United States Patent Application Publication US 2007/0214517 A1 - sequence listing, part 46

SEQ ID NO: 55748 - protein, 236 aa, Glycine max
  peptide (1)..(236): Ceres Seq. ID no. 13594919
  misc_feature (29)..(76): Pfam Name: Zinc finger, C3HC4 type (RING finger) Pfam Description: Zinc finger, C3HC4 type (RING finger)
  misc_feature (29)..(203): Homolog of NCBI NO: 18424590 NR Description: expressed protein [Arabidopsis thaliana]
  misc_feature (28)..(226): Homolog of NCBI NO: 15240828 NR Description: zinc finger (C3HC4-type RING finger) protein
  misc_feature (27)..(208): Homolog of NCBI NO: 21537046 NR Description: nucleoside triphosphatase, putative [Arabidopsis
  misc_feature (22)..(208): Homolog of NCBI NO: 26451292 NR Description: unknown protein [Arabidopsis thaliana]
  misc_feature (22)..(208): Homolog of NCBI NO: 15223693 NR Description: expressed protein [Arabidopsis thaliana]
  misc_feature (18)..(203): Homolog of NCBI NO: 15227065 NR Description: zinc finger (C3HC4-type RING finger) protein
  misc_feature (10)..(225): Homolog of NCBI NO: 22325409 NR Description: zinc finger (C3HC4-type RING finger) protein
  misc_feature (1)..(204): Homolog of NCBI NO: 34905532 NR Description: B1146F03.23 [Oryza sativa (japonica
  misc_feature (10)..(224): Homolog of NCBI NO: 25518349 NR Description: hypothetical protein T14P4.10 - Arabidopsis
  misc_feature (10)..(233): Homolog of NCBI NO: 18411826 NR Description: zinc finger (C3HC4-type RING finger) protein
MELSVVARDMEEVVLLVDDLRSLSGISRCRICHEEEFESSKTLEAPCACSGTVKFAHRDCIQTWCDEKGNTTCEICLQQYEPGYTAAPKKSQITDAAMTIRDSLQISRNEQEPLNTRIVGIVEGNNYSECTYAADRTAACCRSLALAFTLILLVRHLFALLTDGMEDYPFTILTVFLLRASGIIIPMYIIIKAIGAIHDNIKRHHHEDSDDDSSISDGDDEENETPNDEILRHSQS

SEQ ID NO: 55749 - protein, 227 aa, Glycine max
  peptide (1)..(227): Ceres Seq. ID no. 13594920
  misc_feature (20)..(67): Pfam Name: Zinc finger, C3HC4 type (RING finger) Pfam Description: Zinc finger, C3HC4 type (RING finger)
  misc_feature (20)..(194): Homolog of NCBI NO: 18424590 NR Description: expressed protein [Arabidopsis thaliana]
  misc_feature (19)..(217): Homolog of NCBI NO: 15240828 NR Description: zinc finger (C3HC4-type RING finger) protein
  misc_feature (18)..(199): Homolog of NCBI NO: 21537046 NR Description: nucleoside triphosphatase, putative [Arabidopsis
  misc_feature (13)..(199): Homolog of NCBI NO: 26451292 NR Description: unknown protein [Arabidopsis thaliana]
  misc_feature (13)..(199): Homolog of NCBI NO: 15223693 NR Description: expressed protein [Arabidopsis thaliana]
  misc_feature (9)..(194): Homolog of NCBI NO: 15227065 NR Description: zinc finger (C3HC4-type RING finger) protein
  misc_feature (1)..(216): Homolog of NCBI NO: 22325409 NR Description: zinc finger (C3HC4-type RING finger) protein
  misc_feature (1)..(195): Homolog of NCBI NO: 34905532 NR Description: B1146F03.23 [Oryza sativa (japonica
  misc_feature (1)..(215): Homolog of NCBI NO: 25518349 NR Description: hypothetical protein T14P4.10 - Arabidopsis
  misc_feature (1)..(224): Homolog of NCBI NO: 18411826 NR Description: zinc finger (C3HC4-type RING finger) protein
MEEVVLLVDDLRSLSGISRCRICHEEEFESSKTLEAPCACSGTVKFAHRDCIQTWCDEKGNTTCEICLQQYEPGYTAAPKKSQITDAAMTIRDSLQISRNEQEPLNTRIVGIVEGNNYSECTYAADRTAACCRSLALAFTLILLVRHLFALLTDGMEDYPFTILTVFLLRASGIIIPMYIIIKAIGAIHDNIKRHHHEDSDDDSSISDGDDEENETPNDEILRHSQS

SEQ ID NO: 55750 - protein, 139 aa, Glycine max
  peptide (1)..(139): Ceres Seq. ID no. 13594921
  misc_feature (1)..(106): Homolog of NCBI NO: 18424590 NR Description: expressed protein [Arabidopsis thaliana]
  misc_feature (1)..(129): Homolog of NCBI NO: 15240828 NR Description: zinc finger (C3HC4-type RING finger) protein
  misc_feature (1)..(111): Homolog of NCBI NO: 21537046 NR Description: nucleoside triphosphatase, putative [Arabidopsis
  misc_feature (1)..(111): Homolog of NCBI NO: 26451292 NR Description: unknown protein [Arabidopsis thaliana]
  misc_feature (1)..(111): Homolog of NCBI NO: 15223693 NR Description: expressed protein [Arabidopsis thaliana]
  misc_feature (1)..(106): Homolog of NCBI NO: 15227065 NR Description: zinc finger (C3HC4-type RING finger) protein
  misc_feature (1)..(128): Homolog of NCBI NO: 22325409 NR Description: zinc finger (C3HC4-type RING finger) protein
  misc_feature (1)..(107): Homolog of NCBI NO: 34905532 NR Description: B1146F03.23 [Oryza sativa (japonica
  misc_feature (1)..(127): Homolog of NCBI NO: 25518349 NR Description: hypothetical protein T14P4.10 - Arabidopsis
  misc_feature (1)..(136): Homolog of NCBI NO: 18411826 NR Description: zinc finger (C3HC4-type RING finger) protein
MTIRDSLQISRNEQEPLNTRIVGIVEGNNYSECTYAADRTAACCRSLALAFTLILLVRHLFALLTDGMEDYPFTILTVFLLRASGIIIPMYIIIKAIGAIHDNIKRHHHEDSDDDSSISDGDDEENETPNDEILRHSQS

SEQ ID NO: 55751 - DNA, 820 bp, Glycine max
  misc_feature (1)..(820): Ceres Seq. ID no. 13594922
gtttttcccaaataagcgtacgtcgatgtcaaacttggtttgagcaaacgcgcattcgctgacactttcactgcgtgattgattaaccttgctggtttccaccaaattggaattgtttgattgttctttgattttcaaacagcaatcactttcacaatggtgattgcaacaagaaatttcttcgtatctcttttcttaatatcctcatttttttgcacaacactccttgccaagtcttctcacccaatctccgatgctcaagtcaggaagaacaagcttcagtgctatgctgatattgacagtgggttgtggggttggtcatgcaaatcaacggtgatagcaagggagaattgtgctctaagatgcctttcacccgcttgttacgagctcatctacgagagtgacccgctcgaagagggagaaaaggactttattcgaagccaagagtacaaatactgcatgcacaagttgtccatgggagagagccttgagggtgttaagggtgcttttagcaactaatcaagcgaaaattctaaattggaggtggaagctatgatgaatttatatatgccctgttaaatgtagattaaagaaaatgccaagagtcttgagagcatttttttctttcaattaattaattataatgaaccatatacaagtatatgctcttagaaatccagtacaatctagaagaaaacaacgcttctcaaaaggtgagtgctttagtttctaacccttcaagactctattaaggtagtatataagttgcttcatattttgacatttctaaaagaattttatctgttagtaaatttccgtc

SEQ ID NO: 55752 - protein, 120 aa, Glycine max
  peptide (1)..(120): Ceres Seq. ID no. 15221432
  misc_feature (33)..(119): Homolog of NCBI NO: 34902472 NR Description: Putative DNAJ protein [Oryza sativa (japonica
  misc_feature (6)..(104): Homolog of NCBI NO: 11346183 NR Description: hypothetical protein K10A8_90 - Arabidopsis
  misc_feature (6)..(118): Homolog of NCBI NO: 18418364 NR Description: expressed protein [Arabidopsis thaliana]
  misc_feature (6)..(118): Homolog of NCBI NO: 21618076 NR Description: unknown [Arabidopsis thaliana]
MVIATRNFFVSLFLISSFFCTTLLAKSSHPISDAQVRKNKLQCYADIDSGLWGWSCKSTVIARENCALRCLSPACYELIYESDPLEEGEKDFIRSQEYKYCMHKLSMGESLEGVKGAFSN

SEQ ID NO: 55753 - DNA, 785 bp, Glycine max
  misc_feature (1)..(785): Ceres Seq. ID no. 12609177
gagaagagattagagattccagattcggtcgctaataatatttggagttgggaggggtgacctgagattcacgacgcaaaacaaatcatcatgtggagaagaatcgtttcctctggtctcaaaaccctagcctccgatttcgccgctgcttctcctcgtcgatccgtagccaccaccgccgtgagacccttgaggttctatctcgcatccaattcccttttccctcgccatttcagctccgaatcagtggagaccgttgggaagaagaaggtggaggatgttatgcccattgcaaccggacatgaaaaggaggagcttgaagctgaacttgaggggaggaggctgcttgacattgacttccctgaaggtccttttggaactaaggaagctcctgctatcgtaaagtcctactatgacaagcgaattgtgggatgccctggtggtgaaggcgaggatgaacacgatgttgtgtggttctggctggagaaaggaaagtcttttgaatgccccgtttgcactcagtactttgagctggaagtggttggtccaggtggacctcccgatggtcacggtgatgaagacgatgagcaccaccactgattccggcttctcccttgctgcgagttttgcttttttttttttattattttttactgcaataaaaaacatatgctgctgggtgagacagttaaaaatgtttttgatccttttggaacaacacttcggtatcggaagttgtcaaaatgcctaaaaatgttttacttttgtaccaattcttgaatcag

SEQ ID NO: 55754 - protein, 169 aa, Glycine max
  peptide (1)..(169): Ceres Seq. ID no. 12609178
  misc_feature (58)..(154): Pfam Name: Cytochrome c oxidase subunit Vb Pfam Description: Cytochrome c oxidase subunit Vb
  misc_feature (68)..(148): Homolog of NCBI NO: 17017988 NR Description: cytochrome c oxidase subunit Vb precursor [Homo
  misc_feature (68)..(148): Homolog of NCBI NO: 117102 NR Description: CYTOCHROME C OXIDASE POLYPEPTIDE VB (VI)
  misc_feature (68)..(148): Homolog of NCBI NO: 223590 NR Description: oxidase IV,cytochrome
  misc_feature (121)..(168): Homolog of NCBI NO: 5903035 NR Description: Similar to gb|D85381 cytochrome c oxidase subunit precursor from Oryza sativa. ESTs gb|R30504 and gb|AA598195 come
  misc_feature (1)..(107): Homolog of NCBI NO: 7484634 NR Description: probable cytochrome-c oxidase (EC 1.9.3.1) Vb
  misc_feature (1)..(169): Homolog of NCBI NO: 34912592 NR Description: cytochrome c oxidase subunit Vb precursor
  misc_feature (43)..(169): Homolog of NCBI NO: 5803264 NR Description: ESTs AU057456(S21460),AU057455(S21460) correspond a region of the predicted gene.~Similar to cytochrome c oxidase
  misc_feature (1)..(168): Homolog of NCBI NO: 15220092 NR Description: cytochrome c oxidase subunit, putative
  misc_feature (1)..(168): Homolog of NCBI NO: 21592567 NR Description: cytochrome c oxidase subunit, putative
  misc_feature (1)..(169): Homolog of NCBI NO: 15232644 NR Description: putative cytochrome c oxidase subunit Vb
MWRRIVSSGLKTLASDFAAASPRRSVATTAVRPLRFYLASNSLFPRHFSSESVETVGKKKVEDVMPIATGHEKEELEAELEGRRLLDIDFPEGPFGTKEAPAIVKSYYDKRIVGCPGGEGEDEHDVVWFWLEKGKSFECPVCTQYFELEVVGPGGPPDGHGDEDDEHHH

SEQ ID NO: 55755 - protein, 112 aa, Glycine max
  peptide (1)..(112): Ceres Seq. ID no. 12609179
MTSELWDALVVKARMNTMLCGSGWRKESLLNAPFALSTLSWKWLVQVDLPMVTVMKTMSTTTDSGFSLAASFAFFFLLFFTAIKNICCWVRQLKMFLILLEQHFGIGSCQNA

SEQ ID NO: 55756 - protein, 105 aa, Glycine max
  peptide (1)..(105): Ceres Seq. ID no. 12609180
  misc_feature (1)..(90): Pfam Name: Cytochrome c oxidase subunit Vb Pfam Description: Cytochrome c oxidase subunit Vb
  misc_feature (4)..(84): Homolog of NCBI NO: 17017988 NR Description: cytochrome c oxidase subunit Vb precursor [Homo
  misc_feature (4)..(84): Homolog of NCBI NO: 117102 NR Description: CYTOCHROME C OXIDASE POLYPEPTIDE VB (VI)
  misc_feature (4)..(84): Homolog of NCBI NO: 223590 NR Description: oxidase IV,cytochrome
  misc_feature (57)..(104): Homolog of NCBI NO: 5903035 NR Description: Similar to gb|D85381 cytochrome c oxidase subunit precursor from Oryza sativa. ESTs gb|R30504 and gb|AA598195 come
  misc_feature (1)..(43): Homolog of NCBI NO: 7484634 NR Description: probable cytochrome-c oxidase (EC 1.9.3.1) Vb
  misc_feature (1)..(105): Homolog of NCBI NO: 34912592 NR Description: cytochrome c oxidase subunit Vb precursor
  misc_feature (1)..(105): Homolog of NCBI NO: 5803264 NR Description: ESTs AU057456(S21460),AU057455(S21460) correspond a region of the predicted gene.~Similar to cytochrome c oxidase
  misc_feature (1)..(104): Homolog of NCBI NO: 15220092 NR Description: cytochrome c oxidase subunit, putative
  misc_feature (1)..(104): Homolog of NCBI NO: 21592567 NR Description: cytochrome c oxidase subunit, putative
  misc_feature (1)..(105): Homolog of NCBI NO: 15232644 NR Description: putative cytochrome c oxidase subunit Vb
MPIATGHEKEELEAELEGRRLLDIDFPEGPFGTKEAPAIVKSYYDKRIVGCPGGEGEDEHDVVWFWLEKGKSFECPVCTQYFELEVVGPGGPPDGHGDEDDEHHH

SEQ ID NO: 55757 - DNA, 827 bp, Glycine max
  misc_feature (1)..(827): Ceres Seq. ID no. 12609935
agatcaaatcgagcctgcccttctcgctcgcgtctccactccatttccctttcccccgaggaggccgccgccgtgacctgagagcacacgcacgcaccatgtggcgccgcctccaaaccctagcccccgccctccgccgcgctgccgccgcagccggcgcggccccctccccggccagcgcccgggccgctcccctctccacggcggtcgcggccttccgccgcactgggctcctcctctctgcggacaagccggcggcgtcagggacgagtgtggaggacgtcatgcccattgccacggggttggagcgcgaggagctcgaggcggagctccaggggaagaagcgcttcgacatggatcctcctgtcggtccctttggtaccaaggaggcaccggccgtcattgagtcctattttgacaagagaatagtaggttgccctggtgatgaaggagaggatgagcatgacgtcgtatggttctggttgaaaaaagatgagccacatgaatgcccagtctgctcacaatactttgtgcttaaggtcattggtgatggtggaaatccagatgggcatgatgatgatgatgatggtcatcaccactaaggatgcctcgtggttctgaaaataagaattttatgaggcatatgatttcgcttacgcgttctaagcaccagactgctccacggcatccttgtttatgaatatacatttggccatcaagcaggcggtagttttcgccttagtttttttttgtggaaacaaaactcttttcagatttgtccagtgcatgtcttatggagcatcatcaaataagagatgactgcagag

SEQ ID NO: 55758 - protein, 199 aa, Glycine max
  peptide (1)..(199): Ceres Seq. ID no. 12609936
  misc_feature (78)..(184): Pfam Name: Cytochrome c oxidase subunit Vb Pfam Description: Cytochrome c oxidase subunit Vb
  misc_feature (68)..(178): Homolog of NCBI NO: 473729 NR Description: cytochrome c oxidase subunit Vb [Rattus
  misc_feature (68)..(178): Homolog of NCBI NO: 12842467 NR Description: unnamed protein product [Mus musculus]
  misc_feature (68)..(178): Homolog of NCBI NO: 16758362 NR Description: cytochrome c oxidase subunit Vb [Rattus
  misc_feature (68)..(178): Homolog of NCBI NO: 55992 NR Description: cytochrome c oxidase subunit VIa (AA 1 - 118)
  misc_feature (68)..(178): Homolog of NCBI NO: 6753500 NR Description: cytochrome c oxidase, subunit Vb [Mus musculus]
  misc_feature (23)..(198): Homolog of NCBI NO: 21592567 NR Description: cytochrome c oxidase subunit, putative
  misc_feature (23)..(198): Homolog of NCBI NO: 15220092 NR Description: cytochrome c oxidase subunit, putative
  misc_feature (33)..(199): Homolog of NCBI NO: 15232644 NR Description: putative cytochrome c oxidase subunit Vb
  misc_feature (77)..(199): Homolog of NCBI NO: 5803264 NR Description: ESTs AU057456(S21460),AU057455(S21460) correspond a region of the predicted gene.~Similar to cytochrome c oxidase
  misc_feature (33)..(199): Homolog of NCBI NO: 34912592 NR Description: cytochrome c oxidase subunit Vb precursor
IKSSLPFSLASPLHFPFPRGGRRRDLRAHARTMWRRLQTLAPALRRAAAAAGAAPSPASARAAPLSTAVAAFRRTGLLLSADKPAASGTSVEDVMPIATGLEREELEAELQGKKRFDMDPPVGPFGTKEAPAVIESYFDKRIVGCPGDEGEDEHDVVWFWLKKDEPHECPVCSQYFVLKVIGDGGNPDGHDDDDDGHHH

SEQ ID NO: 55759 - protein, 167 aa, Glycine max
  peptide (1)..(167): Ceres Seq. ID no. 12609937
  misc_feature (46)..(152): Pfam Name: Cytochrome c oxidase subunit Vb Pfam Description: Cytochrome c oxidase subunit Vb
  misc_feature (36)..(146): Homolog of NCBI NO: 473729 NR Description: cytochrome c oxidase subunit Vb [Rattus
  misc_feature (36)..(146): Homolog of NCBI NO: 12842467 NR Description: unnamed protein product [Mus musculus]
  misc_feature (36)..(146): Homolog of NCBI NO: 16758362 NR Description: cytochrome c oxidase subunit Vb [Rattus
  misc_feature (36)..(146): Homolog of NCBI NO: 55992 NR Description: cytochrome c oxidase subunit VIa (AA 1 - 118)
  misc_feature (36)..(146): Homolog of NCBI NO: 6753500 NR Description: cytochrome c oxidase, subunit Vb [Mus musculus]
  misc_feature (1)..(166): Homolog of NCBI NO: 21592567 NR Description: cytochrome c oxidase subunit, putative
  misc_feature (1)..(166): Homolog of NCBI NO: 15220092 NR Description: cytochrome c oxidase subunit, putative
  misc_feature (1)..(167): Homolog of NCBI NO: 15232644 NR Description: putative cytochrome c oxidase subunit Vb
  misc_feature (45)..(167): Homolog of NCBI NO: 5803264 NR Description: ESTs AU057456(S21460),AU057455(S21460) correspond a region of the predicted gene.~Similar to cytochrome c oxidase
  misc_feature (1)..(167): Homolog of NCBI NO: 34912592 NR Description: cytochrome c oxidase subunit Vb precursor
MWRRLQTLAPALRRAAAAAGAAPSPASARAAPLSTAVAAFRRTGLLLSADKPAASGTSVEDVMPIATGLEREELEAELQGKKRFDMDPPVGPFGTKEAPAVIESYFDKRIVGCPGDEGEDEHDVVWFWLKKDEPHECPVCSQYFVLKVIGDGGNPDGHDDDDDGHHH

SEQ ID NO: 55760 - protein, 105 aa, Glycine max
  peptide (1)..(105): Ceres Seq. ID no. 12609938
  misc_feature (1)..(90): Pfam Name: Cytochrome c oxidase subunit Vb Pfam Description: Cytochrome c oxidase subunit Vb
  misc_feature (1)..(84): Homolog of NCBI NO: 473729 NR Description: cytochrome c oxidase subunit Vb [Rattus
  misc_feature (1)..(84): Homolog of NCBI NO: 12842467 NR Description: unnamed protein product [Mus musculus]
  misc_feature (1)..(84): Homolog of NCBI NO: 16758362 NR Description: cytochrome c oxidase subunit Vb [Rattus
  misc_feature (1)..(84): Homolog of NCBI NO: 55992 NR Description: cytochrome c oxidase subunit VIa (AA 1 - 118)
  misc_feature (1)..(84): Homolog of NCBI NO: 6753500 NR Description: cytochrome c oxidase, subunit Vb [Mus musculus]
  misc_feature (1)..(104): Homolog of NCBI NO: 21592567 NR Description: cytochrome c oxidase subunit, putative
  misc_feature (1)..(104): Homolog of NCBI NO: 15220092 NR Description: cytochrome c oxidase subunit, putative
  misc_feature (1)..(105): Homolog of NCBI NO: 15232644 NR Description: putative cytochrome c oxidase subunit Vb
  misc_feature (1)..(105): Homolog of NCBI NO: 5803264 NR Description: ESTs AU057456(S21460),AU057455(S21460) correspond a region of the predicted gene.~Similar to cytochrome c oxidase
  misc_feature (1)..(105): Homolog of NCBI NO: 34912592 NR Description: cytochrome c oxidase subunit Vb precursor
MPIATGLEREELEAELQGKKRFDMDPPVGPFGTKEAPAVIESYFDKRIVGCPGDEGEDEHDVVWFWLKKDEPHECPVCSQYFVLKVIGDGGNPDGHDDDDDGHHH

SEQ ID NO: 55761 - DNA, 1186 bp, Glycine max
  misc_feature (1)..(1186): Ceres Seq. ID no. 12609185
agaaaccgaccaagaagcaccagcacacgagttcgaggtagacaaacgtctcgagagaaagacagggagaacatggcggccatctcctccacctcctacttctcctcgcagccgcagctgccggcgtccgacggcgccaaccctgccaccgccagaagcagcagcagcaacggccgggagccccggaggcggcggaccggcaggtgcatcatgctggaagcagacgctgcctctgctagtggcagtggcggcgcggcggcggggaggacgaggagcctgacggaggaggacctggaggagctcaagggctgcctcgacctcggcttcggcttctcctaccaccagatcccgggcctctgcgggacgctccccggcctggagctctgctactccatgacgcggaggttcctcgacgagcagaggactctggtcgggcagctggagcctgctactgcggcggcagcgcccatcacggattggaagatctccggccctggtgatgatcctgacgaagtgaaagctcggctcaagtattgggcacagacagtggcatgcacagtcaaactctgcacctagtggagtggaggtcgggactagggagtttgcgagttcatcccatgacatgtgtgctaagatgggctcaactgaaggtggctgaagctgaagattctgcttacatggctctaagatatgttataccgaggagatgcttcggttgcgcgctatcgggataatataacagatcggtgctttccgaaaacttcagagagggagatgacttatgacaccacagaactgcgagaaatcttgaggcgatatgtcgtctaagctttaatgaaagcatcagaagcttgtcattcgtcataggcaatggtcactaggtgttctaaacgtgcaactcggagacctgctagtgcttttaatcttccttgtaatggtcattaggagctccaactgtgttctactgcgccaagttgagctttgcaaatatgtcagtaggttggctcaagtatggatttgttctcacgttcctgaactttaatttgctttcaaagagtagacactgtataggacgttcgtgatggacacagcgattcggtgctcgagctcagatgctcccgaaatcactgtcgtccgttcctgtcttgggatcccaacaattcagaatcgaatattccgttcatgg

SEQ ID NO: 55762 - protein, 191 aa, Glycine max
  peptide (1)..(191): Ceres Seq. ID no. 12609186
  misc_feature (88)..(188): Homolog of NCBI NO: 21617998 NR Description: unknown [Arabidopsis thaliana]
  misc_feature (88)..(188): Homolog of NCBI NO: 18418346 NR Description: Expressed protein
  misc_feature (93)..(187): Homolog of NCBI NO: 15228829 NR Description: hypothetical protein; protein id: At3g22690.1
  misc_feature (89)..(167): Homolog of NCBI NO: 25408168 NR Description: hypothetical protein At2g31560 [imported] -
  misc_feature (29)..(184): Homolog of NCBI NO: 15221309 NR Description: unknown protein; protein id: At1g05870.1
  misc_feature (14)..(188): Homolog of NCBI NO: 25408860 NR Description: hypothetical protein At2g43340 [imported] -
  misc_feature (14)..(191): Homolog of NCBI NO: 30689349 NR Description: expressed protein [Arabidopsis thaliana]
  misc_feature (29)..(191): Homolog of NCBI NO: 25406874 NR Description: hypothetical protein [imported] - Arabidopsis
  misc_feature (89)..(191): Homolog of NCBI NO: 30684991 NR Description: expressed protein [Arabidopsis thaliana]
  misc_feature (25)..(166): Homolog of NCBI NO: 34907664 NR Description: P0506A10.18 [Oryza sativa (japonica
RNRPRSTSTRVRGRQTSREKDRENMAAISSTSYFSSQPQLPASDGANPATARSSSSNGREPRRRRTGRCIMLEADAASASGSGGAAAGRTRSLTEEDLEELKGCLDLGFGFSYHQIPGLCGTLPGLELCYSMTRRFLDEQRTLVGQLEPATAAAAPITDWKISGPGDDPDEVKARLKYWAQTVACTVKLCT

SEQ ID NO: 55763 - protein, 167 aa, Glycine max
  peptide (1)..(167): Ceres Seq. ID no. 12609187
  misc_feature (64)..(164): Homolog of NCBI NO: 21617998 NR Description: unknown [Arabidopsis thaliana]
  misc_feature (64)..(164): Homolog of NCBI NO: 18418346 NR Description: Expressed protein
  misc_feature (69)..(163): Homolog of NCBI NO: 15228829 NR Description: hypothetical protein; protein id: At3g22690.1
  misc_feature (65)..(143): Homolog of NCBI NO: 25408168 NR Description: hypothetical protein At2g31560 [imported] -
  misc_feature (5)..(160): Homolog of NCBI NO: 15221309 NR Description: unknown protein; protein id: At1g05870.1
  misc_feature (1)..(164): Homolog of NCBI NO: 25408860 NR Description: hypothetical protein At2g43340 [imported] -
  misc_feature (1)..(167): Homolog of NCBI NO: 30689349 NR Description: expressed protein [Arabidopsis thaliana]
  misc_feature (5)..(167): Homolog of NCBI NO: 25406874 NR Description: hypothetical protein [imported] - Arabidopsis
  misc_feature (65)..(167): Homolog of NCBI NO: 30684991 NR Description: expressed protein [Arabidopsis thaliana]
  misc_feature (1)..(142): Homolog of NCBI NO: 34907664 NR Description: P0506A10.18 [Oryza sativa (japonica
MAAISSTSYFSSQPQLPASDGANPATARSSSSNGREPRRRRTGRCIMLEADAASASGSGGAAAGRTRSLTEEDLEELKGCLDLGFGFSYHQIPGLCGTLPGLELCYSMTRRFLDEQRTLVGQLEPATAAAAPITDWKISGPGDDPDEVKARLKYWAQTVACTVKLCT

SEQ ID NO: 55764 - protein, 121 aa, Glycine max
  peptide (1)..(121): Ceres Seq. ID no. 12609188
  misc_feature (18)..(118): Homolog of NCBI NO: 21617998 NR Description: unknown [Arabidopsis thaliana]
  misc_feature (18)..(118): Homolog of NCBI NO: 18418346 NR Description: Expressed protein
  misc_feature (23)..(117): Homolog of NCBI NO: 15228829 NR Description: hypothetical protein; protein id: At3g22690.1
  misc_feature (19)..(97): Homolog of NCBI NO: 25408168 NR Description: hypothetical protein At2g31560 [imported] -
  misc_feature (1)..(114): Homolog of NCBI NO: 15221309 NR Description: unknown protein; protein id: At1g05870.1
  misc_feature (1)..(118): Homolog of NCBI NO: 25408860 NR Description: hypothetical protein At2g43340 [imported] -
  misc_feature (1)..(121): Homolog of NCBI NO: 30689349 NR Description: expressed protein [Arabidopsis thaliana]
  misc_feature (1)..(121): Homolog of NCBI NO: 25406874 NR Description: hypothetical protein [imported] - Arabidopsis
  misc_feature (19)..(121): Homolog of NCBI NO: 30684991 NR Description: expressed protein [Arabidopsis thaliana]
  misc_feature (1)..(96): Homolog of NCBI NO: 34907664 NR Description: P0506A10.18 [Oryza sativa (japonica
MLEADAASASGSGGAAAGRTRSLTEEDLEELKGCLDLGFGFSYHQIPGLCGTLPGLELCYSMTRRFLDEQRTLVGQLEPATAAAAPITDWKISGPGDDPDEVKARLKYWAQTVACTVKLCT

SEQ ID NO: 55765 - DNA, 906 bp, Glycine max
  misc_feature (1)..(906): Ceres Seq. ID no. 13594624
acacattcaaactaataactctcaaaaactgagagcagaagagagtagaggagaaacaaatgtccatatccatggcgctattctctccgccgatctcttcttcagttcaaaaccccaagatctcgttccctctcctctccaccaagcgcttctctctcctctccgtcactcgcgcttcctccgattctgctgcagtctctgcaaccaccgtagagattccgaagcccgcgtcggtttctgtagaggaggtgccatctaaacctcctgcggaaagctcctccgacgagactgatctgccaaccacggcgacgggaatcaagtttcaggatgcgaagtgggttaatggaacctgggatctgaaacagttcgagaaagacgggaaaaccgattgggattctattatcgtcgctgaggcaaagaggagaaagtggcttgaagataacccagaaacaactactaacgctgagcctgttcttttcgacacctcgatcattccatggtgggcgtggatgaagagataccatctaccagaagctgaactcctcaatggtcgtgctgcgatgatagggttcttcatggcttactttgttgacagccttaccggagtaggacttgttgatcaaatgggaaacttcttctgcaaaacactcttgtttgtggctgtagctggagttcttttcatccgcaagaacgaagatttagataagctcaaggttctgatcgaagagacgacgctatatgacaagcaatggcaagcggcttggaaagagccggaatcatcatcatcgacgctttcttcaaagaagtgaacaaaatctttctcgctttttgtttcctcttttctcatgtgatgtttgtgatcagtgaaaaaagtctcaagataaacgcaaaatctatttggctttg

SEQ ID NO: 55766 - protein, 249 aa, Glycine max
  peptide (1)..(249): Ceres Seq. ID no. 13594625
  misc_feature (19)..(249): Homolog of NCBI NO: 18414927 NR Description: Lil3 protein [Arabidopsis thaliana]
  misc_feature (19)..(249): Homolog of NCBI NO: 7485188 NR Description: hypothetical protein - Arabidopsis thaliana
  misc_feature (19)..(249): Homolog of NCBI NO: 21555799 NR Description: Lil3 protein [Arabidopsis thaliana]
  misc_feature (5)..(249): Homolog of NCBI NO: 8978078 NR Description: Lil3 protein [Arabidopsis thaliana]
  misc_feature (1)..(249): Homolog of NCBI NO: 30695110 NR Description: Lil3 protein [Arabidopsis thaliana]
MSISMALFSPPISSSVQNPKISFPLLSTKRFSLLSVTRASSDSAAVSATTVEIPKPASVSVEEVPSKPPAESSSDETDLPTTATGIKFQDAKWVNGTWDLKQFEKDGKTDWDSIIVAEAKRRKWLEDNPETTTNAEPVLFDTSIIPWWAWMKRYHLPEAELLNGRAAMIGFFMAYFVDSLTGVGLVDQMGNFFCKTLLFVAVAGVLFIRKNEDLDKLKVLIEETTLYDKQWQAAWKEPESSSSTLSSKK

SEQ ID NO: 55767 - protein, 245 aa, Glycine max
  peptide (1)..(245): Ceres Seq. ID no. 13594626
  misc_feature (15)..(245): Homolog of NCBI NO: 18414927 NR Description: Lil3 protein [Arabidopsis thaliana]
  misc_feature (15)..(245): Homolog of NCBI NO: 7485188 NR Description: hypothetical protein - Arabidopsis thaliana
  misc_feature (15)..(245): Homolog of NCBI NO: 21555799 NR Description: Lil3 protein [Arabidopsis thaliana]
  misc_feature (1)..(245): Homolog of NCBI NO: 8978078 NR Description: Lil3 protein [Arabidopsis thaliana]
  misc_feature (1)..(245): Homolog of NCBI NO: 30695110 NR Description: Lil3 protein [Arabidopsis thaliana]
MALFSPPISSSVQNPKISFPLLSTKRFSLLSVTRASSDSAAVSATTVEIPKPASVSVEEVPSKPPAESSSDETDLPTTATGIKFQDAKWVNGTWDLKQFEKDGKTDWDSIIVAEAKRRKWLEDNPETTTNAEPVLFDTSIIPWWAWMKRYHLPEAELLNGRAAMIGFFMAYFVDSLTGVGLVDQMGNFFCKTLLFVAVAGVLFIRKNEDLDKLKVLIEETTLYDKQWQAAWKEPESSSSTLSSKK

SEQ ID NO: 55768 - DNA, 819 bp, Glycine max
  misc_feature (1)..(819): Ceres Seq. ID no. 14301427
ctaattccagaaccatcccctccgacctaggctatggctttcatcgtgtccaagctcgcgcgggcagccctcgcatcccgccccgttggagatattgctggtggcatctccccgtgtctctcccggctctatctggcggctggtaccagccgtcgcatgtttgcagctgcaggcggtcccaagtcaaaagaagcaccccgaatatttccccttgttgatgagaattccattaagtcgaaggaatccctatgggccttgtatgaatgctggtgcaagtattggggggtatcccgtgaccgtgaagagatggtccgccggttcaagtcatttgaggctactgcacagtgggtttacaaaatgaacaactctgggtgttcgcaagtgtctcaactgggcccgcatgcagatttttcagagagtgagtttgctgaggtggtgtttcctccacttcctgatgatgatgatgaagacataaaagagatggtgccaggtcaagatttgggccaggagcttgaggagcccttaaataattaattcgagaaattatgaacttgtcttactccatccgttcccaaatataagtctttctagagattcaacaagtgactacatacggagcaaaatgagtgaatctgcactctaaaatatgtctacatgcatacgtatgttgtagtccatttgaaatgtctaaaaagacttatatgtaggaacggatgagtatttggttgtggtaatactgtggtactgggattattgttgttgtctggttgttctcatggaaccaaattagaattgaaataactttgtgttattgctctt

SEQ ID NO: 55769 - protein, 166 aa, Glycine max
  peptide (1)..(166): Ceres Seq. ID no. 14301428
  misc_feature (1)..(111): Homolog of NCBI NO: 38605767 NR Description: OSJNBa0044K18.10 [Oryza sativa (japonica
  misc_feature (63)..(135): Homolog of NCBI NO: 40786566 NR Description: putative cysteine proteinase
  misc_feature (61)..(133): Homolog of NCBI NO: 34897042 NR Description: hypothetical protein [Oryza sativa (japonica
MAFIVSKLARAALASRPVGDIAGGISPCLSRLYLAAGTSRRMFAAAGGPKSKEAPRIFPLVDENSIKSKESLWALYECWCKYWGVSRDREEMVRRFKSFEATAQWVYKMNNSGCSQVSQLGPHADFSESEFAEVVFPPLPDDDDEDIKEMVPGQDLGQELEEPLNN

SEQ ID NO: 55770 - protein, 125 aa, Glycine max
  peptide (1)..(125): Ceres Seq. ID no. 14301429
  misc_feature (1)..(70): Homolog of NCBI NO: 38605767 NR Description: OSJNBa0044K18.10 [Oryza sativa (japonica
  misc_feature (22)..(94): Homolog of NCBI NO: 40786566 NR Description: putative cysteine proteinase
  misc_feature (20)..(92): Homolog of NCBI NO: 34897042 NR Description: hypothetical protein [Oryza sativa (japonica
MFAAAGGPKSKEAPRIFPLVDENSIKSKESLWALYECWCKYWGVSRDREEMVRRFKSFEATAQWVYKMNNSGCSQVSQLGPHADFSESEFAEVVFPPLPDDDDEDIKEMVPGQDLGQELEEPLNN

SEQ ID NO: 55771 - DNA, 618 bp, Glycine max
  misc_feature (1)..(618): Ceres Seq. ID no. 15224985
tcccaaacccaaagcactagtagctatcccactcaagcacacgctcacgatggcatccagagctgctaccttcgtcgccctgagcctcctcctctccgccgtcgccacgcacggctgcggaccctattgccagccgccagtcgtcgtgccgacaccgcccgttgtcgttccgccgccgtaccatggaggaggagcgcacggccacggcgggcagtgctctatcgacgccctaaagctgagggtgtgcgccaacgttctcggcggcctgctcggcctcaaggtcggcgttccggcgcacgacgagtgctgcccgctgctccaggggttggtcgaccttgacgccgccgtctgcctgtgcaccgccgtcagggccaacgtcctcggcatccacctcaacgtgcctgtggacatcagcctcctcctcaaccactgcggcaagacgtgcccgtccgagttcacttgcccagcccattaacggacgcctactgctcacgggcgccgaataaaatttgctttcgatccgtacgtcgttgttattttcgtgtccacatttgaatccttgtaaccagtactactctttttgtaacaatcatcagccatccaaaaaaaaaaaaaaaa

SEQ ID NO: 55772 - protein, 157 aa, Glycine max
  peptide (1)..(157): Ceres Seq. ID no. 15224986
  misc_feature (72)..(154): Pfam Name: Protease inhibitor/seed storage/LTP family Pfam Description: Protease inhibitor/seed storage/LTP family
  misc_feature (17)..(154): Homolog of NCBI NO: 37533220 NR Description: putative lipid tranfer protein
  misc_feature (22)..(155): Homolog of NCBI NO: 39748092 NR Description: lipid transfer protein-like protein
  misc_feature (17)..(155): Homolog of NCBI NO: 399204 NR Description: CORTICAL CELL DELINEATING PROTEIN PRECURSOR
  misc_feature (19)..(154): Homolog of NCBI NO: 37536712 NR Description: putative lipid transfer protein
  misc_feature (17)..(155): Homolog of NCBI NO: 2226329 NR Description: physical impedance induced protein [Zea mays]
  misc_feature (17)..(154): Homolog of NCBI NO: 37533214 NR Description: putative lipid tranfer protein
  misc_feature (17)..(154): Homolog of NCBI NO: 37533212 NR Description: putative lipid transfer protein
  misc_feature (18)..(154): Homolog of NCBI NO: 1084460 NR Description: RCc2 protein - rice
  misc_feature (18)..(154): Homolog of NCBI NO: 37536702 NR Description: putative lipid transfer protein
  misc_feature (19)..(154): Homolog of NCBI NO: 37536704 NR Description: putative lipid transfer protein
PKPKALVAIPLKHTLTMASRAATFVALSLLLSAVATHGCGPYCQPPVVVPTPPVVVPPPYHGGGAHGHGGQCSIDALKLRVCANVLGGLLGLKVGVPAHDECCPLLQGLVDLDAAVCLCTAVRANVLGIHLNVPVDISLLLNHCGKTCPSEFTCPAH

SEQ ID NO: 55773 - protein, 141 aa, Glycine max
  peptide (1)..(141): Ceres Seq. ID no. 15224987
  misc_feature (56)..(138): Pfam Name: Protease inhibitor/seed storage/LTP family Pfam Description: Protease inhibitor/seed storage/LTP family
  misc_feature (1)..(138): Homolog of NCBI NO: 37533220 NR Description: putative lipid tranfer protein
  misc_feature (6)..(139): Homolog of NCBI NO: 39748092 NR Description: lipid transfer protein-like protein
  misc_feature (1)..(139): Homolog of NCBI NO: 399204 NR Description: CORTICAL CELL DELINEATING PROTEIN PRECURSOR
  misc_feature (3)..(138): Homolog of NCBI NO: 37536712 NR Description: putative lipid transfer protein
  misc_feature (1)..(139): Homolog of NCBI NO: 2226329 NR Description: physical impedance induced protein [Zea mays]
  misc_feature (1)..(138): Homolog of NCBI NO: 37533214 NR Description: putative lipid tranfer protein
  misc_feature (1)..(138): Homolog of NCBI NO: 37533212 NR Description: putative lipid transfer protein
  misc_feature (2)..(138): Homolog of NCBI NO: 1084460 NR Description: RCc2 protein - rice
  misc_feature (2)..(138): Homolog of NCBI NO: 37536702 NR Description: putative lipid transfer protein
  misc_feature (3)..(138): Homolog of NCBI NO: 37536704 NR Description: putative lipid transfer protein
MASRAATFVALSLLLSAVATHGCGPYCQPPVVVPTPPVVVPPPYHGGGAHGHGGQCSIDALKLRVCANVLGGLLGLKVGVPAHDECCPLLQGLVDLDAAVCLCTAVRANVLGIHLNVPVDISLLLNHCGKTCPSEFTCPAH

SEQ ID NO: 55774 - protein, 112 aa, Glycine max
  peptide (1)..(112): Ceres Seq. ID no. 15224988
SQTQSTSSYPTQAHAHDGIQSCYLRRPEPPPLRRRHARLRTLLPAASRRADTARCRSAAVPWRRSARPRRAVLYRRPKAEGVRQRSRRPARPQGRRSGARRVLPAAPGVGRP

SEQ ID NO: 55775 - DNA, 861 bp, Glycine max
  misc_feature (1)..(861): Ceres Seq. ID no. 13594925
gacacaagtaacttctctgcatccaaaatgccaggtcttaccatcggagacactattcctgatcttcaagttgaaactaaccaaggcaaaatcaagcttcatcagttctgtgctgatggctggaccatccttttctctcacccaggtgatttcaccccggtttgtaccactgagcttggtaagatggctcagtatgctaaggagttttatcaacgaggagtgaagctcttaggtttatcttgtgatgatgtgcaatcccacaatgagtggatcaaagacattgaagcctacactccaggtgcgaaagtgaattatccaataattgctgatccgaagagagaaatcatcaagcaactcaacatggttgaccctgatgagaaagactccactggcaacctaccctcaagggctcttcatattgttggcccagatttgaagatcaagctgagttttctgtaccctgccactactgggaggaacatggatgaagtgctgagggtgatagagtcattgcagaaggcctcaaagttcaaggttgctaccccagcaaactggaagccaggggaccctgttgtcattacccctgatgtcaccaatgagcaagccaaggaaatgttccctcaagggttcgagagtgtgaaactccatcaaagaaggaatatttgcgcttaactaaagtttgatgatgttctgcttcaagtagtagaaccttcttcagctgtgccaaatctcaatgcaatctagtcatctatctaccctaatcaaactatatatatgttttgtttaagtacactattttgtggcactgcttttgttattataagaaagaatgtacagtttaattgatcttttgttgactgc

SEQ ID NO: 55776 - protein, 223 aa, Glycine max
  peptide (1)..(223): Ceres Seq. ID no. 13594926
  misc_feature (15)..(166): Pfam Name: AhpC/TSA family Pfam Description: AhpC/TSA family
  misc_feature (10)..(219): Homolog of NCBI NO: 28393058 NR Description: putative peroxiredoxin [Arabidopsis thaliana]
  misc_feature (10)..(219): Homolog of NCBI NO: 15221082 NR Description: peroxiredoxin [Arabidopsis thaliana]
  misc_feature (10)..(219): Homolog of NCBI NO: 7381260 NR Description: peroxiredoxin antioxidant [Brassica napus]
  misc_feature (10)..(215): Homolog of NCBI NO: 27261084 NR Description: putative RAB24 protein [Oryza sativa (japonica
  misc_feature (10)..(215): Homolog of NCBI NO: 1710078 NR Description: RAB24 protein
  misc_feature (10)..(219): Homolog of NCBI NO: 12247762 NR Description: 1-Cys peroxiredoxin [Triticum turgidum subsp.
  misc_feature (10)..(219): Homolog of NCBI NO: 34539782 NR Description: 1-Cys-peroxiredoxine [Triticum aestivum]
  misc_feature (10)..(219): Homolog of NCBI NO: 1710077 NR Description: Peroxiredoxin (Rehydrin homolog) (B15C)
  misc_feature (10)..(223): Homolog of NCBI NO: 6466096 NR Description: 1-Cys peroxiredoxin [Fagopyrum esculentum]
  misc_feature (10)..(223): Homolog of NCBI NO: 19423862 NR Description: 1-cys peroxiredoxin [Xerophyta viscosa]
DTSNFSASKMPGLTIGDTIPDLQVETNQGKIKLHQFCADGWTILFSHPGDFTPVCTTELGKMAQYAKEFYQRGVKLLGLSCDDVQSHNEWIKDIEAYTPGAKVNYPIIADPKREIIKQLNMVDPDEKDSTGNLPSRALHIVGPDLKIKLSFLYPATTGRNMDEVLRVIESLQKASKFKVATPANWKPGDPVVITPDVTNEQAKEMFPQGFESVKLHQRRNICA

SEQ ID NO: 55777 - protein, 214 aa, Glycine max
  peptide (1)..(214): Ceres Seq. ID no. 13594927
  misc_feature (6)..(157): Pfam Name: AhpC/TSA family Pfam Description: AhpC/TSA family
  misc_feature (1)..(210): Homolog of NCBI NO: 28393058 NR Description: putative peroxiredoxin [Arabidopsis thaliana]
  misc_feature (1)..(210): Homolog of NCBI NO: 15221082 NR Description: peroxiredoxin [Arabidopsis thaliana]
  misc_feature (1)..(210): Homolog of NCBI NO: 7381260 NR Description: peroxiredoxin antioxidant [Brassica napus]
  misc_feature (1)..(206): Homolog of NCBI NO: 27261084 NR Description: putative RAB24 protein [Oryza sativa (japonica
  misc_feature (1)..(206): Homolog of NCBI NO: 1710078 NR Description: RAB24 protein
  misc_feature (1)..(210): Homolog of NCBI NO: 12247762 NR Description: 1-Cys peroxiredoxin [Triticum turgidum subsp.
  misc_feature (1)..(210): Homolog of NCBI NO: 34539782 NR Description: 1-Cys-peroxiredoxine [Triticum aestivum]
  misc_feature (1)..(210): Homolog of NCBI NO: 1710077 NR Description: Peroxiredoxin (Rehydrin homolog) (B15C)
  misc_feature (1)..(214): Homolog of NCBI NO: 6466096 NR Description: 1-Cys peroxiredoxin [Fagopyrum esculentum]
  misc_feature (1)..(214): Homolog of NCBI NO: 19423862 NR Description: 1-cys peroxiredoxin [Xerophyta viscosa]
MPGLTIGDTIPDLQVETNQGKIKLHQFCADGWTILFSHPGDFTPVCTTELGKMAQYAKEFYQRGVKLLGLSCDDVQSHNEWIKDIEAYTPGAKVNYPIIADPKREIIKQLNMVDPDEKDSTGNLPSRALHIVGPDLKIKLSFLYPATTGRNMDEVLRVIESLQKASKFKVATPANWKPGDPVVITPDVTNEQAKEMFPQGFESVKLHQRRNICA

SEQ ID NO: 55778 - protein, 162 aa, Glycine max
  peptide (1)..(162): Ceres Seq. ID no. 13594928
  misc_feature (1)..(105): Pfam Name: AhpC/TSA family Pfam Description: AhpC/TSA family
  misc_feature (1)..(158): Homolog of NCBI NO: 28393058 NR Description: putative peroxiredoxin [Arabidopsis thaliana]
  misc_feature (1)..(158): Homolog of NCBI NO: 15221082 NR Description: peroxiredoxin [Arabidopsis thaliana]
  misc_feature (1)..(158): Homolog of NCBI NO: 7381260 NR Description: peroxiredoxin antioxidant [Brassica napus]
  misc_feature (1)..(154): Homolog of NCBI NO: 27261084 NR Description: putative RAB24 protein [Oryza sativa (japonica
  misc_feature (1)..(154): Homolog of NCBI NO: 1710078 NR Description: RAB24 protein
  misc_feature (1)..(158): Homolog of NCBI NO: 12247762 NR Description: 1-Cys peroxiredoxin [Triticum turgidum subsp.
  misc_feature (1)..(158): Homolog of NCBI NO: 34539782 NR Description: 1-Cys-peroxiredoxine [Triticum aestivum]
  misc_feature (1)..(158): Homolog of NCBI NO: 1710077 NR Description: Peroxiredoxin (Rehydrin homolog) (B15C)
  misc_feature (1)..(162): Homolog of NCBI NO: 6466096 NR Description: 1-Cys peroxiredoxin [Fagopyrum esculentum]
  misc_feature (1)..(162): Homolog of NCBI NO: 19423862 NR Description: 1-cys peroxiredoxin [Xerophyta viscosa]
MAQYAKEFYQRGVKLLGLSCDDVQSHNEWIKDIEAYTPGAKVNYPIIADPKREIIKQLNMVDPDEKDSTGNLPSRALHIVGPDLKIKLSFLYPATTGRNMDEVLRVIESLQKASKFKVATPANWKPGDPVVITPDVTNEQAKEMFPQGFESVKLHQRRNICA

SEQ ID NO: 55779 - DNA, 944 bp, Glycine max
  misc_feature (1)..(944): Ceres Seq. ID no. 12610129
taaaaccctagccgccgtccgtccccaaccttcaccgccgctccccctcaaccctccgccccccaaaccccgccgccgcctccgccatgcggccgctcgacgagaaggagaccacgatggtcttcgagaagctgttcaagttcaccggccccaacctgaagcacctcctggagcggccctccgtggagggccccgacccggagcccggccgctactgcctccgcctccacaagaaccgcgtcttctacgcctccgagtcgctcgtccgccgcgccaccgccgtgtcccgcacgcgcctcgccggggtcggcacgcccatcggcaagttcacccacggcggcgccttccacctcaccgtccacgcgctcgacctcctcgccgcccacgcgcgccgccgcatctggctcaagcccgacacggagcgctcgttcctcttcggcaactccgtgcccaagtccgcgctcgcgcgcatcacggagaacaccaagtccggcgatggcgtcgtcgtcatgtccatggccgacgtgccgctcgggttcggggtcgccgccaggggcgcgcaggactgcaggaaggccgacaccaacgccgtggtggtgctccaccagtccgacgccggcgagtacctccgcaaggaggaggagctcatgtgaggtgatgtgtgactgttctgaaagatgtgttccctcccttggttgtgatcaccgatcatctgtgcttgcaatcagtgtgcagttcgtcgaccattctgtattctgtagttttcatacagggcaaggaaaagcggatgtctgatctatctgagtgtcatagtagagtagttctcttttcaggcagttctgatggctataatttttgtcacgccgtagcttatcagtaagctactgcattgtatcgtgtgaactgtgaactgaagattccgtgaactaaatattatgataatg

SEQ ID NO: 55780 - protein, 218 aa, Glycine max
  peptide (1)..(218): Ceres Seq. ID no. 12610130
KTLAAVRPQPSPPLPLNPPPPKPRRRLRHAAARREGDHDGLREAVQVHRPQPEAPPGAALRGGPRPGARPLLPPPPQEPRLLRLRVARPPRHRRVPHAPRRGRHAHRQVHPRRRLPPHRPRARPPRRPRAPPHLAQARHGALVPLRQLRAQVRARAHHGEHQVRRWRRRHVHGRRAARVRGRRQGRAGLQEGRHQRRGGAPPVRRRRVPPQGGGAHVR

SEQ ID NO: 55781 - protein, 188 aa, Glycine max
  peptide (1)..(188): Ceres Seq. ID no. 12610131
  misc_feature (1)..(183): Pfam Name: Uncharacterised protein family (UPF0113) Pfam Description: Uncharacterised protein family (UPF0113)
  misc_feature (1)..(187): Homolog of NCBI NO: 24649803 NR Description: CG7006-PA [Drosophila melanogaster]
  misc_feature (1)..(187): Homolog of NCBI NO: 19075218 NR Description: putative protein involved in 60S ribosome subunit
  misc_feature (1)..(187): Homolog of NCBI NO: 34876605 NR Description: similar to Saccharomyces cerevisiae Nip7p homolog
  misc_feature (1)..(187): Homolog of NCBI NO: 39589582 NR Description: Hypothetical protein CBG12182 [Caenorhabditis
  misc_feature (1)..(187): Homolog of NCBI NO: 17506003 NR Description: 60S ribosome biogenesis (20.1 kD) [Caenorhabditis
  misc_feature (1)..(187): Homolog of NCBI NO: 13928674 NR Description: RIKEN cDNA 1110017C15 [Mus musculus]
  misc_feature (1)..(187): Homolog of NCBI NO: 12852038 NR Description: unnamed protein product [Mus musculus]
  misc_feature (1)..(187): Homolog of NCBI NO: 7705437 NR Description: hypothetical protein HSPC031 [Homo sapiens]
  misc_feature (1)..(187): Homolog of NCBI NO: 20301988 NR Description: Saccharomyces cerevisiae Nip7p homolog [Rattus
  misc_feature (1)..(188): Homolog of NCBI NO: 22831121 NR Description: putative 60S ribosome subunit biogenesis protein
MRPLDEKETTMVFEKLFKFTGPNLKHLLERPSVEGPDPEPGRYCLRLHKNRVFYASESLVRRATAVSRTRLAGVGTPIGKFTHGGAFHLTVHALDLLAAHARRRIWLKPDTERSFLFGNSVPKSALARITENTKSGDGVVVMSMADVPLGFGVAARGAQDCRKADTNAVVVLHQSDAGEYLRKEEELM

SEQ ID NO: 55782 - protein, 178 aa, Glycine max
  peptide (1)..(178): Ceres Seq. ID no. 12610132
  misc_feature (1)..(173): Pfam Name: Uncharacterised protein family (UPF0113) Pfam Description: Uncharacterised protein family (UPF0113)
  misc_feature (1)..(177): Homolog of NCBI NO: 24649803 NR Description: CG7006-PA [Drosophila melanogaster]
  misc_feature (1)..(177): Homolog of NCBI NO: 19075218 NR Description: putative protein involved in 60S ribosome subunit
  misc_feature (1)..(177): Homolog of NCBI NO: 34876605 NR Description: similar to Saccharomyces cerevisiae Nip7p homolog
  misc_feature (1)..(177): Homolog of NCBI NO: 39589582 NR Description: Hypothetical protein CBG12182 [Caenorhabditis
  misc_feature (1)..(177): Homolog of NCBI NO: 17506003 NR Description: 60S ribosome biogenesis (20.1 kD) [Caenorhabditis
  misc_feature (1)..(177): Homolog of NCBI NO: 13928674 NR Description: RIKEN cDNA 1110017C15 [Mus musculus]
  misc_feature (1)..(177): Homolog of NCBI NO: 12852038 NR Description: unnamed protein product [Mus musculus]
  misc_feature (1)..(177): Homolog of NCBI NO: 7705437 NR Description: hypothetical protein HSPC031 [Homo sapiens]
  misc_feature (1)..(177): Homolog of NCBI NO: 20301988 NR Description: Saccharomyces cerevisiae Nip7p homolog [Rattus
  misc_feature (1)..(178): Homolog of NCBI NO: 22831121 NR Description: putative 60S ribosome subunit biogenesis protein
MVFEKLFKFTGPNLKHLLERPSVEGPDPEPGRYCLRLHKNRVFYASESLVRRATAVSRTRLAGVGTPIGKFTHGGAFHLTVHALDLLAAHARRRIWLKPDTERSFLFGNSVPKSALARITENTKSGDGVVVMSMADVPLGFGVAARGAQDCRKADTNAVVVLHQSDAGEYLRKEEELM

SEQ ID NO: 55783 - DNA, 788 bp, Glycine max
  misc_feature (1)..(788): Ceres Seq. ID no. 12610133
aaaccaagcagataagcagctgtcctactgtcgcatacacacacaagtgctagctagctaatcgatcagccggcggccatggcggaggagaagcaccaccaccacctgttccaccacaaggagggcgaggacttccagcccgccgctgacggcggcgtcgacacgtacgggtactcgaccgagacggtggtgaccgccaccggcaacgagggggagtacgagcggatcaccaaggaggagaagcaccacaagcacaaggagcacctcggcgagatgggcgccgccgccgccggagccttcgccctctacgagaagcacgaggcgaagaaggacccggagcacgcgcacaagcacaagatcgaggaggaggtggccgccgctgcagccgtcggcgccggcggcttcgtcttccacgagcaccacgagaagaagcaggaccacaaggaggccaaggaggccagcggcgagaagaagcaccaccacttcggctagatcaccgttgacgtgcggtggccggcctcgccgccggccgtgcgtgtgcttacgttacgtgtgttccatagtgagagaggctgggacgtgggcctggtctcgtgctcgcctgtgcgtgattttctctgcgtgcttagcttccgagtgctgaataagtggggctgctgttcatgcagtggctcccacacctcatgcgtcggtgtgtgtcgtgtgtcggtgtgtgtttcaattctaccggcgccctgtatttgtaatttcactttattatgcaagtcctcacgaaactttttgtggcc

SEQ ID NO: 55784 - protein, 137 aa, Glycine max
  peptide (1)..(137): Ceres Seq. ID no. 12610134
  misc_feature (52)..(103): Pfam Name: ABA/WDS induced protein Pfam Description: ABA/WDS induced protein
  misc_feature (13)..(135): Homolog of NCBI NO: 38532363 NR Description: abscisic acid and water deficit stress inducible
  misc_feature (1)..(137): Homolog of NCBI NO: 6525055 NR Description: anth [Lilium longiflorum]
  misc_feature (1)..(135): Homolog of NCBI NO: 7484497 NR Description: water-stress-inducible protein LP3 - loblolly
  misc_feature (1)..(135): Homolog of NCBI NO: 7484607 NR Description: ABA stress ripening protein - common ice plant
  misc_feature (1)..(135): Homolog of NCBI NO: 14582465 NR Description: putative transcription factor [Vitis vinifera]
  misc_feature (1)..(35): Homolog of NCBI NO: 2677824 NR Description: abscisic stress ripening protein homolog [Prunus
  misc_feature (23)..(135): Homolog of NCBI NO: 2677824 NR Description: abscisic stress ripening protein homolog [Prunus
  misc_feature (1)..(135): Homolog of NCBI NO: 7484489 NR Description: abscisic acid- and water-stress-inducible protein
  misc_feature (1)..(137): Homolog of NCBI NO: 7489448 NR Description: abscisic acid- and stress-induced protein - rice
  misc_feature (1)..(137): Homolog of NCBI NO: 15667623 NR Description: drought inducible 22 kD protein [Saccharum
MAEEKHHHHLFHHKEGEDFQPAADGGVDTYGYSTETVVTATGNEGEYERITKEEKHHKHKEHLGEMGAAAAGAFALYEKHEAKKDPEHAHKHKIEEEVAAAAAVGAGGFVFHEHHEKKQDHKEAKEASGEKKHHHFG

SEQ ID NO: 55785 - protein, 72 aa, Glycine max
  peptide (1)..(72): Ceres Seq. ID no. 12610135
  misc_feature (1)..(70): Homolog of NCBI NO: 7484499 NR Description: water-stress-inducible protein LP3-3 - loblolly
  misc_feature (1)..(70): Homolog of NCBI NO: 38532363 NR Description: abscisic acid and water deficit stress inducible
  misc_feature (1)..(72): Homolog of NCBI NO: 6525055 NR Description: anth [Lilium longiflorum]
  misc_feature (1)..(70): Homolog of NCBI NO: 7484497 NR Description: water-stress-inducible protein LP3 - loblolly
  misc_feature (1)..(70): Homolog of NCBI NO: 7484607 NR Description: ABA stress ripening protein - common ice plant
  misc_feature (1)..(70): Homolog of NCBI NO: 14582465 NR Description: putative transcription factor [Vitis vinifera]
  misc_feature (1)..(70): Homolog of NCBI NO: 2677824 NR Description: abscisic stress ripening protein homolog [Prunus
  misc_feature (1)..(70): Homolog of NCBI NO: 7484489 NR Description: abscisic acid- and water-stress-inducible protein
  misc_feature (1)..(72): Homolog of NCBI NO: 7489448 NR Description: abscisic acid- and stress-induced protein - rice
  misc_feature (1)..(72): Homolog of NCBI NO: 15667623 NR Description: drought inducible 22 kD protein [Saccharum
MGAAAAGAFALYEKHEAKKDPEHAHKHKIEEEVAAAAAVGAGGFVFHEHHEKKQDHKEAKEASGEKKHHHFG

SEQ ID NO: 55786 - DNA, 733 bp, Glycine max
  misc_feature (1)..(733): Ceres Seq. ID no. 13638927
gaccatcgccgcagacagaggtcggaagaagaggaaggaaaaggcgctctctctctgtctctcccacacggcggcgcggtgtagccggcggcggcgatggctttctggcaggcgcgcgacttcctgttctgcggcgtgtgcggcaccctcctcgacttcaactcccaccgctacgcctcctgccctctctgcggcttcaagcgcaaggccaaagagatcgaagggaaagaaactcgctacgcggtcaccgcggaggatattagaagagagctaaagataaaaccgtttgtggttcttgaatcggcgccgaatatggacatagtcgtgcaaagatccctgacagagcgagcctgtccagaatgcaaccatcatgaactcgaatattacaccaagcagcttcggtcggcggatgaggggcagactatcttctacgagtgcccggagtgcggccacgcattcaacgagaatacctaagagaaaagttttctactatcagggtatgggtatgcgtggaagaatctgctcctgccattggttgacaatcgatgttcaccgaaatttcgcctgccatgggttgaccattgatgttccagctttttggcgtgtattctaatcttcaatgttacctgggatatgttaatgctcctttctatctaacggtttttgatggaacctgtctgtctgatgtatttgactgaatgtggccatagaaagagcaggatatattgtttct

SEQ ID NO: 55787 - protein, 125 aa, Glycine max
  peptide (1)..(125): Ceres Seq. ID no. 13638928
  misc_feature (84)..(122): Pfam Name: Transcription factor S-II (TFIIS) Pfam Description: Transcription factor S-II (TFIIS)
  misc_feature (10)..(123): Homolog of NCBI NO: 13541573 NR Description: DNA-directed RNA polymerase subunit M
  misc_feature (10)..(123): Homolog of NCBI NO: 16082042 NR Description: probable transcription-associated protein TFIIS
  misc_feature (11)..(125): Homolog of NCBI NO: 29248470 NR Description: GLP_572_32225_32536 [Giardia lamblia ATCC 50803]
  misc_feature (10)..(124): Homolog of NCBI NO: 6322523 NR Description: A12.2 subunit of RNA polymerase I; Rpa12p
  misc_feature (8)..(117): Homolog of NCBI NO: 34852033 NR Description: similar to nuclear RNA polymerase I small
  misc_feature (8)..(117): Homolog of NCBI NO: 12963545 NR Description: nuclear RNA polymerase I small specific subunit
  misc_feature (10)..(124): Homolog of NCBI NO: 19075559 NR Description: dna-directed rna polymerase i subunit
  misc_feature (8)..(117): Homolog of NCBI NO: 7657709 NR Description: zinc ribbon domain containing, 1
  misc_feature (8)..(123): Homolog of NCBI NO: 18404735 NR Description: expressed protein [Arabidopsis thaliana]
  misc_feature (1)..(124): Homolog of NCBI NO: 13324793 NR Description: putative RNA polymerase I subunit [Oryza sativa]
MAFWQARDFLFCGVCGTLLDFNSHRYASCPLCGFKRKAKEIEGKETRYAVTAEDIRRELKIKPFVVLESAPNMDIVVQRSLTERACPECNHHELEYYTKQLRSADEGQTIFYECPECGHAFNENT

SEQ ID NO: 55788 - protein, 90 aa, Glycine max
  peptide (1)..(90): Ceres Seq. ID no. 13638929
TIAADRGRKKRKEKALSLCLSHTAARCSRRRRWLSGRRATSCSAACAAPSSTSTPTATPPALSAASSARPKRSKGKKLATRSPRRILEES

SEQ ID NO: 55789 - protein, 86 aa, Glycine max
  peptide (1)..(86): Ceres Seq. ID no. 13638930
PSPQTEVGRRGRKRRSLSVSPTRRRGVAGGGDGFLAGARLPVLRRVRHPPRLQLPPLRLLPSLRLQAQGQRDRRERNSLRGHRGGY

SEQ ID NO: 55790 - DNA, 1006 bp, Glycine max
  misc_feature (1)..(1006): Ceres Seq. ID no. 13638976
atctactgcccccgccgtcctcgcctcctcccccgatccaaatccgaaatttttcccctccccgcagcccgctccctcctccgcgcccgcactgtagcccgagcgctcggctccaccgccgtgggctgtagccgccgtcgctgccatggcgaacgacgggtcccccaagtccggtgacatcccgccctaccccgagatgattctcgcggcgatcgaggcgctgggcgacaagaacggctcgagcaagtccgccatctccagctacatcgaggagaagtacgagggcctcccctcggcgcacgcctccctcctcacggccaacctcgccagcatgaaggaggccggcaagctcgccttcgtcaagaacaactacctcaaggctgacgctccctccgccaccccggcaaagcgcggccgcggccgcccgcctaaggaccctaacgcgccgcccaagccgaaggctgcgcccaaggaccccaacacgcccaagcgcggccggggccgcccgcccaaggctaaggatcccatggccgacgccgtcaaggatgccgtcgccaaggcgaccaccggcatgccccggggccgcggccgcccgccgggtccctcctcggccaagaaggccaaggtcgccaaggaggctgcctctccggctcccgcggacggctccgctcctgccaagcgtggccgtgggcgcccacgcaaggtggcggtgtgaggcctgcgtgctgatgcctttcggtctgtgtatctcgctgtggttgcgacggtggtaagctcctaggtgtgaccgtgcttcttcgatttgtgctccgtactaattgttccgtcggcttagttgctcagtatgtgttgtaacctaatcgagatgagtgtgcacaatggatggatggatgtttttagcttcggttgtagttgactgtgctgctgtgagtgaacatgttcattttttttatcgccatctctgttgcttccgcattatgatgaagatgtttgtcatgttgttgtg

SEQ ID NO: 55791 - protein, 189 aa, Glycine max
  peptide (1)..(189): Ceres Seq. ID no. 13638977
  misc_feature (11)..(80): Pfam Name: linker histone H1 and H5 family Pfam Description: linker histone H1 and H5 family
  misc_feature (9)..(187): Homolog of NCBI NO: 15223947 NR Description: linker histone protein -related [Arabidopsis
  misc_feature (9)..(187): Homolog of NCBI NO: 1808590 NR Description: HMG-I/Y [Arabidopsis thaliana]
  misc_feature (1)..(186): Homolog of NCBI NO: 6651027 NR Description: high mobility group protein I/Y [Brassica napus]
  misc_feature (1)..(151): Homolog of NCBI NO: 629769 NR Description: histone-like DNA-binding protein PF 1 - oat
  misc_feature (2)..(188): Homolog of NCBI NO: 25553691 NR Description: P0479C08.8 [Oryza sativa (japonica
  misc_feature (2)..(187): Homolog of NCBI NO: 7439646 NR Description: DNA binding protein PF1 - rice
  misc_feature (1)..(187): Homolog of NCBI NO: 4585621 NR Description: HMGI/Y protein [Zea mays]
  misc_feature (1)..(187): Homolog of NCBI NO: 9837562 NR Description: high mobility group I/Y-2 [Zea mays]
  misc_feature (1)..(187): Homolog of NCBI NO: 11544762 NR Description: HMGI/Y protein [Zea mays]
  misc_feature (1)..(188): Homolog of NCBI NO: 20502966 NR Description: HMG-I/Y protein HMGa [Triticum aestivum]
MANDGSPKSGDIPPYPEMILAAIEALGDKNGSSKSAISSYIEEKYEGLPSAHASLLTANLASMKEAGKLAFVKNNYLKADAPSATPAKRGRGRPPKDPNAPPKPKAAPKDPNTPKRGRGRPPKAKDPMADAVKDAVAKATTGMPRGRGRPPGPSSAKKAKVAKEAASPAPADGSAPAKRGRGRPRKVAV

SEQ ID NO: 55792 - protein, 172 aa, Glycine max
  peptide (1)..(172): Ceres Seq. ID no. 13638978
  misc_feature (1)..(63): Pfam Name: linker histone H1 and H5 family Pfam Description: linker histone H1 and H5 family
  misc_feature (1)..(170): Homolog of NCBI NO: 15223947 NR Description: linker histone protein -related [Arabidopsis
  misc_feature (1)..(170): Homolog of NCBI NO: 1808590 NR Description: HMG-I/Y [Arabidopsis thaliana]
  misc_feature (1)..(169): Homolog of NCBI NO: 6651027 NR Description: high mobility group protein I/Y [Brassica napus]
  misc_feature (1)..(134): Homolog of NCBI NO: 629769 NR Description: histone-like DNA-binding protein PF 1 - oat
  misc_feature (1)..(171): Homolog of NCBI NO: 25553691 NR Description: P0479C08.8 [Oryza sativa (japonica
  misc_feature (1)..(170): Homolog of NCBI NO: 7439646 NR Description: DNA binding protein PF1 - rice
  misc_feature (1)..(170): Homolog of NCBI NO: 4585621 NR Description: HMGI/Y protein [Zea mays]
  misc_feature (1)..(170): Homolog of NCBI NO: 9837562 NR Description: high mobility group I/Y-2 [Zea mays]
  misc_feature (1)..(170): Homolog of NCBI NO: 11544762 NR Description: HMGI/Y protein [Zea mays]
  misc_feature (1)..(171): Homolog of NCBI NO: 20502966 NR Description: HMG-I/Y protein HMGa [Triticum aestivum]
MILAAIEALGDKNGSSKSAISSYIEEKYEGLPSAHASLLTANLASMKEAGKLAFVKNNYLKADAPSATPAKRGRGRPPKDPNAPPKPKAAPKDPNTPKRGRGRPPKAKDPMADAVKDAVAKATTGMPRGRGRPPGPSSAKKAKVAKEAASPAPADGSAPAKRGRGRPRKVAV

SEQ ID NO: 55793 - protein, 127 aa, Glycine max
  peptide (1)..(127): Ceres Seq. ID no. 13638979
  misc_feature (1)..(125): Homolog of NCBI NO: 15223947 NR Description: linker histone protein -related [Arabidopsis
  misc_feature (1)..(125): Homolog of NCBI NO: 1808590 NR Description: HMG-I/Y [Arabidopsis thaliana]
  misc_feature (1)..(124): Homolog of NCBI NO: 6651027 NR Description: high mobility group protein I/Y [Brassica napus]
  misc_feature (1)..(89): Homolog of NCBI NO: 629769 NR Description: histone-like DNA-binding protein PF 1 - oat
  misc_feature (1)..(126): Homolog of NCBI NO: 25553691 NR Description: P0479C08.8 [Oryza sativa (japonica
  misc_feature (1)..(125): Homolog of NCBI NO: 7439646 NR Description: DNA binding protein PF1 - rice
  misc_feature (1)..(125): Homolog of NCBI NO: 4585621 NR Description: HMGI/Y protein [Zea mays]
  misc_feature (1)..(125): Homolog of NCBI NO: 9837562 NR Description: high mobility group I/Y-2 [Zea mays]
  misc_feature (1)..(125): Homolog of NCBI NO: 11544762 NR Description: HMGI/Y protein [Zea mays]
  misc_feature (1)..(126): Homolog of NCBI NO: 20502966 NR Description: HMG-I/Y protein HMGa [Triticum aestivum]
MKEAGKLAFVKNNYLKADAPSATPAKRGRGRPPKDPNAPPKPKAAPKDPNTPKRGRGRPPKAKDPMADAVKDAVAKATTGMPRGRGRPPGPSSAKKAKVAKEAASPAPADGSAPAKRGRGRPRKVAV

SEQ ID NO: 55794 - DNA, 1141 bp, Glycine max
  misc_feature (1)..(1141): Ceres Seq. ID no. 13638877
aaccaaagccagagcgcccgtctctcccccctcccacgccgccgcacaccgaaccctagcgccccagcgagcgagcgagcgacagccatgccggcggacgcgaagatccggtggggggagctcgaggaggacgacgggggcgacctcgacttcctgctgccgccgcgggtggtcatcgggcccgacgagaacggcttcaagaagacgatcgagtaccgcttcgacgacgacggcaacaaggtcaaggtcaccaccaccacccgcgtccgcaagctcgcgcgcgcgcgcctctccaaggccgccgtcgagcgtcgcaactggtccaagttcggcgacgccgccagcggcgacgacgcctccgcgcgcctcaccgtcgtctccaccgaggagatcctcctcgagcgcccgcgcgccccagggagcaaagctgatgaaccaagtgcgtctggtgacccactggcaatggcaagcaagggaggtgctgttctcatggtttgcagaacctgtggtaagaagggtgaccactggacctcaaagtgcccctacaaggacctcgctccaccaaccgatgcatcggacatgcctcctacttctgacggccctgcagcactgagtggccctgccaagggctcatacgttgctccaaggctaagggctggtgctgttcataccgatgctgggcacgacatgaggcgcaggaacgacgagaacagtgtccgtgttaccaatctgtctgaggacacccgcgagcccgacctcctcgagctgttccgcacgtttggcccggtcagccgtgtctatgtcgcggtggatcagaagactggaatgagcaggggctttgggtttgtcaactttgttcacagggaggacgccgagaaggccatcagcaagctcaatgggtatggttatgataacctcatcctccatgtggagatggctgcacctaggcctacttagttactgcctactaagcatccagatttcctacaagtgtcgtatcattatggtctccgaaatacccgtacgtttgtgtcgtgagcttgtgtcatgttttgccttgttgagaataactacactctggtggtgaaaaagtgaatttcttaagggatggcacttgagtttatatttcatcaagctttgt

SEQ ID NO: 55795 - protein, 318 aa, Glycine max
  peptide (1)..(318): Ceres Seq. ID no. 13638878
  misc_feature (239)..(310): Pfam Name: RNA recognition motif. (a.k.a. RRM, RBD, or RNP domain) Pfam Description: RNA recognition motif. (a.k.a. RRM, RBD, or RNP
  misc_feature (50)..(315): Homolog of NCBI NO: 31980808 NR Description: eukaryotic translation initiation factor 3,
  misc_feature (52)..(315): Homolog of NCBI NO: 30583983 NR Description: Homo sapiens eukaryotic translation initiation
  misc_feature (52)..(315): Homolog of NCBI NO: 23503064 NR Description: Eukaryotic translation initiation factor 3
  misc_feature (38)..(316): Homolog of NCBI NO: 2951777 NR Description: translation initiation factor 3
  misc_feature (33)..(315): Homolog of NCBI NO: 29124629 NR Description: Similar to eukaryotic translation initiation
  misc_feature (30)..(316): Homolog of NCBI NO: 19112519 NR Description: eukaryotic translation initiation factor 3
  misc_feature (58)..(318): Homolog of NCBI NO: 30681225 NR Description: eukaryotic translation initiation factor 3,
  misc_feature (35)..(318): Homolog of NCBI NO: 10177573 NR Description: eukaryotic translation initiation factor 3
  misc_feature (34)..(318): Homolog of NCBI NO: 15229743 NR Description: eukaryotic translation initiation factor 3
  misc_feature (34)..(318): Homolog of NCBI NO: 12407751 NR Description: initiation factor 3g [Arabidopsis thaliana]
NQSQSARLSPLPRRRTPNPSAPASERATAMPADAKIRWGELEEDDGGDLDFLLPPRVVIGPDENGFKKTIEYRFDDDGNKVKVTTTTRVRKLARARLSKAAVERRNWSKFGDAASGDDASARLTVVSTEEILLERPRAPGSKADEPSASGDPLAMASKGGAVLMVCRTCGKKGDHWTSKCPYKDLAPPTDASDMPPTSDGPAALSGPAKGSYVAPRLRAGAVHTDAGHDMRRRNDENSVRVTNLSEDTREPDLLELFRTFGPVSRVYVAVDQKTGMSRGFGFVNFVHREDAEKAISKLNGYGYDNLILHVEMAAPRPT

SEQ ID NO: 55796 - protein, 289 aa, Glycine max
  peptide (1)..(289): Ceres Seq. ID no. 13638879
  misc_feature (210)..(281): Pfam Name: RNA recognition motif. (a.k.a. RRM, RBD, or RNP domain) Pfam Description: RNA recognition motif. (a.k.a. RRM, RBD, or RNP
  misc_feature (21)..(286): Homolog of NCBI NO: 31980808 NR Description: eukaryotic translation initiation factor 3,
  misc_feature (23)..(286): Homolog of NCBI NO: 30583983 NR Description: Homo sapiens eukaryotic translation initiation
  misc_feature (23)..(286): Homolog of NCBI NO: 23503064 NR Description: Eukaryotic translation initiation factor 3
  misc_feature (9)..(287): Homolog of NCBI NO: 2951777 NR Description: translation initiation factor 3
  misc_feature (4)..(286): Homolog of NCBI NO: 29124629 NR Description: Similar to eukaryotic translation initiation
  misc_feature (1)..(287): Homolog of NCBI NO: 19112519 NR Description: eukaryotic translation initiation factor 3
  misc_feature (29)..(289): Homolog of NCBI NO: 30681225 NR Description: eukaryotic translation initiation factor 3,
  misc_feature (6)..(289): Homolog of NCBI NO: 10177573 NR Description: eukaryotic translation initiation factor 3
  misc_feature (5)..(289): Homolog of NCBI NO: 15229743 NR Description: eukaryotic translation initiation factor 3
  misc_feature (5)..(289): Homolog of NCBI NO: 12407751 NR Description: initiation factor 3g [Arabidopsis thaliana]
MPADAKIRWGELEEDDGGDLDFLLPPRVVIGPDENGFKKTIEYRFDDDGNKVKVTTTTRVRKLARARLSKAAVERRNWSKFGDAASGDDASARLTVVSTEEILLERPRAPGSKADEPSASGDPLAMASKGGAVLMVCRTCGKKGDHWTSKCPYKDLAPPTDASDMPPTSDGPAALSGPAKGSYVAPRLRAGAVHTDAGHDMRRRNDENSVRVTNLSEDTREPDLLELFRTFGPVSRVYVAVDQKTGMSRGFGFVNFVHREDAEKAISKLNGYGYDNLILHVEMAAPRPT

SEQ ID NO: 55797 - protein, 203 aa, Glycine max
  peptide (1)..(203): Ceres Seq. ID no. 13638880
  misc_feature (1)..(135): Homolog of NCBI NO: 13592175 NR Description: ppg3 [Leishmania major]
  misc_feature (1)..(135): Homolog of NCBI NO: 11359723 NR Description: proteophosphoglycan, membrane-associated
TKARAPVSPPSHAAAHRTLAPQRASERQPCRRTRRSGGGSSRRTTGATSTSCCRRGWSSGPTRTASRRRSSTASTTTATRSRSPPPPASASSRARASPRPPSSVATGPSSATPPAATTPPRASPSSPPRRSSSSARAPQGAKLMNQVRLVTHWQWQAREVLFSWFAEPVVRRVTTGPQSAPTRTSLHQPMHRTCLLLLTALQH

SEQ ID NO: 55798 - DNA, 892 bp, Glycine max
  misc_feature (1)..(892): Ceres Seq. ID no. 13594992
cccgcccccgtccggcacctctctcgcttcttcctccggcccatgcgacggcgctgacatctttgcccgcctgacctttcgatggccgccgccgccaccgccgccgccgcgaccggcacacttcttccccacgcactattgaatcatcgctcgcctccgccgccgcagctccttgcgctgtcctcctccttccgccgcctctccttatccacctcccatcgcaggaccacccatttagtcgcccactcagacgccggcgccgttgagccggagcccgtgtctgagcctgctcctgagggcgagcctgtcgctgcctctgctgactccgaggagggggaggcggagggggctgtggcattggcggaggaagaggaggagccggcgccgaggcccaagccgattaagttcggcgagatcatcgggattctgaacaagcagttcatcgaggaggctgagaaggtgaaagtgcttccggatttgaagcctggtgacatcatcgagcttagaatgcaacgtcccaacaagaggagattgtctctctttaagggtataatcattgcaaagcacaaatctggtgttcacaccacgatccgcgtcaggaggattattgccggtgttggagttgaaattacattccccatatactcaccaaggatcaaggagatcaaagtaatcagacacaagaaggtgaggagggcaaagttgtactacctgaagtacaagcttccccgtttctcaactttcaagtgagattagatacgcggcttctcacactagcatgtcgatttctccttggcaaacgagttttcacgatcatgttcagatctgtgcatccactgtaatgatctctgaacctcgagtcgcataattttacatctttttttaattggcg

SEQ ID NO: 55799 - protein, 222 aa, Glycine max
  peptide (1)..(222): Ceres Seq. ID no. 13594993
  misc_feature (114)..(222): Pfam Name: Ribosomal protein L19 Pfam Description: Ribosomal protein L19
  misc_feature (130)..(212): Homolog of NCBI NO: 14285714 NR Description: 50S RIBOSOMAL PROTEIN L19
  misc_feature (38)..(215): Homolog of NCBI NO: 18395422 NR Description: ribosomal protein L19, putative [Arabidopsis
  misc_feature (112)..(215): Homolog of NCBI NO: 15239778 NR Description: ribosomal protein L19, putative [Arabidopsis
  misc_feature (112)..(215): Homolog of NCBI NO: 15234249 NR Description: ribosomal protein L19, putative [Arabidopsis
  misc_feature (70)..(222): Homolog of NCBI NO: 18414915 NR Description: ribosomal protein L19, putative [Arabidopsis
  misc_feature (21)..(222): Homolog of NCBI NO: 7582403 NR Description: plastid ribosomal protein L19 precursor [Spinacia
  misc_feature (67)..(222): Homolog of NCBI NO: 8809601 NR Description: contains similarity to plastid ribosomal protein
  misc_feature (9)..(222): Homolog of NCBI NO: 21592584 NR Description: contains similarity to plastid ribosomal protein
  misc_feature (9)..(222): Homolog of NCBI NO: 18422764 NR Description: ribosomal protein L19, putative [Arabidopsis
  misc_feature (1)..(222): Homolog of NCBI NO: 14140122 NR Description: putative plastid ribosomal protein L19 precursor
MAAAATAAAATGTLLPHALLNHRSPPPPQLLALSSSFRRLSLSTSHRRTTHLVAHSDAGAVEPEPVSEPAPEGEPVAASADSEEGEAEGAVALAEEEEEPAPRPKPIKFGEIIGILNKQFIEEAEKVKVLPDLKPGDIIELRMQRPNKRRLSLFKGIIIAKHKSGVHTTIRVRRIIAGVGVEITFPIYSPRIKEIKVIRHKKVRRAKLYYLKYKLPRFSTFK

SEQ ID NO: 55800 - DNA, 1156 bp, Glycine max
  misc_feature (1)..(1156): Ceres Seq. ID no. 13594929
ccatcgtacggtacactcgtaccaatcagcgttagcgcgaagggataacgtacgtccgttccatcctcgcgcgcgcggccgctccggctccggctccggccatggcgtccacctccgcctccctcggcgccatcctccagcgcttcccgctgctcgcgccccgccccgcctcccgccgcgcgcccaccgcccgccgcgccgtcgccaacaagatctcctgcatcggatgggacccggagggcatcctggcgccgccgcagccgggccacatcgcgcgcctcgagttccggcgccgcctcgacagcgacgccgacgcgcgcgccgccttcgacctccaggtcaaggaggagcaggagcgccgccgcaaggagcgcgaggcgcgggtgatacctgagacggacgccgggctggtggagttcttcctggacacggacgcgcgggagatcgagatcgagatcggcaggctccggcccaggctcaacaagggcttcttcgaccacatccagcgcgagatcgcgcagatcaagttcgcagtcaccagaacagcggcaaatgaagacagactgatcgagctggaggcgatgcagaaggtcatcggggagggagtcgaggcctacgacaagctgcaaaacgacctggtcacggccaaggagcggctcaccaacatcctgcaatccaaagataggaagaaaactctgctcgacatggttgaacggaacgagctcaacatgtccatattaacgcttctcgacgagaacatagcgagcgccaagaccagtaaccaggaggaggccgtggctttcatggaggatgtgcgctcatctatgctgaaatacataacagtataaattttgcctacatacaccggtgaccagttatctctgctatggcactggagtcgtcttcggcgcatagttgttcgaattaattcaatggagctgtaattcacaagtccatcttgtgtgttgtaattttgtttcggttgtatctagttgttctgtctgatatatgttgcaattgtcagtagctttactggcaaaaagagattgtacaatcatatatacatgcacggctgtaccagaaacaaatacaacaagactatgatctaaaaaaaaaaaaaaaaaagcttatcgataccgtcgacctcgaggggggg

SEQ ID NO: 55801 - protein, 248 aa, Glycine max
  peptide (1)..(248): Ceres Seq. ID no. 13594930
  misc_feature (93)..(248): Homolog of NCBI NO: 25373192 NR Description: protein F23N19.15 [imported] - Arabidopsis
  misc_feature (15)..(248): Homolog of NCBI NO: 15221583 NR Description: expressed protein [Arabidopsis thaliana]
  misc_feature (1)..(248): Homolog of NCBI NO: 29368099 NR Description: unknown [Oryza sativa (japonica cultivar-group)]
MASTSASLGAILQRFPLLAPRPASRRAPTARRAVANKISCIGWDPEGILAPPQPGHIARLEFRRRLDSDADARAAFDLQVKEEQERRRKEREARVIPETDAGLVEFFLDTDAREIEIEIGRLRPRLNKGFFDHIQREIAQIKFAVTRTAANEDRLIELEAMQKVIGEGVEAYDKLQNDLVTAKERLTNILQSKDRKKTLLDMVERNELNMSILTLLDENIASAKTSNQEEAVAFMEDVRSSMLKYITV

SEQ ID NO: 55802 - protein, 130 aa, Glycine max
  peptide (1)..(130): Ceres Seq. ID no. 13594931
HRTVHSYQSALARRDNVRPFHPRARGRSGSGSGHGVHLRLPRRHPPALPAARAPPRLPPRAHRPPRRRQQDLLHRMGPGGHPGAAAAGPHRAPRVPAPPRQRRRRARRLRPPGQGGAGAPPQGARGAGDT

SEQ ID NO: 55803 - DNA, 963 bp, Glycine max
  misc_feature (1)..(963): Ceres Seq. ID no. 13638885
acagacgcgagcgcgttaaacgagagaagaacagagagacagatcagacaacaatggcagccaaaccagacctgaagttgttgggcatgtcggtgagtccattcgtcatccgtgttcgcatggcgctgcacatgaagggcgtgagccacgagtacatcgagcaggacctcttcaacaagagcgagctcctcctcgagtccagcccggtggagaagaaggtgcccgtgctcatccacgacggcaagcccgtatgcgactcgccggccatcgtgcagtacatcgacgaggtctgggccgccacggggccgccgatcctccccgccgacccctatgagcgcgccgtcgctcgtttctggaccgcctacgtggacgacaagctattccctgcttacgctggcactgctaaggcagccacggaggaggagaggacgcaacagattaacgagatgttcgcggtgatggggcagctggaggaggcatttgcccagtgctcaaacgggaaggccttcttcgccggcgactccatcggcaacctcgacatcgccgttggatgcaatctgctcttgctcgaggtgctacgcagtatgtatggcgtggagttcgtcgacactgggaggaccccgctcttggcagcgtgggcgaagcggttcggggaaaccgatgcggcgagggaggtggtgcccgacgtgcacgtcgccgtggagtacgccaagaagcgtcaggcttattgggctgctgccgcggctacaaagtgacatgattcagatcagatcagtccgagtactacggactgaaaattatctcaagtccataggatgttgctccaacaataaagaggacaaatcatggatacaccatcttaaacatgatgattaacttacctcacggggttatccaacaatcgctgatttagttattgatcctagtagtagtctagatacgcaacgaagtgacatttttttc

SEQ ID NO: 55804 - protein, 250 aa, Glycine max
  peptide (1)..(250): Ceres Seq. ID no. 13638886
  misc_feature (105)..(220): Pfam Name: Glutathione S-transferase, C-terminal domain Pfam Description: Glutathione S-transferase, C-terminal domain
  misc_feature (23)..(248): Homolog of NCBI NO: 37536280 NR Description: putative glutathione S-transferase
  misc_feature (18)..(250): Homolog of NCBI NO: 21730248 NR Description: Chain A, The Structure Of A Tau Class Glutathione
  misc_feature (18)..(248): Homolog of NCBI NO: 11385517 NR Description: glutathione S-transferase GST 33 [Zea mays]
  misc_feature (23)..(247): Homolog of NCBI NO: 37536312 NR Description: putative glutathione S-transferase
  misc_feature (23)..(247): Homolog of NCBI NO: 33304612 NR Description: tau class GST protein 3 [Oryza sativa (indica
  misc_feature (20)..(248): Homolog of NCBI NO: 37536308 NR Description: putative glutathione S-transferase
  misc_feature (24)..(246): Homolog of NCBI NO: 11385503 NR Description: glutathione S-transferase GST 26 [Zea mays]
  misc_feature (18)..(249): Homolog of NCBI NO: 37536352 NR Description: putative glutathione S-transferase
  misc_feature (18)..(249): Homolog of NCBI NO: 37536354 NR Description: putative glutathione S-transferase
  misc_feature (18)..(250): Homolog of NCBI NO: 22022398 NR Description: glutathione-S-transferase Cla47 [Triticum
RRERVKREKNRETDQTTMAAKPDLKLLGMSVSPFVIRVRMALHMKGVSHEYIEQDLFNKSELLLESSPVEKKVPVLIHDGKPVCDSPAIVQYIDEVWAATGPPILPADPYERAVARFWTAYVDDKLFPAYAGTAKAATEEERTQQINEMFAVMGQLEEAFAQCSNGKAFFAGDSIGNLDIAVGCNLLLLEVLRSMYGVEFVDTGRTPLLAAWAKRFGETDAAREVVPDVHVAVEYAKKRQAYWAAAAATK

SEQ ID NO: 55805 - protein, 233 aa, Glycine max
  peptide (1)..(233): Ceres Seq. ID no. 13638887
  misc_feature (88)..(203): Pfam Name: Glutathione S-transferase, C-terminal domain Pfam Description: Glutathione S-transferase, C-terminal domain
  misc_feature (6)..(231): Homolog of NCBI NO: 37536280 NR Description: putative glutathione S-transferase
  misc_feature (1)..(233): Homolog of NCBI NO: 21730248 NR Description: Chain A, The Structure Of A Tau Class Glutathione
  misc_feature (1)..(231): Homolog of NCBI NO: 11385517 NR Description: glutathione S-transferase GST 33 [Zea mays]
  misc_feature (6)..(230): Homolog of NCBI NO: 37536312 NR Description: putative glutathione S-transferase
  misc_feature (6)..(230): Homolog of NCBI NO: 33304612 NR Description: tau class GST protein 3 [Oryza sativa (indica
  misc_feature (3)..(231): Homolog of NCBI NO: 37536308 NR Description: putative glutathione S-transferase
  misc_feature (7)..(229): Homolog of NCBI NO: 11385503 NR Description: glutathione S-transferase GST 26 [Zea mays]
  misc_feature (1)..(232): Homolog of NCBI NO: 37536352 NR Description: putative glutathione S-transferase
  misc_feature (1)..(232): Homolog of NCBI NO: 37536354 NR Description: putative glutathione S-transferase
  misc_feature (1)..(233): Homolog of NCBI NO: 22022398 NR Description: glutathione-S-transferase Cla47 [Triticum
MAAKPDLKLLGMSVSPFVIRVRMALHMKGVSHEYIEQDLFNKSELLLESSPVEKKVPVLIHDGKPVCDSPAIVQYIDEVWAATGPPILPADPYERAVARFWTAYVDDKLFPAYAGTAKAATEEERTQQINEMFAVMGQLEEAFAQCSNGKAFFAGDSIGNLDIAVGCNLLLLEVLRSMYGVEFVDTGRTPLLAAWAKRFGETDAAREVVPDVHVAVEYAKKRQAYWAAAAATK

SEQ ID NO: 55806 - protein, 222 aa, Glycine max
  peptide (1)..(222): Ceres Seq. ID no. 13638888
  misc_feature (77)..(192): Pfam Name: Glutathione S-transferase, C-terminal domain Pfam Description: Glutathione S-transferase, C-terminal domain
  misc_feature (1)..(220): Homolog of NCBI NO: 37536280 NR Description: putative glutathione S-transferase
  misc_feature (1)..(222): Homolog of NCBI NO: 21730248 NR Description: Chain A, The Structure Of A Tau Class Glutathione
  misc_feature (1)..(220): Homolog of NCBI NO: 11385517 NR Description: glutathione S-transferase GST 33 [Zea mays]
  misc_feature (1)..(219): Homolog of NCBI NO: 37536312 NR Description: putative glutathione S-transferase
  misc_feature (1)..(219): Homolog of NCBI NO: 33304612 NR Description: tau class GST protein 3 [Oryza sativa (indica
  misc_feature (1)..(220): Homolog of NCBI NO: 37536308 NR Description: putative glutathione S-transferase
  misc_feature (1)..(218): Homolog of NCBI NO: 11385503 NR Description: glutathione S-transferase GST 26 [Zea mays]
  misc_feature (1)..(221): Homolog of NCBI NO: 37536352 NR Description: putative glutathione S-transferase
  misc_feature (1)..(221): Homolog of NCBI NO: 37536354 NR Description: putative glutathione S-transferase
  misc_feature (1)..(222): Homolog of NCBI NO: 22022398 NR Description: glutathione-S-transferase Cla47 [Triticum
MSVSPFVIRVRMALHMKGVSHEYIEQDLFNKSELLLESSPVEKKVPVLIHDGKPVCDSPAIVQYIDEVWAATGPPILPADPYERAVARFWTAYVDDKLFPAYAGTAKAATEEERTQQINEMFAVMGQLEEAFAQCSNGKAFFAGDSIGNLDIAVGCNLLLLEVLRSMYGVEFVDTGRTPLLAAWAKRFGETDAAREVVPDVHVAVEYAKKRQAYWAAAAATK

SEQ ID NO: 55807 - DNA, 793 bp, Glycine max
  misc_feature (1)..(793): Ceres Seq. ID no. 13594932
aggacaggccaagcggagaatcgagggtttcggcttccttgtcatctcgccgtctccgacgccggcgacccgggagcgagacctccaaccgccgccctctcgccggcggcgtatttccccgttccgtagaccaggtatgaagagggccgcgccgtcggaggagccggtggagctctcttcgggcgacgacctgagctcggattccgacgatgaggccgggaacgggaaaggcgagaactccttccggctgcccatgtcctccaaatctacagctccagcaaaaggtgcattgatcaggagggctgaaatgtatcaagagtacatgaagcacatcccaattcctgatcactgcagctccttgatcccatccacatcatggctgggactcggaagatcggtgaagcagttgtacgagcagcccttgcattacctcaccaacatcctcttgagacagtgggatcaacagagggttgggagcgataatgagcaccagcctctggatgctatcattcaccctatgaaagctcaggccctcatttgggccactgaagaagtccataggctgaccacctctagtgaccacttagagaagctctgggccaaagaccccatgtatcatgctaacatagatccagtgttcccttccctaaagttgcattagcaaacatcgcaagttggaccgtcttatcctgtctattttgtttctgcctgctgtaatctggcacattttggttgttagcgaagtaatatgaaccatatgtcactgatgttaaaagtatgatatgtgatggcc

SEQ ID NO: 55808 - protein, 219 aa, Glycine max
  peptide (1)..(219): Ceres Seq. ID no. 13594933
  misc_feature (52)..(172): Homolog of NCBI NO: 30102560 NR Description: At3g22680 [Arabidopsis thaliana]
  misc_feature (52)..(214): Homolog of NCBI NO: 30686741 NR Description: expressed protein [Arabidopsis thaliana]
GQAKRRIEGFGFLVISPSPTPATRERDLQPPPSRRRRISPFRRPGMKRAAPSEEPVELSSGDDLSSDSDDEAGNGKGENSFRLPMSSKSTAPAKGALIRRAEMYQEYMKHIPIPDHCSSLIPSTSWLGLGRSVKQLYEQPLHYLTNILLRQWDQQRVGSDNEHQPLDAIIHPMKAQALIWATEEVHRLTTSSDHLEKLWAKDPMYHANIDPVFPSLKLH

SEQ ID NO: 55809 - protein, 174 aa, Glycine max
  peptide (1)..(174): Ceres Seq. ID no. 13594934
  misc_feature (7)..(127): Homolog of NCBI NO: 30102560 NR Description: At3g22680 [Arabidopsis thaliana]
  misc_feature (7)..(169): Homolog of NCBI NO: 30686741 NR Description: expressed protein [Arabidopsis thaliana]
MKRAAPSEEPVELSSGDDLSSDSDDEAGNGKGENSFRLPMSSKSTAPAKGALIRRAEMYQEYMKHIPIPDHCSSLIPSTSWLGLGRSVKQLYEQPLHYLTNILLRQWDQQRVGSDNEHQPLDAIIHPMKAQALIWATEEVHRLTTSSDHLEKLWAKDPMYHANIDPVFPSLKLH

SEQ ID NO: 55810 - protein, 135 aa, Glycine max
  peptide (1)..(135): Ceres Seq. ID no. 13594935
  misc_feature (1)..(88): Homolog of NCBI NO: 30102560 NR Description: At3g22680 [Arabidopsis thaliana]
  misc_feature (1)..(130): Homolog of NCBI NO: 30686741 NR Description: expressed protein [Arabidopsis thaliana]
MSSKSTAPAKGALIRRAEMYQEYMKHIPIPDHCSSLIPSTSWLGLGRSVKQLYEQPLHYLTNILLRQWDQQRVGSDNEHQPLDAIIHPMKAQALIWATEEVHRLTTSSDHLEKLWAKDPMYHANIDPVFPSLKLH

SEQ ID NO: 55811 - DNA, 830 bp, Glycine max
  misc_feature (1)..(830): Ceres Seq. ID no. 12610031
atcacttaaacaagccaactgtgaccgcaagcttagacaaagaaacagagagagagagagaaacagaaagatggtgctaaaggtgtacggacctcactttgcttcaccgaagcgagctctggtaacgctcatcgagaagggcgtcgccttcgagaccgtccccgtcgatctcatgaaaggagaacacaagcagcctgcttatctcgccttacagcctttcggtaccgtccctgctgttgtcgacggcgactacaaaatctttgagtcacgtgccgtcatgaggtacgtagctgagaagtacaggtcacaaggacctgaccttttggggaaaaccgtggaagaaagaggtcaagttgagcaatggctagacgtggaggcgaccacttaccacccaccgctacttaacctgacacttcacataatgttcgcgtcagttatgggattcccatctgatgagaagctgatcaaggagagcgaagagaagctctcggctgttctcgatgtctacgaggcacatctctcaaagagcaagtacttggccggtgatttcgtgagcttggctgacttggctcacctcccgttcactgattacttggtgggtccgatcgggaaggcttacatgatcaaagataggaagcacgtgagcgcgtggtgggacagtattagcagccgtcctgcgtggaaggagactcttgagaagtattcattcccggcttaagaacatgatgttctttgttgttgttgtttgtgtgtttatgtgaggtttaataataatgtggcaatgtatgcttcttcttatattatgttacctctactctgtttcgttttgg

SEQ ID NO: 55812 - protein, 238 aa, Glycine max
  peptide (1)..(238): Ceres Seq. ID no. 12610032
  misc_feature (24)..(237): Homolog of NCBI NO: 15224582 NR Description: glutathione transferase, putative
  misc_feature (24)..(238): Homolog of NCBI NO: 2462929 NR Description: glutathione transferase [Arabidopsis thaliana]
  misc_feature (24)..(238): Homolog of NCBI NO: 15224581 NR Description: glutathione transferase, putative
SLKQANCDRKLRQRNRERERNRKMVLKVYGPHFASPKRALVTLIEKGVAFETVPVDLMKGEHKQPAYLALQPFGTVPAVVDGDYKIFESRAVMRYVAEKYRSQGPDLLGKTVEERGQVEQWLDVEATTYHPPLLNLTLHIMFASVMGFPSDEKLIKESEEKLSAVLDVYEAHLSKSKYLAGDFVSLADLAHLPFTDYLVGPIGKAYMIKDRKHVSAWWDSISSRPAWKETLEKYSFPA

SEQ ID NO: 55813 - protein, 215 aa, Glycine max
  peptide (1)..(215): Ceres Seq. ID no. 12610033
  misc_feature (1)..(214): Homolog of NCBI NO: 15224582 NR Description: glutathione transferase, putative
  misc_feature (1)..(215): Homolog of NCBI NO: 2462929 NR Description: glutathione transferase [Arabidopsis thaliana]
  misc_feature (1)..(215): Homolog of NCBI NO: 15224581 NR Description: glutathione transferase, putative
MVLKVYGPHFASPKRALVTLIEKGVAFETVPVDLMKGEHKQPAYLALQPFGTVPAVVDGDYKIFESRAVMRYVAEKYRSQGPDLLGKTVEERGQVEQWLDVEATTYHPPLLNLTLHIMFASVMGFPSDEKLIKESEEKLSAVLDVYEAHLSKSKYLAGDFVSLADLAHLPFTDYLVGPIGKAYMIKDRKHVSAWWDSISSRPAWKETLEKYSFPA

SEQ ID NO: 55814 - protein, 181 aa, Glycine max
  peptide (1)..(181): Ceres Seq. ID no. 12610034
  misc_feature (1)..(180): Homolog of NCBI NO: 15224582 NR Description: glutathione transferase, putative
  misc_feature (1)..(181): Homolog of NCBI NO: 2462929 NR Description: glutathione transferase [Arabidopsis thaliana]
  misc_feature (1)..(181): Homolog of NCBI NO: 15224581 NR Description: glutathione transferase, putative
MKGEHKQPAYLALQPFGTVPAVVDGDYKIFESRAVMRYVAEKYRSQGPDLLGKTVEERGQVEQWLDVEATTYHPPLLNLTLHIMFASVMGFPSDEKLIKESEEKLSAVLDVYEAHLSKSKYLAGDFVSLADLAHLPFTDYLVGPIGKAYMIKDRKHVSAWWDSISSRPAWKETLEKYSFPA

SEQ ID NO: 55815 - DNA, 742 bp, Glycine max
  misc_feature (1)..(742): Ceres Seq. ID no. 13595021
attacctagaacatcctaatcgaaaaaaacaaacacaaaaaaaaaaacatggcagctcaagcctcgggtctctttagctccgccgtaacaaccgccgctacctccggcgtaaaaaaactccaccttttcacaacaacccaccgtccaagatccctctccttccccaaaaccgcaatccgcgccgagaaaacagactccgccgccgccgccgccgccccggccgccgccgtgaaagaagaagctccggtgggattcacgccgccgcagctggacccgaacacgccgtctccgatcttcgcgggaagcacgggtggtcttctccgcaaggcccaggtggaggagttctacgtcatcacgtggaactcgccgaaggagcagatcttcgagatgccgacgggaggcgcggcgatcatgagggaaggtccgaacctgctgaagctggcgaggaaggagcagtgcttggcgttggggacgaggctcaggtccaagtacaagattaactaccagttctacagggtgttccctaacggtgaggttcagtatcttcatcctaaagatggggtttatccggagaaggcgaatgcgggaagagaaggtgtcggtcagaacatgagatctattgggaaaaatgttagtcccattgaagttaagtttactgggaaacaaagttatgatttgtaagttgtggaaacttaaaatgtgaaaaaacaaaaatcatgtggatgtgactatgtttggtttt

SEQ ID NO: 55816 - protein, 210 aa, Glycine max
  peptide (1)..(210): Ceres Seq. ID no. 15221456
  misc_feature (72)..(209): Pfam Name: PsaD Pfam Description: PsaD
  misc_feature (1)..(210): Homolog of NCBI NO: 131167 NR Description: Photosystem I reaction center subunit II,
  misc_feature (12)..(210): Homolog of NCBI NO: 29367391 NR Description: chloroplast photosystem I reaction center subunit
  misc_feature (1)..(210): Homolog of NCBI NO: 34787117 NR Description: putative photosystem I reaction centre PSI-D
  misc_feature (1)..(210): Homolog of NCBI NO: 21293 NR Description: 20 kDa protein (AA 1-212) [Spinacia oleracea]
  misc_feature (1)..(210): Homolog of NCBI NO: 19855891 NR Description: Photosystem I reaction center subunit II,
  misc_feature (1)..(210): Homolog of NCBI NO: 72680 NR Description: photosystem I chain II precursor - spinach
  misc_feature (1)..(210): Homolog of NCBI NO: 5732201 NR Description: photosystem I subunit II precursor [Arabidopsis
  misc_feature (1)..(210): Homolog of NCBI NO: 15218708 NR Description: photosystem I reaction center subunit II
  misc_feature (1)..(210): Homolog of NCBI NO: 21595031 NR Description: putative photosystem I reaction center subunit II
  misc_feature (1)..(210): Homolog of NCBI NO: 15235503 NR Description: photosystem I reaction center subunit II
MAAQASGLFSSAVTTAATSGVKKLHLFTTTHRPRSLSFPKTAIRAEKTDSAAAAAAPAAAVKEEAPVGFTPPQLDPNTPSPIFAGSTGGLLRKAQVEEFYVITWNSPKEQIFEMPTGGAAIMREGPNLLKLARKEQCLALGTRLRSKYKINYQFYRVFPNGEVQYLHPKDGVYPEKANAGREGVGQNMRSIGKNVSPIEVKFTGKQSYDL

SEQ ID NO: 55817 - DNA, 1240 bp, Glycine max
  misc_feature (1)..(1240): Ceres Seq. ID no. 15177057
actccatttagattctgcttgctcaccaatagaagtgtggtatagccggtggaaatgcagctcctaccgacactctgcttcttgttcttgcagctgctgccgagaggagacgcatccacctctcactctaatcgccacagatcagccccacattggctccccgccacggccacctggtacggaagtcctgagggcgatggcagcagcggaggagcatgcgggtatgggtcgctggtggacgtgaagccgttcaaggctcgcgttggagcagtgagtccgttgctgttcaagagcggcgaaggctgcggtgcttgctacaaggtcaggtgtctggacaagaccatctgctcaaagagagcagtcacaataattgtcacagaccagtcaccgtcaggaccatctgctcgagcaaagcacattcactttgaccttagtggcgccgcatttggccatttggctatccccggccattccggcatcatccgcaaccgcggcctcatctccctcctctatcgccggacggcatgcaaatacagagagaagaacatagcattccatgtgaacgcaggatcaacagcttattggttatctcttctcattgagtatgaagacggagaaggtgacattggctctatgcacattcgtcaagcggggtcgaaggagtggatagcaatgaagcacatatggggagcaaactggtgcatcgtcggaggaccactaaagggaccactctccgttaagctcaccactttgtcaaacaacaaaacgctctccgcagctgacgtcatccccaaaaaatgggttcccaaagctacttacacctcccgcctcaacttctcccctgtcctctaactaaactgaagctccccacccccatttctctgtcctcacttcttttttgttgggagagagaatcggtgaggatactgagtgagtgagagtgagaggatgctctcctccctcttccctcgtttttctttttctgttttgtttggggttgtgtttatgtgtgttggtgaaggaagccatcagagcttgattctgtgactacttactatagtacttactacttactaatgttggacctactctttatgtaatcctttttttaatattttttcttatttgcttctaaaccttgtaaaaggcgataggagtaaagtactgtattatcatcatatttagtgtcatttgtgggacattattatataatgagacagcctacaaatgcataaataat

SEQ ID NO: 55818 - protein, 265 aa, Glycine max
  peptide (1)..(265): Ceres Seq. ID no. 15177058
  misc_feature (165)..(246): Pfam Name: Pollen allergen Pfam Description: Pollen allergen
  misc_feature (34)..(261): Homolog of NCBI NO: 14193767 NR Description: beta-expansin 4 [Zea mays]
  misc_feature (34)..(261): Homolog of NCBI NO: 20138423 NR Description: Putative beta-expansin 2 precursor (At-EXPB2)
  misc_feature (30)..(262): Homolog of NCBI NO: 1076486 NR Description: cim1 protein - soybean
  misc_feature (6)..(198): Homolog of NCBI NO: 21666634 NR Description: beta-expansin [Oryza sativa]
  misc_feature (6)..(265): Homolog of NCBI NO: 38346623 NR Description: OSJNBa0074L08.17 [Oryza sativa (japonica
  misc_feature (1)..(234): Homolog of NCBI NO: 7484871 NR Description: cim1 protein homolog F26K10.130 - Arabidopsis
  misc_feature (3)..(265): Homolog of NCBI NO: 21592834 NR Description: putative beta-expansin/allergen protein
  misc_feature (1)..(265): Homolog of NCBI NO: 18417157 NR Description: beta-expansin, putative (EXPB3) [Arabidopsis
  misc_feature (10)..(265): Homolog of NCBI NO: 11357194 NR Description: beta-expansin [imported] - Arabidopsis thaliana
  misc_feature (3)..(265): Homolog of NCBI NO: 15225423 NR Description: beta-expansin, putative (EXPB1) [Arabidopsis
MQLLPTLCFLFLQLLPRGDASTSHSNRHRSAPHWLPATATWYGSPEGDGSSGGACGYGSLVDVKPFKARVGAVSPLLFKSGEGCGACYKVRCLDKTICSKRAVTIIVTDQSPSGPSARAKHIHFDLSGAAFGHLAIPGHSGIIRNRGLISLLYRRTACKYREKNIAFHVNAGSTAYWLSLLIEYEDGEGDIGSMHIRQAGSKEWIAMKHIWGANWCIVGGPLKGPLSVKLTTLSNNKTLSAADVIPKKWVPKATYTSRLNFSPVL

SEQ ID NO: 55819 - DNA, 1037 bp, Glycine max
  misc_feature (1)..(1037): Ceres Seq. ID no. 13594940
aatttctccttcctctctgcccatacatatctctctctccatcgatctaacctacacacacagagaaagagagagaagcagcagtagcacatgtaacctagctagcctgcggttctccacggcaacgcttcttcttcttggctgccgcctggtgaacctcgccgtagtctgaacggctaggggggcagcgaggcggcggcgccaggggataatcaggaggaatgtcgtcgtcgggccagatcgcgccggcagaacaagtctgctacgtccactgcaacttctgcaacaccgtactcgcggtgagtgtccctgggaacagcatgctcaacattgtgacagtccggtgtgggcactgtacaaacctactttcggtgagcctgagagggcagatgcactcaccagtccctcctgcagcacaggtccaggagagcagcctgagcaagcccaatggcagcaacggcttcattcgcgatcacagcgtctacaatagcccggagtttggttcgtcttcttcttcgtcgtcgtccaaattccggatgccgacgatgatgttctcgtcgcaaaatgatctgctgcaggaacagacgctgcacgcacgtcctccggagaagaggcagcgtgttccttcagcgtacaacagattcatcaaggaagagatacgaaggataaaggcaaacaaccccgacattagccacagggaagccttcagcactgccgcaaagaactgggcacattacccaaacatccatttcggtctaaaccccgagcgcgacggtggcaagaggctcgccgtcgacgatgccgcgccggctgccaagaagatccaaggtttctgttcatagacacgacggttgggagtccaaacaagaacaattgtatctatatatagtattagtatatcgcatatgtgtatacgtaccgcatgtgagtaagtaaagatgcaaaggaaaagagaagaagtcactacgtaccttaccttatacaattgtacgtacatatacggtgatcgagtgaataaataattagtctgtcttttt

SEQ ID NO: 55820 - protein, 206 aa, Glycine max
  peptide (1)..(206): Ceres Seq. ID no. 13594941
  misc_feature (11)..(65): Pfam Name: YABBY protein Pfam Description: YABBY protein
  misc_feature (12)..(176): Homolog of NCBI NO: 8778574 NR Description: F28C11.6 [Arabidopsis thaliana]
  misc_feature (89)..(202): Homolog of NCBI NO: 11280864 NR Description: hypothetical protein 2 [imported] - rice
  misc_feature (11)..(191): Homolog of NCBI NO: 18411242 NR Description: YABBY3 axial regulator -related [Arabidopsis
  misc_feature (10)..(204): Homolog of NCBI NO: 4928751 NR Description: YABBY2 [Arabidopsis thaliana]
  misc_feature (1)..(188): Homolog of NCBI NO: 18406725 NR Description: abnormal floral organs protein (AFO) (FIL) YABBY1
  misc_feature (7)..(206): Homolog of NCBI NO: 27804377 NR Description: MADS-box transcription factor CDM51
  misc_feature (11)..(65): Homolog of NCBI NO: 37535908 NR Description: hypothetical protein [Oryza sativa (japonica
  misc_feature (126)..(191): Homolog of NCBI NO: 37535908 NR Description: hypothetical protein [Oryza sativa (japonica
  misc_feature (8)..(73): Homolog of NCBI NO: 37551421 NR Description: FIL-like protein [Triticum aestivum]
  misc_feature (126)..(191): Homolog of NCBI NO: 37551421 NR Description: FIL-like protein [Triticum aestivum]
MSSSGQIAPAEQVCYVHCNFCNTVLAVSVPGNSMLNIVTVRCGHCTNLLSVSLRGQMHSPVPPAAQVQESSLSKPNGSNGFIRDHSVYNSPEFGSSSSSSSSKFRMPTMMFSSQNDLLQEQTLHARPPEKRQRVPSAYNRFIKEEIRRIKANNPDISHREAFSTAAKNWAHYPNIHFGLNPERDGGKRLAVDDAAPAAKKIQGFCS

SEQ ID NO: 55821 - protein, 173 aa, Glycine max
  peptide (1)..(173): Ceres Seq. ID no. 13594942
  misc_feature (93)..(146): Pfam Name: YABBY protein Pfam Description: YABBY protein
  misc_feature (1)..(143): Homolog of NCBI NO: 8778574 NR Description: F28C11.6 [Arabidopsis thaliana]
  misc_feature (56)..(169): Homolog of NCBI NO: 11280864 NR Description: hypothetical protein 2 [imported] - rice
  misc_feature (1)..(158): Homolog of NCBI NO: 18411242 NR Description: YABBY3 axial regulator -related [Arabidopsis
  misc_feature (1)..(171): Homolog of NCBI NO: 4928751 NR Description: YABBY2 [Arabidopsis thaliana]
  misc_feature (1)..(155): Homolog of NCBI NO: 18406725 NR Description: abnormal floral organs protein (AFO) (FIL) YABBY1
  misc_feature (1)..(173): Homolog of NCBI NO: 27804377 NR Description: MADS-box transcription factor CDM51
  misc_feature (1)..(32): Homolog of NCBI NO: 37535908 NR Description: hypothetical protein [Oryza sativa (japonica
  misc_feature (93)..(158): Homolog of NCBI NO: 37535908 NR Description: hypothetical protein [Oryza sativa (japonica
  misc_feature (1)..(40): Homolog of NCBI NO: 37551421 NR Description: FIL-like protein [Triticum aestivum]
  misc_feature (93)..(158): Homolog of NCBI NO: 37551421 NR Description: FIL-like protein [Triticum aestivum]
MLNIVTVRCGHCTNLLSVSLRGQMHSPVPPAAQVQESSLSKPNGSNGFIRDHSVYNSPEFGSSSSSSSSKFRMPTMMFSSQNDLLQEQTLHARPPEKRQRVPSAYNRFIKEEIRRIKANNPDISHREAFSTAAKNWAHYPNIHFGLNPERDGGKRLAVDDAAPAAKKIQGFCS

SEQ ID NO: 55822 - protein, 150 aa, Glycine max
  peptide (1)..(150): Ceres Seq. ID no. 13594943
  misc_feature (70)..(123): Pfam Name: YABBY protein Pfam Description: YABBY protein
  misc_feature (1)..(120): Homolog of NCBI NO: 18395240 NR Description: F28C11.5 [Arabidopsis thaliana]
  misc_feature (1)..(120): Homolog of NCBI NO: 8778574 NR Description: F28C11.6 [Arabidopsis thaliana]
  misc_feature (33)..(146): Homolog of NCBI NO: 11280864 NR Description: hypothetical protein 2 [imported] - rice
  misc_feature (1)..(135): Homolog of NCBI NO: 18411242 NR Description: YABBY3 axial regulator -related [Arabidopsis
  misc_feature (1)..(148): Homolog of NCBI NO: 4928751 NR Description: YABBY2 [Arabidopsis thaliana]
  misc_feature (1)..(132): Homolog of NCBI NO: 18406725 NR Description: abnormal floral organs protein (AFO) (FIL) YABBY1
  misc_feature (1)..(150): Homolog of NCBI NO: 27804377 NR Description: MADS-box transcription factor CDM51
  misc_feature (70)..(135): Homolog of NCBI NO: 37535908 NR Description: hypothetical protein [Oryza sativa (japonica
  misc_feature (1)..(17): Homolog of NCBI NO: 37551421 NR Description: FIL-like protein [Triticum aestivum]
  misc_feature (70)..(135): Homolog of NCBI NO: 37551421 NR Description: FIL-like protein [Triticum aestivum]
MHSPVPPAAQVQESSLSKPNGSNGFIRDHSVYNSPEFGSSSSSSSSKFRMPTMMFSSQNDLLQEQTLHARPPEKRQRVPSAYNRFIKEEIRRIKANNPDISHREAFSTAAKNWAHYPNIHFGLNPERDGGKRLAVDDAAPAAKKIQGFCS

SEQ ID NO: 55823 - DNA, 1181 bp, Glycine max
  misc_feature (1)..(1181): Ceres Seq. ID no. 12610002
aaagtaaaagtcttatagatctctacagatcccaccactgaaaggaccattttgattcttccatcaaatttctctcgacgtccggcggattttgaggaagtggagagcaaaagcttgattttagcaactatggagagcttctggcaactgggtgatgagctccgaggtcagtcaagagcatcagaggatcacaagtggtccactgttgctacaaagttagctgagcagactaggatgaaaggggagaggacgaacaaccttgatctctccaaaagctactctgagttcagaccaagcgacaagtttagtttccaggagaacaacaacctcaacttcaacatgaatctgatgcagggcaatgtttacaacaacatgaatggatttaaaagtggaggcaacatgaaagttaacaagtacattggcaatgttgttgctaacaaagagatgagcaatgatagtgttgttgacaagaggtttaaaacgctgcctgcatcagagacgcttccgaggaatgaagttcttggcgggtacatctttgtttgcaacaatgataccatgcaggacgacttgaaacgtcacctatttggtttacctccgagatatagggactctgtaagggctataacacctgggttgcctctgtttctttacaattacactactcaccagttgcatggtatcttcgaggcaacaacttttggaggtactaacattgatgccactgcttgggaagacaaaaagtgcaaaggagagtctagatttccagctcaggtaaggatcagagtgaggaaaatatgcaaagccttggaagaggattctttcaggcctgttcttcaccattatgatggtccaaagttccgccttgagctcactgttcccgagacattggatctgctagatctctgtgaacaagctggctctccataagccggggatcaacctttgcaataccacgttgctaagtttgtctgaaacggcgaaacctatctaaatatatatatgcatattaccataagagcgtaagcttttggggtttagttaagagtctagttcaaatgtatggtttactaagaagcgactattctcagttcttgttgtgtctagtgtgtgagtttgtctgtgtctgtaagagtcttgataacccttttgagacgatgatttatgtagagagaaagtaaaag

SEQ ID NO: 55824 - protein, 265 aa, Glycine max
  peptide (1)..(265): Ceres Seq. ID no. 12610003
  misc_feature (1)..(104): Homolog of NCBI NO: 15232081 NR Description: gda-1, putative
  misc_feature (1)..(129): Homolog of NCBI NO: 21592623 NR Description: gda-1, putative [Arabidopsis thaliana]
  misc_feature (48)..(252): Homolog of NCBI NO: 34913876 NR Description: B1156H12.22 [Oryza sativa (japonica
  misc_feature (69)..(258): Homolog of NCBI NO: 18422167 NR Description: putative protein
  misc_feature (69)..(258): Homolog of NCBI NO: 9757950 NR Description: gene_id:MJC20.15~similar to unknown
  misc_feature (62)..(261): Homolog of NCBI NO: 584825 NR Description: B2 PROTEIN
  misc_feature (69)..(264): Homolog of NCBI NO: 2369766 NR Description: hypothetical protein [Citrus x paradisi]
  misc_feature (70)..(264): Homolog of NCBI NO: 21665866 NR Description: GDA2 protein [Pisum sativum]
  misc_feature (42)..(264): Homolog of NCBI NO: 21592623 NR Description: gda-1, putative [Arabidopsis thaliana]
  misc_feature (42)..(264): Homolog of NCBI NO: 15232081 NR Description: gda-1, putative
MESFWQLGDELRGQSRASEDHKWSTVATKLAEQTRMKGERTNNLDLSKSYSEFRPSDKFSFQENNNLNFNMNLMQGNVYNNMNGFKSGGNMKVNKYIGNVVANKEMSNDSVVDKRFKTLPASETLPRNEVLGGYIFVCNNDTMQDDLKRHLFGLPPRYRDSVRAITPGLPLFLYNYTTHQLHGIFEATTFGGTNIDATAWEDKKCKGESRFPAQVRIRVRKICKALEEDSFRPVLHHYDGPKFRLELTVPETLDLLDLCEQAGSP

SEQ ID NO: 55825 - protein, 230 aa, Glycine max
  peptide (1)..(230): Ceres Seq. ID no. 12610004
  misc_feature (1)..(69): Homolog of NCBI NO: 15232081 NR Description: gda-1, putative
  misc_feature (1)..(94): Homolog of NCBI NO: 21592623 NR Description: gda-1, putative [Arabidopsis thaliana]
  misc_feature (13)..(217): Homolog of NCBI NO: 34913876 NR Description: B1156H12.22 [Oryza sativa (japonica
  misc_feature (34)..(223): Homolog of NCBI NO: 18422167 NR Description: putative protein
  misc_feature (34)..(223): Homolog of NCBI NO: 9757950 NR Description: gene_id:MJC20.15~similar to unknown
  misc_feature (27)..(226): Homolog of NCBI NO: 584825 NR Description: B2 PROTEIN
  misc_feature (34)..(229): Homolog of NCBI NO: 2369766 NR Description: hypothetical protein [Citrus x paradisi]
  misc_feature (35)..(229): Homolog of NCBI NO: 21665866 NR Description: GDA2 protein [Pisum sativum]
  misc_feature (7)..(229): Homolog of NCBI NO: 21592623 NR Description: gda-1, putative [Arabidopsis thaliana]
  misc_feature (7)..(229): Homolog of NCBI NO: 15232081 NR Description: gda-1, putative
MKGERTNNLDLSKSYSEFRPSDKFSFQENNNLNFNMNLMQGNVYNNMNGFKSGGNMKVNKYIGNVVANKEMSNDSVVDKRFKTLPASETLPRNEVLGGYIFVCNNDTMQDDLKRHLFGLPPRYRDSVRAITPGLPLFLYNYTTHQLHGIFEATTFGGTNIDATAWEDKKCKGESRFPAQVRIRVRKICKALEEDSFRPVLHHYDGPKFRLELTVPETLDLLDLCEQAGSP

SEQ ID NO: 55826 - protein, 195 aa, Glycine max
  peptide (1)..(195): Ceres Seq. ID no. 12610005
  misc_feature (1)..(34): Homolog of NCBI NO: 15232081 NR Description: gda-1, putative
  misc_feature (1)..(59): Homolog of NCBI NO: 21592623 NR Description: gda-1, putative [Arabidopsis thaliana]
  misc_feature (1)..(182): Homolog of NCBI NO: 34913876 NR Description: B1156H12.22 [Oryza sativa (japonica
  misc_feature (1)..(188): Homolog of NCBI NO: 18422167 NR Description: putative protein
  misc_feature (1)..(188): Homolog of NCBI NO: 9757950 NR Description: gene_id:MJC20.15~similar to unknown
  misc_feature (1)..(191): Homolog of NCBI NO: 584825 NR Description: B2 PROTEIN
  misc_feature (1)..(194): Homolog of NCBI NO: 2369766 NR Description: hypothetical protein [Citrus x paradisi]
  misc_feature (1)..(194): Homolog of NCBI NO: 21665866 NR Description: GDA2 protein [Pisum sativum]
  misc_feature (1)..(194): Homolog of NCBI NO: 21592623 NR Description: gda-1, putative [Arabidopsis thaliana]
  misc_feature (1)..(194): Homolog of NCBI NO: 15232081 NR Description: gda-1, putative
MNLMQGNVYNNMNGFKSGGNMKVNKYIGNVVANKEMSNDSVVDKRFKTLPASETLPRNEVLGGYIFVCNNDTMQDDLKRHLFGLPPRYRDSVRAITPGLPLFLYNYTTHQLHGIFEATTFGGTNIDATAWEDKKCKGESRFPAQVRIRVRKICKALEEDSFRPVLHHYDGPKFRLELTVPETLDLLDLCEQAGSP

SEQ ID NO: 55827 - DNA, 981 bp, Glycine max
  misc_feature (1)..(981): Ceres Seq. ID no. 12610286
aaaaaatcaaaaatctcagccatggcgattgcttcaacctccactcttatcttctcctgcgccaaacccgatctccggccatttccgtcccattttcgttcttcttctccgtctccctctcctcttgtgagtcagctccgtatccctagcctaacccatgacccgatttctctgtcgggtcttatcggaaccggtttggtggctgcgacgttcatggcggcaggaccaggtagtactgctatggcggcggttgattctcttcagctaagcgaaccggcgaatgcgttgtctttacccacttgggctgttcatgtttccagcgttgtcgaatggattacggcgatggtgttggtatggaaatatggagaaagagagggttacgagtcatggaaaggtctctcatggggaatggtgcctttgcttggtggagctctttgcgcatgcacatggcatttcttttacaatgctgaatctcttgaggtgttggtagcgcttcagggagcactaactgtgattggtaatattactctgtgcattgctgcctttcgaatcaacaagtctgcatccaaaatggaaacctctgaagagccgtgagggctaaatacacatctatgtgtttaaaataaaggtcaaaggaatgatttgttttcagtaatttctacaggcaggaatctgaggtgtagcctttttggagagtggtgatggttagagaagcaactggatctttggatgtggtattagcggaaagatctttttgctttatatctctagtgattgcactaaacatgtttcttgagcgtgtgtgtgtatatacttttatattgtagtgtattgtattgtattatcctgattatattcctggtgagtgaggccagtgcttcatgttcataacctattatgtaaacattcttcttctgcaatcgttgtagtcctgacttcattattttcggtcttaggcttggatgatcacagagttcatgc

SEQ ID NO: 55828 - protein, 197 aa, Glycine max
  peptide (1)..(197): Ceres Seq. ID no. 12610287
  misc_feature (94)..(194): Homolog of NCBI NO: 33865822 NR Description: conserved hypothetical protein [Synechococcus sp.
  misc_feature (96)..(192): Homolog of NCBI NO: 33861461 NR Description: conserved hypothetical protein
  misc_feature (94)..(181): Homolog of NCBI NO: 22298980 NR Description: ORF_ID:tlr1437~hypothetical protein
  misc_feature (94)..(192): Homolog of NCBI NO: 23041345 NR Description: hypothetical protein [Trichodesmium erythraeum
  misc_feature (95)..(190): Homolog of NCBI NO: 37521445 NR Description: hypothetical protein glr1876 [Gloeobacter
  misc_feature (94)..(195): Homolog of NCBI NO: 17232000 NR Description: hypothetical protein [Nostoc sp. PCC 7120]
  misc_feature (94)..(190): Homolog of NCBI NO: 16331563 NR Description: hypothetical protein [Synechocystis sp. PCC 6803]
  misc_feature (8)..(114): Homolog of NCBI NO: 7486889 NR Description: hypothetical protein T12H17.220 - Arabidopsis
  misc_feature (32)..(190): Homolog of NCBI NO: 32489057 NR Description: OSJNBb0089B03.1 [Oryza sativa (japonica
  misc_feature (8)..(197): Homolog of NCBI NO: 30685952 NR Description: expressed protein [Arabidopsis thaliana]
KKSKISAMAIASTSTLIFSCAKPDLRPFPSHFRSSSPSPSPLVSQLRIPSLTHDPISLSGLIGTGLVAATFMAAGPGSTAMAAVDSLQLSEPANALSLPTWAVHVSSVVEWITAMVLVWKYGEREGYESWKGLSWGMVPLLGGALCACTWHFFYNAESLEVLVALQGALTVIGNITLCIAAFRINKSASKMETSEEP

SEQ ID NO: 55829 - protein, 190 aa, Glycine max
  peptide (1)..(190): Ceres Seq. ID no. 12610288
  misc_feature (87)..(187): Homolog of NCBI NO: 33865822 NR Description: conserved hypothetical protein [Synechococcus sp.
  misc_feature (89)..(185): Homolog of NCBI NO: 33861461 NR Description: conserved hypothetical protein
  misc_feature (87)..(174): Homolog of NCBI NO: 22298980 NR Description: ORF_ID:tlr1437~hypothetical protein
  misc_feature (87)..(185): Homolog of NCBI NO: 23041345 NR Description: hypothetical protein [Trichodesmium erythraeum
  misc_feature (88)..(183): Homolog of NCBI NO: 37521445 NR Description: hypothetical protein glr1876 [Gloeobacter
  misc_feature (87)..(188): Homolog of NCBI NO: 17232000 NR Description: hypothetical protein [Nostoc sp. PCC 7120]
  misc_feature (87)..(183): Homolog of NCBI NO: 16331563 NR Description: hypothetical protein [Synechocystis sp. PCC 6803]
  misc_feature (1)..(107): Homolog of NCBI NO: 7486889 NR Description: hypothetical protein T12H17.220 - Arabidopsis
  misc_feature (25)..(183): Homolog of NCBI NO: 32489057 NR Description: OSJNBb0089B03.1 [Oryza sativa (japonica
  misc_feature (1)..(190): Homolog of NCBI NO: 30685952 NR Description: expressed protein [Arabidopsis thaliana]
MAIASTSTLIFSCAKPDLRPFPSHFRSSSPSPSPLVSQLRIPSLTHDPISLSGLIGTGLVAATFMAAGPGSTAMAAVDSLQLSEPANALSLPTWAVHVSSVVEWITAMVLVWKYGEREGYESWKGLSWGMVPLLGGALCACTWHFFYNAESLEVLVALQGALTVIGNITLCIAAFRINKSASKMETSEEP

SEQ ID NO: 55830 - protein, 126 aa, Glycine max
  peptide (1)..(126): Ceres Seq. ID no. 12610289
  misc_feature (23)..(123): Homolog of NCBI NO: 33865822 NR Description: conserved hypothetical protein [Synechococcus sp.
  misc_feature (25)..(121): Homolog of NCBI NO: 33861461 NR Description: conserved hypothetical protein
  misc_feature (23)..(110): Homolog of NCBI NO: 22298980 NR Description: ORF_ID:tlr1437~hypothetical protein
  misc_feature (23)..(121): Homolog of NCBI NO: 23041345 NR Description: hypothetical protein [Trichodesmium erythraeum
  misc_feature (24)..(119): Homolog of NCBI NO: 37521445 NR Description: hypothetical protein glr1876 [Gloeobacter
  misc_feature (23)..(124): Homolog of NCBI NO: 17232000 NR Description: hypothetical protein [Nostoc sp. PCC 7120]
  misc_feature (23)..(119): Homolog of NCBI NO: 16331563 NR Description: hypothetical protein [Synechocystis sp. PCC 6803]
  misc_feature (1)..(43): Homolog of NCBI NO: 7486889 NR Description: hypothetical protein T12H17.220 - Arabidopsis
  misc_feature (1)..(119): Homolog of NCBI NO: 32489057 NR Description: OSJNBb0089B03.1 [Oryza sativa (japonica
  misc_feature (1)..(126): Homolog of NCBI NO: 30685952 NR Description: expressed protein [Arabidopsis thaliana]
MAAGPGSTAMAAVDSLQLSEPANALSLPTWAVHVSSVVEWITAMVLVWKYGEREGYESWKGLSWGMVPLLGGALCACTWHFFYNAESLEVLVALQGALTVIGNITLCIAAFRINKSASKMETSEEP

SEQ ID NO: 55831 - DNA, 870 bp, Glycine max
  misc_feature (1)..(870): Ceres Seq. ID no. 13638889
atcatcgataaaagcaaagaaacaagattcgaaaaagttagcgttaaacaatctccacttctctctcccacaagaaaatcaccaagaaaccgttaatcatctatggcgaacatgaacactcttcaacagatgatcttccctgacgagaacgctccgattcatcgcaaaaagagtgttactgctgcttctcttaagaccaaaggaactgtacttggtcagaagaaacctggaggggctcgtaaggctctgaatgatatcacaaacaagtctggtgttcttcccaaagcttcttctaagaacaagcaactcgcgtctgctgcaaagggagaaatcaacatagctggagagatgttcttgcatgatcacagcaagtgcatcaaagagcagcagagtctctgggatgatcacttctctgctgacattctactccaccatgattcgtccagcgtcaagggaaagaatctcaagtatgacaaagaagtgatggatggtaagaacaatctgacttgtgaggaaccagaagagattccatctcccaagctgactgattggctcaagagctcaaccccctggcgctctccaatacgtcatggctctatgatgatgccttccacacctctggcttggcggtttgattcagacgaattcactctcaaggaagactttgacgacctcttctgaatgtctgtttcttaagtgtctaagcttttcatccttcggatgaagtagtagtagtagtaatagcaagcaactttctttcgtttcagctcatcaatgcttcagttctttatgtacttaacaactctgtgtccgtccatcactctctttaactgatttcatgaattaaaaaagttggaatcttttcaagcg

SEQ ID NO: 55832 - protein, 192 aa, Glycine max
  peptide (1)..(192): Ceres Seq. ID no. 13638890
  misc_feature (1)..(189): Homolog of NCBI NO: 18416846 NR Description: hypothetical protein [Arabidopsis thaliana]
  misc_feature (1)..(192): Homolog of NCBI NO: 21536825 NR Description: unknown [Arabidopsis thaliana]
  misc_feature (1)..(192): Homolog of NCBI NO: 27808526 NR Description: At3g14190 [Arabidopsis thaliana]
  misc_feature (1)..(192): Homolog of NCBI NO: 18400304 NR Description: expressed protein [Arabidopsis thaliana]
MANMNTLQQMIFPDENAPIHRKKSVTAASLKTKGTVLGQKKPGGARKALNDITNKSGVLPKASSKNKQLASAAKGEINIAGEMFLHDHSKCIKEQQSLWDDHFSADILLHHDSSSVKGKNLKYDKEVMDGKNNLTCEEPEEIPSPKLTDWLKSSTPWRSPIRHGSMMMPSTPLAWRFDSDEFTLKEDFDDLF

SEQ ID NO: 55833 - protein, 189 aa, Glycine max
  peptide (1)..(189): Ceres Seq. ID no. 13638891
  misc_feature (1)..(186): Homolog of NCBI NO: 18416846 NR Description: hypothetical protein [Arabidopsis thaliana]
  misc_feature (1)..(189): Homolog of NCBI NO: 21536825 NR Description: unknown [Arabidopsis thaliana]
  misc_feature (1)..(189): Homolog of NCBI NO: 27808526 NR Description: At3g14190 [Arabidopsis thaliana]
  misc_feature (1)..(189): Homolog of NCBI NO: 18400304 NR Description: expressed protein [Arabidopsis thaliana]
MNTLQQMIFPDENAPIHRKKSVTAASLKTKGTVLGQKKPGGARKALNDITNKSGVLPKASSKNKQLASAAKGEINIAGEMFLHDHSKCIKEQQSLWDDHFSADILLHHDSSSVKGKNLKYDKEVMDGKNNLTCEEPEEIPSPKLTDWLKSSTPWRSPIRHGSMMMPSTPLAWRFDSDEFTLKEDFDDLF

SEQ ID NO: 55834 - protein, 183 aa, Glycine max
  peptide (1)..(183): Ceres Seq. ID no. 13638892
  misc_feature (1)..(180): Homolog of NCBI NO: 18416846 NR Description: hypothetical protein [Arabidopsis thaliana]
  misc_feature (1)..(183): Homolog of NCBI NO: 21536825 NR Description: unknown [Arabidopsis thaliana]
  misc_feature (1)..(183): Homolog of NCBI NO: 27808526 NR Description: At3g14190 [Arabidopsis thaliana]
  misc_feature (1)..(183): Homolog of NCBI NO: 18400304 NR Description: expressed protein [Arabidopsis thaliana]
MIFPDENAPIHRKKSVTAASLKTKGTVLGQKKPGGARKALNDITNKSGVLPKASSKNKQLASAAKGEINIAGEMFLHDHSKCIKEQQSLWDDHFSADILLHHDSSSVKGKNLKYDKEVMDGKNNLTCEEPEEIPSPKLTDWLKSSTPWRSPIRHGSMMMPSTPLAWRFDSDEFTLKEDFDDLF

SEQ ID NO: 55835 - DNA, 766 bp, Glycine max
  misc_feature (1)..(766): Ceres Seq. ID no. 13638893
actcttcaaagtctccgccagacacttctccatcaaaactcctctcacacaatggccacttccttccctaccttgacaccttttcttttcatcctccttctctccatcccctccgttcttgaagcagctcatcaccacacggcggcgccggctccggctgtagactgttcgatgctcatactcaacatggctgattgtttgtcctttgtttccgctggaggcacggaggccaagccggctagttcgtgttgcaacggccttaagacggtgctcaagactgacgcagagtgtctatgtgaggcgtttaaaagcagtgcttctctaggagttactttgaacatgactaaagcagctacacttcccgctgcatgcaagcttcacgctccttctatggctgcttgtggattgtccgccgctcctactatggctccaggtcttgctccaggaggagctgctggacccgacttaagttttctatctccaaacccatctccagggaaccgcggatcttccttgcttcccttctccttcaccaccgtactcggtgctatgtccttcgtattgttattcttgtctcgtgtctgaagaagccagctagatttggttgtatgaaatggctttgggtttgggttttcgtgactttagttttgcgtgtcttttgagtctacttctgttttagaccatgtcggtttctgttcgtagtttatttaatcttaattacgtttcacattggtccttttatctaagaacatctctgatccctcgt

SEQ ID NO: 55836 - protein, 194 aa, Glycine max
  peptide (1)..(194): Ceres Seq. ID no. 13638894
  misc_feature (56)..(134): Pfam Name: Protease inhibitor/seed storage/LTP family Pfam Description: Protease inhibitor/seed storage/LTP family
  misc_feature (47)..(161): Homolog of NCBI NO: 15220327 NR Description: protease inhibitor/seed storage/lipid transfer
  misc_feature (49)..(171): Homolog of NCBI NO: 30680828 NR Description: protease inhibitor/seed storage/lipid transfer
  misc_feature (22)..(149): Homolog of NCBI NO: 18415958 NR Description: lipid transfer protein family [Arabidopsis
  misc_feature (49)..(192): Homolog of NCBI NO: 7487610 NR Description: hypothetical protein T3F12.2 - Arabidopsis
  misc_feature (22)..(186): Homolog of NCBI NO: 30682659 NR Description: lipid transfer protein family [Arabidopsis
  misc_feature (31)..(181): Homolog of NCBI NO: 27765012 NR Description: At2g13820 [Arabidopsis thaliana]
  misc_feature (31)..(181): Homolog of NCBI NO: 15225509 NR Description: protease inhibitor/seed storage/lipid transfer
  misc_feature (18)..(192): Homolog of NCBI NO: 10176956 NR Description: contains similarity to nonspecific lipid-transfer
  misc_feature (18)..(192): Homolog of NCBI NO: 18424785 NR Description: protease inhibitor/seed storage/lipid transfer
  misc_feature (18)..(192): Homolog of NCBI NO: 21618136 NR Description: nonspecific lipid-transfer protein-like protein
TLQSLRQTLLHQNSSHTMATSFPTLTPFLFILLLSIPSVLEAAHHHTAAPAPAVDCSMLILNMADCLSFVSAGGTEAKPASSCCNGLKTVLKTDAECLCEAFKSSASLGVTLNMTKAATLPAACKLHAPSMAACGLSAAPTMAPGLAPGGAAGPDLSFLSPNPSPGNRGSSLLPFSFTTVLGAMSFVLLFLSRV

SEQ ID NO: 55837 - protein, 177 aa, Glycine max
  peptide (1)..(177): Ceres Seq. ID no. 13638895
  misc_feature (39)..(117): Pfam Name: Protease inhibitor/seed storage/LTP family Pfam Description: Protease inhibitor/seed storage/LTP family
  misc_feature (30)..(144): Homolog of NCBI NO: 15220327 NR Description: protease inhibitor/seed storage/lipid transfer
  misc_feature (32)..(154): Homolog of NCBI NO: 30680828 NR Description: protease inhibitor/seed storage/lipid transfer
  misc_feature (5)..(132): Homolog of NCBI NO: 18415958 NR Description: lipid transfer protein family [Arabidopsis
  misc_feature (32)..(175): Homolog of NCBI NO: 7487610 NR Description: hypothetical protein T3F12.2 - Arabidopsis
  misc_feature (5)..(169): Homolog of NCBI NO: 30682659 NR Description: lipid transfer protein family [Arabidopsis
  misc_feature (14)..(164): Homolog of NCBI NO: 27765012 NR Description: At2g13820 [Arabidopsis thaliana]
  misc_feature (14)..(164): Homolog of NCBI NO: 15225509 NR Description: protease inhibitor/seed storage/lipid transfer
  misc_feature (1)..(175): Homolog of NCBI NO: 10176956 NR Description: contains similarity to nonspecific lipid-transfer
  misc_feature (1)..(175): Homolog of NCBI NO: 18424785 NR Description: protease inhibitor/seed storage/lipid transfer
  misc_feature (1)..(175): Homolog of NCBI NO: 21618136 NR Description: nonspecific lipid-transfer protein-like protein
MATSFPTLTPFLFILLLSIPSVLEAAHHHTAAPAPAVDCSMLILNMADCLSFVSAGGTEAKPASSCCNGLKTVLKTDAECLCEAFKSSASLGVTLNMTKAATLPAACKLHAPSMAACGLSAAPTMAPGLAPGGAAGPDLSFLSPNPSPGNRGSSLLPFSFTTVLGAMSFVLLFLSRV

SEQ ID NO: 55838 - protein, 137 aa, Glycine max
  peptide (1)..(137): Ceres Seq. ID no. 13638896
  misc_feature (1)..(77): Pfam Name: Protease inhibitor/seed storage/LTP family Pfam Description: Protease inhibitor/seed storage/LTP family
  misc_feature (1)..(104): Homolog of NCBI NO: 15220327 NR Description: protease inhibitor/seed storage/lipid transfer
  misc_feature (1)..(114): Homolog of NCBI NO: 30680828 NR Description: protease inhibitor/seed storage/lipid transfer
  misc_feature (1)..(92): Homolog of NCBI NO: 18415958 NR Description: lipid transfer protein family [Arabidopsis
  misc_feature (1)..(135): Homolog of NCBI NO: 7487610 NR Description: hypothetical protein T3F12.2 - Arabidopsis
  misc_feature (1)..(129): Homolog of NCBI NO: 30682659 NR Description: lipid transfer protein family [Arabidopsis
  misc_feature (1)..(124): Homolog of NCBI NO: 27765012 NR Description: At2g13820 [Arabidopsis thaliana]
  misc_feature (1)..(124): Homolog of NCBI NO: 15225509 NR Description: protease inhibitor/seed storage/lipid transfer
  misc_feature (1)..(135): Homolog of NCBI NO: 10176956 NR Description: contains similarity to nonspecific lipid-transfer
  misc_feature (1)..(135): Homolog of NCBI NO: 18424785 NR Description: protease inhibitor/seed storage/lipid transfer
  misc_feature (1)..(135): Homolog of NCBI NO: 21618136 NR Description: nonspecific lipid-transfer protein-like protein
MLILNMADCLSFVSAGGTEAKPASSCCNGLKTVLKTDAECLCEAFKSSASLGVTLNMTKAATLPAACKLHAPSMAACGLSAAPTMAPGLAPGGAAGPDLSFLSPNPSPGNRGSSLLPFSFTTVLGAMSFVLLFLSRV

SEQ ID NO: 55839 - DNA, 957 bp, Glycine max
  misc_feature (1)..(957): Ceres Seq. ID no. 13638897
agacacgcgaaagcaaacacacagggagcgaagaagaaacccagctaggggcgtctggtgcattggcgcaggagaccaatggcgggcctcgggtttgaggagaccaagctccggctcggcctgccaggcggcagcaacgaggccgaggaggcggccgccgcggtgaggagctccggcaagaggggctacgccgagaccatcgacctcgtgctgaagctggagccagcgtcggcggccgcgccgccgtccgaggacgacgaggaagtggccgatggtgtcgcggaggcgcagccctctccggctgctgccgacgggcagttgaagcggtcgccgagccagtgcagcgtggtcaccgccgcgcagccggacgcgggaccccgagaagccgcgcgcgcccaaggcgcaggcggtggggtggccgccggtgcggtcgttccggaggaacatgctggcggcgacggcggagagagggggggcggcgctggtgaaggtgagcatggacggcgcgccctacctgcgcaaggtggacatgggcacctacaagagctaccaggagctgtccaaggccctggagaagatgttcagctccttcaccatcggcaacgactgctcgcaggctcaggggatgacgggcatgaacgagagcaagctggtggacctgctcaacggctccgactatgtgcccacctacgaggacaaggacggcgactggatgctcgtcggcgacgtcccctgggagatgttcgtcgcgtcctgcaagcgcctccggataatgaaaggatcagaagccatcggcctggcaccaagggcaatggagaaatgcaagagcaggagctgaccgtttgctaccaattcaagattatggctctgcttgcccaactatgtaccatactatactgcgtactcctacttcctatgttttatcttgttgttatatatgtgtagtatgtatacgtg

SEQ ID NO: 55840 - protein, 288 aa, Glycine max
  peptide (1)..(288): Ceres Seq. ID no. 13638898
  misc_feature (4)..(91): Pfam Name: AUX/IAA family Pfam Description: AUX/IAA family
  misc_feature (1)..(103): Homolog of NCBI NO: 40539038 NR Description: putative auxin-responsive protein (with
  misc_feature (2)..(91): Homolog of NCBI NO: 20269059 NR Description: aux/IAA protein [Populus tremula x Populus
  misc_feature (4)..(91): Homolog of NCBI NO: 20385508 NR Description: auxin-regulated protein [Populus tremula x
MAGLGFEETKLRLGLPGGSNEAEEAAAAVRSSGKRGYAETIDLVLKLEPASAAAPPSEDDEEVADGVAEAQPSPAAADGQLKRSPSQCSVVTAAQPDAGPREAARAQGAGGGVAAGAVVPEEHAGGDGGERGGGAGEGEHGRRALPAQGGHGHLQELPGAVQGPGEDVQLLHHRQRLLAGSGDDGHEREQAGGPAQRLRLCAHLRGQGRRLDARRRRPLGDVRRVLQAPPDNERIRSHRPGTKGNGEMQEQELTVCYQFKIMALLAQLCTILYCVLLLPMFYLVVIYV

SEQ ID NO: 55841 - DNA, 844 bp, Glycine max
  misc_feature (1)..(844): Ceres Seq. ID no. 12610046
atttttcttttcaaaacgctttacctctcagttctcttcgtccctggacattcttccggtcaccatcggagccggcgaccggtggcgaccgcgcggggacgccgttccctctcataactgtcgcacgccgggacgccgagcgatctcctacccccacccccatcccagtctaccacagcgacaccgtgtgagatccgtgcttcatcggtaggctcagttggtgccttggtggactagtgaactgaaactgtattaatatcttcaggctctggtgcaatggcctacgagatcagtgagatcaaaaaaattggcataggtctggtgggctttggcatcctgttctcgttcctaggtgttatccttttctttgacaggggtttgttggctctgggtaatattttcttcttgactggagtaggccttcttctcggttggcaatctatgtggcagctatttacaaagaaggcaaacattaagggatctgtacctttcttccttggtctctttcttctatttgtcagatggcctgttgctggtataatcctggaactgtatggatcttttgtcctcttcagtggttacgggcctcctatccaagccttcctatatcagattccaatcattggatggattctgcaatacccctttcagctatttggtctgaggcgtaagcgtgcttgacaattatggtggcagaaattcatgataattcatggggaaatagcatattgcccaatgttaaattgtcagtagaaaattattgtagccttcatcttttgtaactaagctctttaacactgcatctgcatgacatgggctttctaaccttggttgtgatgactcc

SEQ ID NO: 55842 - protein, 134 aa, Glycine max
  peptide (1)..(134): Ceres Seq. ID no. 12610047
  misc_feature (29)..(126): Pfam Name: Got1-like family Pfam Description: Got1-like family
  misc_feature (5)..(123): Homolog of NCBI NO: 7705636 NR Description: CGI-141 protein [Homo sapiens]
  misc_feature (1)..(123): Homolog of NCBI NO: 26384022 NR Description: unnamed protein product [Mus musculus]
  misc_feature (3)..(123): Homolog of NCBI NO: 31207271 NR Description: ENSANGP00000015000 [Anopheles gambiae]
  misc_feature (4)..(124): Homolog of NCBI NO: 24642432 NR Description: CG32576-PA [Drosophila melanogaster]
  misc_feature (4)..(124): Homolog of NCBI NO: 17945675 NR Description: RE29988p [Drosophila melanogaster]
  misc_feature (10)..(123): Homolog of NCBI NO: 33146513 NR Description: NFkB activating protein-like
  misc_feature (4)..(124): Homolog of NCBI NO: 30678779 NR Description: expressed protein [Arabidopsis thaliana]
  misc_feature (1)..(124): Homolog of NCBI NO: 15229139 NR Description: putative protein
  misc_feature (1)..(124): Homolog of NCBI NO: 12324443 NR Description: unknown protein; 50647-51606 [Arabidopsis
  misc_feature (1)..(126): Homolog of NCBI NO: 22329359 NR Description: unknown protein; protein id: At1g05785.1
MAYEISEIKKIGIGLVGFGILFSFLGVILFFDRGLLALGNIFFLTGVGLLLGWQSMWQLFTKKANIKGSVPFFLGLFLLFVRWPVAGIILELYGSFVLFSGYGPPIQAFLYQIPIIGWILQYPFQLFGLRRKRA

SEQ ID NO: 55843 - protein, 79 aa, Glycine max
  peptide (1)..(79): Ceres Seq. ID no. 12610048
  misc_feature (1)..(71): Pfam Name: Got1-like family Pfam Description: Got1-like family
  misc_feature (1)..(68): Homolog of NCBI NO: 7705636 NR Description: CGI-141 protein [Homo sapiens]
  misc_feature (1)..(68): Homolog of NCBI NO: 26384022 NR Description: unnamed protein product [Mus musculus]
  misc_feature (1)..(68): Homolog of NCBI NO: 31207271 NR Description: ENSANGP00000015000 [Anopheles gambiae]
  misc_feature (1)..(69): Homolog of NCBI NO: 24642432 NR Description: CG32576-PA [Drosophila melanogaster]
  misc_feature (1)..(69): Homolog of NCBI NO: 17945675 NR Description: RE29988p [Drosophila melanogaster]
  misc_feature (1)..(68): Homolog of NCBI NO: 33146513 NR Description: NFkB activating protein-like
  misc_feature (1)..(69): Homolog of NCBI NO: 30678779 NR Description: expressed protein [Arabidopsis thaliana]
  misc_feature (1)..(69): Homolog of NCBI NO: 15229139 NR Description: putative protein
  misc_feature (1)..(69): Homolog of NCBI NO: 12324443 NR Description: unknown protein; 50647-51606 [Arabidopsis
  misc_feature (1)..(71): Homolog of NCBI NO: 22329359 NR Description: unknown protein; protein id: At1g05785.1
MWQLFTKKANIKGSVPFFLGLFLLFVRWPVAGIILELYGSFVLFSGYGPPIQAFLYQIPIIGWILQYPFQLFGLRRKRA

SEQ ID NO: 55844 - protein, 69 aa, Glycine max
  peptide (1)..(69): Ceres Seq. ID no. 12610049
FFFSKRFTSQFSSSLDILPVTIGAGDRWRPRGDAVPSHNCRTPGRRAISYPHPHPSLPQRHRVRSVLHR

SEQ ID NO: 55845 - DNA, 797 bp, Glycine max
  misc_feature (1)..(797): Ceres Seq. ID no. 13595847
acattttctttacactgaaccatcacttagagagtgcgcttcacacaagaaacaaaacaaaatggctaggcgatttgccattgttgcgatctgcatcgtcctcatcgccggcgtcggaggtcaagctccgtcgtcaccaccaaccaccacaccagcaccacccaccacaacaacccccccgccagcagccactcctcctcctgtctcagctcctccaccagtcacaacttctcctcctccagccaccaccgctcctcctcctgctactcctcctccagttgcttctcctcctccggccactcctcctccagtggcaactcctcctccagcaactccccctcccgtcgcttctcctccaccagcaactcctccacccgtcgcatctcctcctccagcaactcctcctccagctcctcttgcatctcctcccgctcaggttccagctcttgctcctacgacgccagaagctccctctacatctccgtcgtctagcccgcctctcccggcgactgatggccctggaccgagcgtcgaagggccaggaccttccacagattcgaatgaccagaatggagcaagcaagacagtttcaagcttggtacttggatctgttctcgtttggtttatgatctaagcgtgggagcctttcgctcggtgttccttgcatttgttttcatgttgatgtttgtttgttccattgttattactttcggaaccgtattcttttggattattatcttttggagaggatattattgaggagttgagatggagatatcaggatatatttcgtttgg

SEQ ID NO: 55846 - protein, 210 aa, Glycine max
  peptide (1)..(210): Ceres Seq. ID no. 13595848
  misc_feature (42)..(184): Pfam Name: Formin Homology 2 Domain Pfam Description: Formin Homology 2 Domain
  misc_feature (42)..(186): Homolog of NCBI NO: 5917664 NR Description: extensin-like protein [Lycopersicon esculentum]
  misc_feature (26)..(202): Homolog of NCBI NO: 5139695 NR Description: expressed in cucumber hypocotyls [Cucumis
  misc_feature (27)..(176): Homolog of NCBI NO: 1084362 NR Description: extensin-like protein S3 - alfalfa
  misc_feature (43)..(204): Homolog of NCBI NO: 1084362 NR Description: extensin-like protein S3 - alfalfa
  misc_feature (25)..(210): Homolog of NCBI NO: 7441829 NR Description: proline-rich cell wall protein - upland cotton
  misc_feature (25)..(210): Homolog of NCBI NO: 7441828 NR Description: extensin-like cell wall protein - sea-island
  misc_feature (44)..(210): Homolog of NCBI NO: 7441829 NR Description: proline-rich cell wall protein - upland cotton
  misc_feature (44)..(210): Homolog of NCBI NO: 7441828 NR Description: extensin-like cell wall protein - sea-island
  misc_feature (21)..(210): Homolog of NCBI NO: 13265426 NR Description: At2g14890 [Arabidopsis thaliana]
  misc_feature (21)..(210): Homolog of NCBI NO: 15226024 NR Description: arabinogalactan-protein (AGP9) [Arabidopsis
HFLYTEPSLRECASHKKQNKMARRFAIVAICIVLIAGVGGQAPSSPPTTTPAPPTTTTPPPAATPPPVSAPPPVTTSPPPATTAPPPATPPPVASPPPATPPPVATPPPATPPPVASPPPATPPPVASPPPATPPPAPLASPPAQVPALAPTTPEAPSTSPSSSPPLPATDGPGPSVEGPGPSTDSNDQNGASKTVSSLVLGSVLVWFMI

SEQ ID NO: 55847 - protein, 208 aa, Glycine max
  peptide (1)..(208): Ceres Seq. ID no. 13595849
IFFTLNHHLESALHTRNKTKWLGDLPLLRSASSSSPASEVKLRRHHQPPHQHHPPQQPPRQQPLLLLSQLLHQSQLLLLQPPPLLLLLLLLQLLLLLRPLLLQWQLLLQQLPLPSLLLHQQLLHPSHLLLQQLLLQLLLHLLPLRFQLLLLRRQKLPLHLRRLARLSRRLMALDRASKGQDLPQIRMTRMEQARQFQAWYLDLFSFGL

SEQ ID NO: 55848 - protein, 190 aa, Glycine max
  peptide (1)..(190): Ceres Seq. ID no. 13595850
  misc_feature (22)..(164): Pfam Name: Formin Homology 2 Domain Pfam Description: Formin Homology 2 Domain
  misc_feature (22)..(166): Homolog of NCBI NO: 5917664 NR Description: extensin-like protein [Lycopersicon esculentum]
  misc_feature (6)..(182): Homolog of NCBI NO: 5139695 NR Description: expressed in cucumber hypocotyls [Cucumis
  misc_feature (7)..(156): Homolog of NCBI NO: 1084362 NR Description: extensin-like protein S3 - alfalfa
  misc_feature (23)..(184): Homolog of NCBI NO: 1084362 NR Description: extensin-like protein S3 - alfalfa
  misc_feature (5)..(190): Homolog of NCBI NO: 7441829 NR Description: proline-rich cell wall protein - upland cotton
  misc_feature (5)..(190): Homolog of NCBI NO: 7441828 NR Description: extensin-like cell wall protein - sea-island
  misc_feature (24)..(190): Homolog of NCBI NO: 7441829 NR Description: proline-rich cell wall protein - upland cotton
  misc_feature (24)..(190): Homolog of NCBI NO: 7441828 NR Description: extensin-like cell wall protein - sea-island
  misc_feature (1)..(190): Homolog of NCBI NO: 13265426 NR Description: At2g14890 [Arabidopsis thaliana]
  misc_feature (1)..(190): Homolog of NCBI NO: 15226024 NR Description: arabinogalactan-protein (AGP9) [Arabidopsis
MARRFAIVAICIVLIAGVGGQAPSSPPTTTPAPPTTTTPPPAATPPPVSAPPPVTTSPPPATTAPPPATPPPVASPPPATPPPVATPPPATPPPVASPPPATPPPVASPPPATPPPAPLASPPAQVPALAPTTPEAPSTSPSSSPPLPATDGPGPSVEGPGPSTDSNDQNGASKTVSSLVLGSVLVWFMI

SEQ ID NO: 55849 - DNA, 1281 bp, Glycine max
  misc_feature (1)..(1281): Ceres Seq. ID no. 13595066
ctttttcttcagaaacagtaaaccaaaaactatccattgctttccccctagcgttttcttctcggtcgatcttcttctccaactcacactccggcgtctcttagtcgaccgaccgctccttcagcagagaaagtcattccggaaacatgccgggtcagaagattgaaacaggtcatgaggacatggtccatgatgtgcagatggactactacggaaagagagttgcaactgcctcatctgactgcaccatcaagataaccggcgtcagcaacaacggtggatcccagcacctagctacattaaccggccaccgtggtcccgtctggcaggtcgcgtgggcccaccctaagtttggatcattccttgcttcatgctcctatgacggtcaggtcatactctggaaagaaggcagccaaaaccagtggacccaagctcatgtcttcacggaccataaatcttcggtcaactccatcgcttgggctcctcatgacctcggactgtccttggcttgtgggtcatccgacggaaacatttcggtattcacaggccgtgctgatggtggttgggacacgacgaagatcgaccaagcgcatccggtyggagtcacttctgtctcatgggcaccagccactgcgcctggtgctcttgtcagctctggattgcttgatccggtttacaagctggcttccggtgggtgtgataatactgtgaaagtgtggaagctctcaaatgggtcgtggaagatggattgctttccggctcttcagaagcatactgattgggttcgtgatgtggcttgggcaccgaacttgggtctccctaagtccaccatagccagtggctcacaggatgggaaagtgatcatatggacagtggggaaagaaggtgagcagtgggaaggtaaggttctgaaggactttatgaccccggtgtggcgggtatcgtggtcgttgacaggtaacatgttggctgtgtccgatgggaacaacaacatgacggtgtggaaagaggctgttgatggagagtgggaacaggtcaccgttatggaatgatacgtttcgctatttactttactgaattaaagtctttttaaaaggatcctttttctcaggctggtttggtggtctatctgtgagggaatgtggatgtgtttttttcttcttcttaatttgggtttcggaacattttggtcattttcatctttcctagcgactttttcttttgtttttcctttttaaaaacactatcttcgtgaaatataatatcttagttttaaactgg

SEQ ID NO: 55850 - protein, 301 aa, Glycine max
  peptide (1)..(301): Ceres Seq. ID no. 15221470
  misc_feature (6)..(294): Homolog of NCBI NO: 27712890 NR Description: similar to SEC13 (S. cerevisiae)-like 1;
  misc_feature (6)..(294): Homolog of NCBI NO: 12805321 NR Description: SEC13 related gene [Mus musculus]
  misc_feature (6)..(294): Homolog of NCBI NO: 38174439 NR Description: Unknown (protein for MGC:76017) [Silurana
  misc_feature (1)..(301): Homolog of NCBI NO: 34897242 NR Description: putative coat protein complex II (COPII)
  misc_feature (1)..(301): Homolog of NCBI NO: 34393220 NR Description: putative Sec13p [Oryza sativa (japonica
  misc_feature (1)..(301): Homolog of NCBI NO: 18147582 NR Description: Sec13p [Oryza sativa]
  misc_feature (1)..(301): Homolog of NCBI NO: 21593236 NR Description: transport protein SEC13, putative [Arabidopsis
  misc_feature (1)..(301): Homolog of NCBI NO: 15232095 NR Description: protein transport protein SEC13 family / WD-40
  misc_feature (1)..(301): Homolog of NCBI NO: 21593146 NR Description: putative protein transport protein SEC13
  misc_feature (1)..(301): Homolog of NCBI NO: 15227692 NR Description: transducin / WD-40 repeat protein family
  misc_feature (151)..(151): Xaa is any aa, unknown or other
MPGQKIETGHEDMVHDVQMDYYGKRVATASSDCTIKITGVSNNGGSQHLATLTGHRGPVWQVAWAHPKFGSFLASCSYDGQVILWKEGSQNQWTQAHVFTDHKSSVNSIAWAPHDLGLSLACGSSDGNISVFTGRADGGWDTTKIDQAHPXGVTSVSWAPATAPGALVSSGLLDPVYKLASGGCDNTVKVWKLSNGSWKMDCFPALQKHTDWVRDVAWAPNLGLPKSTIASGSQDGKVIIWTVGKEGEQWEGKVLKDFMTPVWRVSWSLTGNMLAVSDGNNNMTVWKEAVDGEWEQVTVME

SEQ ID NO: 55851 - protein, 289 aa, Glycine max
  peptide (1)..(289): Ceres Seq. ID no. 15221471
  misc_feature (1)..(282): Homolog of NCBI NO: 29150272 NR Description: SEC13 related gene [Mus musculus]
  misc_feature (1)..(282): Homolog of NCBI NO: 12805321 NR Description: SEC13 related gene [Mus musculus]
  misc_feature (1)..(282): Homolog of NCBI NO: 38174439 NR Description: Unknown (protein for MGC:76017) [Silurana
  misc_feature (1)..(289): Homolog of NCBI NO: 34897242 NR Description: putative coat protein complex II (COPII)
  misc_feature (1)..(289): Homolog of NCBI NO: 34393220 NR Description: putative Sec13p [Oryza sativa (japonica
  misc_feature (1)..(289): Homolog of NCBI NO: 18147582 NR Description: Sec13p [Oryza sativa]
  misc_feature (1)..(289): Homolog of NCBI NO: 21593236 NR Description: transport protein SEC13, putative [Arabidopsis
  misc_feature (1)..(289): Homolog of NCBI NO: 15232095 NR Description: protein transport protein SEC13 family / WD-40
  misc_feature (1)..(289): Homolog of NCBI NO: 21593146 NR Description: putative protein transport protein SEC13
  misc_feature (1)..(289): Homolog of NCBI NO: 15227692 NR Description: transducin / WD-40 repeat protein family
  misc_feature (139)..(139): Xaa is any aa, unknown or other
MVHDVQMDYYGKRVATASSDCTIKITGVSNNGGSQHLATLTGHRGPVWQVAWAHPKFGSFLASCSYDGQVILWKEGSQNQWTQAHVFTDHKSSVNSIAWAPHDLGLSLACGSSDGNISVFTGRADGGWDTTKIDQAHPXGVTSVSWAPATAPGALVSSGLLDPVYKLASGGCDNTVKVWKLSNGSWKMDCFPALQKHTDWVRDVAWAPNLGLPKSTIASGSQDGKVIIWTVGKEGEQWEGKVLKDFMTPVWRVSWSLTGNMLAVSDGNNNMTVWKEAVDGEWEQVTVME

SEQ ID NO: 55852 - protein, 283 aa, Glycine max
  peptide (1)..(283): Ceres Seq. ID no. 15221472
  misc_feature (1)..(276): Homolog of NCBI NO: 27712890 NR Description: similar to SEC13 (S. cerevisiae)-like 1;
  misc_feature (1)..(276): Homolog of NCBI NO: 12805321 NR Description: SEC13 related gene [Mus musculus]
  misc_feature (1)..(276): Homolog of NCBI NO: 38174439 NR Description: Unknown (protein for MGC:76017) [Silurana
  misc_feature (1)..(283): Homolog of NCBI NO: 34897242 NR Description: putative coat protein complex II (COPII)
  misc_feature (1)..(283): Homolog of NCBI NO: 34393220 NR Description: putative Sec13p [Oryza sativa (japonica
  misc_feature (1)..(283): Homolog of NCBI NO: 18147582 NR Description: Sec13p [Oryza sativa]
  misc_feature (1)..(283): Homolog of NCBI NO: 21593236 NR Description: transport protein SEC13, putative [Arabidopsis
  misc_feature (1)..(283): Homolog of NCBI NO: 15232095 NR Description: protein transport protein SEC13 family / WD-40
  misc_feature (1)..(283): Homolog of NCBI NO: 21593146 NR Description: putative protein transport protein SEC13
  misc_feature (1)..(283): Homolog of NCBI NO: 15227692 NR Description: transducin / WD-40 repeat protein family
  misc_feature (133)..(133): Xaa is any aa, unknown or other
MDYYGKRVATASSDCTIKITGVSNNGGSQHLATLTGHRGPVWQVAWAHPKFGSFLASCSYDGQVILWKEGSQNQWTQAHVFTDHKSSVNSIAWAPHDLGLSLACGSSDGNISVFTGRADGGWDTTKIDQAHPXGVTSVSWAPATAPGALVSSGLLDPVYKLASGGCDNTVKVWKLSNGSWKMDCFPALQKHTDWVRDVAWAPNLGLPKSTIASGSQDGKVIIWTVGKEGEQWEGKVLKDFMTPVWRVSWSLTGNMLAVSDGNNNMTVWKEAVDGEWEQVTVME

SEQ ID NO: 55853 - DNA, 935 bp, Glycine max
  misc_feature (1)..(935): Ceres Seq. ID no. 12611082
attgttcacgtactgtgtcaagagcaaagagccaagagggtgcaattacatgagctgaaagaagtaacgcaaaagcccctttatttttaatggttagaacttagaagctgattgtgacaatggatgctcgtggagaagggtcttctacttcttactacaacgttcttggtgttagctcagattctaacgtggatgagattagacgtgcttataggaagctggctatgcaatggcatcctgataagtgcacaaggtcgccttctttgctgggtgaagctaagcgcaaattccagcaaattcaagaagcctattcagtgttgtctgatagtaagaaaagaactatgtatgatgcgggcttgtatgatcctcaagaggaagaggatgagggcttttctgattttgtggaagaaatgttgtcccatatggctcaagtgaggcgagagggaaagcattacggtttggaagagttgcagggcatgttaatggaaatggctaaaggatttgagtgtccttcaatgtattgtggggtgaactctgtgattgatgagtctccatgcgtaaagagaacgcgttttgacacaaacatgatggagaataaggggtcacatttccaagtacctgatcttaacctctattgcagttaagatgtttttcacggatcgatatcaagaaaaaacagatgggtagtgatgatgaattttggtagttattttcaacattttgacaatggatttatctgtacatattccttgtatggtgctaaattcccagggctttgtctcagtttttctagttgtaaatgatatatatcttctgaaggggaagagaggagaaaataatgattgagtagtttggaaattatgttttgagtaaggattttctgccacgggattgttcactttttgtatttctttgatttggataagaagttttgc

SEQ ID NO: 55854 - protein, 174 aa, Glycine max
  peptide (1)..(174): Ceres Seq. ID no. 12611083
  misc_feature (11)..(80): Pfam Name: DnaJ domain Pfam Description: DnaJ domain
  misc_feature (1)..(156): Homolog of NCBI NO: 18405757 NR Description: DnaJ protein, putative
  misc_feature (1)..(156): Homolog of NCBI NO: 21554587 NR Description: DnaJ protein, putative [Arabidopsis thaliana]
MDARGEGSSTSYYNVLGVSSDSNVDEIRRAYRKLAMQWHPDKCTRSPSLLGEAKRKFQQIQEAYSVLSDSKKRTMYDAGLYDPQEEEDEGFSDFVEEMLSHMAQVRREGKHYGLEELQGMLMEMAKGFECPSMYCGVNSVIDESPCVKRTRFDTNMMENKGSHFQVPDLNLYCS

SEQ ID NO: 55855 - protein, 139 aa, Glycine max
  peptide (1)..(139): Ceres Seq. ID no. 12611084
  misc_feature (1)..(121): Homolog of NCBI NO: 18405757 NR Description: DnaJ protein, putative
  misc_feature (1)..(121): Homolog of NCBI NO: 21554587 NR Description: DnaJ protein, putative [Arabidopsis thaliana]
MQWHPDKCTRSPSLLGEAKRKFQQIQEAYSVLSDSKKRTMYDAGLYDPQEEEDEGFSDFVEEMLSHMAQVRREGKHYGLEELQGMLMEMAKGFECPSMYCGVNSVIDESPCVKRTRFDTNMMENKGSHFQVPDLNLYCS

SEQ ID NO: 55856 - protein, 103 aa, Glycine max
  peptide (1)..(103): Ceres Seq. ID no. 12611085
MLVEKGLLLLTTTFLVLAQILTWMRLDVLIGSWLCNGILISAQGRLLCWVKLSANSSKFKKPIQCCLIVRKELCMMRACMILKRKRMRAFLILWKKCCPIWLK

SEQ ID NO: 55857 - DNA, 743 bp, Glycine max
  misc_feature (1)..(743): Ceres Seq. ID no. 13595067
attgttcctgcgtctccccccttccttccaaacagcggtgacctccaccacctccaccaccacccaagagccgagcgaggagaagagagaagaggagatcgaccatggctgcggacggcgggaggtgggtgggcctggcggtggacttctcggaggggagccgcgcggcgctgcagtgggcggcggacaacctgctccgcgccggcgacaacctgctcctcctgcacgtcctcaaggaccccgactacgagcagggcgagaccctcctctgggaggcctccggctcgcctttgatccccctctcggagttctctcacccttcaattgcaaagaagtatggtgtgaagcctgatgctgaaacgctggacatgctcaacactatagcgaagcagaaggaggttgccgtggtttccaaagtcctgtttggagatccccgcgagaagctgtgccaagccatccatgacatgcccatcagctccctggtcattgggagcaggggccttggcaagctcaagagggtgctcttgggcagcgtcagcgattacgtcgtgaacaacgccgcctgcccggtcaccgttgtcaagccagcgagtaaccatgcctgatctcatggtcgcaaatgtctacatgtgttttagtttgccggagtcctatatatccagttggccgcaacttattgaaccatccagtgttattcgtaataataattgacaattagcctgtggatgattcccaggttgtgc

SEQ ID NO: 55858 - protein, 166 aa, Glycine max
  peptide (1)..(166): Ceres Seq. ID no. 13595068
  misc_feature (6)..(160): Pfam Name: Universal stress protein family Pfam Description: Universal stress protein family
  misc_feature (2)..(165): Homolog of NCBI NO: 40539010 NR Description: putative stress-related protein
  misc_feature (7)..(138): Homolog of NCBI NO: 18396497 NR Description: expressed protein [Arabidopsis thaliana]
  misc_feature (7)..(164): Homolog of NCBI NO: 11602749 NR Description: early nodulin ENOD18 [Vicia faba]
  misc_feature (7)..(164): Homolog of NCBI NO: 11602751 NR Description: ENOD18 protein [Vicia faba]
  misc_feature (7)..(164): Homolog of NCBI NO: 11602747 NR Description: early nodulin ENOD18 [Vicia faba]
  misc_feature (7)..(160): Homolog of NCBI NO: 30693971 NR Description: expressed protein [Arabidopsis thaliana]
  misc_feature (7)..(160): Homolog of NCBI NO: 30678807 NR Description: expressed protein [Arabidopsis thaliana]
  misc_feature (3)..(160): Homolog of NCBI NO: 20160561 NR Description: P0414E03.3 [Oryza sativa (japonica
  misc_feature (5)..(160): Homolog of NCBI NO: 15528707 NR Description: P0583G08.8 [Oryza sativa (japonica
  misc_feature (1)..(160): Homolog of NCBI NO: 18401345 NR Description: expressed protein [Arabidopsis thaliana]
MAADGGRWVGLAVDFSEGSRAALQWAADNLLRAGDNLLLLHVLKDPDYEQGETLLWEASGSPLIPLSEFSHPSIAKKYGVKPDAETLDMLNTIAKQKEVAVVSKVLFGDPREKLCQAIHDMPISSLVIGSRGLGKLKRVLLGSVSDYVVNNAACPVTVVKPASNHA

SEQ ID NO: 55859 - protein, 116 aa, Glycine max
  peptide (1)..(116): Ceres Seq. ID no. 13595069
LFLRLPPSFQTAVTSTTSTTTQEPSEEKREEEIDHGCGRREVGGPGGGLLGGEPRGAAVGGGQPAPRRRQPAPPARPQGPRLRAGRDPPLGGLRLAFDPPLGVLSPFNCKEVWCEA

SEQ ID NO: 55860 - protein, 97 aa, Glycine max
  peptide (1)..(97): Ceres Seq. ID no. 13595070
IVPASPPFLPNSGDLHHLHHHPRAERGEERRGDRPWLRTAGGGWAWRWTSRRGAARRCSGRRTTCSAPATTCSSCTSSRTPTTSRARPSSGRPPARL

SEQ ID NO: 55861 - DNA, 972 bp, Glycine max
  misc_feature (1)..(972): Ceres Seq. ID no. 12610896
cgaaaaatcacattcaccttcaaacatcaaacatcacatctcttaaaagagtttctttgtatcaatggcaggtatcaaagttttcggacacgctgcttccatttccaccagaagagtcctcctcaccctccacgagaaaaacctcgactttgagctcgttcatgtcgacctcaaggacggtgagcacaagaaagagtctttcctatcccacaacccttttggtaaagttccggcctttgaagatggagacctcaaaatcttcgagtcaagagctatcactcagtacatagctcaccgatacgaaggccaaggaactaaccttctccagcccgactccaagaacctggcccactatgcaatcatggccatgggaatgcaagtagaagctcaccagttcgacccactggcttcaaagcttgcttgggaacatgtatttaagctcatctatggcttgaccacagaccaagccgttgttgccgaagaagaggctaagttagccaaggtccttaatgtatacgaggctcggctcaaggagttcaagtatttggctggtgacacttttactttgaccgatcttcaccacattcctgcggttcaatacttgcttgaaactcccaccaagaagcttttcaccgagcgtccacatgtcaacaagtgggtggctgagatcaccaagaggccagcttcacagaagatccttcagtgaggaatttctaaaaggctctgcttcagtaacagtaataatgctcagactaaataagtggctgcttcactgcccaatttctcattaatctgtttttctttctcagttatgtgtgtgtgtgttcttgagagatctttgttgaatcaaaaactatctatctaatctttaagctcttttataataaaaaggttagttaattaatacaaaggttgcaatgtcttaactgcaatgtcttaactgcagagttattactgagaatattatacatt

SEQ ID NO: 55862 - protein, 213 aa, Glycine max
  peptide (1)..(213): Ceres Seq. ID no. 12610897
  misc_feature (98)..(206): Pfam Name: Glutathione S-transferase, C-terminal domain Pfam Description: Glutathione S-transferase, C-terminal domain
  misc_feature (1)..(213): Homolog of NCBI NO: 31790103 NR Description: glutathione S-transferase 5 [Brassica juncea]
  misc_feature (1)..(213): Homolog of NCBI NO: 31790105 NR Description: glutathione S-transferase 6 [Brassica juncea]
  misc_feature (1)..(211): Homolog of NCBI NO: 21555418 NR Description: Atpm24.1 glutathione S transferase [Arabidopsis
  misc_feature (2)..(211): Homolog of NCBI NO: 2554769 NR Description: Chain A, Structure Of Glutathione S-Transferase
  misc_feature (1)..(212): Homolog of NCBI NO: 15227063 NR Description: glutathione transferase, putative
  misc_feature (1)..(213): Homolog of NCBI NO: 31790093 NR Description: glutathione S-transferase 1 [Brassica juncea]
  misc_feature (1)..(211): Homolog of NCBI NO: 15235401 NR Description: glutathione transferase, putative
  misc_feature (1)..(213): Homolog of NCBI NO: 31790095 NR Description: glutathione S-transferase 2 [Brassica juncea]
  misc_feature (1)..(213): Homolog of NCBI NO: 31790097 NR Description: glutathione S-transferase 3 [Brassica juncea]
  misc_feature (1)..(213): Homolog of NCBI NO: 31790099 NR Description: glutathione S-transferase 4 [Brassica juncea]
MAGIKVFGHAASISTRRVLLTLHEKNLDFELVHVDLKDGEHKKESFLSHNPFGKVPAFEDGDLKIFESRAITQYIAHRYEGQGTNLLQPDSKNLAHYAIMAMGMQVEAHQFDPLASKLAWEHVFKLIYGLTTDQAVVAEEEAKLAKVLNVYEARLKEFKYLAGDTFTLTDLHHIPAVQYLLETPTKKLFTERPHVNKWVAEITKRPASQKILQ

SEQ ID NO: 55863 - protein, 114 aa, Glycine max
  peptide (1)..(114): Ceres Seq. ID no. 12610898
  misc_feature (1)..(107): Pfam Name: Glutathione S-transferase, C-terminal domain Pfam Description: Glutathione S-transferase, C-terminal domain
  misc_feature (1)..(114): Homolog of NCBI NO: 31790103 NR Description: glutathione S-transferase 5 [Brassica juncea]
  misc_feature (1)..(114): Homolog of NCBI NO: 31790105 NR Description: glutathione S-transferase 6 [Brassica juncea]
  misc_feature (1)..(112): Homolog of NCBI NO: 21555418 NR Description: Atpm24.1 glutathione S transferase [Arabidopsis
  misc_feature (1)..(112): Homolog of NCBI NO: 2554769 NR Description: Chain A, Structure Of Glutathione S-Transferase
  misc_feature (1)..(113): Homolog of NCBI NO: 15227063 NR Description: glutathione transferase, putative
  misc_feature (1)..(114): Homolog of NCBI NO: 31790093 NR Description: glutathione S-transferase 1 [Brassica juncea]
  misc_feature (1)..(112): Homolog of NCBI NO: 15235401 NR Description: glutathione transferase, putative
  misc_feature (1)..(114): Homolog of NCBI NO: 31790095 NR Description: glutathione S-transferase 2 [Brassica juncea]
  misc_feature (1)..(114): Homolog of NCBI NO: 31790097 NR Description: glutathione S-transferase 3 [Brassica juncea]
  misc_feature (1)..(114): Homolog of NCBI NO: 31790099 NR Description: glutathione S-transferase 4 [Brassica juncea]
MAMGMQVEAHQFDPLASKLAWEHVFKLIYGLTTDQAVVAEEEAKLAKVLNVYEARLKEFKYLAGDTFTLTDLHHIPAVQYLLETPTKKLFTERPHVNKWVAEITKRPASQKILQ

SEQ ID NO: 55864 - protein, 112 aa, Glycine max
  peptide (1)..(112): Ceres Seq. ID no. 12610899
  misc_feature (1)..(105): Pfam Name: Glutathione S-transferase, C-terminal domain Pfam Description: Glutathione S-transferase, C-terminal domain
  misc_feature (1)..(112): Homolog of NCBI NO: 31790103 NR Description: glutathione S-transferase 5 [Brassica juncea]
  misc_feature (1)..(112): Homolog of NCBI NO: 31790105 NR Description: glutathione S-transferase 6 [Brassica juncea]
  misc_feature (1)..(110): Homolog of NCBI NO: 21555418 NR Description: Atpm24.1 glutathione S transferase [Arabidopsis
  misc_feature (1)..(110): Homolog of NCBI NO: 2554769 NR Description: Chain A, Structure Of Glutathione S-Transferase
  misc_feature (1)..(111): Homolog of NCBI NO: 15227063 NR Description: glutathione transferase, putative
  misc_feature (1)..(112): Homolog of NCBI NO: 31790093 NR Description: glutathione S-transferase 1 [Brassica juncea]
  misc_feature (1)..(110): Homolog of NCBI NO: 15235401 NR Description: glutathione transferase, putative
  misc_feature (1)..(112): Homolog of NCBI NO: 31790095 NR Description: glutathione S-transferase 2 [Brassica juncea]
  misc_feature (1)..(112): Homolog of NCBI NO: 31790097 NR Description: glutathione S-transferase 3 [Brassica juncea]
  misc_feature (1)..(112): Homolog of NCBI NO: 31790099 NR Description: glutathione S-transferase 4 [Brassica juncea]
MGMQVEAHQFDPLASKLAWEHVFKLIYGLTTDQAVVAEEEAKLAKVLNVYEARLKEFKYLAGDTFTLTDLHHIPAVQYLLETPTKKLFTERPHVNKWVAEITKRPASQKILQ

SEQ ID NO: 55865 - DNA, 677 bp, Glycine max
  misc_feature (1)..(677): Ceres Seq. ID no. 12610904
atttttctagggttctgagattcaggagagagataacgaacagcaatggcgaatcaagtgatctccggaatcaaggaaacggttcaatcgatcaacggcgcggctcgtccatggggcgatttcctcgatctctccgctttcagcttcccgtcctccttctccgacgccacaactcgcctcactcagaaccttgctcatttccgcatcaactacaccatcatcctctccgtcctcctcgctctaaccttgatcacacgcccgatcgccatcctcgctttcgtagccgtcggcttagcttggttcttcctctatttcgctcgcgaggaggcgctcaccgtcttcgggttcaccgtcgacgatggcgtcgtggcggtgcttctcatcgttctaacgatcgcagcgctagttaccactggagtttggctcagtgctctcaccaccgttggattcggagctctggttttgatcttacacgcggcgctgagaggaacggaggatcttgtgacggatgatctggaatcgccttacggaccaatgctctctaccgccggcggagataacggtgattacagtgggatttgagctacatttggtgcttgtaactaaactctaattgttttctttgtgttcattattagacattgttcaagacgttaaggaatcaaatgaaagtttat

SEQ ID NO: 55866 - protein, 178 aa, Glycine max
  peptide (1)..(178): Ceres Seq. ID no. 12610905
  misc_feature (1)..(169): Homolog of NCBI NO: 40539036 NR Description: putative prenylated rab acceptor protein
  misc_feature (6)..(170): Homolog of NCBI NO: 18072825 NR Description: prenylated Rab receptor 2 [Arabidopsis thaliana]
  misc_feature (6)..(170): Homolog of NCBI NO: 15239101 NR Description: putative protein; protein id: At5g05380.1
  misc_feature (6)..(156): Homolog of NCBI NO: 18400140 NR Description: expressed protein
  misc_feature (6)..(156): Homolog of NCBI NO: 21617895 NR Description: unknown [Arabidopsis thaliana]
  misc_feature (5)..(159): Homolog of NCBI NO: 15220814 NR Description: hypothetical protein; protein id: At1g17700.1
  misc_feature (1)..(171): Homolog of NCBI NO: 18390939 NR Description: expressed protein
  misc_feature (1)..(171): Homolog of NCBI NO: 21594668 NR Description: unknown [Arabidopsis thaliana]
  misc_feature (1)..(178): Homolog of NCBI NO: 21555645 NR Description: unknown [Arabidopsis thaliana]
  misc_feature (1)..(178): Homolog of NCBI NO: 18379300 NR Description: expressed protein
MANQVISGIKETVQSINGAARPWGDFLDLSAFSFPSSFSDATTRLTQNLAHFRINYTIILSVLLALTLITRPIAILAFVAVGLAWFFLYFAREEALTVFGFTVDDGVVAVLLIVLTIAALVTTGVWLSALTTVGFGALVLILHAALRGTEDLVTDDLESPYGPMLSTAGGDNGDYSGI

SEQ ID NO: 55867 - protein, 169 aa, Glycine max
  peptide (1)..(169): Ceres Seq. ID no. 12610906
FSRVLRFRREITNSNGESSDLRNQGNGSIDQRRGSSMGRFPRSLRFQLPVLLLRRHNSPHSEPCSFPHQLHHHPLRPPRSNLDHTPDRHPRFRSRRLSLVLPLFRSRGGAHRLRVHRRRWRRGGASHRSNDRSASYHWSLAQCSHHRWIRSSGFDLTRGAERNGGSCDG

SEQ ID NO: 55868 - protein, 133 aa, Glycine max
  peptide (1)..(133): Ceres Seq. ID no. 12610907
MGRFPRSLRFQLPVLLLRRHNSPHSEPCSFPHQLHHHPLRPPRSNLDHTPDRHPRFRSRRLSLVLPLFRSRGGAHRLRVHRRRWRRGGASHRSNDRSASYHWSLAQCSHHRWIRSSGFDLTRGAERNGGSCDG

SEQ ID NO: 55869 - DNA, 1013 bp, Glycine max
  misc_feature (1)..(1013): Ceres Seq. ID no. 12610908
aaaatcgccttcgtctttccccgtcgtctccaccaacgccagtttttccccgtcgtctccaccaacgccagtccaaatccaaacccgaaggaggaagagaggctagctagctagggttccgcctcccgccggccggagagagggagagagaggatgacgacggcggcgcggccaacgtgggcgccagcgaagggcgggaacgagcagggcggcacgcgtatcttcgggccctccgggaagtactcctcccgcgacctcgccgcacacacctccctcaagcccagaaaagagggacaacaaactcaagaggaggtacagaagaggaatcttagggatgaacttgaggagcgtgaacgcaagcacttctcatccaaggataagtcctatgttgacgagagggaccggcgaaaaagttcaggcctgctcttagaaggttcaaaacgggatgaggataagatagttccacgtgaaattgatgcagatgactctgacgtggaactaaaaagtgatgatgaaagcgacgatgatgacgacgacgatgacactgaggcactaatggcagagcttgaaaggattaaaaaagaaagagccgaggacaggcttagaaaggagcgtcagcaagcagaagaagaggccaagatgaaggaggctgagctgatgcgaggaaacccactgatcaatatgaataattctggctccttcaatgtgaagagaaggtgggatgatgatgttgtattcaagaaccaggctcgtggagagactaagacaccgaaacggttcatcaatgacaccatcagaagtgatttccaccgcaagtttctgcataggtacatgaaatgatgctgctgtatgctttatgttgtctggacagtatgcatgctgaaagagcctgtgatgtttctgtattctgaagatcgatttgtatgacataactgtaacagctacgttatcttaatggtgatatgtttaccctgttcctaagagtaaagaaaagaacccactgcttgtgtatt

SEQ ID NO: 55870 - protein, 228 aa, Glycine max
  peptide (1)..(228): Ceres Seq. ID no. 12610909
  misc_feature (1)..(228): Pfam Name: Cwf15/Cwc15 cell cycle control protein Pfam Description: Cwf15/Cwc15 cell cycle control protein
  misc_feature (1)..(228): Homolog of NCBI NO: 17564200 NR Description: Adrenal gland protein AD-002 like (26.1 kD)
  misc_feature (1)..(228): Homolog of NCBI NO: 39582427 NR Description: Hypothetical protein CBG22646 [Caenorhabditis
  misc_feature (1)..(228): Homolog of NCBI NO: 7705475 NR Description: hypothetical protein HSPC148 [Homo sapiens]
  misc_feature (1)..(228): Homolog of NCBI NO: 27719369 NR Description: similar to RIKEN cDNA 0610040D20
  misc_feature (1)..(228): Homolog of NCBI NO: 6523797 NR Description: adrenal gland protein AD-002 [Homo sapiens]
  misc_feature (1)..(228): Homolog of NCBI NO: 12963537 NR Description: RIKEN cDNA 0610040D20 [Mus musculus]
  misc_feature (1)..(228): Homolog of NCBI NO: 18399903 NR Description: expressed protein
  misc_feature (1)..(228): Homolog of NCBI NO: 15451186 NR Description: Unknown protein [Arabidopsis thaliana]
  misc_feature (1)..(228): Homolog of NCBI NO: 21592359 NR Description: unknown [Arabidopsis thaliana]
  misc_feature (1)..(228): Homolog of NCBI NO: 34897750 NR Description: ESTs AU032852(S15362),AU070591(S5037) correspond a region of the predicted gene.~Similar to Caenorhabditis elegans
MTTAARPTWAPAKGGNEQGGTRIFGPSGKYSSRDLAAHTSLKPRKEGQQTQEEVQKRNLRDELEERERKHFSSKDKSYVDERDRRKSSGLLLEGSKRDEDKIVPREIDADDSDVELKSDDESDDDDDDDDTEALMAELERIKKERAEDRLRKERQQAEEEAKMKEAELMRGNPLINMNNSGSFNVKRRWDDDVVFKNQARGETKTPKRFINDTIRSDFHRKFLHRYMK

SEQ ID NO: 55871 - DNA, 841 bp, Glycine max
  misc_feature (1)..(841): Ceres Seq. ID no. 13595230
aaccaagcagccgctgcaacatactgtacaattactttgcactagcaacacaacgctcttactgagctcatagcgtttgcacctgcccatcttaactagttgatcaccgcagcaatggcctccaccaacagctggacccacgagatcgagtcgtcggtcgcggcaccgcgcctgttccgtgccggcgtcatggactggcacactctggcacccaagctcgcgccccacatcgtcgccagcgcccaccccgtggagggcgaaggcggcatcggcagcgtcaggcagttcaacttcacctcagtcatgccctttaccctcatgaaggagaggcttgagttcctggacacagacaagtgtgagtgcaagtcgaccctcgtcgagggcggcggcatcgacacggcgatcgagactgcgacgtcgcacatcaaggtggagccggcggccaacggagggtgcttcgtgaaggtggactcgacgtacaagctgctgccaggcgtggaggtgaatgacgaaatcaccaaggccaaggaatccgtcaccgccatctttaaagccgccgatgcctacctcatcgccaaccctgacgcctacaactgaatcagttgagagggatcatatatgattatgatgtccctagtttgattcttttgtgctttcttcccgatgtaataaagctgctccatctctaagctacaaatagtaacgccgagggcgagagcaccgaggagagtgtggacgtgagaagttgaaaatttagtatttgtaactactaaaggggcctgtttgtttgatgatgttggtgcttgctttatgtgaaatacctaaacgctcttgttttctt

SEQ ID NO: 55872 - protein, 160 aa, Glycine max
  peptide (1)..(160): Ceres Seq. ID no. 13595231
  misc_feature (2)..(155): Pfam Name: Pathogenesis-related protein Bet v I family Pfam Description: Pathogenesis-related protein Bet v I family
  misc_feature (3)..(159): Homolog of NCBI NO: 4210624 NR Description: intracellular pathogenesis-related protein,
  misc_feature (3)..(159): Homolog of NCBI NO: 548591 NR Description: Pathogenesis-related protein 1 (AOPR1)
  misc_feature (10)..(159): Homolog of NCBI NO: 6649902 NR Description: intracellular pathogenesis-related protein PR-105
  misc_feature (10)..(159): Homolog of NCBI NO: 6649904 NR Description: intracellular pathogenesis-related protein PR-106
  misc_feature (10)..(159): Homolog of NCBI NO: 4325333 NR Description: intracellular pathogenesis-related protein PR-107
  misc_feature (3)..(159): Homolog of NCBI NO: 4210626 NR Description: intracellular pathogenesis-related protein,
  misc_feature (6)..(159): Homolog of NCBI NO: 939857 NR Description: pathogenesis related protein [Asparagus
  misc_feature (3)..(159): Homolog of NCBI NO: 1572683 NR Description: early flowering protein 1 [Asparagus officinalis]
  misc_feature (1)..(160): Homolog of NCBI NO: 7442203 NR Description: pathogenesis-related protein - sorghum
  misc_feature (1)..(160): Homolog of NCBI NO: 16589076 NR Description: pathogen-related protein [Oryza sativa]
MASTNSWTHEIESSVAAPRLFRAGVMDWHTLAPKLAPHIVASAHPVEGEGGIGSVRQFNFTSVMPFTLMKERLEFLDTDKCECKSTLVEGGGIDTAIETATSHIKVEPAANGGCFVKVDSTYKLLPGVEVNDEITKAKESVTAIFKAADAYLIANPDAYN

SEQ ID NO: 55873 - protein, 135 aa, Glycine max
  peptide (1)..(135): Ceres Seq. ID no. 13595232
  misc_feature (1)..(130): Pfam Name: Pathogenesis-related protein Bet v I family Pfam Description: Pathogenesis-related protein Bet v I family
  misc_feature (1)..(134): Homolog of NCBI NO: 4210624 NR Description: intracellular pathogenesis-related protein,
  misc_feature (1)..(134): Homolog of NCBI NO: 548591 NR Description: Pathogenesis-related protein 1 (AOPR1)
  misc_feature (1)..(134): Homolog of NCBI NO: 6649904 NR Description: intracellular pathogenesis-related protein PR-106
  misc_feature (1)..(134): Homolog of NCBI NO: 6649902 NR Description: intracellular pathogenesis-related protein PR-105
  misc_feature (1)..(134): Homolog of NCBI NO: 4325333 NR Description: intracellular pathogenesis-related protein PR-107
  misc_feature (1)..(134): Homolog of NCBI NO: 4210626 NR Description: intracellular pathogenesis-related protein,
  misc_feature (1)..(134): Homolog of NCBI NO: 939857 NR Description: pathogenesis related protein [Asparagus
  misc_feature (1)..(134): Homolog of NCBI NO: 1572683 NR Description: early flowering protein 1 [Asparagus officinalis]
  misc_feature (1)..(135): Homolog of NCBI NO: 7442203 NR Description: pathogenesis-related protein - sorghum
  misc_feature (1)..(135): Homolog of NCBI NO: 16589076 NR Description: pathogen-related protein [Oryza sativa]
MDWHTLAPKLAPHIVASAHPVEGEGGIGSVRQFNFTSVMPFTLMKERLEFLDTDKCECKSTLVEGGGIDTAIETATSHIKVEPAANGGCFVKVDSTYKLLPGVEVNDEITKAKESVTAIFKAADAYLIANPDAYN

SEQ ID NO: 55874 - protein, 97 aa, Glycine max
  peptide (1)..(97): Ceres Seq. ID no. 13595233
  misc_feature (1)..(92): Pfam Name: Pathogenesis-related protein Bet v I family Pfam Description: Pathogenesis-related protein Bet v I family
  misc_feature (1)..(96): Homolog of NCBI NO: 4210624 NR Description: intracellular pathogenesis-related protein,
  misc_feature (1)..(96): Homolog of NCBI NO: 548591 NR Description: Pathogenesis-related protein 1 (AOPR1)
  misc_feature (1)..(96): Homolog of NCBI NO: 6649904 NR Description: intracellular pathogenesis-related protein PR-106
  misc_feature (1)..(96): Homolog of NCBI NO: 6649902 NR Description: intracellular pathogenesis-related protein PR-105
  misc_feature (1)..(96): Homolog of NCBI NO: 4325333 NR Description: intracellular pathogenesis-related protein PR-107
  misc_feature (1)..(96): Homolog of NCBI NO: 4210626 NR Description: intracellular pathogenesis-related protein,
  misc_feature (1)..(96): Homolog of NCBI NO: 939857 NR Description: pathogenesis related protein [Asparagus
  misc_feature (1)..(96): Homolog of NCBI NO: 1572683 NR Description: early flowering protein 1 [Asparagus officinalis]
  misc_feature (1)..(97): Homolog of NCBI NO: 7442203 NR Description: pathogenesis-related protein - sorghum
  misc_feature (1)..(97): Homolog of NCBI NO: 16589076 NR Description: pathogen-related protein [Oryza sativa]
MPFTLMKERLEFLDTDKCECKSTLVEGGGIDTAIETATSHIKVEPAANGGCFVKVDSTYKLLPGVEVNDEITKAKESVTAIFKAADAYLIANPDAYN

SEQ ID NO: 55875 - DNA, 788 bp, Glycine max
  misc_feature (1)..(788): Ceres Seq. ID no. 13595288
gtgaagataagaagttgaatgcaacatatataatcagtgtcgcccgaaaacttgggtgttccattttcctgttacctgaggacataatagaggtcaaccagaagatgattctcattttagntgctagtataatgtattggagcctcaagaaacctgaagaaaacatcacccctgaagcatcgcctaaagcttcagtagatggtgaaagcgaaacagatttagttgatgaggtatcccatttagccattgacgaggtatccaatttagccattgatgatacaacttcggagaatgctagctcttcttaagttagtaaggttgaagcaaaccatacccaatggagaatgagcgggaaaaaacgcatttttgtttatagggcaaaaggaagatgccaacctcttggttcccagttcgaaagaaagcttattgttatgaaaaaccacagataatagaaggatcttgtaaattattctttagaatttttttgtacttaggcatattctttcatgaaaattgcatgcaaattttcccaataataatgtgggcggaaggcatcattttattttcggtctgattgttaagattattcttaatgcgtgcatacggatacgggttgaagtggatgaactgaaccagtaatgattatgcacttcatttaagtggtttttctatttcaagtctgggattcaagtataatacatgtagttgatgctatagcaattggagacctttatgccaaaaaaaaaaaaaaaaaatatcgataccgtcgacctcgagggggggcccgg

SEQ ID NO: 55876 - protein, 101 aa, Glycine max
  peptide (1)..(101): Ceres Seq. ID no. 13595289
  misc_feature (1)..(56): Homolog of NCBI NO: 7489668 NR Description: fimbrin/plastin-like protein - wheat (fragment)
  misc_feature (1)..(87): Homolog of NCBI NO: 15224051 NR Description: fimbrin -related [Arabidopsis thaliana]
  misc_feature (1)..(69): Homolog of NCBI NO: 15240502 NR Description: fimbrin [Arabidopsis thaliana]
  misc_feature (1)..(84): Homolog of NCBI NO: 34914666 NR Description: fimbrin-like protein (actin binding motif)
  misc_feature (1)..(83): Homolog of NCBI NO: 15238983 NR Description: fimbrin 2 (gb|AAB97844.1) [Arabidopsis thaliana]
  misc_feature (1)..(83): Homolog of NCBI NO: 2737926 NR Description: fimbrin-like protein AtFim2 [Arabidopsis thaliana]
  misc_feature (1)..(101): Homolog of NCBI NO: 15236837 NR Description: fimbrin-related protein (ATFIM1) [Arabidopsis
  misc_feature (1)..(101): Homolog of NCBI NO: 2905893 NR Description: fimbrin-like protein [Arabidopsis thaliana]
  misc_feature (1)..(101): Homolog of NCBI NO: 2811224 NR Description: fimbrin 1 [Arabidopsis thaliana]
  misc_feature (1)..(86): Homolog of NCBI NO: 15238586 NR Description: fimbrin [Arabidopsis thaliana]
  misc_feature (40)..(40): Xaa is any aa, unknown or other
EDKKLNATYIISVARKLGCSIFLLPEDIIEVNQKMILILXASIMYWSLKKPEENITPEASPKASVDGESETDLVDEVSHLAIDEVSNLAIDDTTSENASSS

SEQ ID NO: 55877 - protein, 67 aa, Glycine max
  peptide (1)..(67): Ceres Seq. ID no. 13595290
  misc_feature (1)..(22): Homolog of NCBI NO: 7489668 NR Description: fimbrin/plastin-like protein - wheat (fragment)
  misc_feature (1)..(53): Homolog of NCBI NO: 15224051 NR Description: fimbrin -related [Arabidopsis thaliana]
  misc_feature (1)..(35): Homolog of NCBI NO: 15240502 NR Description: fimbrin [Arabidopsis thaliana]
  misc_feature (1)..(50): Homolog of NCBI NO: 34914666 NR Description: fimbrin-like protein (actin binding motif)
  misc_feature (1)..(49): Homolog of NCBI NO: 15238983 NR Description: fimbrin 2 (gb|AAB97844.1) [Arabidopsis thaliana]
  misc_feature (1)..(49): Homolog of NCBI NO: 2737926 NR Description: fimbrin-like protein AtFim2 [Arabidopsis thaliana]
  misc_feature (1)..(67): Homolog of NCBI NO: 15236837 NR Description: fimbrin-related protein (ATFIM1) [Arabidopsis
  misc_feature (1)..(67): Homolog of NCBI NO: 2905893 NR Description: fimbrin-like protein [Arabidopsis thaliana]
  misc_feature (1)..(67): Homolog of NCBI NO: 2811224 NR Description: fimbrin 1 [Arabidopsis thaliana]
  misc_feature (1)..(52): Homolog of NCBI NO: 15238586 NR Description: fimbrin [Arabidopsis thaliana]
  misc_feature (6)..(6): Xaa is any aa, unknown or other
MILILXASIMYWSLKKPEENITPEASPKASVDGESETDLVDEVSHLAIDEVSNLAIDDTTSENASSS

SEQ ID NO: 55878 - protein, 61 aa, Glycine max
  peptide (1)..(61): Ceres Seq. ID no. 13595291
MPTSWFPVRKKAYCYEKPQIIEGSCKLFFRIFLYLGIFFHENCMQIFPIIMWAEGIILFSV

SEQ ID NO: 55879 - DNA, 818 bp, Glycine max
  misc_feature (1)..(818): Ceres Seq. ID no. 13595292
tactcatccccactcctgtcccccgtccactccgccgccgccgccgccgccgcgaattccgcccgcgtccaccgccgcgcgtcgccccggcggactccaggacctccggatcggagccccgcgcctcgccatggcggtcgccgcgctcaaggtgcagctgaacgcgctcctctccaacatgttcgccacgggtatggtggacgagcagttccagcagctgcagtcgctggaggaggggggcaccgcgtcgggcttcgtcgccgaggtcgccaccctcttcatcgaagacgccgaccggatcatcgcctacatcgccgccctgctggaccagcccgtggtggatttcgacaaggtggacgcccacgtgcaccagctcaaggggagcagctcgagtgttggtgctcagaaagtgaagctcgcctgcatgcacttccgccagttctatgaggcaaaaagcaaagaagggtgcctcatggcgctggctcttgttaggagcgagttctgtgatgtgcgcaacaagttccagaccatgatgcagctggagcagcagatcgaggcgtgcagtccgaagtagagtagcagtaactgaagcaaaaggagcttagctccctccgtgtgacccctgacatgatggggggcagtgtgtatgtatctctgaagcttgtaggcagtgtaacgggcgtcgggggctttggagggcgtgtgcgcggaaccgggccgaccgattcccgcggcggaactccgggctcgcgacccccttggaacggaacttgcttgtaccgtgtcaacgctatacctgtttgtgttgtgcccgccct

SEQ ID NO: 55880 - protein, 190 aa, Glycine max
  peptide (1)..(190): Ceres Seq. ID no. 15221525
  misc_feature (44)..(184): Homolog of NCBI NO: 21593802 NR Description: putative AHP2 [Arabidopsis thaliana]
  misc_feature (46)..(184): Homolog of NCBI NO: 15228686 NR Description: ATHP2 -related [Arabidopsis thaliana]
  misc_feature (44)..(184): Homolog of NCBI NO: 18379097 NR Description: AHP2 -related [Arabidopsis thaliana]
  misc_feature (44)..(186): Homolog of NCBI NO: 13774348 NR Description: histidine-containing phosphotransfer protein
  misc_feature (59)..(186): Homolog of NCBI NO: 15233079 NR Description: two-component phosphorelay mediator -related
  misc_feature (52)..(189): Homolog of NCBI NO: 6009622 NR Description: histidine-containing phosphotransfer protein [Zea
  misc_feature (52)..(189): Homolog of NCBI NO: 22036126 NR Description: his-containing phosphotransfer protein [Zea mays]
  misc_feature (44)..(190): Homolog of NCBI NO: 33637786 NR Description: two-component phosphorelay mediator HP2
  misc_feature (44)..(190): Homolog of NCBI NO: 33637784 NR Description: two-component phosphorelay mediator HP1
  misc_feature (44)..(186): Homolog of NCBI NO: 5689238 NR Description: histidine-containing phosphotransfer protein [Zea
THPHSCPPSTPPPPPPPRIPPASTAARRPGGLQDLRIGAPRLAMAVAALKVQLNALLSNMFATGMVDEQFQQLQSLEEGGTASGFVAEVATLFIEDADRIIAYIAALLDQPVVDFDKVDAHVHQLKGSSSSVGAQKVKLACMHFRQFYEAKSKEGCLMALALVRSEFCDVRNKFQTMMQLEQQIEACSPK

SEQ ID NO: 55881 - protein, 148 aa, Glycine max
  peptide (1)..(148): Ceres Seq. ID no. 15221526
YSSPLLSPVHSAAAAAAANSARVHRRASPRRTPGPPDRSPAPRHGGRRAQGAAERAPLQHVRHGYGGRAVPAAAVAGGGGHRVGLRRRGRHPLHRRRRPDHRLHRRPAGPARGGFRQGGRPRAPAQGEQLECWCSESEARLHALPPVL

SEQ ID NO: 55882 - protein, 147 aa, Glycine max
  peptide (1)..(147): Ceres Seq. ID no. 15221527
  misc_feature (1)..(141): Homolog of NCBI NO: 21593802 NR Description: putative AHP2 [Arabidopsis thaliana]
  misc_feature (3)..(141): Homolog of NCBI NO: 15228686 NR Description: ATHP2 -related [Arabidopsis thaliana]
  misc_feature (1)..(141): Homolog of NCBI NO: 18379097 NR Description: AHP2 -related [Arabidopsis thaliana]
  misc_feature (1)..(143): Homolog of NCBI NO: 13774348 NR Description: histidine-containing phosphotransfer protein
  misc_feature (16)..(143): Homolog of NCBI NO: 15233079 NR Description: two-component phosphorelay mediator -related
  misc_feature (9)..(146): Homolog of NCBI NO: 6009622 NR Description: histidine-containing phosphotransfer protein [Zea
  misc_feature (9)..(146): Homolog of NCBI NO: 22036126 NR Description: his-containing phosphotransfer protein [Zea mays]
  misc_feature (1)..(147): Homolog of NCBI NO: 33637786 NR Description: two-component phosphorelay mediator HP2
  misc_feature (1)..(147): Homolog of NCBI NO: 33637784 NR Description: two-component phosphorelay mediator HP1
  misc_feature (1)..(143): Homolog of NCBI NO: 5689238 NR Description: histidine-containing phosphotransfer protein [Zea
MAVAALKVQLNALLSNMFATGMVDEQFQQLQSLEEGGTASGFVAEVATLFIEDADRIIAYIAALLDQPVVDFDKVDAHVHQLKGSSSSVGAQKVKLACMHFRQFYEAKSKEGCLMALALVRSEFCDVRNKFQTMMQLEQQIEACSPK

SEQ ID NO: 55883 - DNA, 1245 bp, Glycine max
  misc_feature (1)..(1245): Ceres Seq. ID no. 12609965
aatcgaaaatctctctctctctctagcctctccattccgtgtggcgaccgagcgaaccctagccgagattagactaccatccccaatctaccggaggaggacgaggacgacgccgacgagatgctgagggttgcggggaggaggctctcgtcttcgctctcctggcgccccgtggcgaccgtcggagccaggggcccgctcgctggcgccggcggccctgggagagacgacgacgacggttcggcctaccagcggcggttcgccatcgagtcccccttcttcaccgccgcgagaggcttttcttcagctgaaacacttgttccacggaaccaagatgctgggttggctgaactcccagccactgttgctgcactgaagaaccccaactcaaaaatcctttatgaccagtacaaccatgaaagatatcctcctggagatcccagcaagcgtgcctttgcctactttgttctgagtggtgggagattcgtatatgcatcactgctgcgtctccttgtcttgaagtttgtcttgagcatgtcagcaagtaaggatgtgcttgcacttgcttcccttgaggttgatctatccagcattgaacccggtagcacagtgactgtcaagtggcgtggaaagccagtcttcatcaggcgacggacagacgatgacatcaagctggccaacagcgtggatgttgcatccctgcgccacccagagcaagacgctgagcgtgtgaagaacccagagtggctggtggttattggtgtctgcactcatcttggttgcattccccttcccaactctggagactttggtggctggttctgcccgtgccatggctcccactatgacatctctggcagaatccgcaagggccctgccccgtacaaccttgaggtgcccacctacagtttcttggaagataacaagatgctcataggctaagagcctaaaaccagtacctaccgacatatattatccacaggagtgaattcctgttgcgctgttattttgttttcaatgtggctaggagtttttgtttcaggactattgcaacggtgatccactgttacctactgaagttcatttgcagtgcgaaataattatttctcctatgttgctactggattgcaagttgttttgtactgattttctgagaccctatcggaaggatattgtatacctcttctggtccttgctacctatatatttgttaaataagcaaacatactattcttcatctgtgtc

SEQ ID NO: 55884 - protein, 273 aa, Glycine max
  peptide (1)..(273): Ceres Seq. ID no. 12609966
  misc_feature (173)..(269): Pfam Name: Rieske [2Fe-2S] domain Pfam Description: Rieske [2Fe-2S] domain
  misc_feature (1)..(273): Homolog of NCBI NO: 21553507 NR Description: ubiquinol--cytochrome-c reductase-like protein
  misc_feature (1)..(273): Homolog of NCBI NO: 18417067 NR Description: ubiquinol--cytochrome-c reductase - like protein
  misc_feature (36)..(273): Homolog of NCBI NO: 1717949 NR Description: Ubiquinol-cytochrome C reductase iron-sulfur
  misc_feature (1)..(273): Homolog of NCBI NO: 1717951 NR Description: Ubiquinol-cytochrome C reductase iron-sulfur
  misc_feature (1)..(273): Homolog of NCBI NO: 1717953 NR Description: Ubiquinol-cytochrome C reductase iron-sulfur
  misc_feature (1)..(273): Homolog of NCBI NO: 586145 NR Description: Ubiquinol-cytochrome C reductase iron-sulfur
  misc_feature (1)..(273): Homolog of NCBI NO: 1717950 NR Description: Ubiquinol-cytochrome C reductase iron-sulfur
  misc_feature (1)..(273): Homolog of NCBI NO: 1076675 NR Description: ubiquinol-cytochrome-c reductase (EC 1.10.2.2)
  misc_feature (1)..(273): Homolog of NCBI NO: 38347166 NR Description: OSJNBa0039C07.12 [Oryza sativa (japonica
  misc_feature (1)..(273): Homolog of NCBI NO: 1717957 NR Description: Ubiquinol-cytochrome C reductase iron-sulfur
MLRVAGRRLSSSLSWRPVATVGARGPLAGAGGPGRDDDDGSAYQRRFAIESPFFTAARGFSSAETLVPRNQDAGLAELPATVAALKNPNSKILYDQYNHERYPPGDPSKRAFAYFVLSGGRFVYASLLRLLVLKFVLSMSASKDVLALASLEVDLSSIEPGSTVTVKWRGKPVFIRRRTDDDIKLANSVDVASLRHPEQDAERVKNPEWLVVIGVCTHLGCIPLPNSGDFGGWFCPCHGSHYDISGRIRKGPAPYNLEVPTYSFLEDNKMLIG

SEQ ID NO: 55885 - DNA, 798 bp, Glycine max
  misc_feature (1)..(798): Ceres Seq. ID no. 15178253
atattattccactcttaccctttctggctcagtcgctctcctctcaagtctcacttcaccgtaacgcgcatgcctttgtttgaagctagccttcgtcgaattcaatttgttttccctctcacgcggtcctaagtgctaacctgtatctgagtataacgtgggggaattgacccttagatgtcatatcttcctttaacagatacaaaatgccaaaagtaaagacaaaccgtgttacatacccagagggctgggaattaattgagcctactctccatgaacttcaagcaaagatgagggaagctgagaacgatccacatgatggcaagagaaactgtgagacattatggcctatatttaagattgcacaccagaagagccgctacatatttgacctctatcatcaaaggaaggagatttctaaagaattgtatgaattctgtttagatcaaggatatgctgaccacaatctaattgcaaaatggaagaagcctggttatgaacgtctatgctgcttggggtgtatgcagccacgcaatcacaattttgccaccacttgtgtttgcagagttcccaagaaccttagggaggagaaggttatagagtgtgttcattgtggttgcaagggctgtgctagcggggactgagtggacatcaattctattatcagttgccaaaaagggggtttcttaggattattttgttggtgtttttagcattctccagattgtgttaactatttactacatgaatactatactatgtaatgaaaaatattagttaattgttaactatctgcac

SEQ ID NO: 55886 - protein, 145 aa, Glycine max
  peptide (1)..(145): Ceres Seq. ID no. 15178254
  misc_feature (1)..(143): Pfam Name: G10 protein Pfam Description: G10 protein
  misc_feature (1)..(131): Homolog of NCBI NO: 40740955 NR Description: hypothetical protein AN8857.2 [Aspergillus
  misc_feature (3)..(142): Homolog of NCBI NO: 39590778 NR Description: Hypothetical protein CBG10019 [Caenorhabditis
  misc_feature (1)..(142): Homolog of NCBI NO: 120625 NR Description: G10 PROTEIN
  misc_feature (1)..(142): Homolog of NCBI NO: 32171175 NR Description: maternal G10 transcript [Homo sapiens]
  misc_feature (2)..(142): Homolog of NCBI NO: 15128111 NR Description: G10-like protein [Branchiostoma belcheri]
  misc_feature (1)..(142): Homolog of NCBI NO: 15029378 NR Description: G10 protein [Branchiostoma belcheri]
  misc_feature (1)..(130): Homolog of NCBI NO: 5852181 NR Description: zhb0011.1 [Oryza sativa (indica cultivar-group)]
  misc_feature (1)..(144): Homolog of NCBI NO: 544359 NR Description: G10 PROTEIN HOMOLOG
  misc_feature (1)..(145): Homolog of NCBI NO: 15233517 NR Description: G10 - like protein [Arabidopsis thaliana]
  misc_feature (1)..(145): Homolog of NCBI NO: 34908438 NR Description: putative G10 protein [Oryza sativa (japonica
MPKVKTNRVTYPEGWELIEPTLHELQAKMREAENDPHDGKRNCETLWPIFKIAHQKSRYIFDLYHQRKEISKELYEFCLDQGYADHNLIAKWKKPGYERLCCLGCMQPRNHNFATTCVCRVPKNLREEKVIECVHCGCKGCASGD

SEQ ID NO: 55887 - protein, 117 aa, Glycine max
  peptide (1)..(117): Ceres Seq. ID no. 15178255
  misc_feature (1)..(115): Pfam Name: G10 protein Pfam Description: G10 protein
  misc_feature (1)..(103): Homolog of NCBI NO: 40740955 NR Description: hypothetical protein AN8857.2 [Aspergillus
  misc_feature (1)..(114): Homolog of NCBI NO: 39590778 NR Description: Hypothetical protein CBG10019 [Caenorhabditis
  misc_feature (1)..(114): Homolog of NCBI NO: 120625 NR Description: G10 PROTEIN
  misc_feature (1)..(114): Homolog of NCBI NO: 32171175 NR Description: maternal G10 transcript [Homo sapiens]
  misc_feature (1)..(114): Homolog of NCBI NO: 15128111 NR Description: G10-like protein [Branchiostoma belcheri]
  misc_feature (1)..(114): Homolog of NCBI NO: 15029378 NR Description: G10 protein [Branchiostoma belcheri]
  misc_feature (1)..(102): Homolog of NCBI NO: 5852181 NR Description: zhb0011.1 [Oryza sativa (indica cultivar-group)]
  misc_feature (1)..(116): Homolog of NCBI NO: 544359 NR Description: G10 PROTEIN HOMOLOG
  misc_feature (1)..(117): Homolog of NCBI NO: 15233517 NR Description: G10 - like protein [Arabidopsis thaliana]
  misc_feature (1)..(117): Homolog of NCBI NO: 34908438 NR Description: putative G10 protein [Oryza sativa (japonica
MREAENDPHDGKRNCETLWPIFKIAHQKSRYIFDLYHQRKEISKELYEFCLDQGYADHNLIAKWKKPGYERLCCLGCMQPRNHNFATTCVCRVPKNLREEKVIECVHCGCKGCASGD

SEQ ID NO: 55888 - DNA, 989 bp, Glycine max
  misc_feature (1)..(989): Ceres Seq. ID no. 12610925
caattttcattccgaagtccctttcaacgagagagagggagagagagaggagcagttagttgagacccgagacggagatggatctgctggagaggagcgcagccactattaaggcggagcagggggaggcccagcgcaaggaagccgagaggaaggagcaggagcacaaggagcaggagacccagcagccagggctcaccggccgacccccgctcgccaacggcaggtctggaatgttgccaatgtcgagccctccagcaaatccgggacagcttaccattttttatggtgggtcagtatgtgtgtatgactcagtgccaccagagaaggctcaagcaatcatgctcattgcagcagcagcagctgcggcctcaaaaagcaatggcaccactgctgttaagcctccagcgatgtctgcgaccaatgctatccaagccatgcttacgcggtcgctctcactccagagcacttctgtagcaaatggacaacctcaggctgtcgcggatcctggctcgatttgcaagcttcaggctgatcttcccatcgccaggagacactcccttcagcgcttcctggagaagcgccgtgacagggtggtgagcaaagctccttacggcgccgggaagccatccgaaggcatgggagcatcttctgggatggaagtggtcgcggagggcaaggcccagtaaccatgaaagaagaaagacggccctgcccctgatgtttggaaggaaaggggcgtgtgttagctgatgtgatgttacaccgtagaaccatcatcgttcgtgacgataataatgatccgaccagaacctctattgtcattgttctgttgtcattgtgtagtttactctgtatctgaacttgttttggtctgcggaaccgtactgctatgatgaatgtgtcgatgatgtaaatcgtggctgtcgtgcctgtctgactgatacattgttatcgtagtcgataaatgatatcatctgtgccgtctc

SEQ ID NO: 55889 - protein, 203 aa, Glycine max
  peptide (1)..(203): Ceres Seq. ID no. 12610926
  misc_feature (59)..(92): Pfam Name: ZIM motif Pfam Description: ZIM motif
  misc_feature (59)..(179): Homolog of NCBI NO: 18410737 NR Description: expressed protein
  misc_feature (40)..(194): Homolog of NCBI NO: 25406068 NR Description: hypothetical protein F5A18.12 [imported] -
  misc_feature (65)..(186): Homolog of NCBI NO: 29788814 NR Description: unknown protein [Oryza sativa (japonica
  misc_feature (38)..(92): Homolog of NCBI NO: 21618251 NR Description: unknown [Arabidopsis thaliana]
  misc_feature (38)..(92): Homolog of NCBI NO: 18401669 NR Description: expressed protein
  misc_feature (107)..(185): Homolog of NCBI NO: 21618251 NR Description: unknown [Arabidopsis thaliana]
  misc_feature (107)..(185): Homolog of NCBI NO: 18401669 NR Description: expressed protein
  misc_feature (22)..(186): Homolog of NCBI NO: 23237931 NR Description: contains ESTs
  misc_feature (50)..(179): Homolog of NCBI NO: 15242096 NR Description: putative protein
  misc_feature (1)..(203): Homolog of NCBI NO: 32488878 NR Description: OSJNBa0060D06.16 [Oryza sativa (japonica
MDLLERSAATIKAEQGEAQRKEAERKEQEHKEQETQQPGLTGRPPLANGRSGMLPMSSPPANPGQLTIFYGGSVCVYDSVPPEKAQAIMLIAAAAAAASKSNGTTAVKPPAMSATNAIQAMLTRSLSLQSTSVANGQPQAVADPGSICKLQADLPIARRHSLQRFLEKRRDRVVSKAPYGAGKPSEGMGASSGMEVVAEGKAQ

SEQ ID NO: 55890 - protein, 151 aa, Glycine max
  peptide (1)..(151): Ceres Seq. ID no. 12610927
  misc_feature (7)..(40): Pfam Name: ZIM motif Pfam Description: ZIM motif
  misc_feature (7)..(127): Homolog of NCBI NO: 18410737 NR Description: expressed protein
  misc_feature (1)..(142): Homolog of NCBI NO: 25406068 NR Description: hypothetical protein F5A18.12 [imported] -
  misc_feature (13)..(134): Homolog of NCBI NO: 29788814 NR Description: unknown protein [Oryza sativa (japonica
  misc_feature (1)..(40): Homolog of NCBI NO: 21618251 NR Description: unknown [Arabidopsis thaliana]
  misc_feature (1)..(40): Homolog of NCBI NO: 18401669 NR Description: expressed protein
  misc_feature (55)..(133): Homolog of NCBI NO: 21618251 NR Description: unknown [Arabidopsis thaliana]
  misc_feature (55)..(133): Homolog of NCBI NO: 18401669 NR Description: expressed protein
  misc_feature (1)..(134): Homolog of NCBI NO: 23237931 NR Description: contains ESTs
  misc_feature (1)..(127): Homolog of NCBI NO: 15242096 NR Description: putative protein
  misc_feature (1)..(151): Homolog of NCBI NO: 32488878 NR Description: OSJNBa0060D06.16 [Oryza sativa (japonica
MLPMSSPPANPGQLTIFYGGSVCVYDSVPPEKAQAIMLIAAAAAAASKSNGTTAVKPPAMSATNAIQAMLTRSLSLQSTSVANGQPQAVADPGSICKLQADLPIARRHSLQRFLEKRRDRVVSKAPYGAGKPSEGMGASSGMEVVAEGKAQ

SEQ ID NO: 55891 - protein, 148 aa, Glycine max
  peptide (1)..(148): Ceres Seq. ID no. 12610928
  misc_feature (4)..(37): Pfam Name: ZIM motif Pfam Description: ZIM motif
  misc_feature (4)..(124): Homolog of NCBI NO: 18410737 NR Description: expressed protein
  misc_feature (1)..(139): Homolog of NCBI NO: 25406068 NR Description: hypothetical protein F5A18.12 [imported] -
  misc_feature (10)..(131): Homolog of NCBI NO: 29788814 NR Description: unknown protein [Oryza sativa (japonica
  misc_feature (1)..(37): Homolog of NCBI NO: 21618251 NR Description: unknown [Arabidopsis thaliana]
  misc_feature (1)..(37): Homolog of NCBI NO: 18401669 NR Description: expressed protein
  misc_feature (52)..(130): Homolog of NCBI NO: 21618251 NR Description: unknown [Arabidopsis thaliana]
  misc_feature (52)..(130): Homolog of NCBI NO: 18401669 NR Description: expressed protein
  misc_feature (1)..(131): Homolog of NCBI NO: 23237931 NR Description: contains ESTs
  misc_feature (1)..(124): Homolog of NCBI NO: 15242096 NR Description: putative protein
  misc_feature (1)..(148): Homolog of NCBI NO: 32488878 NR Description: OSJNBa0060D06.16 [Oryza sativa (japonica
MSSPPANPGQLTIFYGGSVCVYDSVPPEKAQAIMLIAAAAAAASKSNGTTAVKPPAMSATNAIQAMLTRSLSLQSTSVANGQPQAVADPGSICKLQADLPIARRHSLQRFLEKRRDRVVSKAPYGAGKPSEGMGASSGMEVVAEGKAQ

SEQ ID NO: 55892 - DNA, 1164 bp, Glycine max
  misc_feature (1)..(1164): Ceres Seq. ID no. 12610930
agacaataacccacggagagggttagaagacggcgaaatatccgcaacgagctcgtggaaatggcgacgacggtggtgccgctcgccgcggccatggccgccgctccaaggtctctcctcctgggcgctccagaccccttcccgttcctcgggatccgcccgctcctctgccgctctccgcgcggcgtcgcctgcgcccttcgccgaccttccaagtacaagaataaaattaagaacgaggtggtggtagcagaggatgacattgatggcagtgacgaggatgacgacgacgacgagggtgggttggaagcgcttttcaagcagctggaagaagatctgaagaacgacgatttgtctgtcgaggatgatgaaatatcagaggaagacatggccaggtttgaacaggtattggcagaagccattggagatgtcgatgttgctgatgaatctgcagtagatttggtgtcaggctccgaagttgttggtaatgatgaggcagcagatccagtcgaacggccagagcttaaaagctggcagctccggagattggctcgtgcaatgcaaattggtcggcgtaaaactagtataaagaatcttgcaggggagcttggcctggataggggtttggtcattgaattgctccgcaatccgcctccagaacttctacttatgtctgattctttgcctgatgaagccccctctaaacctgaaactaaggaaatagagccctctccagtagctgatgaggttgtagttgatgagattgatgccactgaagccaatccacagatggaccttccggttcatgtcatgagcacagaatggtctgcgcagaaaaggctgaaaaaggcgcaactggaaacactggaaaaggtttacttcaaatccaaacgccccactaatactatgatcagtagcatagttcaagttacaagccttccacgaaagaccattattaagtggtttgaggatagaagggagcaagatggtgtaccagaccgtcgtgccgcatacatgagatccctatctgagacaatggctagttgataacttcagataagcttgtgttatagtgttctcttttaggtctgaactacgtaggaatttgtaaattcaaactgtgaaatgcaaccagtttcataaggccaacacggcgtatctttc

SEQ ID NO: 55893 - protein, 328 aa, Glycine max
  peptide (1)..(328): Ceres Seq. ID no. 12610931
  misc_feature (51)..(318): Homolog of NCBI NO: 30683552 NR Description: expressed protein [Arabidopsis thaliana]
  misc_feature (51)..(318): Homolog of NCBI NO: 8953389 NR Description: putative protein [Arabidopsis thaliana]
  misc_feature (23)..(328): Homolog of NCBI NO: 29367497 NR Description: unknown [Oryza sativa (japonica cultivar-group)]
MATTVVPLAAAMAAAPRSLLLGAPDPFPFLGIRPLLCRSPRGVACALRRPSKYKNKIKNEVVVAEDDIDGSDEDDDDDEGGLEALFKQLEEDLKNDDLSVEDDEISEEDMARFEQVLAEAIGDVDVADESAVDLVSGSEVVGNDEAADPVERPELKSWQLRRLARAMQIGRRKTSIKNLAGELGLDRGLVIELLRNPPPELLLMSDSLPDEAPSKPETKEIEPSPVADEVVVDEIDATEANPQMDLPVHVMSTEWSAQKRLKKAQLETLEKVYFKSKRPTNTMISSIVQVTSLPRKTIIKWFEDRREQDGVPDRRAAYMRSLSETMAS

SEQ ID NO: 55894 - protein, 317 aa, Glycine max
  peptide (1)..(317): Ceres Seq. ID no. 12610932
  misc_feature (40)..(307): Homolog of NCBI NO: 30683552 NR Description: expressed protein [Arabidopsis thaliana]
  misc_feature (40)..(307): Homolog of NCBI NO: 8953389 NR Description: putative protein [Arabidopsis thaliana]
  misc_feature (12)..(317): Homolog of NCBI NO: 29367497 NR Description: unknown [Oryza sativa (japonica cultivar-group)]
MAAAPRSLLLGAPDPFPFLGIRPLLCRSPRGVACALRRPSKYKNKIKNEVVVAEDDIDGSDEDDDDDEGGLEALFKQLEEDLKNDDLSVEDDEISEEDMARFEQVLAEAIGDVDVADESAVDLVSGSEVVGNDEAADPVERPELKSWQLRRLARAMQIGRRKTSIKNLAGELGLDRGLVIELLRNPPPELLLMSDSLPDEAPSKPETKEIEPSPVADEVVVDEIDATEANPQMDLPVHVMSTEWSAQKRLKKAQLETLEKVYFKSKRPTNTMISSIVQVTSLPRKTIIKWFEDRREQDGVPDRRAAYMRSLSETMAS

SEQ ID NO: 55895 - protein, 219 aa, Glycine max
  peptide (1)..(219): Ceres Seq. ID no. 12610933
  misc_feature (1)..(209): Homolog of NCBI NO: 30683552 NR Description: expressed protein [Arabidopsis thaliana]
  misc_feature (1)..(209): Homolog of NCBI NO: 8953389 NR Description: putative protein [Arabidopsis thaliana]
  misc_feature (1)..(219): Homolog of NCBI NO: 29367497 NR Description: unknown [Oryza sativa (japonica cultivar-group)]
MARFEQVLAEAIGDVDVADESAVDLVSGSEVVGNDEAADPVERPELKSWQLRRLARAMQIGRRKTSIKNLAGELGLDRGLVIELLRNPPPELLLMSDSLPDEAPSKPETKEIEPSPVADEVVVDEIDATEANPQMDLPVHVMSTEWSAQKRLKKAQLETLEKVYFKSKRPTNTMISSIVQVTSLPRKTIIKWFEDRREQDGVPDRRAAYMRSLSETMAS

SEQ ID NO: 55896 - DNA, 864 bp, Glycine max
  misc_feature (1)..(864): Ceres Seq. ID no. 13582138
atggaagagaagagatcgatggagcaacccaccgatcgattcgccatggccacctttctgatcttcctcatacttgccctcgccgccggcagcagcaaccaaggaggagcagctgctgccgccgccggagcccgacctgaccttatcgtcatgaagctgcacggtcacgaccccgagggcccctccgtggccttccagacccacgacctctccttcgccggcttcaccaacgggggcggccactggcaggctttcccaggcctcgcccacctgttcccgacgtccacgcccctcccgttcggcagcagctacgacgacctcatcggcggcctcgccaacctgccgagggtgcctctggggcggcaggccatggccgacgccgcccgggtgctctccgcctacgacccgtccgcggccgcggccgccgacgtcgagccagtcaagcgcgcactggcagcgctcaaggtgatgctaggcgatgcccagcggctgcagcccatccacgagacggtcgttcgggggtgggagagcgagtcccgcgtcgcgcccgagcacctgccctacattgaccactgggacaccatctcctacgagatcatccgcgccaaccggacgggcaagtggaacgggcccttcgccaagatgctggaaacccaagccaacatccgcagccaggaggaggcgctcgccgtcgtccgggtgctgctccatgccgacttcgagcaggtgctccaggctcacggcaccaagatcaacttccagtgaacatgcatgcatgcatgcatgcttgctggcttagacttcagatttgtgctccatctcctattcgagtccatgtttctttaattaaccatgttcgttgtt

SEQ ID NO: 55897 - protein, 254 aa, Glycine max
  peptide (1)..(254): Ceres Seq. ID no. 13582139
  misc_feature (49)..(215): Pfam Name: Ribosome inactivating protein Pfam Description: Ribosome inactivating protein
  misc_feature (60)..(239): Homolog of NCBI NO: 132580 NR Description: Protein synthesis inhibitor II
  misc_feature (60)..(236): Homolog of NCBI NO: 479388 NR Description: tritin - wheat
  misc_feature (60)..(236): Homolog of NCBI NO: 7442154 NR Description: protein synthesis inhibitor - rye
  misc_feature (62)..(236): Homolog of NCBI NO: 29244620 NR Description: hypothetical protein [Oryza sativa (japonica
  misc_feature (48)..(249): Homolog of NCBI NO: 18150092 NR Description: RA39p [Oryza sativa]
  misc_feature (53)..(238): Homolog of NCBI NO: 29150390 NR Description: hypothetical protein [Oryza sativa (japonica
  misc_feature (49)..(215): Homolog of NCBI NO: 37537022 NR Description: putative ribosome inactivating toxin protein
MEEKRSMEQPTDRFAMATFLIFLILALAAGSSNQGGAAAAAAGARPDLIVMKLHGHDPEGPSVAFQTHDLSFAGFTNGGGHWQAFPGLAHLFPTSTPLPFGSSYDDLIGGLANLPRVPLGRQAMADAARVLSAYDPSAAAAADVEPVKRALAALKVMLGDAQRLQPIHETVVRGWESESRVAPEHLPYIDHWDTISYEIIRANRTGKWNGPFAKMLETQANIRSQEEALAVVRVLLHADFEQVLQAHGTKINFQ

SEQ ID NO: 55898 - protein, 248 aa, Glycine max
  peptide (1)..(248): Ceres Seq. ID no. 13582140
  misc_feature (43)..(209): Pfam Name: Ribosome inactivating protein Pfam Description: Ribosome inactivating protein
  misc_feature (54)..(233): Homolog of NCBI NO: 132580 NR Description: Protein synthesis inhibitor II
  misc_feature (54)..(230): Homolog of NCBI NO: 479388 NR Description: tritin - wheat
  misc_feature (54)..(230): Homolog of NCBI NO: 7442154 NR Description: protein synthesis inhibitor - rye
  misc_feature (56)..(230): Homolog of NCBI NO: 29244620 NR Description: hypothetical protein [Oryza sativa (japonica
  misc_feature (42)..(243): Homolog of NCBI NO: 18150092 NR Description: RA39p [Oryza sativa]
  misc_feature (47)..(232): Homolog of NCBI NO: 29150390 NR Description: hypothetical protein [Oryza sativa (japonica
  misc_feature (43)..(209): Homolog of NCBI NO: 37537022 NR Description: putative ribosome inactivating toxin protein
MEQPTDRFAMATFLIFLILALAAGSSNQGGAAAAAAGARPDLIVMKLHGHDPEGPSVAFQTHDLSFAGFTNGGGHWQAFPGLAHLFPTSTPLPFGSSYDDLIGGLANLPRVPLGRQAMADAARVLSAYDPSAAAAADVEPVKRALAALKVMLGDAQRLQPIHETVVRGWESESRVAPEHLPYIDHWDTISYEIIRANRTGKWNGPFAKMLETQANIRSQEEALAVVRVLLHADFEQVLQAHGTKINFQ

SEQ ID NO: 55899 - protein, 239 aa, Glycine max
  peptide (1)..(239): Ceres Seq. ID no. 13582141
  misc_feature (34)..(200): Pfam Name: Ribosome inactivating protein Pfam Description: Ribosome inactivating protein
  misc_feature (45)..(224): Homolog of NCBI NO: 132580 NR Description: Protein synthesis inhibitor II
  misc_feature (45)..(221): Homolog of NCBI NO: 479388 NR Description: tritin - wheat
  misc_feature (45)..(221): Homolog of NCBI NO: 7442154 NR Description: protein synthesis inhibitor - rye
  misc_feature (47)..(221): Homolog of NCBI NO: 29244620 NR Description: hypothetical protein [Oryza sativa (japonica
  misc_feature (33)..(234): Homolog of NCBI NO: 18150092 NR Description: RA39p [Oryza sativa]
  misc_feature (38)..(223): Homolog of NCBI NO: 29150390 NR Description: hypothetical protein [Oryza sativa (japonica
  misc_feature (34)..(200): Homolog of NCBI NO: 37537022 NR Description: putative ribosome inactivating toxin protein
MATFLIFLILALAAGSSNQGGAAAAAAGARPDLIVMKLHGHDPEGPSVAFQTHDLSFAGFTNGGGHWQAFPGLAHLFPTSTPLPFGSSYDDLIGGLANLPRVPLGRQAMADAARVLSAYDPSAAAAADVEPVKRALAALKVMLGDAQRLQPIHETVVRGWESESRVAPEHLPYIDHWDTISYEIIRANRTGKWNGPFAKMLETQANIRSQEEALAVVRVLLHADFEQVLQAHGTKINFQ

SEQ ID NO: 55900 - DNA, 823 bp, Glycine max
  misc_feature (1)..(823): Ceres Seq. ID no. 12611052
atctagtgaggctagtccagacagataaccacaagtcggaaaggaaaaccaggcgagatgaacgcacgcgacctcctcttctccggcttcgacatcgtcaagcaacaggcgagcgccgtggcctccaccgtctcgctggccaagccgtacctcccggcaaagctaaccgagatgaacacgggcaacatcgtcgccggtctcggctacgtcaagaaccatacaggagcggccgtggcctccaccgtttcgttggccaagccgtacctccccgcaaggcttaccgggatgaacaccggcgacatcgtcgcaggtctcggctacgtcaagaaccatacgggagcggccatggtctccaccgtctcgttggccaagccgtacctgcccgcaaagctctccacgcgggacggtgccgtgggaaccgcggcgatggtcatcgggggcgccgtgggcgcctacttcctctggcccgctgcggccgcccccgccgcggccggcgccatgatgaaggcgcctggtgccgccggcttcctcatctcccgcacggcgttcctggccaacccgcaggtctactaccagatcctccgcaccgctggcgccgcggcggccgccgccgctttcgtgtagggaagcaagcaaacgcgccccttggatctctcccccgtttgctttgtttcgcgtagtgtgtttaattaagcgtggttcgactatatggtggttcattccatctattctactgctgtatacagtatactccttgccgtgggagcgagagaagatgggggtgataataagcggtgcctcgtactcgtgtttgccattttcc

SEQ ID NO: 55901 - protein, 225 aa, Glycine max
  peptide (1)..(225): Ceres Seq. ID no. 12611053
LVRLVQTDNHKSERKTRRDERTRPPLLRLRHRQATGERRGLHRLAGQAVPPGKANRDEHGQHRRRSRLRQEPYRSGRGLHRFVGQAVPPRKAYRDEHRRHRRRSRLRQEPYGSGHGLHRLVGQAVPARKALHAGRCRGNRGDGHRGRRGRLLPLARCGRPRRGRRHDEGAWCRRLPHLPHGVPGQPAGLLPDPPHRWRRGGRRRFRVGKQANAPLGSLPRLLCFA

SEQ ID NO: 55902 - protein, 188 aa, Glycine max
  peptide (1)..(188): Ceres Seq. ID no. 12611054
  misc_feature (117)..(187): Homolog of NCBI NO: 34394580 NR Description: hypothetical protein [Oryza sativa (japonica
  misc_feature (77)..(188): Homolog of NCBI NO: 34394582 NR Description: unknown protein [Oryza sativa (japonica
MNARDLLFSGFDIVKQQASAVASTVSLAKPYLPAKLTEMNTGNIVAGLGYVKNHTGAAVASTVSLAKPYLPARLTGMNTGDIVAGLGYVKNHTGAAMVSTVSLAKPYLPAKLSTRDGAVGTAAMVIGGAVGAYFLWPAAAAPAAAGAMMKAPGAAGFLISRTAFLANPQVYYQILRTAGAAAAAAAFV

SEQ ID NO: 55903 - protein, 150 aa, Glycine max
  peptide (1)..(150): Ceres Seq. ID no. 12611055
  misc_feature (79)..(149): Homolog of NCBI NO: 34394580 NR Description: hypothetical protein [Oryza sativa (japonica
  misc_feature (39)..(150): Homolog of NCBI NO: 34394582 NR Description: unknown protein [Oryza sativa (japonica
MNTGNIVAGLGYVKNHTGAAVASTVSLAKPYLPARLTGMNTGDIVAGLGYVKNHTGAAMVSTVSLAKPYLPAKLSTRDGAVGTAAMVIGGAVGAYFLWPAAAAPAAAGAMMKAPGAAGFLISRTAFLANPQVYYQILRTAGAAAAAAAFV

SEQ ID NO: 55904 - DNA, 743 bp, Glycine max
  misc_feature (1)..(743): Ceres Seq. ID no. 12610934
aaacacaacacacaatccaagttaaagaaaccgttaaaaagaaaaaaaaaactacgctgtttcttgaaaatggagattgttaggttcgcggtcatttttgtactttgctccatctcgtcttccaacgccgcaattacaccgccgagcggcggagcaggagatgctcactcaatgccatgtatacaaaaactgatgccgtgtcagccgtatcttcactcggcgactcccccgcctccagcgtcgtgttgtatgccgttgaaggagatcgtcgagaccgacgtgaactgtctttgctccgtcttcaacaacgtagatatgcttaaatcgcttaaccttactaaagaaaacgctcttgttctccccaaagcttgtggcgccaacgctgatgtgtcacaatgcaaagccagcaccggtactacgacgccttcgacgtcaccgggaactactaaaactcctccggcatctcccgctgaaagcggatctaccggaggtccagcctcttcaacggccaaaccatcagactcggctcccgccatcaacttttctggaattagcttcgcctccgctttcgtggcattggcaacaatcttattctgatatcctactaattagtcacgtctttattcagcttagttggtttaaaatgttggaaactactattatcagacaatattcggtaactgatgagtattaatatgtactatgaaaattctaataatagtaataatttccaacagctcttt

SEQ ID NO: 55905 - protein, 198 aa, Glycine max
  peptide (1)..(198): Ceres Seq. ID no. 12610935
  misc_feature (60)..(133): Pfam Name: Protease inhibitor/seed storage/LTP family Pfam Description: Protease inhibitor/seed storage/LTP family
  misc_feature (60)..(171): Homolog of NCBI NO: 15221585 NR Description: unknown protein; protein id: At1g62790.1
  misc_feature (60)..(170): Homolog of NCBI NO: 30696757 NR Description: protease inhibitor/seed storage/lipid transfer
  misc_feature (30)..(194): Homolog of NCBI NO: 25553602 NR Description: OJ1656_E11.34 [Oryza sativa (japonica
  misc_feature (54)..(197): Homolog of NCBI NO: 7484433 NR Description: lipid transfer protein - Norway spruce
  misc_feature (53)..(146): Homolog of NCBI NO: 25406275 NR Description: hypothetical protein F6D5.6 [imported] -
  misc_feature (53)..(146): Homolog of NCBI NO: 15219496 NR Description: hypothetical protein; protein id: At1g73550.1
  misc_feature (24)..(133): Homolog of NCBI NO: 25406276 NR Description: probable lipid transfer protein F6D5.5
  misc_feature (24)..(155): Homolog of NCBI NO: 21593596 NR Description: lipid transfer protein, putative [Arabidopsis
  misc_feature (24)..(155): Homolog of NCBI NO: 18410388 NR Description: lipid transfer protein, putative
  misc_feature (24)..(198): Homolog of NCBI NO: 15221052 NR Description: lipid transfer protein, putative
KHNTQSKLKKPLKRKKKLRCFLKMEIVRFAVIFVLCSISSSNAAITPPSGGAGDAHSMPCIQKLMPCQPYLHSATPPPPASCCMPLKEIVETDVNCLCSVFNNVDMLKSLNLTKENALVLPKACGANADVSQCKASTGTTTPSTSPGTTKTPPASPAESGSTGGPASSTAKPSDSAPAINFSGISFASAFVALATILF

SEQ ID NO: 55906 - protein, 175 aa, Glycine max
  peptide (1)..(175): Ceres Seq. ID no. 12610936
  misc_feature (37)..(110): Pfam Name: Protease inhibitor/seed storage/LTP family Pfam Description: Protease inhibitor/seed storage/LTP family
  misc_feature (37)..(148): Homolog of NCBI NO: 15221585 NR Description: unknown protein; protein id: At1g62790.1
  misc_feature (37)..(147): Homolog of NCBI NO: 30696757 NR Description: protease inhibitor/seed storage/lipid transfer
  misc_feature (7)..(171): Homolog of NCBI NO: 25553602 NR Description: OJ1656_E11.34 [Oryza sativa (japonica
  misc_feature (31)..(174): Homolog of NCBI NO: 7484433 NR Description: lipid transfer protein - Norway spruce
  misc_feature (30)..(123): Homolog of NCBI NO: 25406275 NR Description: hypothetical protein F6D5.6 [imported] -
  misc_feature (30)..(123): Homolog of NCBI NO: 15219496 NR Description: hypothetical protein; protein id: At1g73550.1
  misc_feature (1)..(110): Homolog of NCBI NO: 25406276 NR Description: probable lipid transfer protein F6D5.5
  misc_feature (1)..(132): Homolog of NCBI NO: 21593596 NR Description: lipid transfer protein, putative [Arabidopsis
  misc_feature (1)..(132): Homolog of NCBI NO: 18410388 NR Description: lipid transfer protein, putative
  misc_feature (1)..(175): Homolog of NCBI NO: 15221052 NR Description: lipid transfer protein, putative
MEIVRFAVIFVLCSISSSNAAITPPSGGAGDAHSMPCIQKLMPCQPYLHSATPPPPASCCMPLKEIVETDVNCLCSVFNNVDMLKSLNLTKENALVLPKACGANADVSQCKASTGTTTPSTSPGTTKTPPASPAESGSTGGPASSTAKPSDSAPAINFSGISFASAFVALATILF

SEQ ID NO: 55907 - protein, 141 aa, Glycine max
  peptide (1)..(141): Ceres Seq. ID no. 12610937
  misc_feature (3)..(76): Pfam Name: Protease inhibitor/seed storage/LTP family Pfam Description: Protease inhibitor/seed storage/LTP family
  misc_feature (3)..(114): Homolog of NCBI NO: 15221585 NR Description: unknown protein; protein id: At1g62790.1
  misc_feature (3)..(113): Homolog of NCBI NO: 30696757 NR Description: protease inhibitor/seed storage/lipid transfer
  misc_feature (1)..(137): Homolog of NCBI NO: 25553602 NR Description: OJ1656_E11.34 [Oryza sativa (japonica
  misc_feature (1)..(140): Homolog of NCBI NO: 7484433 NR Description: lipid transfer protein - Norway spruce
  misc_feature (1)..(89): Homolog of NCBI NO: 25406275 NR Description: hypothetical protein F6D5.6 [imported] -
  misc_feature (1)..(89): Homolog of NCBI NO: 15219496 NR Description: hypothetical protein; protein id: At1g73550.1
  misc_feature (1)..(76): Homolog of NCBI NO: 25406276 NR Description: probable lipid transfer protein F6D5.5
  misc_feature (1)..(98): Homolog of NCBI NO: 21593596 NR Description: lipid transfer protein, putative [Arabidopsis
  misc_feature (1)..(98): Homolog of NCBI NO: 18410388 NR Description: lipid transfer protein, putative
  misc_feature (1)..(141): Homolog of NCBI NO: 15221052 NR Description: lipid transfer protein, putative
MPCIQKLMPCQPYLHSATPPPPASCCMPLKEIVETDVNCLCSVFNNVDMLKSLNLTKENALVLPKACGANADVSQCKASTGTTTPSTSPGTTKTPPASPAESGSTGGPASSTAKPSDSAPAINFSGISFASAFVALATILF

SEQ ID NO: 55908 - DNA, 817 bp, Glycine max
  misc_feature (1)..(817): Ceres Seq. ID no. 13639161
aagttagtcagacaacgggccactctctcgcgcctttagaaaccacgagtacgtagatcaatcttgattgatttctctctccgtcccggccggccatgaggagctcagtgcacgtgccagccgcggtagaggcgctgctgggccacccggtggcggcactgtcggagaggccggcgccgcggctaacgcggctgctggtgaacgtgacggtggagcggagcctgtggccggtgcacgtgctgctgggcgccgatgccacggtggccgacctggcgcgcgccgccgtcgacgcctatgccgccgaggggcgcaggccgccgctccccaccgatgacggcgccaccgacgcggccgcgcggttcgaagctgcacctctccaagtacgccctcgacgctcttgacccggaagagaaggtgcttgacctgggctctcgcaacttcttcctttgcgccgccaggtcgacgctgggatcagatcatcatctgcgacttcgctcatcactgacatgtcttgatgtctgaaggaaaaaagtgtgtgccatgtaaaacgagttggcatgtcggcctatatatgtggagtatatataactcatgttcgatccttctttggttgatcggtctgccagatcctctgcatcagtgtgtacgtagtgttagcttaggtatacatacagttcggccaagcaacgatacatacagatacatgtccggcgtatttacgagctcaagatatgtacgtggcgacgctgtatgtatacagctgcaagatgcaacgtttatgtatgtacctagtgccatgatgttacgtttctggact

SEQ ID NO: 55909 - protein, 101 aa, Glycine max
  peptide (1)..(101): Ceres Seq. ID no. 13639162
  misc_feature (31)..(99): Homolog of NCBI NO: 38347592 NR Description: OSJNBa0042I15.5 [Oryza sativa (japonica
  misc_feature (28)..(80): Homolog of NCBI NO: 18401542 NR Description: expressed protein [Arabidopsis thaliana]
MRSSVHVPAAVEALLGHPVAALSERPAPRLTRLLVNVTVERSLWPVHVLLGADATVADLARAAVDAYAAEGRRPPLPTDDGATDAAARFEAAPLQVRPRRS

SEQ ID NO: 55910 - protein, 101 aa, Glycine max
  peptide (1)..(101): Ceres Seq. ID no. 13639163
MSEGKKCVPCKTSWHVGLYMWSIYNSCSILLWLIGLPDPLHQCVRSVSLGIHTVRPSNDTYRYMSGVFTSSRYVRGDAVCIQLQDATFMYVPSAMMLRFWT

SEQ ID NO: 55911 - protein, 89 aa, Glycine max
  peptide (1)..(89): Ceres Seq. ID no. 13639164
  misc_feature (30)..(73): Homolog of NCBI NO: 18401542 NR Description: expressed protein [Arabidopsis thaliana]
MPRWPTWRAPPSTPMPPRGAGRRSPPMTAPPTRPRGSKLHLSKYALDALDPEEKVLDLGSRNFFLCAARSTLGSDHHLRLRSSLTCLDV

SEQ ID NO: 55912 - DNA, 1013 bp, Glycine max
  misc_feature (1)..(1013): Ceres Seq. ID no. 13595000
cgttctccgctcgccgccgcgccgcaatatcgtcgggaacatgagcggcgcgacgggcaccgccgacttcttctaccgggaggcgctgcgcctcggctacgtcgcccgctctgccttcaagctgatccagatacagaagcagcacaagctcatcgccccgggcgccgccgtgctcgacctcgggtgcgcccccggcgcgtggctccaggtggcctgccagaaccttggcccgctcgagaagggcggcctggtcgtcggcgtcgatgtcaagaaggtgaaggtcccctcagcgcactgcgactggcgggtcaggacggtctgcaccgatgtgatggctttgatgaagcagcaagccagggcgatgtcgccgcaggaacggggattttctgtgatattatccgacatgtgtccggtagtttcagggatcacaaccagagacgaagctatatcttgtgagctgggcatgcgtgcgctctcgttggcagttggtaagataaaggtcaaagaatcggccgactatcgtgagactatggagaggtttcagagctccacaggcccagatcctgatgaggacggtgttcttagacgtggaggcagcctagtaatcaagtttcttgagaacgaggatataccagggtttaacaaattttgcaaagagaagtttaagaaagtatctctcctgaggcctaaggcgacgaggtctagttcgagggagatctacatgatctgcgaagggttgcggtagaagattggccaccactcacctcccatgagatcttgcaagcttgtgctgagcagagtggctggaccaagaactctacaaatttgccggtgagctgtaggcgtgtaggcctgagatgatgctaacttcatcggcaattcatgattactgagttgaggaaactccgatggtatctctcctggaggtgatttggtttggtgcctttgttaaagaacagccgtattggctttgcgttcgtgcttttagaagaaaaaaggttgtacctgtctcg

SEQ ID NO: 55913 - protein, 247 aa, Glycine max
  peptide (1)..(247): Ceres Seq. ID no. 13595001
  misc_feature (33)..(247): Pfam Name: FtsJ-like methyltransferase Pfam Description: FtsJ-like methyltransferase
  misc_feature (193)..(247): Homolog of NCBI NO: 23057977 NR Description: hypothetical protein [Pseudomonas fluorescens
  misc_feature (22)..(161): Homolog of NCBI NO: 23057977 NR Description: hypothetical protein [Pseudomonas fluorescens
  misc_feature (194)..(247): Homolog of NCBI NO: 23028204 NR Description: hypothetical protein [Microbulbifer degradans
  misc_feature (22)..(167): Homolog of NCBI NO: 23028204 NR Description: hypothetical protein [Microbulbifer degradans
  misc_feature (193)..(242): Homolog of NCBI NO: 23051065 NR Description: hypothetical protein [Methanosarcina barkeri]
  misc_feature (22)..(168): Homolog of NCBI NO: 23051065 NR Description: hypothetical protein [Methanosarcina barkeri]
  misc_feature (193)..(244): Homolog of NCBI NO: 15669566 NR Description: cell division protein FtsJ [Methanococcus
  misc_feature (22)..(166): Homolog of NCBI NO: 15669566 NR Description: cell division protein FtsJ [Methanococcus
  misc_feature (14)..(247): Homolog of NCBI NO: 15240727 NR Description: FtsJ (dbj|BAA83750.1) [Arabidopsis thaliana]
  misc_feature (14)..(245): Homolog of NCBI NO: 34897416 NR Description: putative FtsJ cell division protein
VLRSPPRRNIVGNMSGATGTADFFYREALRLGYVARSAFKLIQIQKQHKLIAPGAAVLDLGCAPGAWLQVACQNLGPLEKGGLVVGVDVKKVKVPSAHCDWRVRTVCTDVMALMKQQARAMSPQERGFSVILSDMCPVVSGITTRDEAISCELGMRALSLAVGKIKVKESADYRETMERFQSSTGPDPDEDGVLRRGGSLVIKFLENEDIPGFNKFCKEKFKKVSLLRPKATRSSSREIYMICEGLR

SEQ ID NO: 55914 - protein, 234 aa, Glycine max
  peptide (1)..(234): Ceres Seq. ID no. 13595002
  misc_feature (20)..(234): Pfam Name: FtsJ-like methyltransferase Pfam Description: FtsJ-like methyltransferase
  misc_feature (180)..(234): Homolog of NCBI NO: 23057977 NR Description: hypothetical protein [Pseudomonas fluorescens
  misc_feature (9)..(148): Homolog of NCBI NO: 23057977 NR Description: hypothetical protein [Pseudomonas fluorescens
  misc_feature (181)..(234): Homolog of NCBI NO: 23028204 NR Description: hypothetical protein [Microbulbifer degradans
  misc_feature (9)..(154): Homolog of NCBI NO: 23028204 NR Description: hypothetical protein [Microbulbifer degradans
  misc_feature (180)..(229): Homolog of NCBI NO: 23051065 NR Description: hypothetical protein [Methanosarcina barkeri]
  misc_feature (9)..(155): Homolog of NCBI NO: 23051065 NR Description: hypothetical protein [Methanosarcina barkeri]
  misc_feature (180)..(231): Homolog of NCBI NO: 15669566 NR Description: cell division protein FtsJ [Methanococcus
  misc_feature (9)..(153): Homolog of NCBI NO: 15669566 NR Description: cell division protein FtsJ [Methanococcus
  misc_feature (1)..(234): Homolog of NCBI NO: 15240727 NR Description: FtsJ (dbj|BAA83750.1) [Arabidopsis thaliana]
  misc_feature (1)..(232): Homolog of NCBI NO: 34897416 NR Description: putative FtsJ cell division protein
MSGATGTADFFYREALRLGYVARSAFKLIQIQKQHKLIAPGAAVLDLGCAPGAWLQVACQNLGPLEKGGLVVGVDVKKVKVPSAHCDWRVRTVCTDVMALMKQQARAMSPQERGFSVILSDMCPVVSGITTRDEAISCELGMRALSLAVGKIKVKESADYRETMERFQSSTGPDPDEDGVLRRGGSLVIKFLENEDIPGFNKFCKEKFKKVSLLRPKATRSSSREIYMICEGLR

SEQ ID NO: 55915 - protein, 151 aa, Glycine max
  peptide (1)..(151): Ceres Seq. ID no. 13595003
RSPLAAAPQYRREHERRDGHRRLLLPGGAAPRLRRPLCLQADPDTEAAQAHRPGRRRARPRVRPRRVAPGGLPEPWPAREGRPGRRRRCQEGEGPLSALRLAGQDGLHRCDGFDEAASQGDVAAGTGIFCDIIRHVSGSFRDHNQRRSYIL

SEQ ID NO: 55916 - DNA, 1153 bp, Glycine max
  misc_feature (1)..(1153): Ceres Seq. ID no. 13595190
atcaccggtttcgaaatccatccatccaaaccagcggaagaagaagaaaagaaaaagagaaaaatccacgcgaaagggcgagcgcaggacagggacgaacaaccttgcgtgcgaggcgaggccgctccgattcgacagacgcaggcgcagcgcagggatggacgccttctactcgacctcgtcggcggcggccagcggatggggctacgactccctcaagaacttccgcgagatctcccccgccgtgcagtcccacctcaagctcgtttacctgaccctatgctttgccctggcctcatctgccgtgggtgcttacctgcacattgccctgaacattggcgggatgctgacaatgctcgcgtgtatcggaaccatcgcctggatgttctcggtgccagtctatgaggagaggaagaggtttgggctgctgatgggtgcagccctcctggaaggggcttcagttggacctctgattgagcttgccatagactttgacccaagcatcctcgtgacagggtttgtcggaaccgccatcgccttcgggtgcttctctggcgccgccatcatcgccaagcgcagggagtacctgtacctcggcggcctgctctcctctggcctgtcgatcctgctctggctgcagtttgccacgtccatctttggccactcctctggcagcttcatgtttgaggtttactttggcctgttgatcttcctggggtacatggtgtacgacacgcaggagatcatcgagagggcgcaccacggtgacatggactacatcaagcacgcgctcaccctcttcaccgacttcgtcgccgtcctcgtccgcatcctcatcatcatgctcaagaacgcaggcgacaagtcggaggacaagaagaagtggaagaggaggtcctgaacgtgtcctctgcacatcgtagataccatcaccaccgcgctactggtaccaccaccactgctaagtacttgtaggaattaagctggcgcagtaacttggcgccgtgccacccttgttaattcgcgctcgtgtgaacattgtgtgagtttgatgctgctgatgaagcatttgcagatgctgtctgcgttccggatctcttgtgttcctgttaccgtcacgataatagaaacctgagacgatttggtttggttc

SEQ ID NO: 55917 - protein, 299 aa, Glycine max
  peptide (1)..(299): Ceres Seq. ID no. 13595191
  misc_feature (76)..(285): Pfam Name: Uncharacterised protein family UPF0005 Pfam Description: Uncharacterised protein family UPF0005
  misc_feature (69)..(293): Homolog of NCBI NO: 21311961 NR Description: testis enhanced gene transcript; Bax inhibitor-1
  misc_feature (67)..(293): Homolog of NCBI NO: 15236582 NR Description: Bax inhibitor-1 (BI1) family [Arabidopsis
  misc_feature (59)..(204): Homolog of NCBI NO: 27526517 NR Description: putative BAX inhibitor 1 [Hordeum vulgare subsp.
  misc_feature (53)..(294): Homolog of NCBI NO: 17981376 NR Description: bax inhibitor-like protein [Brassica oleracea]
  misc_feature (53)..(297): Homolog of NCBI NO: 14719274 NR Description: Bax inhibitor 1 [Brassica napus]
  misc_feature (53)..(299): Homolog of NCBI NO: 15238017 NR Description: Bax inhibitor-1 (BI-1), putative [Arabidopsis
  misc_feature (53)..(299): Homolog of NCBI NO: 21593125 NR Description: Bax inhibitor-1 like [Arabidopsis thaliana]
  misc_feature (56)..(299): Homolog of NCBI NO: 14719276 NR Description: Bax inhibitor 1 [Nicotiana tabacum]
  misc_feature (53)..(297): Homolog of NCBI NO: 12229685 NR Description: Bax inhibitor-1 (BI-1) (OsBI-1)
  misc_feature (53)..(299): Homolog of NCBI NO: 13940165 NR Description: BAX inhibitor 1 [Hordeum vulgare subsp. vulgare]
SPVSKSIHPNQRKKKKRKREKSTRKGERRTGTNNLACEARPLRFDRRRRSAGMDAFYSTSSAAASGWGYDSLKNFREISPAVQSHLKLVYLTLCFALASSAVGAYLHIALNIGGMLTMLACIGTIAWMFSVPVYEERKRFGLLMGAALLEGASVGPLIELAIDFDPSILVTGFVGTAIAFGCFSGAAIIAKRREYLYLGGLLSSGLSILLWLQFATSIFGHSSGSFMFEVYFGLLIFLGYMVYDTQEIIERAHHGDMDYIKHALTLFTDFVAVLVRILIIMLKNAGDKSEDKKKWKRRS

SEQ ID NO: 55918 - protein, 247 aa, Glycine max
  peptide (1)..(247): Ceres Seq. ID no. 13595192
  misc_feature (24)..(233): Pfam Name: Uncharacterised protein family UPF0005 Pfam Description: Uncharacterised protein family UPF0005
  misc_feature (17)..(241): Homolog of NCBI NO: 21311961 NR Description: testis enhanced gene transcript; Bax inhibitor-1
  misc_feature (15)..(241): Homolog of NCBI NO: 15236582 NR Description: Bax inhibitor-1 (BI1) family [Arabidopsis
  misc_feature (7)..(152): Homolog of NCBI NO: 27526517 NR Description: putative BAX inhibitor 1 [Hordeum vulgare subsp.
  misc_feature (1)..(242): Homolog of NCBI NO: 17981376 NR Description: bax inhibitor-like protein [Brassica oleracea]
  misc_feature (1)..(245): Homolog of NCBI NO: 14719274 NR Description: Bax inhibitor 1 [Brassica napus]
  misc_feature (1)..(247): Homolog of NCBI NO: 15238017 NR Description: Bax inhibitor-1 (BI-1), putative [Arabidopsis
  misc_feature (1)..(247): Homolog of NCBI NO: 21593125 NR Description: Bax inhibitor-1 like [Arabidopsis thaliana]
  misc_feature (4)..(247): Homolog of NCBI NO: 14719276 NR Description: Bax inhibitor 1 [Nicotiana tabacum]
  misc_feature (1)..(245): Homolog of NCBI NO: 12229685 NR Description: Bax inhibitor-1 (BI-1) (OsBI-1)
  misc_feature (1)..(247): Homolog of NCBI NO: 13940165 NR Description: BAX inhibitor 1 [Hordeum vulgare subsp. vulgare]
MDAFYSTSSAAASGWGYDSLKNFREISPAVQSHLKLVYLTLCFALASSAVGAYLHIALNIGGMLTMLACIGTIAWMFSVPVYEERKRFGLLMGAALLEGASVGPLIELAIDFDPSILVTGFVGTAIAFGCFSGAAIIAKRREYLYLGGLLSSGLSILLWLQFATSIFGHSSGSFMFEVYFGLLIFLGYMVYDTQEIIERAHHGDMDYIKHALTLFTDFVAVLVRILIIMLKNAGDKSEDKKKWKRRS

SEQ ID NO: 55919 - protein, 185 aa, Glycine max
  peptide (1)..(185): Ceres Seq. ID no. 13595193
  misc_feature (1)..(171): Pfam Name: Uncharacterised protein family UPF0005 Pfam Description: Uncharacterised protein family UPF0005
  misc_feature (1)..(179): Homolog of NCBI NO: 21311961 NR Description: testis enhanced gene transcript; Bax inhibitor-1
  misc_feature (1)..(179): Homolog of NCBI NO: 15236582 NR Description: Bax inhibitor-1 (BI1) family [Arabidopsis
  misc_feature (1)..(90): Homolog of NCBI NO: 27526517 NR Description: putative BAX inhibitor 1 [Hordeum vulgare subsp.
  misc_feature (1)..(180): Homolog of NCBI NO: 17981376 NR Description: bax inhibitor-like protein [Brassica oleracea]
  misc_feature (1)..(183): Homolog of NCBI NO: 14719274 NR Description: Bax inhibitor 1 [Brassica napus]
  misc_feature (1)..(185): Homolog of NCBI NO: 15238017 NR Description: Bax inhibitor-1 (BI-1), putative [Arabidopsis
  misc_feature (1)..(185): Homolog of NCBI NO: 21593125 NR Description: Bax inhibitor-1 like [Arabidopsis thaliana]
  misc_feature (1)..(185): Homolog of NCBI NO: 14719276 NR Description: Bax inhibitor 1 [Nicotiana tabacum]
  misc_feature (1)..(183): Homolog of NCBI NO: 12229685 NR Description: Bax inhibitor-1 (BI-1) (OsBI-1)
  misc_feature (1)..(185): Homolog of NCBI NO: 13940165 NR Description: BAX inhibitor 1 [Hordeum vulgare subsp. vulgare]
MLTMLACIGTIAWMFSVPVYEERKRFGLLMGAALLEGASVGPLIELAIDFDPSILVTGFVGTAIAFGCFSGAAIIAKRREYLYLGGLLSSGLSILLWLQFATSIFGHSSGSFMFEVYFGLLIFLGYMVYDTQEIIERAHHGDMDYIKHALTLFTDFVAVLVRILIIMLKNAGDKSEDKKKWKRRS

SEQ ID NO: 55920 - DNA, 960 bp, Glycine max
  misc_feature (1)..(960): Ceres Seq. ID no. 12611101
aacaaacacatcttcctctcagtactcgtcgtctctctactctattcttcttctctgacaaaagccaatacctgccccttgcaatatcatgggtcatgaatgtatcgatgcatcaaaggagttcaagtggggtgaggacgtcaaaagtgaagtgactgagattgttcttgttcgccatggagaaaccacttggaatgctgctggaagaatccagggacaaattgaatcggatcttaacgaaattggacaaaagcaggctgttgcaatcgctgagagattaggaaaagaggagagacccatagctatatattcatcagacctcaagcgagccaaagacactgctctcaagatcgcggaaacttgtttttgttccaaggtgactgaagtgcccgagttaaaggagaggcatgtgggtagtctccaagggttgtattggaaagaaggagcagagaaagaacctgaagcttactctgctttcttttcttcccaaaatgacctcgagattcctggaggaggagagagctttgaccaactttgtgagaggtccatgaatgcccttgagcgaattgcaaagaagcacaaaggggagagagtgatagtagtgactcatggaggagtgttaagggcaatctacatgaggatcacgcaagcttcctctgctgggaaactccttaatgcttcagtgaatgttgttcacttcagtgacgagaaatggatcattgattcatggagcgatgtttctcatctctcatcagttggattcctccaacgtggcttcgatggtgacgccaagccctagaggaccatcatccattctctagatctcctccataaataatattctctgtggtgcgtttaagatacgaagtgtttccattggtgcggtcgatgttcttgtggaaaagttgtttatctttttgtattttgcattaatcgattaataataaagctctcttcttg

SEQ ID NO: 55921 - protein, 236 aa, Glycine max
  peptide (1)..(236): Ceres Seq. ID no. 12611102
  misc_feature (23)..(214): Pfam Name: Phosphoglycerate mutase family Pfam Description: Phosphoglycerate mutase family
  misc_feature (19)..(223): Homolog of NCBI NO: 15806410 NR Description: phosphoglycerate mutase, putative [Deinococcus
  misc_feature (23)..(222): Homolog of NCBI NO: 22988026 NR Description: hypothetical protein [Burkholderia fungorum]
  misc_feature (22)..(222): Homolog of NCBI NO: 33596671 NR Description: probable phosphoglycerate mutase 2 [Bordetella
  misc_feature (21)..(220): Homolog of NCBI NO: 17545218 NR Description: PUTATIVE PHOSPHOGLYCERATE MUTASE 2 PROTEIN
  misc_feature (22)..(222): Homolog of NCBI NO: 33592552 NR Description: probable phosphoglycerate mutase 2 [Bordetella
  misc_feature (23)..(223): Homolog of NCBI NO: 22976134 NR Description: hypothetical protein [Ralstonia metallidurans]
  misc_feature (16)..(233): Homolog of NCBI NO: 15229783 NR Description: putative protein
  misc_feature (88)..(236): Homolog of NCBI NO: 26450240 NR Description: putative phosphoglycerate mutase [Arabidopsis
  misc_feature (1)..(236): Homolog of NCBI NO: 9955567 NR Description: phosphoglycerate mutase-like protein [Arabidopsis
  misc_feature (1)..(236): Homolog of NCBI NO: 15237633 NR Description: phosphoglycerate mutase - like protein; protein
MGHECIDASKEFKWGEDVKSEVTEIVLVRHGETTWNAAGRIQGQIESDLNEIGQKQAVAIAERLGKEERPIAIYSSDLKRAKDTALKIAETCFCSKVTEVPELKERHVGSLQGLYWKEGAEKEPEAYSAFFSSQNDLEIPGGGESFDQLCERSMNALERIAKKHKGERVIVVTHGGVLRAIYMRITQASSAGKLLNASVNVVHFSDEKWIIDSWSDVSHLSSVGFLQRGFDGDAKP

SEQ ID NO: 55922 - DNA, 820 bp, Glycine max
  misc_feature (1)..(820): Ceres Seq. ID no. 13595350
atcgctaatctcgtcattcgtctctcgaatccttaaaaagaaccgtaggaagaaacaatggatccagctgagatgaggtacttggaagaagaggacggccccatgatgaagaccatcaaaggcagcgtgactggtttcgccgccgggaccatctacggaaccattttggccacgtggaaagacgttccgagggtggagaggaacgtggctcttccggggctcatcagaaccctgaagatgatgggaactcacgggctcactttcgccgccattggaggagtttacatcggtgttgagcaggtggttcagggttatagaggcaagagagattttttcaatggtgctattggtgggtttgttgctggagcttctgtccttggctatagagcaaggagcatcccaacagcgatagctgcaggtgcaacactagcggttacatctgctttgattgactctggaggtcagaccacaagagtagacaacggcagagagtattatccttacgctcccgttgagaaaacagctaaagctgatgcttgatctctcttttggcgttcggaactcttaataaagctctgcatctgcttatcatgggctcttgagatcatctctcttccctgtcctctctatttttttgttttgtttctggagatataaaattgctcttgtttcctcctgtgtttatggagagtgacttacatcttttgtctgaacttttccttgcaataaaaaatcaactttgttttcaaaaaaaaaaaaaaaaaagcttatcgataccgtcgacctgtttaaacacaataaagtkggaactggagggggg

SEQ ID NO: 55923 - protein, 160 aa, Glycine max
  peptide (1)..(160): Ceres Seq. ID no. 15221551
  misc_feature (1)..(160): Homolog of NCBI NO: 18405910 NR Description: expressed protein [Arabidopsis thaliana]
MDPAEMRYLEEEDGPMMKTIKGSVTGFAAGTIYGTILATWKDVPRVERNVALPGLIRTLKMMGTHGLTFAAIGGVYIGVEQVVQGYRGKRDFFNGAIGGFVAGASVLGYRARSIPTAIAAGATLAVTSALIDSGGQTTRVDNGREYYPYAPVEKTAKADA

SEQ ID NO: 55924 - protein, 155 aa, Glycine max
  peptide (1)..(155): Ceres Seq. ID no. 15221552
  misc_feature (1)..(155): Homolog of NCBI NO: 18405910 NR Description: expressed protein [Arabidopsis thaliana]
MRYLEEEDGPMMKTIKGSVTGFAAGTIYGTILATWKDVPRVERNVALPGLIRTLKMMGTHGLTFAAIGGVYIGVEQVVQGYRGKRDFFNGAIGGFVAGASVLGYRARSIPTAIAAGATLAVTSALIDSGGQTTRVDNGREYYPYAPVEKTAKADA

SEQ ID NO: 55925 - protein, 145 aa, Glycine max
  peptide (1)..(145): Ceres Seq. ID no. 15221553
  misc_feature (1)..(145): Homolog of NCBI NO: 18405910 NR Description: expressed protein [Arabidopsis thaliana]
MMKTIKGSVTGFAAGTIYGTILATWKDVPRVERNVALPGLIRTLKMMGTHGLTFAAIGGVYIGVEQVVQGYRGKRDFFNGAIGGFVAGASVLGYRARSIPTAIAAGATLAVTSALIDSGGQTTRVDNGREYYPYAPVEKTAKADA

SEQ ID NO: 55926 - DNA, 805 bp, Glycine max
  misc_feature (1)..(805): Ceres Seq. ID no. 12610699
aaaaagaatcattcaaatgaaatggtggttcagaaatgggggaaggaggagcctccctttctctctgtgtgtatgggttgcgagaaggagtagaaccatgcgttcagacgcggcgttggaagccatagccaaagcttcagaagacagagttcccaacatagttctctacaactacccttccttttctggagcatactctgctctctttgctcacctcttctacactcaccacaatctcccttccctcatattacccttctcttcggttccccttctcgctctcagggttgaagatttgtgctttgaaggcctggagacgtgttatctacttgactttattcctccgaaggaattccttttcgacctttctcgtaaatcaaaatgcaagattattgggtttgatcatcggaaatcggtacttggacatattccccctgccaatgattgccctgagaatattatgattaatgtaaatcttgagaagagtagctccagtgttgtttatgagtactttgccggcaaatgtgaggatgctaatatttctaatggtgaggctccatgtttggtggactcaaaagacaaaggccgagtggagccttccaaaattttggtttgttctgctgcttttgttttgttcctcatccctgaaggacgtcttatttcaagttataaaagttctactagatgaaaagataaagtagtcaggtgatcctgtgatatatttgttctcttatctatcgaaatctgctggaataataagcatttagatcaaaaaaaaaaaaaaatatcgataccgtcgacctcg

SEQ ID NO: 55927 - protein, 228 aa, Glycine max
  peptide (1)..(228): Ceres Seq. ID no. 12610700
  misc_feature (54)..(197): Homolog of NCBI NO: 25405983 NR Description: protein F12M16.25 [imported] - Arabidopsis
  misc_feature (54)..(197): Homolog of NCBI NO: 18404427 NR Description: Expressed protein
  misc_feature (54)..(197): Homolog of NCBI NO: 21593117 NR Description: unknown [Arabidopsis thaliana]
  misc_feature (5)..(198): Homolog of NCBI NO: 15242457 NR Description: putative protein; protein id: At5g09580.1
KRIIQMKWWFRNGGRRSLPFSLCVWVARRSRTMRSDAALEAIAKASEDRVPNIVLYNYPSFSGAYSALFAHLFYTHHNLPSLILPFSSVPLLALRVEDLCFEGLETCYLLDFIPPKEFLFDLSRKSKCKIIGFDHRKSVLGHIPPANDCPENIMINVNLEKSSSSVVYEYFAGKCEDANISNGEAPCLVDSKDKGRVEPSKILVCSAAFVLFLIPEGRLISSYKSSTR

SEQ ID NO: 55928 - protein, 223 aa, Glycine max
  peptide (1)..(223): Ceres Seq. ID no. 12610701
  misc_feature (49)..(192): Homolog of NCBI NO: 25405983 NR Description: protein F12M16.25 [imported] - Arabidopsis
  misc_feature (49)..(192): Homolog of NCBI NO: 18404427 NR Description: Expressed protein
  misc_feature (49)..(192): Homolog of NCBI NO: 21593117 NR Description: unknown [Arabidopsis thaliana]
  misc_feature (1)..(193): Homolog of NCBI NO: 15242457 NR Description: putative protein; protein id: At5g09580.1
MKWWFRNGGRRSLPFSLCVWVARRSRTMRSDAALEAIAKASEDRVPNIVLYNYPSFSGAYSALFAHLFYTHHNLPSLILPFSSVPLLALRVEDLCFEGLETCYLLDFIPPKEFLFDLSRKSKCKIIGFDHRKSVLGHIPPANDCPENIMINVNLEKSSSSVVYEYFAGKCEDANISNGEAPCLVDSKDKGRVEPSKILVCSAAFVLFLIPEGRLISSYKSSTR

SEQ ID NO: 55929 - protein, 196 aa, Glycine max
  peptide (1)..(196): Ceres Seq. ID no. 12610702
  misc_feature (22)..(165): Homolog of NCBI NO: 25405983 NR Description: protein F12M16.25 [imported] - Arabidopsis
  misc_feature (22)..(165): Homolog of NCBI NO: 18404427 NR Description: Expressed protein
  misc_feature (22)..(165): Homolog of NCBI NO: 21593117 NR Description: unknown [Arabidopsis thaliana]
  misc_feature (1)..(166): Homolog of NCBI NO: 15242457 NR Description: putative protein; protein id: At5g09580.1
MRSDAALEAIAKASEDRVPNIVLYNYPSFSGAYSALFAHLFYTHHNLPSLILPFSSVPLLALRVEDLCFEGLETCYLLDFIPPKEFLFDLSRKSKCKIIGFDHRKSVLGHIPPANDCPENIMINVNLEKSSSSVVYEYFAGKCEDANISNGEAPCLVDSKDKGRVEPSKILVCSAAFVLFLIPEGRLISSYKSSTR

SEQ ID NO: 55930 - DNA, 743 bp, Glycine max
  misc_feature (1)..(743): Ceres Seq. ID no. 12610954
atagactctttcatttcctcttttctttgtgtactaacatttttttgttcaaatccatttgctcctttagacaccgatctccttcatggctccgattgctgtcggtagtgttttaccagacggaaaaattttcctctttgacgagaacgatcagctccagacggtcaccgttcactctctcttggctggtaagaaggtcattctctttggtgtccccggtgctttcacttccgcctgcagcttgcagcatgtgcctagtttcattgagaaagcggaccagctgaaagcaaagggtgttaatgagataatatgctatggcatgaatgatccgtatgtgatgaaagcatggggaaagacattcccagagaacaagcatgtcaagtttgtctcagacggctcaggagaatacacaaagctcctcggactggagcttgaccttaaggacaaaggtcttggtattaggacaaggagatttgctatgttgctcgataacctcaaggtgactgtcgccaacattgaaacaggtggcgagttcacggtttctagcgccgaggatatcctcaaggctctctaagaaactaccatgtgaaagtagaggatctctagcctgattttcagaataagaagttggcataataaattagttttagttgtttaattcctctttctaattataataacgtactagtttttgaaggcccggtttgtttccaaagtttaataaatttttaataaatttctct

SEQ ID NO: 55931 - protein, 162 aa, Glycine max
  peptide (1)..(162): Ceres Seq. ID no. 12610955
  misc_feature (6)..(160): Pfam Name: AhpC/TSA family Pfam Description: AhpC/TSA family
  misc_feature (1)..(162): Homolog of NCBI NO: 30841938 NR Description: thioredoxin peroxidase 1 [Lycopersicon esculentum]
  misc_feature (1)..(162): Homolog of NCBI NO: 18654477 NR Description: thioredoxin peroxidase [Capsicum annuum]
  misc_feature (1)..(162): Homolog of NCBI NO: 19548660 NR Description: peroxiredoxin [Populus tremula x Populus
  misc_feature (1)..(162): Homolog of NCBI NO: 4704732 NR Description: peroxiredoxin TPx2 [Arabidopsis thaliana]
  misc_feature (1)..(162): Homolog of NCBI NO: 21553913 NR Description: peroxiredoxin, putative [Arabidopsis thaliana]
  misc_feature (1)..(162): Homolog of NCBI NO: 18406870 NR Description: peroxiredoxin, putative
  misc_feature (1)..(162): Homolog of NCBI NO: 21593881 NR Description: type 2 peroxiredoxin, putative [Arabidopsis
  misc_feature (1)..(162): Homolog of NCBI NO: 15218876 NR Description: type 2 peroxiredoxin, putative
  misc_feature (1)..(162): Homolog of NCBI NO: 15218877 NR Description: type 2 peroxiredoxin, putative
  misc_feature (1)..(162): Homolog of NCBI NO: 4928472 NR Description: type 2 peroxiredoxin [Brassica rapa subsp.
MAPIAVGSVLPDGKIFLFDENDQLQTVTVHSLLAGKKVILFGVPGAFTSACSLQHVPSFIEKADQLKAKGVNEIICYGMNDPYVMKAWGKTFPENKHVKFVSDGSGEYTKLLGLELDLKDKGLGIRTRRFAMLLDNLKVTVANIETGGEFTVSSAEDILKAL

SEQ ID NO: 55932 - protein, 93 aa, Glycine max
  peptide (1)..(93): Ceres Seq. ID no. 12610956
RLFHFLFSLCTNIFLFKSICSFRHRSPSWLRLLSVVFYQTEKFSSLTRTISSRRSPFTLSWLVRRSFSLVSPVLSLPPAACSMCLVSLRKRTS

SEQ ID NO: 55933 - protein, 84 aa, Glycine max
  peptide (1)..(84): Ceres Seq. ID no. 12610957
  misc_feature (1)..(82): Pfam Name: AhpC/TSA family Pfam Description: AhpC/TSA family
  misc_feature (1)..(84): Homolog of NCBI NO: 30841938 NR Description: thioredoxin peroxidase 1 [Lycopersicon esculentum]
  misc_feature (1)..(84): Homolog of NCBI NO: 18654477 NR Description: thioredoxin peroxidase [Capsicum annuum]
  misc_feature (1)..(84): Homolog of NCBI NO: 19548660 NR Description: peroxiredoxin [Populus tremula x Populus
  misc_feature (1)..(84): Homolog of NCBI NO: 4704732 NR Description: peroxiredoxin TPx2 [Arabidopsis thaliana]
  misc_feature (1)..(84): Homolog of NCBI NO: 21553913 NR Description: peroxiredoxin, putative [Arabidopsis thaliana]
  misc_feature (1)..(84): Homolog of NCBI NO: 18406870 NR Description: peroxiredoxin, putative
  misc_feature (1)..(84): Homolog of NCBI NO: 21593881 NR Description: type 2 peroxiredoxin, putative [Arabidopsis
  misc_feature (1)..(84): Homolog of NCBI NO: 15218876 NR Description: type 2 peroxiredoxin, putative
  misc_feature (1)..(84): Homolog of NCBI NO: 15218877 NR Description: type 2 peroxiredoxin, putative
  misc_feature (1)..(84): Homolog of NCBI NO: 4928472 NR Description: type 2 peroxiredoxin [Brassica rapa subsp.
MNDPYVMKAWGKTFPENKHVKFVSDGSGEYTKLLGLELDLKDKGLGIRTRRFAMLLDNLKVTVANIETGGEFTVSSAEDILKAL

SEQ ID NO: 55934 - DNA, 1453 bp, Glycine max
  misc_feature (1)..(1453): Ceres Seq. ID no. 13595351
agaaccacaagcagttagcaccccgcattgtttctctgtagatcactaacaggttgtagagagagagagagagagagagagagagagagagaggaggaaggagggagagatggggagggatcagcaggcaggtgtaggtgcaggcgcggcggcggcgcaccgggagaaggtgaagctgttcatgggggtgctggcgctgcagttcctgctcgccggcttccacatcgtcagccgggcggcgctcaacatgggcatcagcaagctcgtcttcatcgtctaccgcaacgtcatctccctcgccctcctcgcccccttcgcctacttcctcgagaagaaggaccggccgccgctcaccttctcgctgctggcggagttcttcgtgctggcgctcatcgggatcacggcgaaccaggggttctacctgctggggctgtaccacctgtcgccgacctacgcgtcggcgatccagaacatggtgccagccatcaccttcgtgctggccacggtcctccggctggagcaggtggacctgggccggcggcacggggtggccaaggtggtgggcaccgtggtgagcatcggcggcgccacggtgatcacgctctacaagggcctgccgctcttcagccacaacctgcacgtgcaggccgtcctctcctggacctccggcagccccatcttcaactggaccctaggctgcgtcttcatcctcggccactgcctctcctggtccggctggatggtgctccaggtgccggtgctcaagcggtacccggcgaggctgtcggtcatctcgctcacctgcgtcttcgggctgctccagttcctcgtcatcgccgccttcaccgaggaggacctcagccggtggaaggtgcagtccggcggggagctgttcaccatcctctacgcggggctggtggcctccggcgtggcgttcgcgctgcagatctggtgcatcgaccgcggcggcccgctcttcaccgccgtgttccagcccgtgcagaccgtcgccgtcgccgtcatggccgccgtcatcctcggcgaccagctctacaccggagggatcatcggcgcggtgctgatcgtcatcgggctctacttcgtgctgtggggcaagagcgaggagaagaagacgaggagccaagacccggagatggcgaggcgcctgctcggggaagacggcggcgcagctgacaaagatcagcaagtgagcaccactgtcctggcgtgaaagctgctgcttgctggatttggagatgtgtgtactgatgtgggtgtttgtacctacgtttttaactagtgtttcaagcgtgcgaccaagaagaagaagactcgtactagttgacgatgtgaactgccaaacacactcagtcatatttggtacctactgtgtatagccccttgtcttcgagttgtgtgtgtgtctataaatacactatgctccctaattttc

SEQ ID NO: 55935 - protein, 373 aa, Glycine max
  peptide (1)..(373): Ceres Seq. ID no. 13595352
  misc_feature (205)..(334): Pfam Name: Integral membrane protein DUF6 Pfam Description: Integral membrane protein DUF6
  misc_feature (22)..(341): Homolog of NCBI NO: 15240683 NR Description: nodulin MtN21 family protein [Arabidopsis
  misc_feature (19)..(362): Homolog of NCBI NO: 34908998 NR Description: nodulin-like protein [Oryza sativa (japonica
  misc_feature (35)..(348): Homolog of NCBI NO: 21593130 NR Description: nodulin-like protein [Arabidopsis thaliana]
  misc_feature (19)..(96): Homolog of NCBI NO: 25404978 NR Description: protein F10A5.28 [imported] - Arabidopsis
  misc_feature (157)..(341): Homolog of NCBI NO: 25404978 NR Description: protein F10A5.28 [imported] - Arabidopsis
  misc_feature (19)..(348): Homolog of NCBI NO: 18409794 NR Description: nodulin MtN21 family protein [Arabidopsis
  misc_feature (19)..(341): Homolog of NCBI NO: 18410867 NR Description: nodulin MtN21 family protein [Arabidopsis
  misc_feature (19)..(367): Homolog of NCBI NO: 15229596 NR Description: nodulin MtN21 family protein [Arabidopsis
  misc_feature (1)..(367): Homolog of NCBI NO: 9294076 NR Description: nodulin-like protein [Arabidopsis thaliana]
  misc_feature (1)..(370): Homolog of NCBI NO: 34895316 NR Description: putative nodulin [Oryza sativa (japonica
MGRDQQAGVGAGAAAAHREKVKLFMGVLALQFLLAGFHIVSRAALNMGISKLVFIVYRNVISLALLAPFAYFLEKKDRPPLTFSLLAEFFVLALIGITANQGFYLLGLYHLSPTYASAIQNMVPAITFVLATVLRLEQVDLGRRHGVAKVVGTVVSIGGATVITLYKGLPLFSHNLHVQAVLSWTSGSPIFNWTLGCVFILGHCLSWSGWMVLQVPVLKRYPARLSVISLTCVFGLLQFLVIAAFTEEDLSRWKVQSGGELFTILYAGLVASGVAFALQIWCIDRGGPLFTAVFQPVQTVAVAVMAAVILGDQLYTGGIIGAVLIVIGLYFVLWGKSEEKKTRSQDPEMARRLLGEDGGAADKDQQVSTTVLA

SEQ ID NO: 55936 - protein, 349 aa, Glycine max
  peptide (1)..(349): Ceres Seq. ID no. 13595353
  misc_feature (181)..(310): Pfam Name: Integral membrane protein DUF6 Pfam Description: Integral membrane protein DUF6
  misc_feature (1)..(317): Homolog of NCBI NO: 15240683 NR Description: nodulin MtN21 family protein [Arabidopsis
  misc_feature (1)..(338): Homolog of NCBI NO: 34908998 NR Description: nodulin-like protein [Oryza sativa (japonica
  misc_feature (11)..(324): Homolog of NCBI NO: 21593130 NR Description: nodulin-like protein [Arabidopsis thaliana]
  misc_feature (1)..(72): Homolog of NCBI NO: 25404978 NR Description: protein F10A5.28 [imported] - Arabidopsis
  misc_feature (133)..(317): Homolog of NCBI NO: 25404978 NR Description: protein F10A5.28 [imported] - Arabidopsis
  misc_feature (1)..(324): Homolog of NCBI NO: 18409794 NR Description: nodulin MtN21 family protein [Arabidopsis
  misc_feature (1)..(317): Homolog of NCBI NO: 18410867 NR Description: nodulin MtN21 family protein [Arabidopsis
  misc_feature (1)..(343): Homolog of NCBI NO: 15229596 NR Description: nodulin MtN21 family protein [Arabidopsis
  misc_feature (1)..(343): Homolog of NCBI NO: 9294076 NR Description: nodulin-like protein [Arabidopsis thaliana]
  misc_feature (1)..(346): Homolog of NCBI NO: 34895316 NR Description: putative nodulin [Oryza sativa (japonica
MGVLALQFLLAGFHIVSRAALNMGISKLVFIVYRNVISLALLAPFAYFLEKKDRPPLTFSLLAEFFVLALIGITANQGFYLLGLYHLSPTYASAIQNMVPAITFVLATVLRLEQVDLGRRHGVAKVVGTVVSIGGATVITLYKGLPLFSHNLHVQAVLSWTSGSPIFNWTLGCVFILGHCLSWSGWMVLQVPVLKRYPARLSVISLTCVFGLLQFLVIAAFTEEDLSRWKVQSGGELFTILYAGLVASGVAFALQIWCIDRGGPLFTAVFQPVQTVAVAVMAAVILGDQLYTGGIIGAVLIVIGLYFVLWGKSEEKKTRSQDPEMARRLLGEDGGAADKDQQVSTTVLA

SEQ ID NO: 55937 - protein, 327 aa, Glycine max
  peptide (1)..(327): Ceres Seq. ID no. 13595354
  misc_feature (159)..(288): Pfam Name: Integral membrane protein DUF6 Pfam Description: Integral membrane protein DUF6
  misc_feature (1)..(295): Homolog of NCBI NO: 15240683 NR Description: nodulin MtN21 family protein [Arabidopsis
  misc_feature (1)..(316): Homolog of NCBI NO: 34908998 NR Description: nodulin-like protein [Oryza sativa (japonica
  misc_feature (1)..(302): Homolog of NCBI NO: 21593130 NR Description: nodulin-like protein [Arabidopsis thaliana]
  misc_feature (1)..(50): Homolog of NCBI NO: 25404978 NR Description: protein F10A5.28 [imported] - Arabidopsis
  misc_feature (111)..(295): Homolog of NCBI NO: 25404978 NR Description: protein F10A5.28 [imported] - Arabidopsis
  misc_feature (1)..(302): Homolog of NCBI NO: 18409794 NR Description: nodulin MtN21 family protein [Arabidopsis
  misc_feature (1)..(295): Homolog of NCBI NO: 18410867 NR Description: nodulin MtN21 family protein [Arabidopsis
  misc_feature (1)..(321): Homolog of NCBI NO: 15229596 NR Description: nodulin MtN21 family protein [Arabidopsis
  misc_feature (1)..(321): Homolog of NCBI NO: 9294076 NR Description: nodulin-like protein [Arabidopsis thaliana]
  misc_feature (1)..(324): Homolog of NCBI NO: 34895316 NR Description: putative nodulin [Oryza sativa (japonica
MGISKLVFIVYRNVISLALLAPFAYFLEKKDRPPLTFSLLAEFFVLALIGITANQGFYLLGLYHLSPTYASAIQNMVPAITFVLATVLRLEQVDLGRRHGVAKVVGTVVSIGGATVITLYKGLPLFSHNLHVQAVLSWTSGSPIFNWTLGCVFILGHCLSWSGWMVLQVPVLKRYPARLSVISLTCVFGLLQFLVIAAFTEEDLSRWKVQSGGELFTILYAGLVASGVAFALQIWCIDRGGPLFTAVFQPVQTVAVAVMAAVILGDQLYTGGIIGAVLIVIGLYFVLWGKSEEKKTRSQDPEMARRLLGEDGGAADKDQQVSTTVLA

SEQ ID NO: 55938 - DNA, 889 bp, Glycine max
  misc_feature (1)..(889): Ceres Seq. ID no. 12610385
aacctttttttctctcgtctccaattttctcagcttctgctggatctctccagcagagacgatccttcctacgggactgtttgatcaatcaaggcttctcgggcaaacaggtgaatagaagtgagattaggctatgtgggttttgtatgttttacagatttgctattgaaggttcatttctaagaaggaagaaatggaccacgacaagacaggatgccaaagcccacctgaaggtcccaagctatgcatcaacaactgcggtttcttcggaagctctgccacaatgaacatgtgttccaagtgtcacaaggctatcctgtttcaacaggaacagggggctaggtttgcatctgcagtgtctggtggtacatcttcatccagcaacatcttaaaggaaacctttgctgctaccgcgctggttgatgctgaaaccaaatccgttgagccggtggctgtctctttacagccatcttctgtccaagtcgtcgtcgcagaggtagtagctccagaagcagctgcatcaataccaaaggaaggaccaagccgatgtgctacttgcaataaacgggttggtctgactggattcaaatgtcgctgcggtgacctcttctgcgggacgcaccgctatgcagacatacacaactgctccttcaattaccatgccgctgcgcaagaagctatagctaaagcaaacccggttgtgaaggcagagaagcttgacaaaatctgaagaactcaaacaccaaagtgatagactacgacctccttaggagcatttagaattggaaaagaaggtttagaattttacatatttgttattattgcctactaaggtgtttactcctataagagggagacatttgattctaataaaatcatccattaagag

SEQ ID NO: 55939 - protein, 178 aa, Glycine max
  peptide (1)..(178): Ceres Seq. ID no. 12610386
  misc_feature (119)..(159): Pfam Name: AN1-like Zinc finger Pfam Description: AN1-like Zinc finger
  misc_feature (3)..(178): Homolog of NCBI NO: 8778645 NR Description: F5O11.17 [Arabidopsis thaliana]
  misc_feature (15)..(178): Homolog of NCBI NO: 15225894 NR Description: putative zinc finger protein
  misc_feature (11)..(178): Homolog of NCBI NO: 15234402 NR Description: putative protein
  misc_feature (8)..(178): Homolog of NCBI NO: 14596167 NR Description: zinc finger-like protein [Arabidopsis thaliana]
  misc_feature (8)..(178): Homolog of NCBI NO: 18404102 NR Description: expressed protein
  misc_feature (8)..(178): Homolog of NCBI NO: 15231686 NR Description: zinc finger - like protein
  misc_feature (1)..(178): Homolog of NCBI NO: 35187687 NR Description: zinc-finger protein [Oryza sativa (indica
  misc_feature (1)..(178): Homolog of NCBI NO: 11361253 NR Description: hypothetical protein p85RF [imported] - Prunus
  misc_feature (1)..(178): Homolog of NCBI NO: 25082726 NR Description: expressed protein [Arabidopsis thaliana]
  misc_feature (1)..(178): Homolog of NCBI NO: 18403408 NR Description: expressed protein
MDHDKTGCQSPPEGPKLCINNCGFFGSSATMNMCSKCHKAILFQQEQGARFASAVSGGTSSSSNILKETFAATALVDAETKSVEPVAVSLQPSSVQVVVAEVVAPEAAASIPKEGPSRCATCNKRVGLTGFKCRCGDLFCGTHRYADIHNCSFNYHAAAQEAIAKANPVVKAEKLDKI

SEQ ID NO: 55940 - protein, 148 aa, Glycine max
  peptide (1)..(148): Ceres Seq. ID no. 12610387
  misc_feature (89)..(129): Pfam Name: AN1-like Zinc finger Pfam Description: AN1-like Zinc finger
  misc_feature (1)..(148): Homolog of NCBI NO: 8778645 NR Description: F5O11.17 [Arabidopsis thaliana]
  misc_feature (1)..(148): Homolog of NCBI NO: 15225894 NR Description: putative zinc finger protein
  misc_feature (1)..(148): Homolog of NCBI NO: 15234402 NR Description: putative protein
  misc_feature (1)..(148): Homolog of NCBI NO: 14596167 NR Description: zinc finger-like protein [Arabidopsis thaliana]
  misc_feature (1)..(148): Homolog of NCBI NO: 18404102 NR Description: expressed protein
  misc_feature (1)..(148): Homolog of NCBI NO: 15231686 NR Description: zinc finger - like protein
  misc_feature (1)..(148): Homolog of NCBI NO: 35187687 NR Description: zinc-finger protein [Oryza sativa (indica
  misc_feature (1)..(148): Homolog of NCBI NO: 11361253 NR Description: hypothetical protein p85RF [imported] - Prunus
  misc_feature (1)..(148): Homolog of NCBI NO: 25082726 NR Description: expressed protein [Arabidopsis thaliana]
  misc_feature (1)..(148): Homolog of NCBI NO: 18403408 NR Description: expressed protein
MNMCSKCHKAILFQQEQGARFASAVSGGTSSSSNILKETFAATALVDAETKSVEPVAVSLQPSSVQVVVAEVVAPEAAASIPKEGPSRCATCNKRVGLTGFKCRCGDLFCGTHRYADIHNCSFNYHAAAQEAIAKANPVVKAEKLDKI

SEQ ID NO: 55941 - protein, 146 aa, Glycine max
  peptide (1)..(146): Ceres Seq. ID no. 12610388
  misc_feature (87)..(127): Pfam Name: AN1-like Zinc finger Pfam Description: AN1-like Zinc finger
  misc_feature (1)..(146): Homolog of NCBI NO: 8778645 NR Description: F5O11.17 [Arabidopsis thaliana]
  misc_feature (1)..(146): Homolog of NCBI NO: 15225894 NR Description: putative zinc finger protein
  misc_feature (1)..(146): Homolog of NCBI NO: 15234402 NR Description: putative protein
  misc_feature (1)..(146): Homolog of NCBI NO: 14596167 NR Description: zinc finger-like protein [Arabidopsis thaliana]
  misc_feature (1)..(146): Homolog of NCBI NO: 18404102 NR Description: expressed protein
  misc_feature (1)..(146): Homolog of NCBI NO: 15231686 NR Description: zinc finger - like protein
  misc_feature (1)..(146): Homolog of NCBI NO: 35187687 NR Description: zinc-finger protein [Oryza sativa (indica
  misc_feature (1)..(146): Homolog of NCBI NO: 11361253 NR Description: hypothetical protein p85RF [imported] - Prunus
  misc_feature (1)..(146): Homolog of NCBI NO: 25082726 NR Description: expressed protein [Arabidopsis thaliana]
  misc_feature (1)..(146): Homolog of NCBI NO: 18403408 NR Description: expressed protein
MCSKCHKAILFQQEQGARFASAVSGGTSSSSNILKETFAATALVDAETKSVEPVAVSLQPSSVQVVVAEVVAPEAAASIPKEGPSRCATCNKRVGLTGFKCRCGDLFCGTHRYADIHNCSFNYHAAAQEAIAKANPVVKAEKLDKI

SEQ ID NO: 55942 - DNA, 977 bp, Glycine max
  misc_feature (1)..(977): Ceres Seq. ID no. 12610391
aagggttttttaagttcttgaaatcttctcgatcgaaggattccaaatgggttcggtttcgggtcaaacccgaattgctacgatgagcctctccctctcctcatcagagaagagctctaataatcgctcctcctcgcttctcaatcctaagaacgcagtttcagatagttacggggtctcttccaaatgcagcacattcctcaggggccagttccaaagaatacaactctcttatactcgccacactcgacctttgccaaaacgtgcaggccacgttgtgtctccgagctgcgtcatgccgttgacggaagagaatgtggagagagtgctcgacgaagtacgccccgcgttgatggcagacggaggaaacgtggcgctgcatgagatcgacggactcgtggtggttcttaagctacaaggagcttgtggttcgtgtcccagctcgtcgatgacgttaaagatgggaatcgagagtcgtctccgcgacaagattccggagatcatgtccgtcgagcagtttcttgaagcggagactggagggttggagctcaacgaggaaaacatcgaaaaggttctcgctgagctacggccttacctatcgggaacaggaggtggagggcttgagcttgttgagatcgatggttatatagttaagattcggctcactggaccagctgctggagtcatgacggttcgtgtcgcgttgactcagaaactgagggaaaacattccttcaataggtgcagtccagcttctagagtgaccactttttgtattgttcatctacgagagcctatatttcgattatatgtacatcattttcaaatctaacatccataccattcagttcctggtggctcttgtgttggctctcatttttgtcatatgctaagtctagatccataggctctcatctcataagtagaccttggattcatccaggttacgttctatatacaagtaactgagtttaatcc

SEQ ID NO: 55943 - protein, 238 aa, Glycine max
  peptide (1)..(238): Ceres Seq. ID no. 12610392
  misc_feature (91)..(158): Pfam Name: NifU-like domain Pfam Description: NifU-like domain
  misc_feature (84)..(159): Homolog of NCBI NO: 33860975 NR Description: NifU-like protein
  misc_feature (84)..(159): Homolog of NCBI NO: 16332125 NR Description: NifU protein [Synechocystis sp. PCC 6803]
  misc_feature (78)..(159): Homolog of NCBI NO: 22298836 NR Description: ORF_ID:tsl1293~similar to NifU protein
  misc_feature (84)..(159): Homolog of NCBI NO: 33862527 NR Description: NifU-like protein [Prochlorococcus marinus str.
  misc_feature (14)..(224): Homolog of NCBI NO: 8777425 NR Description: gene_id:K9P8.8~pir||T09896~strong similarity to
  misc_feature (66)..(237): Homolog of NCBI NO: 30698492 NR Description: NifU1 [Oryza sativa (japonica cultivar-group)]
  misc_feature (14)..(237): Homolog of NCBI NO: 18423084 NR Description: Expressed protein
  misc_feature (13)..(238): Homolog of NCBI NO: 7485833 NR Description: hypothetical protein F20B18.20 - Arabidopsis
  misc_feature (1)..(238): Homolog of NCBI NO: 21554503 NR Description: nitrogen fixation like protein [Arabidopsis
  misc_feature (1)..(238): Homolog of NCBI NO: 18416645 NR Description: nitrogen fixation like protein
MGSVSGQTRIATMSLSLSSSEKSSNNRSSSLLNPKNAVSDSYGVSSKCSTFLRGQFQRIQLSYTRHTRPLPKRAGHVVSPSCVMPLTEENVERVLDEVRPALMADGGNVALHEIDGLVVVLKLQGACGSCPSSSMTLKMGIESRLRDKIPEIMSVEQFLEAETGGLELNEENIEKVLAELRPYLSGTGGGGLELVEIDGYIVKIRLTGPAAGVMTVRVALTQKLRENIPSIGAVQLLE

SEQ ID NO: 55944 - protein, 226 aa, Glycine max
  peptide (1)..(226): Ceres Seq. ID no. 12610393
  misc_feature (79)..(146): Pfam Name: NifU-like domain Pfam Description: NifU-like domain
  misc_feature (72)..(147): Homolog of NCBI NO: 33860975 NR Description: NifU-like protein
  misc_feature (72)..(147): Homolog of NCBI NO: 16332125 NR Description: NifU protein [Synechocystis sp. PCC 6803]
  misc_feature (66)..(147): Homolog of NCBI NO: 22298836 NR Description: ORF_ID:tsl1293~similar to NifU protein
  misc_feature (72)..(147): Homolog of NCBI NO: 33862527 NR Description: NifU-like protein [Prochlorococcus marinus str.
  misc_feature (2)..(212): Homolog of NCBI NO: 8777425 NR Description: gene_id:K9P8.8~pir||T09896~strong similarity to
  misc_feature (54)..(225): Homolog of NCBI NO: 30698492 NR Description: NifU1 [Oryza sativa (japonica cultivar-group)]
  misc_feature (2)..(225): Homolog of NCBI NO: 18423084 NR Description: Expressed protein
  misc_feature (1)..(226): Homolog of NCBI NO: 7485833 NR Description: hypothetical protein F20B18.20 - Arabidopsis
  misc_feature (1)..(226): Homolog of NCBI NO: 21554503 NR Description: nitrogen fixation like protein [Arabidopsis
  misc_feature (1)..(226): Homolog of NCBI NO: 18416645 NR Description: nitrogen fixation like protein
MSLSLSSSEKSSNNRSSSLLNPKNAVSDSYGVSSKCSTFLRGQFQRIQLSYTRHTRPLPKRAGHVVSPSCVMPLTEENVERVLDEVRPALMADGGNVALHEIDGLVVVLKLQGACGSCPSSSMTLKMGIESRLRDKIPEIMSVEQFLEAETGGLELNEENIEKVLAELRPYLSGTGGGGLELVEIDGYIVKIRLTGPAAGVMTVRVALTQKLRENIPSIGAVQLLE

SEQ ID NO: 55945 - protein, 155 aa, Glycine max
  peptide (1)..(155): Ceres Seq. ID no. 12610394
  misc_feature (8)..(75): Pfam Name: NifU-like domain Pfam Description: NifU-like domain
  misc_feature (1)..(76): Homolog of NCBI NO: 33860975 NR Description: NifU-like protein
  misc_feature (1)..(76): Homolog of NCBI NO: 16332125 NR Description: NifU protein [Synechocystis sp. PCC 6803]
  misc_feature (1)..(76): Homolog of NCBI NO: 22298836 NR Description: ORF_ID:tsl1293~similar to NifU protein
  misc_feature (1)..(76): Homolog of NCBI NO: 33862527 NR Description: NifU-like protein [Prochlorococcus marinus str.
  misc_feature (1)..(141): Homolog of NCBI NO: 8777425 NR Description: gene_id:K9P8.8~pir||T09896~strong similarity to
  misc_feature (1)..(154): Homolog of NCBI NO: 30698492 NR Description: NifU1 [Oryza sativa (japonica cultivar-group)]
  misc_feature (1)..(154): Homolog of NCBI NO: 18423084 NR Description: Expressed protein
  misc_feature (1)..(155): Homolog of NCBI NO: 7485833 NR Description: hypothetical protein F20B18.20 - Arabidopsis
  misc_feature (1)..(155): Homolog of NCBI NO: 21554503 NR Description: nitrogen fixation like protein [Arabidopsis
  misc_feature (1)..(155): Homolog of NCBI NO: 18416645 NR Description: nitrogen fixation like protein
MPLTEENVERVLDEVRPALMADGGNVALHEIDGLVVVLKLQGACGSCPSSSMTLKMGIESRLRDKIPEIMSVEQFLEAETGGLELNEENIEKVLAELRPYLSGTGGGGLELVEIDGYIVKIRLTGPAAGVMTVRVALTQKLRENIPSIGAVQLLE

SEQ ID NO: 55946 - DNA, 777 bp, Glycine max
  misc_feature (1)..(777): Ceres Seq. ID no. 12612272
actacaaacagcctggtagcatatctgtctcgtggggcatcgtgtcaaccagacaccaccgtgcgtgtcagccatgtcgctcatgccttggttcggcggtggccggggagggatggaccccttctcctccgacctctgggaccccttcggctctccttggcccttggaccgcagccgccgcgaaggcggcagccgggacgacgcaaccgccatggctcgcaccaacgtcgactggcatgagaacgacaaagagcacattttctccgcagagatccccggggtgaggaaggaggacgtgaaggtggaggtggaggacggcaacgtgctcaagatcagcggggagaagacgcgggaggaggagcacaagggcgacgcctggaaccgcgtggagcgcagcttcgggtccttcatgcgccggttccgcctgccggagaacgccaaggcggacagcatccggtgcaccatgctggacggcgtgctcagggtcgtcgttcccaaggacgaggaggcacagaagcagcgcaacgtccgctccatcgacatagcataaaggctaaaagcaccgcgccgtgacaatgccatctcctcttttattagcgtgtactcgtggtagtaatctgtatcgtgtgttctactttagcagtaatgctaggttattctgtacggtagtttagaagtgtgctttatgcgccatatagctgctacggcatatggcacttttaatcgtgttgagtccaagaatttactactagtggacgagcatccatcgtaaactgc

SEQ ID NO: 55947 - protein, 158 aa, Glycine max
  peptide (1)..(158): Ceres Seq. ID no. 12612273
  misc_feature (1)..(158): Homolog of NCBI NO: 15294150 NR Description: AT3g46230/F12M12_200 [Arabidopsis thaliana]
  misc_feature (1)..(158): Homolog of NCBI NO: 7441319 NR Description: heat-shock protein 17.6, low molecular weight -
  misc_feature (1)..(158): Homolog of NCBI NO: 2911276 NR Description: LMW heat shock protein [Fragaria x ananassa]
  misc_feature (1)..(158): Homolog of NCBI NO: 123556 NR Description: 18.2 KD CLASS I HEAT SHOCK PROTEIN
  misc_feature (1)..(158): Homolog of NCBI NO: 4456758 NR Description: heat shock protein 17.4 [Quercus suber]
  misc_feature (1)..(158): Homolog of NCBI NO: 71495 NR Description: heat shock protein (clone DChsp17.7) - carrot
  misc_feature (1)..(158): Homolog of NCBI NO: 3819743 NR Description: cytosolic class I small heat-shock protein
  misc_feature (1)..(157): Homolog of NCBI NO: 462322 NR Description: 18.3 KD CLASS I HEAT SHOCK PROTEIN (HSP 18.3)
  misc_feature (1)..(158): Homolog of NCBI NO: 21618106 NR Description: heat shock protein 18 [Arabidopsis thaliana]
  misc_feature (1)..(158): Homolog of NCBI NO: 15238509 NR Description: heat shock protein 18
MSLMPWFGGGRGGMDPFSSDLWDPFGSPWPLDRSRREGGSRDDATAMARTNVDWHENDKEHIFSAEIPGVRKEDVKVEVEDGNVLKISGEKTREEEHKGDAWNRVERSFGSFMRRFRLPENAKADSIRCTMLDGVLRVVVPKDEEAQKQRNVRSIDIA

SEQ ID NO: 55948 - protein, 155 aa, Glycine max
  peptide (1)..(155): Ceres Seq. ID no. 12612274
  misc_feature (1)..(155): Homolog of NCBI NO: 15294150 NR Description: AT3g46230/F12M12_200 [Arabidopsis thaliana]
  misc_feature (1)..(155): Homolog of NCBI NO: 7441319 NR Description: heat-shock protein 17.6, low molecular weight -
  misc_feature (1)..(155): Homolog of NCBI NO: 2911276 NR Description: LMW heat shock protein [Fragaria x ananassa]
  misc_feature (1)..(155): Homolog of NCBI NO: 123556 NR Description: 18.2 KD CLASS I HEAT SHOCK PROTEIN
  misc_feature (1)..(155): Homolog of NCBI NO: 4456758 NR Description: heat shock protein 17.4 [Quercus suber]
  misc_feature (1)..(155): Homolog of NCBI NO: 71495 NR Description: heat shock protein (clone DChsp17.7) - carrot
  misc_feature (1)..(155): Homolog of NCBI NO: 3819743 NR Description: cytosolic class I small heat-shock protein
  misc_feature (1)..(154): Homolog of NCBI NO: 462322 NR Description: 18.3 KD CLASS I HEAT SHOCK PROTEIN (HSP 18.3)
  misc_feature (1)..(155): Homolog of NCBI NO: 21618106 NR Description: heat shock protein 18 [Arabidopsis thaliana]
  misc_feature (1)..(155): Homolog of NCBI NO: 15238509 NR Description: heat shock protein 18
MPWFGGGRGGMDPFSSDLWDPFGSPWPLDRSRREGGSRDDATAMARTNVDWHENDKEHIFSAEIPGVRKEDVKVEVEDGNVLKISGEKTREEEHKGDAWNRVERSFGSFMRRFRLPENAKADSIRCTMLDGVLRVVVPKDEEAQKQRNVRSIDIA

SEQ ID NO: 55949 - protein, 145 aa, Glycine max
  peptide (1)..(145): Ceres Seq. ID no. 12612275
  misc_feature (1)..(145): Homolog of NCBI NO: 15294150 NR Description: AT3g46230/F12M12_200 [Arabidopsis thaliana]
  misc_feature (1)..(145): Homolog of NCBI NO: 7441319 NR Description: heat-shock protein 17.6, low molecular weight -
  misc_feature (1)..(145): Homolog of NCBI NO: 2911276 NR Description: LMW heat shock protein [Fragaria x ananassa]
  misc_feature (1)..(145): Homolog of NCBI NO: 123556 NR Description: 18.2 KD CLASS I HEAT SHOCK PROTEIN
  misc_feature (1)..(145): Homolog of NCBI NO: 4456758 NR Description: heat shock protein 17.4 [Quercus suber]
  misc_feature (1)..(145): Homolog of NCBI NO: 71495 NR Description: heat shock protein (clone DChsp17.7) - carrot
  misc_feature (1)..(145): Homolog of NCBI NO: 3819743 NR Description: cytosolic class I small heat-shock protein
  misc_feature (1)..(144): Homolog of NCBI NO: 462322 NR Description: 18.3 KD CLASS I HEAT SHOCK PROTEIN (HSP 18.3)
  misc_feature (1)..(145): Homolog of NCBI NO: 21618106 NR Description: heat shock protein 18 [Arabidopsis thaliana]
  misc_feature (1)..(145): Homolog of NCBI NO: 15238509 NR Description: heat shock protein 18
MDPFSSDLWDPFGSPWPLDRSRREGGSRDDATAMARTNVDWHENDKEHIFSAEIPGVRKEDVKVEVEDGNVLKISGEKTREEEHKGDAWNRVERSFGSFMRRFRLPENAKADSIRCTMLDGVLRVVVPKDEEAQKQRNVRSIDIA

SEQ ID NO: 55950 - DNA, 708 bp, Glycine max
  misc_feature (1)..(708): Ceres Seq. ID no. 13582188
atttttcgaaaaatggcctgaaaaataataattaaattgagaccattccaataagtgttaattaactgggagaaccaacccgcaaggctgccgaagatcttacggaaccttggatgcgtttgcttgtgttgtgtgattccgggaataaatgatccgattcatattgttgcagaacagacaaggcaagactcgtcttgcaaagtactatgttcctctcgaggagtccgagaaacacaaggttgaatacgaggttcatagattggtggtcaatcgcgactcgaagttcaccaatttcgtcgagtttagaacgcataaggttatataccggagatatgcagggttgtttttctcattgtgcgttgacataacagacaatgagttggcttaccttgaatgcatccacttgttcgttgagattttggaccatttcttcagcaatgtctgtgagcttgatttggttttcaacttccacaaggtgtacttaatactggatgaattcattcttgctggagagcttcaagaaacaagcaagcgggcgatcattgagaggatgtcagaactggagaagctcgagtaatgaggttgggatattatatgatagtcaagaatgaaaatgagcagtatgagtcttcctttttgctcctctctgttatgttctgtctaccttaaacacacaccttttcattttgatttattaaaactctaatg

SEQ ID NO: 55951 - protein, 142 aa, Glycine max
  peptide (1)..(142): Ceres Seq. ID no. 13582189
  misc_feature (1)..(142): Pfam Name: Clathrin adaptor complex small chain Pfam Description: Clathrin adaptor complex small chain
  misc_feature (1)..(142): Homolog of NCBI NO: 30584435 NR Description: Homo sapiens adaptor-related protein complex 2,
  misc_feature (1)..(140): Homolog of NCBI NO: 19110255 NR Description: putative adaptor protein complex small chain
  misc_feature (1)..(142): Homolog of NCBI NO: 34784526 NR Description: Unknown (protein for MGC:65827) [Danio rerio]
  misc_feature (11)..(109): Homolog of NCBI NO: 25405904 NR Description: protein T2E6.6 [imported] - Arabidopsis thaliana
  misc_feature (1)..(142): Homolog of NCBI NO: 40746043 NR Description: conserved hypothetical protein [Aspergillus
  misc_feature (40)..(142): Homolog of NCBI NO: 19070753 NR Description: clathrin coat assembly protein [Oryza sativa]
  misc_feature (1)..(129): Homolog of NCBI NO: 7489722 NR Description: clathrin coat assembly protein AP17 - maize
  misc_feature (1)..(142): Homolog of NCBI NO: 30983940 NR Description: clathrin coat assembly protein [Gossypium
  misc_feature (1)..(142): Homolog of NCBI NO: 15220987 NR Description: clathrin coat assembly protein AP17 -related
  misc_feature (1)..(142): Homolog of NCBI NO: 17149110 NR Description: clathrin assembly protein AP17-like protein
MIRFILLQNRQGKTRLAKYYVPLEESEKHKVEYEVHRLVVNRDSKFTNFVEFRTHKVIYRRYAGLFFSLCVDITDNELAYLECIHLFVEILDHFFSNVCELDLVFNFHKVYLILDEFILAGELQETSKRAIIERMSELEKLE

SEQ ID NO: 55952 - DNA, 1310 bp, Glycine max
  misc_feature (1)..(1310): Ceres Seq. ID no. 13639177
atttcccttcatccgtcggcctttgagagtccacccgaccagccgccgcgccgcgcgcagcaggagcccctcgacggcggccgtcggcgctagggttcttcacgtccaccttcgtaccttagccttctcgctattctcgttccgtcctccggatacccaccctctcttgccgtgtttctgccgaggcagcggaatctcccccgatggaggcggccgccgtcgcttcctccggccccgggctgcgctgcgcgcttaaccccgccccgaaccagcataggaaaggcgcgcgcttgagcttaccggccaagagtcagcagcgctgcgccgtcacttgcgggcgcttgctgctccgccccaacgctcgcgtatgcacggcggcatcggcatcggcatcgacggtgatggatagcggggctggggactccggggtgaggaggaagaggctcgcggtgttcgtctcaggcgggggctcgaacttccggtcgatccacgaggccgttctgggtgggaaggtgaacggggatgttgttgcgctcgtcaccgataagccaggctgcggtggcgcggagtatgcaaggtgcaatggcatgcccgtggtcgtgtttcccaagtcgaaatcggcgccggagggggtctccacagatgaacttctgaatgttctgagggatctgaaggtagactttattctacttgctggttacttgaagctcatacctggtgagctagttaagtcatttcccagatccatgctgaatatacatccttcactgctcccggcatttggaggcaagggttattatggtttgaaagtgcataaagcagttattgcatctggagccagatactcaggaccaactgtgcactttgtggatgagcagttcgacacagggaaaaccttggcccaaagagttgtgccagtgttagccaatgatactccagagcaattggctgcaagggttcttcacgaggagcaccaagtttacgttgaggcagttgctgccttgtgtgaggatcgaattgtgtggcgagacgatggtgtcccacttatcagaagtcagacaaaccccaatgcgtatacctaattcgtgatctctgtcctgagatctcctgaaaactaatgaagtttgtagtgtccgcaccaagtgccagttttcgccacggcatgtagtcaacacacaccgtttgtctgattgagtgaaataacatgtctaataatctggtcccagaaacataatgtgtaccttgcactgtgtttaactcattgtatggcttggcttcgatgataatctgtgcctgaaataacatttctg

SEQ ID NO: 55953 - protein, 292 aa, Glycine max
  peptide (1)..(292): Ceres Seq. ID no. 13639178
  misc_feature (79)..(264): Pfam Name: Formyl transferase Pfam Description: Formyl transferase
  misc_feature (58)..(291): Homolog of NCBI NO: 15221650 NR Description: phosphoribosylglycinamide formyltransferase
  misc_feature (63)..(291): Homolog of NCBI NO: 37992753 NR Description: glycinamide ribonucleotide transformylase
  misc_feature (76)..(288): Homolog of NCBI NO: 7433568 NR Description: phosphoribosylglycinamide formyltransferase (EC
  misc_feature (76)..(291): Homolog of NCBI NO: 12644307 NR Description: Phosphoribosylglycinamide formyltransferase, precursor (GART) (GAR transformylase)
MEAAAVASSGPGLRCALNPAPNQHRKGARLSLPAKSQQRCAVTCGRLLLRPNARVCTAASASASTVMDSGAGDSGVRRKRLAVFVSGGGSNFRSIHEAVLGGKVNGDVVALVTDKPGCGGAEYARCNGMPVVVFPKSKSAPEGVSTDELLNVLRDLKVDFILLAGYLKLIPGELVKSFPRSMLNIHPSLLPAFGGKGYYGLKVHKAVIASGARYSGPTVHFVDEQFDTGKTLAQRVVPVLANDTPEQLAARVLHEEHQVYVEAVAALCEDRIVWRDDGVPLIRSQTNPNAYT

SEQ ID NO: 55954 - protein, 226 aa, Glycine max
  peptide (1)..(226): Ceres Seq. ID no. 13639179
  misc_feature (13)..(198): Pfam Name: Formyl transferase Pfam Description: Formyl transferase
  misc_feature (1)..(225): Homolog of NCBI NO: 15221650 NR Description: phosphoribosylglycinamide formyltransferase
  misc_feature (1)..(225): Homolog of NCBI NO: 37992753 NR Description: glycinamide ribonucleotide transformylase
  misc_feature (10)..(222): Homolog of NCBI NO: 7433568 NR Description: phosphoribosylglycinamide formyltransferase (EC
  misc_feature (10)..(225): Homolog of NCBI NO: 12644307 NR Description: Phosphoribosylglycinamide formyltransferase, precursor (GART) (GAR transformylase)
MDSGAGDSGVRRKRLAVFVSGGGSNFRSIHEAVLGGKVNGDVVALVTDKPGCGGAEYARCNGMPVVVFPKSKSAPEGVSTDELLNVLRDLKVDFILLAGYLKLIPGELVKSFPRSMLNIHPSLLPAFGGKGYYGLKVHKAVIASGARYSGPTVHFVDEQFDTGKTLAQRVVPVLANDTPEQLAARVLHEEHQVYVEAVAALCEDRIVWRDDGVPLIRSQTNPNAYT

SEQ ID NO: 55955 - protein, 164 aa, Glycine max
  peptide (1)..(164): Ceres Seq. ID no. 13639180
  misc_feature (1)..(136): Pfam Name: Formyl transferase Pfam Description: Formyl transferase
  misc_feature (1)..(163): Homolog of NCBI NO: 15221650 NR Description: phosphoribosylglycinamide formyltransferase
  misc_feature (1)..(163): Homolog of NCBI NO: 37992753 NR Description: glycinamide ribonucleotide transformylase
  misc_feature (1)..(160): Homolog of NCBI NO: 7433568 NR Description: phosphoribosylglycinamide formyltransferase (EC
  misc_feature (1)..(163): Homolog of NCBI NO: 12644307 NR Description: Phosphoribosylglycinamide formyltransferase, precursor (GART) (GAR transformylase)
MPVVVFPKSKSAPEGVSTDELLNVLRDLKVDFILLAGYLKLIPGELVKSFPRSMLNIHPSLLPAFGGKGYYGLKVHKAVIASGARYSGPTVHFVDEQFDTGKTLAQRVVPVLANDTPEQLAARVLHEEHQVYVEAVAALCEDRIVWRDDGVPLIRSQTNPNAYT

SEQ ID NO: 55956 - DNA, 1021 bp, Glycine max
  misc_feature (1)..(1021): Ceres Seq. ID no. 15177112
gtgacagaaatgagcaacgaaatccggttcttcgagctaaacactggagctaatatcccttcactagggctgggaacttggctggctgatcctggtgttgttggtgatgttatagctcatgccgtcgaggttggttatcgccatattgattgtgctcaaatttacggcaatcaggaggagattggtttagcattaaagaagttatttgaagagggtgtagtcaagcgagaagatttatggatcacctctaaactctggtgtacagatcatgctccagaagatgtaccagaagctctggacagaacattgagagacttgcaacttgattatatagatttataccttattcactggccaattcgaatgaagaagggttcagtgggctttaaggctgaaaacattgtgccatcagacatacctaacacttggaaggcaatggaagctttgaataaaagtggcaaggctagagctataggtgtaagcaatttctcaactaagaagttgggagaattgcttgagtatgctcgtgttactcctgcggttaaccagtcagagtgtcatcctgcatggaggcaggacaagttgaaggccttttgcaaatctaagggtgtccacttctctggatattcacctttgggttcccctgcctggcttgaaggtgatttccttaaccatccagttataaatatgatcgcaaagaaattaggaaagactccagcacaggtagctcttcgatggggactgcaaatgggccatagtgtgcttcccaagagttctaatccagcaaggataaaggaaaactttgatatttttgactggtccattcctgaggacatgcttgataaattttttgagattcaacaggaaagattactcaaggctagcttcttccatgaaccaaatgggggttacttaccagaagacgaattgtgggatgggggtatatgaaaagtcggttgaatgattagttaaaaaagtggatggaataaaagaaacgcatcttctgtttggggtgttaggc

SEQ ID NO: 55957 - protein, 315 aa, Glycine max
  peptide (1)..(315): Ceres Seq. ID no. 15177113
  misc_feature (2)..(312): Homolog of NCBI NO: 30679355 NR Description: aldose reductase, putative [Arabidopsis thaliana]
  misc_feature (4)..(315): Homolog of NCBI NO: 13160399 NR Description: aldose reductase [Digitalis purpurea]
  misc_feature (4)..(315): Homolog of NCBI NO: 13160397 NR Description: aldose reductase [Digitalis purpurea]
  misc_feature (4)..(288): Homolog of NCBI NO: 25283479 NR Description: probable alcohol dehydrogenase [imported] -
  misc_feature (4)..(315): Homolog of NCBI NO: 7431112 NR Description: abscisic acid activated protein - alfalfa
  misc_feature (4)..(315): Homolog of NCBI NO: 15232354 NR Description: aldo/keto reductase family [Arabidopsis thaliana]
  misc_feature (4)..(290): Homolog of NCBI NO: 7431114 NR Description: aldehyde dehydrogenase homolog At2g37770 -
  misc_feature (15)..(315): Homolog of NCBI NO: 28393400 NR Description: putative aldo/keto reductase [Arabidopsis
  misc_feature (4)..(315): Homolog of NCBI NO: 30687261 NR Description: aldo/keto reductase family [Arabidopsis thaliana]
  misc_feature (4)..(315): Homolog of NCBI NO: 30687247 NR Description: aldo/keto reductase family [Arabidopsis thaliana]
VTEMSNEIRFFELNTGANIPSLGLGTWLADPGVVGDVIAHAVEVGYRHIDCAQIYGNQEEIGLALKKLFEEGVVKREDLWITSKLWCTDHAPEDVPEALDRTLRDLQLDYIDLYLIHWPIRMKKGSVGFKAENIVPSDIPNTWKAMEALNKSGKARAIGVSNFSTKKLGELLEYARVTPAVNQSECHPAWRQDKLKAFCKSKGVHFSGYSPLGSPAWLEGDFLNHPVINMIAKKLGKTPAQVALRWGLQMGHSVLPKSSNPARIKENFDIFDWSIPEDMLDKFFEIQQERLLKASFFHEPNGGYLPEDELWDGGI

SEQ ID NO: 55958 - protein, 312 aa, Glycine max
  peptide (1)..(312): Ceres Seq. ID no. 15177114
  misc_feature (1)..(309): Homolog of NCBI NO: 30679355 NR Description: aldose reductase, putative [Arabidopsis thaliana]
  misc_feature (1)..(312): Homolog of NCBI NO: 13160399 NR Description: aldose reductase [Digitalis purpurea]
  misc_feature (1)..(312): Homolog of NCBI NO: 13160397 NR Description: aldose reductase [Digitalis purpurea]
  misc_feature (1)..(285): Homolog of NCBI NO: 25283479 NR Description: probable alcohol dehydrogenase [imported] -
  misc_feature (1)..(312): Homolog of NCBI NO: 7431112 NR Description: abscisic acid activated protein - alfalfa
  misc_feature (1)..(312): Homolog of NCBI NO: 15232354 NR Description: aldo/keto reductase family [Arabidopsis thaliana]
  misc_feature (1)..(287): Homolog of NCBI NO: 7431114 NR Description: aldehyde dehydrogenase homolog At2g37770 -
  misc_feature (12)..(312): Homolog of NCBI NO: 28393400 NR Description: putative aldo/keto reductase [Arabidopsis
  misc_feature (1)..(312): Homolog of NCBI NO: 30687261 NR Description: aldo/keto reductase family [Arabidopsis thaliana]
  misc_feature (1)..(312): Homolog of NCBI NO: 30687247 NR Description: aldo/keto reductase family [Arabidopsis thaliana]
MSNEIRFFELNTGANIPSLGLGTWLADPGVVGDVIAHAVEVGYRHIDCAQIYGNQEEIGLALKKLFEEGVVKREDLWITSKLWCTDHAPEDVPEALDRTLRDLQLDYIDLYLIHWPIRMKKGSVGFKAENIVPSDIPNTWKAMEALNKSGKARAIGVSNFSTKKLGELLEYARVTPAVNQSECHPAWRQDKLKAFCKSKGVHFSGYSPLGSPAWLEGDFLNHPVINMIAKKLGKTPAQVALRWGLQMGHSVLPKSSNPARIKENFDIFDWSIPEDMLDKFFEIQQERLLKASFFHEPNGGYLPEDELWDGGI

SEQ ID NO: 55959 - protein, 194 aa, Glycine max
  peptide (1)..(194): Ceres Seq. ID no. 15177115
  misc_feature (1)..(191): Homolog of NCBI NO: 30679355 NR Description: aldose reductase, putative [Arabidopsis thaliana]
  misc_feature (1)..(194): Homolog of NCBI NO: 13160399 NR Description: aldose reductase [Digitalis purpurea]
  misc_feature (1)..(194): Homolog of NCBI NO: 13160397 NR Description: aldose reductase [Digitalis purpurea]
  misc_feature (1)..(167): Homolog of NCBI NO: 25283479 NR Description: probable alcohol dehydrogenase [imported] -
  misc_feature (1)..(194): Homolog of NCBI NO: 7431112 NR Description: abscisic acid activated protein - alfalfa
  misc_feature (1)..(194): Homolog of NCBI NO: 15232354 NR Description: aldo/keto reductase family [Arabidopsis thaliana]
  misc_feature (1)..(169): Homolog of NCBI NO: 7431114 NR Description: aldehyde dehydrogenase homolog At2g37770 -
  misc_feature (1)..(194): Homolog of NCBI NO: 28393400 NR Description: putative aldo/keto reductase [Arabidopsis
  misc_feature (1)..(194): Homolog of NCBI NO: 30687261 NR Description: aldo/keto reductase family [Arabidopsis thaliana]
  misc_feature (1)..(194): Homolog of NCBI NO: 30687247 NR Description: aldo/keto reductase family [Arabidopsis thaliana]
MKKGSVGFKAENIVPSDIPNTWKAMEALNKSGKARAIGVSNFSTKKLGELLEYARVTPAVNQSECHPAWRQDKLKAFCKSKGVHFSGYSPLGSPAWLEGDFLNHPVINMIAKKLGKTPAQVALRWGLQMGHSVLPKSSNPARIKENFDIFDWSIPEDMLDKFFEIQQERLLKASFFHEPNGGYLPEDELWDGGI

SEQ ID NO: 55960 - DNA, 1082 bp, Glycine max
  misc_feature (1)..(1082): Ceres Seq. ID no. 13639033
attgtgtggatgaggacagtgtagtgtagtgccattgagaagcattaatgatactagttagccatatccaagctccttgcgtaggagccatgttttcaaagtgttgttctctattgtctctacccaaattcatcactgttacaaacccaccaacgttttccaaccctgtacctaatttcatcactagaagaataagctccacaagaccctttcatctcacactcgccaaagcagagggaaacctcgattcagattcaccctcaacctccacttcttctccttctccttctccttttgccactgaccaaacggttttcgtgactggcaaggatgttccattggagggtgtcatccagttcgagaaaccagcctcttctcctccttttgaaaaatgggggcgtgtggctctgctagctggtgcggatgtgttggccttgtttgtgttttcgacaattggaagatatagtcatggactttctgttttggaccttgagacaccgcgcactgctgacccttttattgcggggtggtttttgggtgcttacttccttggaggttttggggaggatggccgcgggatgaacggtctctcgaagggtgtcgttgctactgcgaagtcatgggctgttgggatccctataggaatagtaataaaggcagcaacatcgggtcatctaccgaattatggttttgtatttgtgagtctgggaagcactgctgttttacttgttacattcagagcattattatatactattcttccagttgacaatagtaagaagagcgatgactatcgccgcggcagtccctttgaactctttgagctgctaacatcattagtacggcggtggtagcaatggtttgcatgttcaaggcaccataatgtgtatgcatctaaacatcagtttccatcgctagtctccttgtactatctgctcgtatgaaaaaagtaagagtagatgtttactgcagttgaattttattcaactaaatgtgtatactattattacacctttgatcaatcaaaagtgcattaactaccaaaaaaaaaaaaaaaaaatcaagattcgcacgagaccatt

SEQ ID NO: 55961 - protein, 268 aa, Glycine max
  peptide (1)..(268): Ceres Seq. ID no. 13639034
  misc_feature (116)..(231): Homolog of NCBI NO: 22970530 NR Description: hypothetical protein [Chloroflexus aurantiacus]
  misc_feature (39)..(268): Homolog of NCBI NO: 28273393 NR Description: unknown protein [Oryza sativa (japonica
  misc_feature (23)..(266): Homolog of NCBI NO: 25405875 NR Description: protein F27F5.3 [imported] - Arabidopsis thaliana
  misc_feature (23)..(268): Homolog of NCBI NO: 18401414 NR Description: expressed protein [Arabidopsis thaliana]
MILVSHIQAPCVGAMFSKCCSLLSLPKFITVTNPPTFSNPVPNFITRRISSTRPFHLTLAKAEGNLDSDSPSTSTSSPSPSPFATDQTVFVTGKDVPLEGVIQFEKPASSPPFEKWGRVALLAGADVLALFVFSTIGRYSHGLSVLDLETPRTADPFIAGWFLGAYFLGGFGEDGRGMNGLSKGVVATAKSWAVGIPIGIVIKAATSGHLPNYGFVFVSLGSTAVLLVTFRALLYTILPVDNSKKSDDYRRGSPFELFELLTSLVRRW

SEQ ID NO: 55962 - protein, 254 aa, Glycine max
  peptide (1)..(254): Ceres Seq. ID no. 13639035
  misc_feature (102)..(217): Homolog of NCBI NO: 22970530 NR Description: hypothetical protein [Chloroflexus aurantiacus]
  misc_feature (25)..(254): Homolog of NCBI NO: 28273393 NR Description: unknown protein [Oryza sativa (japonica
  misc_feature (9)..(252): Homolog of NCBI NO: 25405875 NR Description: protein F27F5.3 [imported] - Arabidopsis thaliana
  misc_feature (9)..(254): Homolog of NCBI NO: 18401414 NR Description: expressed protein [Arabidopsis thaliana]
MFSKCCSLLSLPKFITVTNPPTFSNPVPNFITRRISSTRPFHLTLAKAEGNLDSDSPSTSTSSPSPSPFATDQTVFVTGKDVPLEGVIQFEKPASSPPFEKWGRVALLAGADVLALFVFSTIGRYSHGLSVLDLETPRTADPFIAGWFLGAYFLGGFGEDGRGMNGLSKGVVATAKSWAVGIPIGIVIKAATSGHLPNYGFVFVSLGSTAVLLVTFRALLYTILPVDNSKKSDDYRRGSPFELFELLTSLVRRW

SEQ ID NO: 55963 - DNA, 746 bp, Glycine max
  misc_feature (1)..(746): Ceres Seq. ID no. 12610958
aaaagtcaaaacactctagtcagcaatgtggagcgtcaccggagctttgtgcgtggcggtgcctaccgccgccgcattccgtccaaaaccctttctcgtctcctctaaccttctccccaaccagacgaagaagctccatctctctcctcggcagcctccggctctatcatcacatttctcctcgtcttctttcaaaaccgccgctacttccgttcaacaacagtcagatgataaaaagggggagaagggcactaagtactacttccttgttgcaaacgctaagttcatgctcgacgaggaggagcactttcaggagcaactgtttgaacgtcttagatactacggagagcgtgacaaggaacaagacttctggctcgtcattgagcctaggttcctcgacaagttccccaacatcactcagagactccgtcgccctgctgttgctcttgtttccaccaatggcccctggatcacgtttatgaagttgagattggatcgagttctagctgaatcatttgaagcttcatctctggatgaagccttggcctctagtcctacaactctagagttcgaccagcctggaaactgggtggctccgtacccaaagtatgaacctggatggtgggacaccttcttgcccaaagcaaaacaagaatctctagcatagaactttgtccacctttgtcttagtgctttgtagtttgtattactgagcttcttgtgttatccaaatatgattgcaaccc

SEQ ID NO: 55964 - protein, 213 aa, Glycine max
  peptide (1)..(213): Ceres Seq. ID no. 12610959
  misc_feature (78)..(168): Homolog of NCBI NO: 37520451 NR Description: hypothetical protein [Gloeobacter violaceus]
  misc_feature (76)..(165): Homolog of NCBI NO: 33861662 NR Description: conserved hypothetical protein
  misc_feature (76)..(167): Homolog of NCBI NO: 11465670 NR Description: ORF108 [Porphyra purpurea]
  misc_feature (78)..(175): Homolog of NCBI NO: 22299042 NR Description: ORF_ID:tll1499~hypothetical protein
  misc_feature (76)..(176): Homolog of NCBI NO: 33865445 NR Description: conserved hypothetical protein [Synechococcus sp.
  misc_feature (78)..(175): Homolog of NCBI NO: 16329384 NR Description: hypothetical protein [Synechocystis sp. PCC 6803]
  misc_feature (78)..(178): Homolog of NCBI NO: 17227712 NR Description: hypothetical protein [Nostoc sp. PCC 7120]
  misc_feature (67)..(178): Homolog of NCBI NO: 23129763 NR Description: hypothetical protein [Nostoc punctiforme]
  misc_feature (78)..(178): Homolog of NCBI NO: 23042740 NR Description: hypothetical protein [Trichodesmium erythraeum
  misc_feature (1)..(211): Homolog of NCBI NO: 15237144 NR Description: similar to unknown protein (sp|P72777); protein
MWSVTGALCVAVPTAAAFRPKPFLVSSNLLPNQTKKLHLSPRQPPALSSHFSSSSFKTAATSVQQQSDDKKGEKGTKYYFLVANAKFMLDEEEHFQEQLFERLRYYGERDKEQDFWLVIEPRFLDKFPNITQRLRRPAVALVSTNGPWITFMKLRLDRVLAESFEASSLDEALASSPTTLEFDQPGNWVAPYPKYEPGWWDTFLPKAKQESLA

SEQ ID NO: 55965 - protein, 159 aa, Glycine max
  peptide (1)..(159): Ceres Seq. ID no. 12610960
KSKHSSQQCGASPELCAWRCLPPPHSVQNPFSSPLTFSPTRRRSSISLLGSLRLYHHISPRLLSKPPLLPFNNSQMIKRGRRALSTTSLLQTLSSCSTRRSTFRSNCLNVLDTTESVTRNKTSGSSLSLGSSTSSPTSLRDSVALLLLLFPPMAPGSRL

SEQ ID NO: 55966 - protein, 126 aa, Glycine max
  peptide (1)..(126): Ceres Seq. ID no. 12610961
  misc_feature (1)..(81): Homolog of NCBI NO: 37520451 NR Description: hypothetical protein [Gloeobacter violaceus]
  misc_feature (1)..(78): Homolog of NCBI NO: 33861662 NR Description: conserved hypothetical protein
  misc_feature (1)..(80): Homolog of NCBI NO: 11465670 NR Description: ORF108 [Porphyra purpurea]
  misc_feature (1)..(88): Homolog of NCBI NO: 22299042 NR Description: ORF_ID:tll1499~hypothetical protein
  misc_feature (1)..(89): Homolog of NCBI NO: 33865445 NR Description: conserved hypothetical protein [Synechococcus sp.
  misc_feature (1)..(88): Homolog of NCBI NO: 16329384 NR Description: hypothetical protein [Synechocystis sp. PCC 6803]
  misc_feature (1)..(91): Homolog of NCBI NO: 17227712 NR Description: hypothetical protein [Nostoc sp. PCC 7120]
  misc_feature (1)..(91): Homolog of NCBI NO: 23129763 NR Description: hypothetical protein [Nostoc punctiforme]
  misc_feature (1)..(91): Homolog of NCBI NO: 23042740 NR Description: hypothetical protein [Trichodesmium erythraeum
  misc_feature (1)..(124): Homolog of NCBI NO: 15237144 NR Description: similar to unknown protein (sp|P72777); protein
MLDEEEHFQEQLFERLRYYGERDKEQDFWLVIEPRFLDKFPNITQRLRRPAVALVSTNGPWITFMKLRLDRVLAESFEASSLDEALASSPTTLEFDQPGNWVAPYPKYEPGWWDTFLPKAKQESLA

SEQ ID NO: 55967 - DNA, 711 bp, Glycine max
  misc_feature (1)..(711): Ceres Seq. ID no. 12611129
acgagaaacaggagagattttttgcagatctcaacaacatttgtaggtgacgatggcgcttcgtgctactcaatcgactgctcgcatggcggcgaatctccgacgcgtggctcggcctttctcaacagacgcggtggtggagtcggattacaagcgtggcgagatcggcaaggtctccggaatcccagaggagcatctcgcacgaaaggtgataatatactcgcctgcaagaacagcgacccagcaaggatctgggaaacttgggaaatggaagattaacttcgtctccaccctcaagtgggaaaatccattgatgggctggacttctactggtgacccttatgccaatgttggggactccgctcttggttttgattctgagctagctgccaagtcctttgctgagcgtcatggctgggactatgtggtcaaggagcccaaaacaccgttattgaaggccaagtcatactcggacaacttcaagtggaaaggcaaacctcaactagagaactgatctccttcttcttcttcttccatttctcgaacaaaaggagaagcccccacttgatataaagaaaggctctcattttttattcgctatttaccatctgtgagctttttttctgaactattatccatggttggattctcttttttttttttaattccttataacaataatatgatgatgatgatgacaaacagttcttt

SEQ ID NO: 55968 - protein, 153 aa, Glycine max
  peptide (1)..(153): Ceres Seq. ID no. 12611130
  misc_feature (51)..(153): Pfam Name: ETC complex I subunit conserved region Pfam Description: ETC complex I subunit conserved region
  misc_feature (37)..(153): Homolog of NCBI NO: 34334026 NR Description: NADH:ubiquinone oxidoreductase 18 kD-like subunit
  misc_feature (37)..(151): Homolog of NCBI NO: 14919381 NR Description: Similar to NADH dehydrogenase (ubiquinone) Fe-S
  misc_feature (37)..(151): Homolog of NCBI NO: 6754814 NR Description: NADH dehydrogenase (ubiquinone) Fe-S protein 4
  misc_feature (37)..(151): Homolog of NCBI NO: 19110803 NR Description: NADH dehydrogenase [Gallus gallus]
  misc_feature (18)..(151): Homolog of NCBI NO: 13528960 NR Description: NADH dehydrogenase (ubiquinone) Fe-S protein 4
  misc_feature (9)..(151): Homolog of NCBI NO: 4505369 NR Description: NADH dehydrogenase (ubiquinone) Fe-S protein 4,
  misc_feature (8)..(151): Homolog of NCBI NO: 28461229 NR Description: NADH dehydrogenase (ubiquinone) Fe-S protein 4,
  misc_feature (18)..(135): Homolog of NCBI NO: 34901114 NR Description: NADH-ubiquinone oxidoreductase 18 kDa subunit, precursor-like protein~contains ESTs
  misc_feature (1)..(153): Homolog of NCBI NO: 15240784 NR Description: putative protein
  misc_feature (1)..(153): Homolog of NCBI NO: 21555571 NR Description: unknown [Arabidopsis thaliana]
MALRATQSTARMAANLRRVARPFSTDAVVESDYKRGEIGKVSGIPEEHLARKVIIYSPARTATQQGSGKLGKWKINFVSTLKWENPLMGWTSTGDPYANVGDSALGFDSELAAKSFAERHGWDYVVKEPKTPLLKAKSYSDNFKWKGKPQLEN

SEQ ID NO: 55969 - protein, 142 aa, Glycine max
  peptide (1)..(142): Ceres Seq. ID no. 12611131
  misc_feature (40)..(142): Pfam Name: ETC complex I subunit conserved region Pfam Description: ETC complex I subunit conserved region
  misc_feature (26)..(142): Homolog of NCBI NO: 34334026 NR Description: NADH:ubiquinone oxidoreductase 18 kD-like subunit
  misc_feature (26)..(140): Homolog of NCBI NO: 14919381 NR Description: Similar to NADH dehydrogenase (ubiquinone) Fe-S
  misc_feature (26)..(140): Homolog of NCBI NO: 6754814 NR Description: NADH dehydrogenase (ubiquinone) Fe-S protein 4
  misc_feature (26)..(140): Homolog of NCBI NO: 19110803 NR Description: NADH dehydrogenase [Gallus gallus]
  misc_feature (7)..(140): Homolog of NCBI NO: 13528960 NR Description: NADH dehydrogenase (ubiquinone) Fe-S protein 4
  misc_feature (1)..(140): Homolog of NCBI NO: 4505369 NR Description: NADH dehydrogenase (ubiquinone) Fe-S protein 4,
  misc_feature (1)..(140): Homolog of NCBI NO: 28461229 NR Description: NADH dehydrogenase (ubiquinone) Fe-S protein 4,
  misc_feature (7)..(124): Homolog of NCBI NO: 34901114 NR Description: NADH-ubiquinone oxidoreductase 18 kDa subunit, precursor-like protein~contains ESTs
  misc_feature (1)..(142): Homolog of NCBI NO: 15240784 NR Description: putative protein
  misc_feature (1)..(142): Homolog of NCBI NO: 21555571 NR Description: unknown [Arabidopsis thaliana]
MAANLRRVARPFSTDAVVESDYKRGEIGKVSGIPEEHLARKVIIYSPARTATQQGSGKLGKWKINFVSTLKWENPLMGWTSTGDPYANVGDSALGFDSELAAKSFAERHGWDYVVKEPKTPLLKAKSYSDNFKWKGKPQLEN

SEQ ID NO: 55970 - protein, 92 aa, Glycine max
  peptide (1)..(92): Ceres Seq. ID no. 12611132
TRNRRDFLQISTTFVGDDGASCYSIDCSHGGESPTRGSAFLNRRGGGVGLQAWRDRQGLRNPRGASRTKGDNILACKNSDPARIWETWEMED

SEQ ID NO: 55971 - DNA, 741 bp, Glycine max
  misc_feature (1)..(741): Ceres Seq. ID no. 13595072
acagaccagagcacaatcccctatgttagctccagttccttaaatagctccatcctccacacgtctcaaaccatctccacactcttcagttttcattgtttggagaacacacaatacacctcccaccttagcagcgcaatggcgaccaccaccatgtccctctcctcgaccttcgccggcaagtcggtgaagaacgtggcttcatcagctctctttggtgaggcccgtgtcactatgcgcaagaccgctgcaaaggccaagccggtttcatcaggcagcccatggtacggtgccgaccgtgtgctctacctcggcccgctttccggagagcccccgagctacttgaccggcgagttccccggcgactacggatgggacaccgccgggctctcggccgaccccgagacctttgccaagaaccgggagctcgaggtgatccactgccggtgggccatgctcggtgcgcttggatgtgtcttccccgagcttcttgcacgcaacggcgtcaagttcggcgaggcggtatggttcaaggccggttcccagatcttcagcgagggtggcctcgactacctgggcaaccccagcctcgtgcacgcacaaagcatccttgctatctgggcatgccaagtcgtgctcatgggcgctgttgaggggtaccgcattgctggcggcccactcggtgaggtagtcgacccactctacctgtttaaacacaataaagttggaacgggagggggg

SEQ ID NO: 55972 - protein, 247 aa, Glycine max
  peptide (1)..(247): Ceres Seq. ID no. 13595073
  misc_feature (110)..(235): Pfam Name: Chlorophyll A-B binding protein Pfam Description: Chlorophyll A-B binding protein
  misc_feature (47)..(235): Homolog of NCBI NO: 3036949 NR Description: light harvesting chlorophyll a/b-binding protein
  misc_feature (47)..(235): Homolog of NCBI NO: 115781 NR Description: Chlorophyll A-B binding protein 16, chloroplast
  misc_feature (47)..(235): Homolog of NCBI NO: 3036948 NR Description: light harvesting chlorophyll a/b-binding protein
  misc_feature (47)..(235): Homolog of NCBI NO: 170404 NR Description: chlorophyll a/b-binding protein Cab-3C
  misc_feature (47)..(235): Homolog of NCBI NO: 115825 NR Description: Chlorophyll A-B binding protein 3C, chloroplast
  misc_feature (47)..(235): Homolog of NCBI NO: 115815 NR Description: Chlorophyll A-B binding protein M9, chloroplast
  misc_feature (47)..(235): Homolog of NCBI NO: 115786 NR Description: Chlorophyll A-B binding protein, chloroplast
  misc_feature (47)..(235): Homolog of NCBI NO: 115782 NR Description: Chlorophyll A-B binding protein, chloroplast
  misc_feature (47)..(235): Homolog of NCBI NO: 7443223 NR Description: chlorophyll a/b-binding protein type I precursor
  misc_feature (47)..(235): Homolog of NCBI NO: 1657859 NR Description: chlorophyll a/b-binding protein WCAB precursor
TDQSTIPYVSSSSLNSSILHTSQTISTLFSFHCLENTQYTSHLSSAMATTTMSLSSTFAGKSVKNVASSALFGEARVTMRKTAAKAKPVSSGSPWYGADRVLYLGPLSGEPPSYLTGEFPGDYGWDTAGLSADPETFAKNRELEVIHCRWAMLGALGCVFPELLARNGVKFGEAVWFKAGSQIFSEGGLDYLGNPSLVHAQSILAIWACQVVLMGAVEGYRIAGGPLGEVVDPLYLFKHNKVGTGGG

SEQ ID NO: 55973 - protein, 201 aa, Glycine max
  peptide (1)..(201): Ceres Seq. ID no. 13595074
  misc_feature (64)..(189): Pfam Name: Chlorophyll A-B binding protein Pfam Description: Chlorophyll A-B binding protein
  misc_feature (1)..(189): Homolog of NCBI NO: 3036949 NR Description: light harvesting chlorophyll a/b-binding protein
  misc_feature (1)..(189): Homolog of NCBI NO: 115781 NR Description: Chlorophyll A-B binding protein 16, chloroplast
  misc_feature (1)..(189): Homolog of NCBI NO: 3036948 NR Description: light harvesting chlorophyll a/b-binding protein
  misc_feature (1)..(189): Homolog of NCBI NO: 170404 NR Description: chlorophyll a/b-binding protein Cab-3C
  misc_feature (1)..(189): Homolog of NCBI NO: 115825 NR Description: Chlorophyll A-B binding protein 3C, chloroplast
  misc_feature (1)..(189): Homolog of NCBI NO: 115815 NR Description: Chlorophyll A-B binding protein M9, chloroplast
  misc_feature (1)..(189): Homolog of NCBI NO: 115786 NR Description: Chlorophyll A-B binding protein, chloroplast
  misc_feature (1)..(189): Homolog of NCBI NO: 115782 NR Description: Chlorophyll A-B binding protein, chloroplast
  misc_feature (1)..(189): Homolog of NCBI NO: 7443223 NR Description: chlorophyll a/b-binding protein type I precursor
  misc_feature (1)..(189): Homolog of NCBI NO: 1657859 NR Description: chlorophyll a/b-binding protein WCAB precursor
MATTTMSLSSTFAGKSVKNVASSALFGEARVTMRKTAAKAKPVSSGSPWYGADRVLYLGPLSGEPPSYLTGEFPGDYGWDTAGLSADPETFAKNRELEVIHCRWAMLGALGCVFPELLARNGVKFGEAVWFKAGSQIFSEGGLDYLGNPSLVHAQSILAIWACQVVLMGAVEGYRIAGGPLGEVVDPLYLFKHNKVGTGGG

SEQ ID NO: 55974 - protein, 196 aa, Glycine max
  peptide (1)..(196): Ceres Seq. ID no. 13595075
  misc_feature (59)..(184): Pfam Name: Chlorophyll A-B binding protein Pfam Description: Chlorophyll A-B binding protein
  misc_feature (1)..(184): Homolog of NCBI NO: 3036949 NR Description: light harvesting chlorophyll a/b-binding protein
  misc_feature (1)..(184): Homolog of NCBI NO: 115781 NR Description: Chlorophyll A-B binding protein 16, chloroplast
  misc_feature (1)..(184): Homolog of NCBI NO: 3036948 NR Description: light harvesting chlorophyll a/b-binding protein
  misc_feature (1)..(184): Homolog of NCBI NO: 170404 NR Description: chlorophyll a/b-binding protein Cab-3C
  misc_feature (1)..(184): Homolog of NCBI NO: 115825 NR Description: Chlorophyll A-B binding protein 3C, chloroplast
  misc_feature (1)..(184): Homolog of NCBI NO: 115815 NR Description: Chlorophyll A-B binding protein M9, chloroplast
  misc_feature (1)..(184): Homolog of NCBI NO: 115786 NR Description: Chlorophyll A-B binding protein, chloroplast
  misc_feature (1)..(184): Homolog of NCBI NO: 115782 NR Description: Chlorophyll A-B binding protein, chloroplast
  misc_feature (1)..(184): Homolog of NCBI NO: 7443223 NR Description: chlorophyll a/b-binding protein type I precursor
  misc_feature (1)..(184): Homolog of NCBI NO: 1657859 NR Description: chlorophyll a/b-binding protein WCAB precursor
MSLSSTFAGKSVKNVASSALFGEARVTMRKTAAKAKPVSSGSPWYGADRVLYLGPLSGEPPSYLTGEFPGDYGWDTAGLSADPETFAKNRELEVIHCRWAMLGALGCVFPELLARNGVKFGEAVWFKAGSQIFSEGGLDYLGNPSLVHAQSILAIWACQVVLMGAVEGYRIAGGPLGEVVDPLYLFKHNKVGTGGG

SEQ ID NO: 55975 - DNA, 1310 bp, Glycine max
  misc_feature (1)..(1310): Ceres Seq. ID no. 13638980
gaaaaatcttctccctgcctctgcgtagctcttctcgcccccgcttgtctccgccgcgggcgcggccggcgctcggccgtccgcacacgacgcaacgccccgccccgccctccgctcccactgttcggtcggcccaagatcctcatccgaacttaagacaaaatgggctcaagagtttttgctttgttcatcactggcgttgtccttttgggcagtagaatcttggccttggaccacactgttgttgaaaagagattaaatgagaacacggtatcacttacaacaaagggaagtccacaactatgccaactttgtgagcagtttgccacagaaaccctcttctatttgaaggagaatgagacccggatcgaaattatagatactcttcaccaagcttgtttgaaatttcattcacttaagttagagtgtacaaagttggttgattattatgcagcactgttcttcgcacaaattgattctctaagccctgaagaattttgcgtatcagcaagtctttgtgaggaagttacatacattcgcctcccaggacatgaacatgcttgcaccctttgtcatgaggttgttgatgagattcgtactggtcttgaagaccctgagatggagctcaagataatcgagatacttctgaaaggatgcaacaacacagagagcttcgtacagaagtgcaagaagatgataatccaaaatgcaccactcatactagaagatatcaagaagtttctcgagaagagagatttctgcgattctatccgtgtctgtggaggcaaaattgctcgccctccaggaggaggtctgagaggcctgtctactgtgtgagctctttcttttcctgaacacgcatgacgattgcgtggcatttaatgaagaacacgggggctatctgacctcacgcggtgatgtttagaagaaagattggtggtgtaagtctacgaacgaaaagatcttccataatgctatttccgagcagtgtactccctccgtcccataattcttgtcttagatttgtctagatacggatgtacctaacactaaaacgtgacttgatacatccgtatttggacaaatctaagacaagaattttgagacggagggagcatatattatacagcattggcattgtacctgtggagaagtgtatatattatcacagtcatcaaatgaaatttctgtgatagttgttgctacatgatcgttcatggaacgtaagcaaaatgtatgcttaaagtgtagagcatatacgcgtgtaaacaaattatgaactatgtgcagtggacttttatttatgatgc

SEQ ID NO: 55976 - protein, 224 aa, Glycine max
  peptide (1)..(224): Ceres Seq. ID no. 13638981
  misc_feature (46)..(79): Pfam Name: Saposin-like type B, region 1 Pfam Description: Saposin-like type B, region 1
  misc_feature (50)..(207): Homolog of NCBI NO: 6942199 NR Description: putative protein [Vitis riparia]
  misc_feature (46)..(208): Homolog of NCBI NO: 15241065 NR Description: expressed protein [Arabidopsis thaliana]
  misc_feature (6)..(206): Homolog of NCBI NO: 15231028 NR Description: expressed protein [Arabidopsis thaliana]
  misc_feature (34)..(206): Homolog of NCBI NO: 34896130 NR Description: P0701D05.19 [Oryza sativa (japonica
MGSRVFALFITGVVLLGSRILALDHTVVEKRLNENTVSLTTKGSPQLCQLCEQFATETLFYLKENETRIEIIDTLHQACLKFHSLKLECTKLVDYYAALFFAQIDSLSPEEFCVSASLCEEVTYIRLPGHEHACTLCHEVVDEIRTGLEDPEMELKIIEILLKGCNNTESFVQKCKKMIIQNAPLILEDIKKFLEKRDFCDSIRVCGGKIARPPGGGLRGLSTV

SEQ ID NO: 55977 - DNA, 946 bp, Glycine max
  misc_feature (1)..(946): Ceres Seq. ID no. 12610412
aacattcctaagaagattacacagagagatcagtttttgagcattctctcatctctcaaagccaaagctctctccctctctctctgtctctgcttgtgtagccatggctaactcgataatggcttcctccaaaccactcatctccctctcctcctccactcaaccaacccgcgtcaacctccccaaatccatcaaactcccccagatccccaaacccatctcctcctcctcctcctcctcctccctcagcagcaaggctctgtctttctcctccgccaccgtcaagtctctagctttaatcgccgccctcgctcccccttccatggccgaagctatggagaaggcccagctcttcgacttcaacctgacgctcccgatcatcgtcgtggagtttctcttcctcatgttcgcgctcgacaaagtctactactctccccttgggaactttatggataagagagacggtgagatcaaggagaagctcgcgagcgtgaaggatacttccactgaggtgaaggcgctcgatgaacaagctgccgctgtgatgagggcggctagggctgagatcgccgccgcgcttaacaagatgaagaaggagacggaggtggaagtggagcagcagctggcggtagggaggaagaaggtggaggcggagctgcaggaagctttggcgagcttggagaagcagaaggaggagaccattaaggctttggattctcagatcgctgctcttagtgaagacattgtcaagaaggttcttccttcttaaaaacaaactcttgtgtgttctgtcttttctcaatctcaatttatatgaaattactgtaaatctctcttcttttctctctatgtctttgtctgatcgttggatgaatcaacaacaattttatatgtaagtttttataaatgattagctctcttttcttatttagtttgataaagattg

SEQ ID NO: 55978 - protein, 221 aa, Glycine max
  peptide (1)..(221): Ceres Seq. ID no. 12610413
  misc_feature (75)..(219): Homolog of NCBI NO: 114697 NR Description: ATP synthase B' chain (Subunit II)
  misc_feature (73)..(219): Homolog of NCBI NO: 23043220 NR Description: hypothetical protein [Trichodesmium erythraeum
  misc_feature (14)..(149): Homolog of NCBI NO: 31980479 NR Description: hypothetical protein [Drosera tokaiensis]
  misc_feature (62)..(220): Homolog of NCBI NO: 5902610 NR Description: CFO ATP synthase subunit II precursor
  misc_feature (14)..(149): Homolog of NCBI NO: 31980477 NR Description: hypothetical protein [Drosera tokaiensis]
  misc_feature (60)..(221): Homolog of NCBI NO: 29367413 NR Description: H+-transporting ATP synthase chain 9-like protein
  misc_feature (1)..(220): Homolog of NCBI NO: 448445 NR Description: CF0 ATP synthase:SUBUNIT=9
  misc_feature (1)..(220): Homolog of NCBI NO: 461595 NR Description: ATP synthase B' chain, chloroplast precursor
  misc_feature (2)..(221): Homolog of NCBI NO: 14596171 NR Description: H+-transporting ATP synthase-like protein
  misc_feature (2)..(221): Homolog of NCBI NO: 15236722 NR Description: H+-transporting ATP synthase chain 9 - like
MANSIMASSKPLISLSSSTQPTRVNLPKSIKLPQIPKPISSSSSSSSLSSKALSFSSATVKSLALIAALAPPSMAEAMEKAQLFDFNLTLPIIVVEFLFLMFALDKVYYSPLGNFMDKRDGEIKEKLASVKDTSTEVKALDEQAAAVMRAARAEIAAALNKMKKETEVEVEQQLAVGRKKVEAELQEALASLEKQKEETIKALDSQIAALSEDIVKKVLPS

SEQ ID NO: 55979 - protein, 216 aa, Glycine max
  peptide (1)..(216): Ceres Seq. ID no. 12610414
  misc_feature (70)..(214): Homolog of NCBI NO: 114697 NR Description: ATP synthase B' chain (Subunit II)
  misc_feature (68)..(214): Homolog of NCBI NO: 23043220 NR Description: hypothetical protein [Trichodesmium erythraeum
  misc_feature (9)..(144): Homolog of NCBI NO: 31980479 NR Description: hypothetical protein [Drosera tokaiensis]
  misc_feature (57)..(215): Homolog of NCBI NO: 5902610 NR Description: CFO ATP synthase subunit II precursor
  misc_feature (9)..(144): Homolog of NCBI NO: 31980477 NR Description: hypothetical protein [Drosera tokaiensis]
  misc_feature (55)..(216): Homolog of NCBI NO: 29367413 NR Description: H+-transporting ATP synthase chain 9-like protein
  misc_feature (1)..(215): Homolog of NCBI NO: 448445 NR Description: CF0 ATP synthase:SUBUNIT=9
  misc_feature (1)..(215): Homolog of NCBI NO: 461595 NR Description: ATP synthase B' chain, chloroplast precursor
  misc_feature (1)..(216): Homolog of NCBI NO: 14596171 NR Description: H+-transporting ATP synthase-like protein
  misc_feature (1)..(216): Homolog of NCBI NO: 15236722 NR Description: H+-transporting ATP synthase chain 9 - like
MASSKPLISLSSSTQPTRVNLPKSIKLPQIPKPISSSSSSSSLSSKALSFSSATVKSLALIAALAPPSMAEAMEKAQLFDFNLTLPIIVVEFLFLMFALDKVYYSPLGNFMDKRDGEIKEKLASVKDTSTEVKALDEQAAAVMRAARAEIAAALNKMKKETEVEVEQQLAVGRKKVEAELQEALASLEKQKEETIKALDSQIAALSEDIVKKVLPS

SEQ ID NO: 55980 - protein, 148 aa, Glycine max
  peptide (1)..(148): Ceres Seq. ID no. 12610415
  misc_feature (2)..(146): Homolog of NCBI NO: 114697 NR Description: ATP synthase B' chain (Subunit II)
  misc_feature (1)..(146): Homolog of NCBI NO: 23043220 NR Description: hypothetical protein [Trichodesmium erythraeum
  misc_feature (1)..(76): Homolog of NCBI NO: 31980479 NR Description: hypothetical protein [Drosera tokaiensis]
  misc_feature (1)..(147): Homolog of NCBI NO: 5902610 NR Description: CFO ATP synthase subunit II precursor
  misc_feature (1)..(76): Homolog of NCBI NO: 31980477 NR Description: hypothetical protein [Drosera tokaiensis]
  misc_feature (1)..(148): Homolog of NCBI NO: 29367413 NR Description: H+-transporting ATP synthase chain 9-like protein
  misc_feature (1)..(147): Homolog of NCBI NO: 448445 NR Description: CF0 ATP synthase:SUBUNIT=9
  misc_feature (1)..(147): Homolog of NCBI NO: 461595 NR Description: ATP synthase B' chain, chloroplast precursor
  misc_feature (1)..(148): Homolog of NCBI NO: 14596171 NR Description: H+-transporting ATP synthase-like protein
  misc_feature (1)..(148): Homolog of NCBI NO: 15236722 NR Description: H+-transporting ATP synthase chain 9 - like
MAEAMEKAQLFDFNLTLPIIVVEFLFLMFALDKVYYSPLGNFMDKRDGEIKEKLASVKDTSTEVKALDEQAAAVMRAARAEIAAALNKMKKETEVEVEQQLAVGRKKVEAELQEALASLEKQKEETIKALDSQIAALSEDIVKKVLPS

SEQ ID NO: 55981 - DNA, 738 bp, Glycine max
  misc_feature (1)..(738): Ceres Seq. ID no. 12610964
acaagacaagcgtcgattgccccccatccgtggctgcgcgtccgccggtggccgggggttctaatccgagcgattcccaatcccaaccgccgctggaagaccccgcagctccacgacagcgcgggcagaggcagacatggcgcccgtgctacctgcaccggcggcggcggcggcggcggctcctcctcccttctgccgtgtctctctcccggcccgcagcgctttcccctcctccttccccgtcagaagccttggcaggtttgcagccaggagcagcggcggcggcggccgtcccgagcccaaagcaggtgatgaagagagcaaggccgtcctcgacgccttcttcctcgggaaggccttggcggaggctctgacggagagggccgagtcggtggtgggcgaggtgttcagcgtcgtcgggcagtggcaggcggagcagcagaagcaggtccaggaatttcaggaggaggtagttcagagagcccaaaaggctaaggaaagagctgctgaggaggtcgttgatgataagggaccaaagactctaaagggatcttcaacaaccattgtgacgcctgcacctacaccccctccttctcctactattcccacacaggcagaatagttataagcgacgatgaagagttagtgctgcatgtagactcacttttgtgctccaagaaagttacgaaattctcctttgagatatttattgatcaagttgtcctttctttgatagtg

SEQ ID NO: 55982 - protein, 161 aa, Glycine max
  peptide (1)..(161): Ceres Seq. ID no. 12610965
  misc_feature (62)..(123): Homolog of NCBI NO: 23130619 NR Description: hypothetical protein [Nostoc punctiforme]
  misc_feature (62)..(135): Homolog of NCBI NO: 17232006 NR Description: hypothetical protein [Nostoc sp. PCC 7120]
  misc_feature (57)..(148): Homolog of NCBI NO: 21553912 NR Description: unknown [Arabidopsis thaliana]
  misc_feature (57)..(148): Homolog of NCBI NO: 15235625 NR Description: putative protein
MAPVLPAPAAAAAAAPPPFCRVSLPARSAFPSSFPVRSLGRFAARSSGGGGRPEPKAGDEESKAVLDAFFLGKALAEALTERAESVVGEVFSVVGQWQAEQQKQVQEFQEEVVQRAQKAKERAAEEVVDDKGPKTLKGSSTTIVTPAPTPPPSPTIPTQAE

SEQ ID NO: 55983 - protein, 123 aa, Glycine max
  peptide (1)..(123): Ceres Seq. ID no. 12610966
KTSVDCPPSVAARPPVAGGSNPSDSQSQPPLEDPAAPRQRGQRQTWRPCYLHRRRRRRRLLLPSAVSLSRPAALSPPPSPSEALAGLQPGAAAAAAVPSPKQVMKRARPSSTPSSSGRPWRRL

SEQ ID NO: 55984 - protein, 103 aa, Glycine max
  peptide (1)..(103): Ceres Seq. ID no. 12610967
TRQASIAPHPWLRVRRWPGVLIRAIPNPNRRWKTPQLHDSAGRGRHGARATCTGGGGGGGSSSLLPCLSPGPQRFPLLLPRQKPWQVCSQEQRRRRPSRAQSR

SEQ ID NO: 55985 - DNA, 1015 bp, Glycine max
  misc_feature (1)..(1015): Ceres Seq. ID no. 15226426
sgcwcgagamcattwcctagaacatcstaatsgaaaagttgcagtcattgttagtttattgtgtactagcagcgccactcagtctgttcaaggagtattagtcttgtaatggcttcattttcttgttttcattcttcgattcgggagattgttcaataaagacctggcatgtaatctcttaaagcttaattcaggccactttcattatataaaactgtagatctaagatgtactgtactagtgagtatgctgttcagcttgagctagtaattctggtatctgccctgcatccctttactagcagaatgtgaaatgcctgtcatgagccacttgcaaattctaccattatatagactgtaaatctgagatgtactactgagtatgctctttcttgtgtgtgttcctaggccatactggagatgctactttccaaacactcaggctatcatatatgttgttgattcaagtgatactgataggctggtaactgcaaaagaagaatttcattccatccttgaggaggatgagctgaaaggtgcggttgttcttgtatatgcgaataaacaggaccttccaggtgcacttgatgatgctgccataactgaatcattagaacttcacaagattaagagccgccaatgggcaattttcaaaacatctgctataaaaggggaggggctttttgaaggcttgaactggctcagtaatgcactcaagtccggaggcagctaatgtaggaggcccagcctccattccgtgaatcattgcttgatggtaaggaacagggacgatgacagccttctcgctagtctgcgtggaaatcagaatctctttattttaactctggaagttatacacaatcagttatctgtagagtgcttgttgaagtttccagacacaacactaggtgtaccatgtcgagagcaagaatatatttgtagaaaataccgagcaaacgattacggtttgaaatatgtggcttcaccgcgtaaattttcaccccattttctttttc

SEQ ID NO: 55986 - protein, 116 aa, Glycine max
  peptide (1)..(116): Ceres Seq. ID no. 15226427
  misc_feature (9)..(111): Pfam Name: ADP-ribosylation factor family Pfam Description: ADP-ribosylation factor family
  misc_feature (9)..(115): Homolog of NCBI NO: 17154685 NR Description: ADP-ribosylation factor [Gossypium hirsutum]
  misc_feature (9)..(114): Homolog of NCBI NO: 3182922 NR Description: ADP-ribosylation factor 1
  misc_feature (9)..(114): Homolog of NCBI NO: 30682545 NR Description: ADP-ribosylation factor 3 (ARF3) [Arabidopsis
  misc_feature (9)..(114): Homolog of NCBI NO: 20197875 NR Description: ADP-ribosylation factor 3 [Arabidopsis thaliana]
  misc_feature (9)..(116): Homolog of NCBI NO: 40253742 NR Description: putative ADP-ribosylation factor 3
MLFLVCVPRPYWRCYFPNTQAIIYVVDSSDTDRLVTAKEEFHSILEEDELKGAVVLVYANKQDLPGALDDAAITESLELHKIKSRQWAIFKTSAIKGEGLFEGLNWLSNALKSGGS

SEQ ID NO: 55987 - protein, 81 aa, Glycine max
  peptide (1)..(81): Ceres Seq. ID no. 15226428
MVRNRDDDSLLASLRGNQNLFILTLEVIHNQLSVECLLKFPDTTLGVPCREQEYICRKYRANDYGLKYVASPRKFSPHFLF

SEQ ID NO: 55988 - DNA, 1256 bp, Glycine max
  misc_feature (1)..(1256): Ceres Seq. ID no. 15176047
aaacgataaggtgtgtctcctccgactctctcgtcatcgtctgagcttacctaactccagttaatggcgatgtcgacgactacactcttccatgcacttgttccttccaacacttacaaatccagagctgtctcctcttccttcgtctcagttcctcgctcctcaactccaccttcttcgccgtctctccagttccgctcgcttgtttcagacacgacgtcgatctacggtcggaggaaatttaccggcaatctcagaagagtatccttaaccgtctccgccgccgcagcagctgagcctctcaccgtcctcgtcaccggtgccggtggcagaacagggcaaatcgtgtacaagaagttgaaggagaggtcggatcagttcgtggcgagaggcttggtgaggacgaaagagagcaaggagaagatcggtggagaggacgaagtgttcgtcggtgatattcgagaccctgaatccattgctcctgctgtgcaagggattgatgctttggtcattcttacgagcgctgtaccgaagatgaaacctggttttgatcctagcaaaggagagagacctgagttctactttgaagaaggagcttatcctgaacaggttgattggattggtcagaagaatcagatagatgctgctaaggcagcaggaattaagcagattgttttggtggggtcgatgggaggaacaaacataaacaaccccttgaatagcattggcaatgccaacattctggtttggaagaggaaagctgagcagtacttggctgattccggtattccgtacaccatcatcagggcgggcggtctgcaggacaaagaaggtggcattcgagaattaattgtgggaaaagatgacgagattctagagacagaaatgagaacaattgcaagggctgatgttgctgaagtctgcgttcaggcgttgcagctcgaggaggcaaagtataaagcacttgatctggcctcaaagcctgagggaacaggcaccccaacaaaggatttcaaggcacttttcactcaagttaccgctcggttctgatcttctgttactttgtcttttaagcagagtaataggacaagagactgagagggataataagttcattatgtgagatacacatgtctgaatcggctctttctatatttttcaaggggtctttcccgaagtatctaagtatattttgtatgcaccattcacaaaatcccaaagtcgaaaagatcgggattgatctttgaaagtaaaag

SEQ ID NO: 55989 - protein, 328 aa, Glycine max
  peptide (1)..(328): Ceres Seq. ID no. 15176048
  misc_feature (82)..(156): Pfam Name: Isoflavone reductase Pfam Description: Isoflavone reductase
  misc_feature (180)..(324): Homolog of NCBI NO: 16330694 NR Description: hypothetical protein [Synechocystis sp. PCC 6803]
  misc_feature (181)..(314): Homolog of NCBI NO: 37523053 NR Description: hypothetical protein gll3484 [Gloeobacter
  misc_feature (3)..(321): Homolog of NCBI NO: 7486379 NR Description: hypothetical protein F3L17.100 - Arabidopsis
  misc_feature (3)..(321): Homolog of NCBI NO: 30689062 NR Description: expressed protein [Arabidopsis thaliana]
  misc_feature (81)..(323): Homolog of NCBI NO: 11358410 NR Description: hypothetical protein T7H20.290 - Arabidopsis
  misc_feature (81)..(328): Homolog of NCBI NO: 18413869 NR Description: expressed protein [Arabidopsis thaliana]
  misc_feature (74)..(328): Homolog of NCBI NO: 34897418 NR Description: unknown protein [Oryza sativa (japonica
  misc_feature (65)..(328): Homolog of NCBI NO: 14719331 NR Description: putative 3-beta hydroxysteroid
  misc_feature (1)..(328): Homolog of NCBI NO: 7485430 NR Description: hypothetical protein At2g37660 [imported] -
  misc_feature (1)..(328): Homolog of NCBI NO: 18404496 NR Description: expressed protein [Arabidopsis thaliana]
MAMSTTTLFHALVPSNTYKSRAVSSSFVSVPRSSTPPSSPSLQFRSLVSDTTSIYGRRKFTGNLRRVSLTVSAAAAAEPLTVLVTGAGGRTGQIVYKKLKERSDQFVARGLVRTKESKEKIGGEDEVFVGDIRDPESIAPAVQGIDALVILTSAVPKMKPGFDPSKGERPEFYFEEGAYPEQVDWIGQKNQIDAAKAAGIKQIVLVGSMGGTNINNPLNSIGNANILVWKRKAEQYLADSGIPYTIIRAGGLQDKEGGIRELIVGKDDEILETEMRTIARADVAEVCVQALQLEEAKYKALDLASKPEGTGTPTKDFKALFTQVTARF

SEQ ID NO: 55990 - protein, 326 aa, Glycine max
  peptide (1)..(326): Ceres Seq. ID no. 15176049
  misc_feature (80)..(154): Pfam Name: Isoflavone reductase Pfam Description: Isoflavone reductase
  misc_feature (178)..(322): Homolog of NCBI NO: 16330694 NR Description: hypothetical protein [Synechocystis sp. PCC 6803]
  misc_feature (179)..(312): Homolog of NCBI NO: 37523053 NR Description: hypothetical protein gll3484 [Gloeobacter
  misc_feature (1)..(319): Homolog of NCBI NO: 7486379 NR Description: hypothetical protein F3L17.100 - Arabidopsis
  misc_feature (1)..(319): Homolog of NCBI NO: 30689062 NR Description: expressed protein [Arabidopsis thaliana]
  misc_feature (79)..(321): Homolog of NCBI NO: 11358410 NR Description: hypothetical protein T7H20.290 - Arabidopsis
  misc_feature (79)..(326): Homolog of NCBI NO: 18413869 NR Description: expressed protein [Arabidopsis thaliana]
  misc_feature (72)..(326): Homolog of NCBI NO: 34897418 NR Description: unknown protein [Oryza sativa (japonica
  misc_feature (63)..(326): Homolog of NCBI NO: 14719331 NR Description: putative 3-beta hydroxysteroid
  misc_feature (1)..(326): Homolog of NCBI NO: 7485430 NR Description: hypothetical protein At2g37660 [imported] -
  misc_feature (1)..(326): Homolog of NCBI NO: 18404496 NR Description: expressed protein [Arabidopsis thaliana]
MSTTTLFHALVPSNTYKSRAVSSSFVSVPRSSTPPSSPSLQFRSLVSDTTSIYGRRKFTGNLRRVSLTVSAAAAAEPLTVLVTGAGGRTGQIVYKKLKERSDQFVARGLVRTKESKEKIGGEDEVFVGDIRDPESIAPAVQGIDALVILTSAVPKMKPGFDPSKGERPEFYFEEGAYPEQVDWIGQKNQIDAAKAAGIKQIVLVGSMGGTNINNPLNSIGNANILVWKRKAEQYLADSGIPYTIIRAGGLQDKEGGIRELIVGKDDEILETEMRTIARADVAEVCVQALQLEEAKYKALDLASKPEGTGTPTKDFKALFTQVTARF

SEQ ID NO: 55991 - protein, 171 aa, Glycine max
  peptide (1)..(171): Ceres Seq. ID no. 15176050
  misc_feature (24)..(149): Pfam Name: Isoflavone reductase Pfam Description: Isoflavone reductase
  misc_feature (23)..(167): Homolog of NCBI NO: 16330694 NR Description: hypothetical protein [Synechocystis sp. PCC 6803]
  misc_feature (24)..(157): Homolog of NCBI NO: 37523053 NR Description: hypothetical protein gll3484 [Gloeobacter
  misc_feature (1)..(164): Homolog of NCBI NO: 7486379 NR Description: hypothetical protein F3L17.100 - Arabidopsis
  misc_feature (1)..(164): Homolog of NCBI NO: 30689062 NR Description: expressed protein [Arabidopsis thaliana]
  misc_feature (1)..(166): Homolog of NCBI NO: 11358410 NR Description: hypothetical protein T7H20.290 - Arabidopsis
  misc_feature (1)..(171): Homolog of NCBI NO: 18413869 NR Description: expressed protein [Arabidopsis thaliana]
  misc_feature (1)..(171): Homolog of NCBI NO: 34897418 NR Description: unknown protein [Oryza sativa (japonica
  misc_feature (1)..(171): Homolog of NCBI NO: 14719331 NR Description: putative 3-beta hydroxysteroid
  misc_feature (1)..(171): Homolog of NCBI NO: 7485430 NR Description: hypothetical protein At2g37660 [imported] -
  misc_feature (1)..(171): Homolog of NCBI NO: 18404496 NR Description: expressed protein [Arabidopsis thaliana]
MKPGFDPSKGERPEFYFEEGAYPEQVDWIGQKNQIDAAKAAGIKQIVLVGSMGGTNINNPLNSIGNANILVWKRKAEQYLADSGIPYTIIRAGGLQDKEGGIRELIVGKDDEILETEMRTIARADVAEVCVQALQLEEAKYKALDLASKPEGTGTPTKDFKALFTQVTARF

SEQ ID NO: 55992 - DNA, 677 bp, Glycine max
  misc_feature (1)..(677): Ceres Seq. ID no. 12611141
gagagggagagcgaaacatacaaaggaattcgagtgaggatctaatcgtccatatctttgacctaaccctagtatcgggggctctgtgccgtcggagcaccctttctgatcggaataagactttatacagctcagttgagtctgtttccttctgaaataaaaaaagggtgatggaaacccagaagaaaactagggaacatagcctacaccatatagttgatgacatcggtgctgcatttggaatgggagctattggaggttctgtggtccacttcataaaaggaacccaaaattccccgaaaggccgtcggtttgttgggggagcacaagctgtgagcatgaatgctcctcgtataggaggtagttttgctgtgttcggaggccttttctctgcgtttgactacacaatggtgtacattaggaagaaggaagatccatggaactctatcgtagcaggtgctgctacaggagggtttctgtctatgcgacaagggcttgctgctgcttcgagatcagctcttatgggagggctcttgcttgctttgatcaaaggggtccattaatgttaaacaagttagcttattggattgtgtttattgagctttctctgctcagtcttggaacctatatactcttttgtttaaatcattctacagtaattcatgtattggtggtat

SEQ ID NO: 55993 - protein, 130 aa, Glycine max
  peptide (1)..(130): Ceres Seq. ID no. 12611142
  misc_feature (8)..(129): Homolog of NCBI NO: 23490183 NR Description: mitochondrial import inner membrane translocase
  misc_feature (4)..(129): Homolog of NCBI NO: 30923567 NR Description: CG40451-PA [Drosophila melanogaster]
  misc_feature (1)..(129): Homolog of NCBI NO: 15217923 NR Description: mitochondrial inner membrane translocase
  misc_feature (1)..(126): Homolog of NCBI NO: 38678774 NR Description: mitochondrial inner membrane translocase TM17-3
  misc_feature (1)..(126): Homolog of NCBI NO: 15239150 NR Description: membrane translocase - like protein
  misc_feature (1)..(126): Homolog of NCBI NO: 21593521 NR Description: membrane translocase-like protein [Arabidopsis
  misc_feature (1)..(128): Homolog of NCBI NO: 34394571 NR Description: translocase inner membrane-like protein
  misc_feature (1)..(128): Homolog of NCBI NO: 6103722 NR Description: TIM17 [Arabidopsis thaliana]
  misc_feature (1)..(128): Homolog of NCBI NO: 38678772 NR Description: mitochondrial inner membrane translocase TM17-2
  misc_feature (1)..(128): Homolog of NCBI NO: 15228131 NR Description: putative protein translocase
METQKKTREHSLHHIVDDIGAAFGMGAIGGSVVHFIKGTQNSPKGRRFVGGAQAVSMNAPRIGGSFAVFGGLFSAFDYTMVYIRKKEDPWNSIVAGAATGGFLSMRQGLAAASRSALMGGLLLALIKGVH

SEQ ID NO: 55994 - protein, 106 aa, Glycine max
  peptide (1)..(106): Ceres Seq. ID no. 12611143
  misc_feature (1)..(105): Homolog of NCBI NO: 23490183 NR Description: mitochondrial import inner membrane translocase
  misc_feature (1)..(105): Homolog of NCBI NO: 30923567 NR Description: CG40451-PA [Drosophila melanogaster]
  misc_feature (1)..(105): Homolog of NCBI NO: 15217923 NR Description: mitochondrial inner membrane translocase
  misc_feature (1)..(102): Homolog of NCBI NO: 38678774 NR Description: mitochondrial inner membrane translocase TM17-3
  misc_feature (1)..(102): Homolog of NCBI NO: 15239150 NR Description: membrane translocase - like protein
  misc_feature (1)..(102): Homolog of NCBI NO: 21593521 NR Description: membrane translocase-like protein [Arabidopsis
  misc_feature (1)..(104): Homolog of NCBI NO: 34394571 NR Description: translocase inner membrane-like protein
  misc_feature (1)..(104): Homolog of NCBI NO: 6103722 NR Description: TIM17 [Arabidopsis thaliana]
  misc_feature (1)..(104): Homolog of NCBI NO: 38678772 NR Description: mitochondrial inner membrane translocase TM17-2
  misc_feature (1)..(104): Homolog of NCBI NO: 15228131 NR Description: putative protein translocase
MGAIGGSVVHFIKGTQNSPKGRRFVGGAQAVSMNAPRIGGSFAVFGGLFSAFDYTMVYIRKKEDPWNSIVAGAATGGFLSMRQGLAAASRSALMGGLLLALIKGVH

SEQ ID NO: 55995 - protein, 80 aa, Glycine max
  peptide (1)..(80): Ceres Seq. ID no. 12611144
MELYRSRCCYRRVSVYATRACCCFEISSYGRALACFDQRGPLMLNKLAYWIVFIELSLLSLGTYILFCLNHSTVIHVLVV

SEQ ID NO: 55996 - DNA, 917 bp, Glycine max
  misc_feature (1)..(917): Ceres Seq. ID no. 13594958
aatttaatcaaccccctttcaacagtatcatttttagtaatttttttatcagtaaaagggaaaacaaatccttttgttttcattctcacttttgcagctaagttgggaaacattttttgcaggtaagatcactgacacttgatgttaaagtgtgggatccctctgttttaagtatgcttaagtcactgggcaatctttttgcaaactcagtttgggaggagctgctgtatccaccgagtaatttgcaaactgttgacacccctgcgagttcatccaaggaaaatggagaggagttctttcatgcaagaaaaccaaaacatgacgattctatttcattaaaggaaaggttcattcatgcaaagtattctgagaaaatatttattccccggacaaagaaatatcaccctctcttttcacccgcacaactggtgctggaaagcatctatgccaatgataagaaagcagtctaccagcatattatcaagtcagattttgacatcaatgccatcggttggcaagcatcgtctgatgactctttcaacatggtttcttcaaataatttaaacattgcctctcaaagtgaaattcagcccattgaggccatacaagatggttctagcgtgcttcaccttgcatgcctaactagtgacattggcatggtggagctgctcctacaacatggggcaaatataaatgcttgtgattctagaggtcagacaccactacattattgtattattaaagggaagaccgcagctgcaaaagtgcttatcatgaggggagccaatacatatgtcgcagataaagaaggcaaaactcctgttaagcttgcatcagaatctggctgtggtgatgatgaaattctcgctctcttgacaagcagatgacatgtttaaaatcttacaatgagcggtcat

SEQ ID NO: 55997 - protein, 237 aa, Glycine max
  peptide (1)..(237): Ceres Seq. ID no. 13594959
  misc_feature (1)..(70): Pfam Name: Putative GTPase activating protein for Arf Pfam Description: Putative GTPase activating protein for Arf
  misc_feature (145)..(224): Homolog of NCBI NO: 28373837 NR Description: Chain A, 4ank: A Designed Ankyrin Repeat Protein
  misc_feature (115)..(224): Homolog of NCBI NO: 28274852 NR Description: ankyrin repeat protein E4_2 [synthetic construct]
  misc_feature (117)..(235): Homolog of NCBI NO: 15240398 NR Description: ARF GTPase-activating domain-containing protein
  misc_feature (1)..(217): Homolog of NCBI NO: 15240398 NR Description: ARF GTPase-activating domain-containing protein
  misc_feature (1)..(234): Homolog of NCBI NO: 30681946 NR Description: ARF GTPase-activating domain-containing protein
  misc_feature (1)..(234): Homolog of NCBI NO: 25402625 NR Description: hypothetical protein [imported] - Arabidopsis
  misc_feature (1)..(234): Homolog of NCBI NO: 15219822 NR Description: ARF GTPase-activating domain-containing protein
  misc_feature (1)..(234): Homolog of NCBI NO: 38175545 NR Description: putative ARF GTPase-activating domain-containing
  misc_feature (1)..(235): Homolog of NCBI NO: 30684352 NR Description: ARF GTPase-activating domain-containing protein
  misc_feature (1)..(235): Homolog of NCBI NO: 11358303 NR Description: hypothetical protein T31B5.120 - Arabidopsis
MLKSLGNLFANSVWEELLYPPSNLQTVDTPASSSKENGEEFFHARKPKHDDSISLKERFIHAKYSEKIFIPRTKKYHPLFSPAQLVLESIYANDKKAVYQHIIKSDFDINAIGWQASSDDSFNMVSSNNLNIASQSEIQPIEAIQDGSSVLHLACLTSDIGMVELLLQHGANINACDSRGQTPLHYCIIKGKTAAAKVLIMRGANTYVADKEGKTPVKLASESGCGDDEILALLTSR

SEQ ID NO: 55998 - DNA, 970 bp, Glycine max
  misc_feature (1)..(970): Ceres Seq. ID no. 13595294
atctcttgtgcaactcttagggtttttatcctccaaagtcacagtgccccttcttctcttatcctcaaggacagcagaaatggcggcgactcaacttacagcatcaccagtgactgtttcagctaggagcttagcctcactcagagcttcgagtgccaagtttggaactttgaaaccaggcacccttaagcagagccagttccgttctttcgttgtcagagctgcttctgtggttgctcctaagtatacttccattaagccattgggagatagagttttggtgaagatcaaggaggcagaggagaagactatgggaggtatcttacttccatccacagctcaatcaaagcctcaaggaggtgaagtcgttactgtgggtgaaggaagaactattgggaagaccaaaatcgacatagatgtccctactggcgcgcaaattatttactccaaatacgcaggaactgaggtggagttcaacgatgttcagcatcttattctcaaggaagatgatattgttggccttcttgagaccgaggacataaaagatctcaagcccttgaatgaccgtgtcttcattaaggtagctgaggctgaggagaaaacagctggagggttgttgctaaccgagactaccaaagagaagccttctattggcacggtgatagcagttggaccaggttctctagatgaggaaggtaagcgccagccactatcgatatctaccggaagcacagttctttactccaagtatgctggtaacgacttcaagggcaaagatggttccaactacatcgccctgagagcttcagatgtgatggctatcctttcttagtttatatctctgtaacctgcaatttgtatcccagttgtggaaatttttcataaacggcttctgcataatctgaaacaaagacttgagttttaaaatatggttcttaaaaaaaaaaaaaaaaaagcttatcgataccgt

SEQ ID NO: 55999 - protein, 276 aa, Glycine max
  peptide (1)..(276): Ceres Seq. ID no. 15221530
  misc_feature (181)..(276): Pfam Name: Chaperonin 10 Kd subunit Pfam Description: Chaperonin 10 Kd subunit
  misc_feature (83)..(174): Homolog of NCBI NO: 37522465 NR Description: chaperonin GroES [Gloeobacter violaceus]
  misc_feature (179)..(275): Homolog of NCBI NO: 29839360 NR Description: 10 kDa chaperonin (Protein Cpn10) (groES protein)
  misc_feature (180)..(276): Homolog of NCBI NO: 116204 NR Description: 10 kDa chaperonin (Protein Cpn10) (groES protein)
  misc_feature (177)..(276): Homolog of NCBI NO: 11467285 NR Description: GroES [Cyanophora paradoxa]
  misc_feature (180)..(275): Homolog of NCBI NO: 22297730 NR Description: 10kD chaperonin [Thermosynechococcus elongatus
  misc_feature (27)..(276): Homolog of NCBI NO: 399241 NR Description: 20 kDa chaperonin, chloroplast precursor (Protein (Chloroplast protein Cpn10) (Chloroplast chaperonin 10)
  misc_feature (27)..(276): Homolog of NCBI NO: 7331143 NR Description: chaperonin 21 precursor [Lycopersicon esculentum]
  misc_feature (27)..(276): Homolog of NCBI NO: 21780187 NR Description: cp10-like protein [Gossypium hirsutum]
  misc_feature (27)..(276): Homolog of NCBI NO: 25453528 NR Description: chaperonin 10 [imported] - Arabidopsis thaliana
  misc_feature (27)..(276): Homolog of NCBI NO: 15242045 NR Description: chloroplast Cpn21 protein [Arabidopsis thaliana]
SLVQLLGFLSSKVTVPLLLLSSRTAEMAATQLTASPVTVSARSLASLRASSAKFGTLKPGTLKQSQFRSFVVRAASVVAPKYTSIKPLGDRVLVKIKEAEEKTMGGILLPSTAQSKPQGGEVVTVGEGRTIGKTKIDIDVPTGAQIIYSKYAGTEVEFNDVQHLILKEDDIVGLLETEDIKDLKPLNDRVFIKVAEAEEKTAGGLLLTETTKEKPSIGTVIAVGPGSLDEEGKRQPLSISTGSTVLYSKYAGNDFKGKDGSNYIALRASDVMAILS

SEQ ID NO: 56000 - protein, 250 aa, Glycine max
  peptide (1)..(250): Ceres Seq. ID no. 15221531
  misc_feature (155)..(250): Pfam Name: Chaperonin 10 Kd subunit Pfam Description: Chaperonin 10 Kd subunit
  misc_feature (57)..(148): Homolog of NCBI NO: 37522465 NR Description: chaperonin GroES [Gloeobacter violaceus]
  misc_feature (153)..(249): Homolog of NCBI NO: 29839360 NR Description: 10 kDa chaperonin (Protein Cpn10) (groES protein)
  misc_feature (154)..(250): Homolog of NCBI NO: 116204 NR Description: 10 kDa chaperonin (Protein Cpn10) (groES protein)
  misc_feature (151)..(250): Homolog of NCBI NO: 11467285 NR Description: GroES [Cyanophora paradoxa]
  misc_feature (154)..(249): Homolog of NCBI NO: 22297730 NR Description: 10kD chaperonin [Thermosynechococcus elongatus
  misc_feature (1)..(250): Homolog of NCBI NO: 399241 NR Description: 20 kDa chaperonin, chloroplast precursor (Protein (Chloroplast protein Cpn10) (Chloroplast chaperonin 10)
  misc_feature (1)..(250): Homolog of NCBI NO: 7331143 NR Description: chaperonin 21 precursor [Lycopersicon esculentum]
  misc_feature (1)..(250): Homolog of NCBI NO: 21780187 NR Description: cp10-like protein [Gossypium hirsutum]
  misc_feature (1)..(250): Homolog of NCBI NO: 25453528 NR Description: chaperonin 10 [imported] - Arabidopsis thaliana
  misc_feature (1)..(250): Homolog of NCBI NO: 15242045 NR Description: chloroplast Cpn21 protein [Arabidopsis thaliana]
MAATQLTASPVTVSARSLASLRASSAKFGTLKPGTLKQSQFRSFVVRAASVVAPKYTSIKPLGDRVLVKIKEAEEKTMGGILLPSTAQSKPQGGEVVTVGEGRTIGKTKIDIDVPTGAQIIYSKYAGTEVEFNDVQHLILKEDDIVGLLETEDIKDLKPLNDRVFIKVAEAEEKTAGGLLLTETTKEKPSIGTVIAVGPGSLDEEGKRQPLSISTGSTVLYSKYAGNDFKGKDGSNYIALRASDVMAILS

SEQ ID NO: 56001 - protein, 173 aa, Glycine max
  peptide (1)..(173): Ceres Seq. ID no. 15221532
  misc_feature (78)..(173): Pfam Name: Chaperonin 10 Kd subunit Pfam Description: Chaperonin 10 Kd subunit
  misc_feature (1)..(71): Homolog of NCBI NO: 37522465 NR Description: chaperonin GroES [Gloeobacter violaceus]
  misc_feature (76)..(172): Homolog of NCBI NO: 29839360 NR Description: 10 kDa chaperonin (Protein Cpn10) (groES protein)
  misc_feature (77)..(173): Homolog of NCBI NO: 116204 NR Description: 10 kDa chaperonin (Protein Cpn10) (groES protein)
  misc_feature (74)..(173): Homolog of NCBI NO: 11467285 NR Description: GroES [Cyanophora paradoxa]
  misc_feature (77)..(172): Homolog of NCBI NO: 22297730 NR Description: 10kD chaperonin [Thermosynechococcus elongatus
  misc_feature (1)..(173): Homolog of NCBI NO: 399241 NR Description: 20 kDa chaperonin, chloroplast precursor (Protein (Chloroplast protein Cpn10) (Chloroplast chaperonin 10)
  misc_feature (1)..(173): Homolog of NCBI NO: 7331143 NR Description: chaperonin 21 precursor [Lycopersicon esculentum]
  misc_feature (1)..(173): Homolog of NCBI NO: 21780187 NR Description: cp10-like protein [Gossypium hirsutum]
  misc_feature (1)..(173): Homolog of NCBI NO: 25453528 NR Description: chaperonin 10 [imported] - Arabidopsis thaliana
  misc_feature (1)..(173): Homolog of NCBI NO: 15242045 NR Description: chloroplast Cpn21 protein [Arabidopsis thaliana]
MGGILLPSTAQSKPQGGEVVTVGEGRTIGKTKIDIDVPTGAQIIYSKYAGTEVEFNDVQHLILKEDDIVGLLETEDIKDLKPLNDRVFIKVAEAEEKTAGGLLLTETTKEKPSIGTVIAVGPGSLDEEGKRQPLSISTGSTVLYSKYAGNDFKGKDGSNYIALRASDVMAILS

SEQ ID NO: 56002 - DNA, 840 bp, Glycine max
  misc_feature (1)..(840): Ceres Seq. ID no. 13582184
gtttaaaaaaaaaaaccctagcaccagtcccgccgccgccgctgccgccctgaccctcgccgctgctgcagcctccaccgcgcaaccatgggtatcgacctcgtcgccggcggccgcaacaagaggaccaagcgcacggcgcccaaatcggacgatgtgtacctcaagctgctcgtcaagctctaccgcttcctggtccggaggaccaagagccagttcaacgccgtgatcctgaagcgcctcttcatgagcaagaccaaccgccccccgctctcgatgcgccgcctcgtcaggttcatggaggggaaggaggacaagatcgctgtgatagtgggcaccatcaccgatgaccagagggtctacgagataccggcaatgaaggtggccgcgctcaggttcaccgagacggcgagggccaggattgtcaatgccggtggcgagtgccttacctttgaccagctcgcgctccgtgctccgcttggacagaacacgcttctcctgaggggtcccaagaacgccagggaggctgttaggcactttggcaaggctccaggagtgccacacagccacaccaagccatatgtccactccaagggcaggaaattcgagaaggcaagaggaaggaggaacagcaggggcttcaaggtttaagccgtggagttttcggcacccttgtcacatttgctgttatcggtcaatcttcacttttttgggtaccagaatcatactgctttagatgtcagagtcttgtgtcgatgagtattcagaaccagttcattcttgtttcagtattttgcaacttgagaccatgcttgcaatccagttatgaatatcattttt

SEQ ID NO: 56003 - protein, 187 aa, Glycine max
  peptide (1)..(187): Ceres Seq. ID no. 13582185
  misc_feature (1)..(186): Homolog of NCBI NO: 28630354 NR Description: ribosomal protein L18 [Branchiostoma lanceolatum]
  misc_feature (1)..(186): Homolog of NCBI NO: 28630356 NR Description: ribosomal protein L18 [Petromyzon marinus]
  misc_feature (1)..(163): Homolog of NCBI NO: 28798549 NR Description: 60S ribosomal protein [Medicago sativa]
  misc_feature (2)..(187): Homolog of NCBI NO: 7440855 NR Description: ribosomal protein L18, cytosolic - Arabidopsis
  misc_feature (4)..(187): Homolog of NCBI NO: 6094021 NR Description: 60S RIBOSOMAL PROTEIN L18
  misc_feature (1)..(187): Homolog of NCBI NO: 15241061 NR Description: 60S ribosomal protein L18 (RPL18C) [Arabidopsis
  misc_feature (1)..(187): Homolog of NCBI NO: 15230011 NR Description: 60S ribosomal protein L18 (RPL18B) [Arabidopsis
  misc_feature (1)..(187): Homolog of NCBI NO: 606970 NR Description: cytoplasmic ribosomal protein L18
  misc_feature (1)..(187): Homolog of NCBI NO: 34393858 NR Description: putative cytoplasmic ribosomal protein L18
  misc_feature (1)..(187): Homolog of NCBI NO: 34897628 NR Description: cytoplasmic ribosomal protein L18 [Oryza sativa]
MGIDLVAGGRNKRTKRTAPKSDDVYLKLLVKLYRFLVRRTKSQFNAVILKRLFMSKTNRPPLSMRRLVRFMEGKEDKIAVIVGTITDDQRVYEIPAMKVAALRFTETARARIVNAGGECLTFDQLALRAPLGQNTLLLRGPKNAREAVRHFGKAPGVPHSHTKPYVHSKGRKFEKARGRRNSRGFKV

SEQ ID NO: 56004 - protein, 134 aa, Glycine max
  peptide (1)..(134): Ceres Seq. ID no. 13582186
  misc_feature (1)..(133): Homolog of NCBI NO: 28630354 NR Description: ribosomal protein L18 [Branchiostoma lanceolatum]
  misc_feature (1)..(133): Homolog of NCBI NO: 28630356 NR Description: ribosomal protein L18 [Petromyzon marinus]
  misc_feature (1)..(110): Homolog of NCBI NO: 28798549 NR Description: 60S ribosomal protein [Medicago sativa]
  misc_feature (1)..(134): Homolog of NCBI NO: 7440855 NR Description: ribosomal protein L18, cytosolic - Arabidopsis
  misc_feature (1)..(134): Homolog of NCBI NO: 6094021 NR Description: 60S RIBOSOMAL PROTEIN L18
  misc_feature (1)..(134): Homolog of NCBI NO: 15241061 NR Description: 60S ribosomal protein L18 (RPL18C) [Arabidopsis
  misc_feature (1)..(134): Homolog of NCBI NO: 15230011 NR Description: 60S ribosomal protein L18 (RPL18B) [Arabidopsis
  misc_feature (1)..(134): Homolog of NCBI NO: 606970 NR Description: cytoplasmic ribosomal protein L18
  misc_feature (1)..(134): Homolog of NCBI NO: 34393858 NR Description: putative cytoplasmic ribosomal protein L18
  misc_feature (1)..(134): Homolog of NCBI NO: 34897628 NR Description: cytoplasmic ribosomal protein L18 [Oryza sativa]
MSKTNRPPLSMRRLVRFMEGKEDKIAVIVGTITDDQRVYEIPAMKVAALRFTETARARIVNAGGECLTFDQLALRAPLGQNTLLLRGPKNAREAVRHFGKAPGVPHSHTKPYVHSKGRKFEKARGRRNSRGFKV

SEQ ID NO: 56005 - protein, 124 aa, Glycine max
  peptide (1)..(124): Ceres Seq. ID no. 13582187
  misc_feature (1)..(123): Homolog of NCBI NO: 28630354 NR Description: ribosomal protein L18 [Branchiostoma lanceolatum]
  misc_feature (1)..(123): Homolog of NCBI NO: 28630356 NR Description: ribosomal protein L18 [Petromyzon marinus]
  misc_feature (1)..(100): Homolog of NCBI NO: 28798549 NR Description: 60S ribosomal protein [Medicago sativa]
  misc_feature (1)..(124): Homolog of NCBI NO: 7440855 NR Description: ribosomal protein L18, cytosolic - Arabidopsis
  misc_feature (1)..(124): Homolog of NCBI NO: 6094021 NR Description: 60S RIBOSOMAL PROTEIN L18
  misc_feature (1)..(124): Homolog of NCBI NO: 15241061 NR Description: 60S ribosomal protein L18 (RPL18C) [Arabidopsis
  misc_feature (1)..(124): Homolog of NCBI NO: 15230011 NR Description: 60S ribosomal protein L18 (RPL18B) [Arabidopsis
  misc_feature (1)..(124): Homolog of NCBI NO: 606970 NR Description: cytoplasmic ribosomal protein L18
  misc_feature (1)..(124): Homolog of NCBI NO: 34393858 NR Description: putative cytoplasmic ribosomal protein L18
  misc_feature (1)..(124): Homolog of NCBI NO: 34897628 NR Description: cytoplasmic ribosomal protein L18 [Oryza sativa]
MRRLVRFMEGKEDKIAVIVGTITDDQRVYEIPAMKVAALRFTETARARIVNAGGECLTFDQLALRAPLGQNTLLLRGPKNAREAVRHFGKAPGVPHSHTKPYVHSKGRKFEKARGRRNSRGFKV

SEQ ID NO: 56006 - DNA, 844 bp, Glycine max
  misc_feature (1)..(844): Ceres Seq. ID no. 13581971
aaaaaaaacgagaagtaggatctgttgttcttcgttttctacgaggaagcaaaataacaataacagaggaagaaagaaaatcacacagtttcagtttcagtttcagcttcgctttgtagaaatggctactctatcaagcttcattgctacgccgaagaatcccaagacccactttctctcaggttcctcattcatgtcgatggacaaatgcttcttgaaaatcagcaccagcggacactttacagatttctctttaagggctaaagcaacatgtaacaaaccacttgttattcaagctggtggtgatggtggaagaccaagtagtggaagtatttttgttggtggttttgtattgggaggactaattgctggagcattgggttgtctatatgcacctcagataagcagggcactagctggagctgacagtaaagacttaatgaggaaacttccaaaattcatgtatgatgaagaaaaagcactggagaggactcgcgaggtgctaactgagaaaatagcgcagttgaactctgccatagatggtgtttctgcacagttgcggccagatgaagactcaaatgaaattgccgtgaactcagaggaaattgaaacaccaatcagcgatgaaagtgaaatcgaagtcaacaaataaaaagctgttgtcatttactccaagttgatgtcacaaattgcttttgcatcattgaatctattaatgtatgtacttgacacaagttggttccagcaaacgtagattatgttctgttgctgaacaagtctccgttaaatagacaatttgttacattgacaagttataccaataattcatttaatttactgtccc

SEQ ID NO: 56007 - protein, 216 aa, Glycine max
  peptide (1)..(216): Ceres Seq. ID no. 13581972
  misc_feature (44)..(213): Homolog of NCBI NO: 15233017 NR Description: expressed protein [Arabidopsis thaliana]
  misc_feature (73)..(213): Homolog of NCBI NO: 22326856 NR Description: protein; similar to unknown protein
  misc_feature (73)..(213): Homolog of NCBI NO: 10176975 NR Description: protein; similar to unknown protein [Arabidopsis
  misc_feature (54)..(213): Homolog of NCBI NO: 17065406 NR Description: Unknown protein [Arabidopsis thaliana]
  misc_feature (41)..(203): Homolog of NCBI NO: 18400762 NR Description: expressed protein [Arabidopsis thaliana]
KKTRSRICCSSFSTRKQNNNNRGRKKITQFQFQFQLRFVEMATLSSFIATPKNPKTHFLSGSSFMSMDKCFLKISTSGHFTDFSLRAKATCNKPLVIQAGGDGGRPSSGSIFVGGFVLGGLIAGALGCLYAPQISRALAGADSKDLMRKLPKFMYDEEKALERTREVLTEKIAQLNSAIDGVSAQLRPDEDSNEIAVNSEEIETPISDESEIEVNK

SEQ ID NO: 56008 - protein, 176 aa, Glycine max
  peptide (1)..(176): Ceres Seq. ID no. 13581973
  misc_feature (4)..(173): Homolog of NCBI NO: 15233017 NR Description: expressed protein [Arabidopsis thaliana]
  misc_feature (33)..(173): Homolog of NCBI NO: 22326856 NR Description: protein; similar to unknown protein
  misc_feature (33)..(173): Homolog of NCBI NO: 10176975 NR Description: protein; similar to unknown protein [Arabidopsis
  misc_feature (14)..(173): Homolog of NCBI NO: 17065406 NR Description: Unknown protein [Arabidopsis thaliana]
  misc_feature (1)..(163): Homolog of NCBI NO: 18400762 NR Description: expressed protein [Arabidopsis thaliana]
MATLSSFIATPKNPKTHFLSGSSFMSMDKCFLKISTSGHFTDFSLRAKATCNKPLVIQAGGDGGRPSSGSIFVGGFVLGGLIAGALGCLYAPQISRALAGADSKDLMRKLPKFMYDEEKALERTREVLTEKIAQLNSAIDGVSAQLRPDEDSNEIAVNSEEIETPISDESEIEVNK

SEQ ID NO: 56009 - protein, 152 aa, Glycine max
  peptide (1)..(152): Ceres Seq. ID no. 13581974
  misc_feature (1)..(149): Homolog of NCBI NO: 15233017 NR Description: expressed protein [Arabidopsis thaliana]
  misc_feature (9)..(149): Homolog of NCBI NO: 22326856 NR Description: protein; similar to unknown protein
  misc_feature (9)..(149): Homolog of NCBI NO: 10176975 NR Description: protein; similar to unknown protein [Arabidopsis
  misc_feature (1)..(149): Homolog of NCBI NO: 17065406 NR Description: Unknown protein [Arabidopsis thaliana]
  misc_feature (1)..(139): Homolog of NCBI NO: 18400762 NR Description: expressed protein [Arabidopsis thaliana]
MSMDKCFLKISTSGHFTDFSLRAKATCNKPLVIQAGGDGGRPSSGSIFVGGFVLGGLIAGALGCLYAPQISRALAGADSKDLMRKLPKFMYDEEKALERTREVLTEKIAQLNSAIDGVSAQLRPDEDSNEIAVNSEEIETPISDESEIEVNK

SEQ ID NO: 56010 - DNA, 827 bp, Glycine max
  misc_feature (1)..(827): Ceres Seq. ID no. 13594974
agaacatcctaatcgaaaaatatttcttttaacatttccttagtttctgaacctaccctcatcgggtctccaaggagccaagaaagaactgctttctcggcttctcggagtctcaccatcctctgttttcaccatttcttcatccacacgcaacctctaatctaaacctaaccctaaaaaatggactccacggagctaaaacgtgtgttccaaatgttcgacaaggacggagacggtcggatcacacagaaggagctaaacgagtcattcaaaaacctcggcatcataatccctgaaaacgagctgtcgcagatgatcgagaagatcgatgtgaacggagatggttgcgttgacgtcgaagagtttggagagctttacaagtcgataatggtccaaggcgaggatgagataggagatgaagatatgaaggaagcgttcaacgtttttgatcagaatggagatgggtttattacggtggatgagttgaaaacggtgttgtcttccttgggcctcaagcaaggtaagaccttggaggagtgtaggaagatgataatacaagtggatgttgatggtgatggtagggttaattacaaggagtttaggcaaatgatgaagaagggtcagattttagctcaatgagctgatgatctatgatttgtttgtttatatattttttttggttatttgtgttaacctttttctctcgcattctagaaggaaatatcacattatctgtaactggagctgttttatagtgtctaggtttgcgagagcacattgtaaaaattgtagacctgtttgtttctaatgtgatttgtgataatttt

SEQ ID NO: 56011 - protein, 152 aa, Glycine max
  peptide (1)..(152): Ceres Seq. ID no. 15221441
  misc_feature (119)..(147): Pfam Name: EF hand Pfam Description: EF hand
  misc_feature (5)..(144): Homolog of NCBI NO: 4959165 NR Description: calmodulin mutant SYNCAM57D [synthetic construct]
  misc_feature (2)..(151): Homolog of NCBI NO: 21740787 NR Description: OSJNBb0091E11.1 [Oryza sativa (japonica
  misc_feature (5)..(147): Homolog of NCBI NO: 15231685 NR Description: calcium-binding protein, putative [Arabidopsis
  misc_feature (1)..(151): Homolog of NCBI NO: 15235516 NR Description: calcium-binding protein, putative [Arabidopsis
  misc_feature (1)..(151): Homolog of NCBI NO: 15231470 NR Description: calcium-binding protein, putative [Arabidopsis
  misc_feature (1)..(147): Homolog of NCBI NO: 25295758 NR Description: probable calcium binding protein [imported] -
  misc_feature (1)..(147): Homolog of NCBI NO: 18406202 NR Description: calmodulin-like protein (MSS3) [Arabidopsis
  misc_feature (1)..(147): Homolog of NCBI NO: 28301674 NR Description: calcium-binding protein [Lotus japonicus]
  misc_feature (1)..(147): Homolog of NCBI NO: 15221358 NR Description: calcium-binding protein, putative [Arabidopsis
  misc_feature (1)..(151): Homolog of NCBI NO: 15236276 NR Description: calcium-binding protein, putative [Arabidopsis
MDSTELKRVFQMFDKDGDGRITQKELNESFKNLGIIIPENELSQMIEKIDVNGDGCVDVEEFGELYKSIMVQGEDEIGDEDMKEAFNVFDQNGDGFITVDELKTVLSSLGLKQGKTLEECRKMIIQVDVDGDGRVNYKEFRQMMKKGQILAQ

SEQ ID NO: 56012 - protein, 141 aa, Glycine max
  peptide (1)..(141): Ceres Seq. ID no. 15221442
  misc_feature (108)..(136): Pfam Name: EF hand Pfam Description: EF hand
  misc_feature (1)..(133): Homolog of NCBI NO: 4959165 NR Description: calmodulin mutant SYNCAM57D [synthetic construct]
  misc_feature (1)..(140): Homolog of NCBI NO: 21740787 NR Description: OSJNBb0091E11.1 [Oryza sativa (japonica
  misc_feature (1)..(136): Homolog of NCBI NO: 15231685 NR Description: calcium-binding protein, putative [Arabidopsis
  misc_feature (1)..(140): Homolog of NCBI NO: 15235516 NR Description: calcium-binding protein, putative [Arabidopsis
  misc_feature (1)..(140): Homolog of NCBI NO: 15231470 NR Description: calcium-binding protein, putative [Arabidopsis
  misc_feature (1)..(136): Homolog of NCBI NO: 25295758 NR Description: probable calcium binding protein [imported] -
  misc_feature (1)..(136): Homolog of NCBI NO: 18406202 NR Description: calmodulin-like protein (MSS3) [Arabidopsis
  misc_feature (1)..(136): Homolog of NCBI NO: 28301674 NR Description: calcium-binding protein [Lotus japonicus]
  misc_feature (1)..(136): Homolog of NCBI NO: 15221358 NR Description: calcium-binding protein, putative [Arabidopsis
  misc_feature (1)..(140): Homolog of NCBI NO: 15236276 NR Description: calcium-binding protein, putative [Arabidopsis
MFDKDGDGRITQKELNESFKNLGIIIPENELSQMIEKIDVNGDGCVDVEEFGELYKSIMVQGEDEIGDEDMKEAFNVFDQNGDGFITVDELKTVLSSLGLKQGKTLEECRKMIIQVDVDGDGRVNYKEFRQMMKKGQILAQ

SEQ ID NO: 56013 - protein, 108 aa, Glycine max
  peptide (1)..(108): Ceres Seq. ID no. 15221443
  misc_feature (75)..(103): Pfam Name: EF hand Pfam Description: EF hand
  misc_feature (1)..(100): Homolog of NCBI NO: 4959165 NR Description: calmodulin mutant SYNCAM57D [synthetic construct]
  misc_feature (1)..(107): Homolog of NCBI NO: 21740787 NR Description: OSJNBb0091E11.1 [Oryza sativa (japonica
  misc_feature (1)..(103): Homolog of NCBI NO: 15231685 NR Description: calcium-binding protein, putative [Arabidopsis
  misc_feature (1)..(107): Homolog of NCBI NO: 15235516 NR Description: calcium-binding protein, putative [Arabidopsis
  misc_feature (1)..(107): Homolog of NCBI NO: 15231470 NR Description: calcium-binding protein, putative [Arabidopsis
  misc_feature (1)..(103): Homolog of NCBI NO: 25295758 NR Description: probable calcium binding protein [imported] -
  misc_feature (1)..(103): Homolog of NCBI NO: 18406202 NR Description: calmodulin-like protein (MSS3) [Arabidopsis
  misc_feature (1)..(103): Homolog of NCBI NO: 28301674 NR Description: calcium-binding protein [Lotus japonicus]
  misc_feature (1)..(103): Homolog of NCBI NO: 15221358 NR Description: calcium-binding protein, putative [Arabidopsis
  misc_feature (1)..(107): Homolog of NCBI NO: 15236276 NR Description: calcium-binding protein, putative [Arabidopsis
MIEKIDVNGDGCVDVEEFGELYKSIMVQGEDEIGDEDMKEAFNVFDQNGDGFITVDELKTVLSSLGLKQGKTLEECRKMIIQVDVDGDGRVNYKEFRQMMKKGQILAQ

SEQ ID NO: 56014 - DNA, 926 bp, Glycine max
  misc_feature (1)..(926): Ceres Seq. ID no. 15224629
aaaattacaacctctctctctcgccgtctgctcgctcgctcgtcccccaaatcccaccccctccccgaccgaaccccagcggcgtcgccggcgatggagtgcgtcatcggcgtggtgggcagcgacttcgcggtggtggcggcggacacgtccgccgtgcagagcatcctcgtccacaagacggacgaggacaagatcatgctcctcgactcccacaagctcatgggcgcctccggggagcccggcgaccgcgtgcagttcaccgagttcatccagaagaacctccacctctaccagttccgcaacaacatgccgctcagcaccgccgccaccgccaacttcacccgcggcgagctcgccaccgccctgcgcaagaatccctactccgtaaacatcatacttgcagggtttgataaagacgctggtgcatcgatgtactacattgactacatcgcgacgctccacaagatcgacaagggagcattcgggtacgggtcgtacttctgtctgtcgctgatggacaagttgtaccgccctgacatgtctgtcgaggaagcggtagaccttgttgacaagtgcatcaaggagatcagactccggctggtcgtcgcgcctcagaatttcgccatcaagatcgtggacaaggatggcgccagggactatgctaggcgtgagatcggaggtgacagtcctgcagccgcaaccgcaaccgcagcagtagcaacaattgcctgaggtgattggccctgtcggtggtcatttggctgggtggaggctgaacccttcctgtcaattgtttccgagtactgtcactatgtaatcgcaatacgtttcggttcgagaactgtgttgcaaattctcccagatgtggactagtctgtttatgaccccctatttcatggttatatgtttcactgtttcttgcc

SEQ ID NO: 56015 - protein, 244 aa, Glycine max
  peptide (1)..(244): Ceres Seq. ID no. 15224630
  misc_feature (32)..(213): Pfam Name: Proteasome A-type and B-type Pfam Description: Proteasome A-type and B-type
  misc_feature (32)..(217): Homolog of NCBI NO: 8394079 NR Description: proteasome (prosome, macropain) subunit, beta
  misc_feature (32)..(220): Homolog of NCBI NO: 30585195 NR Description: Homo sapiens proteasome (prosome, macropain)
  misc_feature (32)..(220): Homolog of NCBI NO: 4506195 NR Description: proteasome beta 2 subunit
  misc_feature (32)..(220): Homolog of NCBI NO: 19113828 NR Description: proteasome component; c7-I subfamily
  misc_feature (32)..(220): Homolog of NCBI NO: 29841035 NR Description: similar to NM_017284 proteasome (prosome,
  misc_feature (32)..(165): Homolog of NCBI NO: 14594929 NR Description: putative beta4 proteasome subunit [Nicotiana
  misc_feature (32)..(225): Homolog of NCBI NO: 15228805 NR Description: 20S proteasome beta subunit D (PBD1) [Arabidopsis
  misc_feature (32)..(224): Homolog of NCBI NO: 15233580 NR Description: 20S proteasome beta subunit D2 (PBD2)
  misc_feature (32)..(244): Homolog of NCBI NO: 17380213 NR Description: Proteasome subunit beta type 2 (20S proteasome
  misc_feature (32)..(244): Homolog of NCBI NO: 27552546 NR Description: 20S proteasome beta 4 subunit
KITTSLSRRLLARSSPKSHPLPDRTPAASPAMECVIGVVGSDFAVVAADTSAVQSILVHKTDEDKIMLLDSHKLMGASGEPGDRVQFTEFIQKNLHLYQFRNNMPLSTAATANFTRGELATALRKNPYSVNIILAGFDKDAGASMYYIDYIATLHKIDKGAFGYGSYFCLSLMDKLYRPDMSVEEAVDLVDKCIKEIRLRLVVAPQNFAIKIVDKDGARDYARREIGGDSPAAATATAAVATIA

SEQ ID NO: 56016 - protein, 213 aa, Glycine max
  peptide (1)..(213): Ceres Seq. ID no. 15224631
  misc_feature (1)..(182): Pfam Name: Proteasome A-type and B-type Pfam Description: Proteasome A-type and B-type
  misc_feature (1)..(186): Homolog of NCBI NO: 8394079 NR Description: proteasome (prosome, macropain) subunit, beta
  misc_feature (1)..(189): Homolog of NCBI NO: 30585195 NR Description: Homo sapiens proteasome (prosome, macropain)
  misc_feature (1)..(189): Homolog of NCBI NO: 4506195 NR Description: proteasome beta 2 subunit
  misc_feature (1)..(189): Homolog of NCBI NO: 19113828 NR Description: proteasome component; c7-I subfamily
  misc_feature (1)..(189): Homolog of NCBI NO: 29841035 NR Description: similar to NM_017284 proteasome (prosome,
  misc_feature (1)..(134): Homolog of NCBI NO: 14594929 NR Description: putative beta4 proteasome subunit [Nicotiana
  misc_feature (1)..(194): Homolog of NCBI NO: 15228805 NR Description: 20S proteasome beta subunit D (PBD1) [Arabidopsis
  misc_feature (1)..(193): Homolog of NCBI NO: 15233580 NR Description: 20S proteasome beta subunit D2 (PBD2)
  misc_feature (1)..(213): Homolog of NCBI NO: 17380213 NR Description: Proteasome subunit beta type 2 (20S proteasome
  misc_feature (1)..(213): Homolog of NCBI NO: 27552546 NR Description: 20S proteasome beta 4 subunit
MECVIGVVGSDFAVVAADTSAVQSILVHKTDEDKIMLLDSHKLMGASGEPGDRVQFTEFIQKNLHLYQFRNNMPLSTAATANFTRGELATALRKNPYSVNIILAGFDKDAGASMYYIDYIATLHKIDKGAFGYGSYFCLSLMDKLYRPDMSVEEAVDLVDKCIKEIRLRLVVAPQNFAIKIVDKDGARDYARREIGGDSPAAATATAAVATIA

SEQ ID NO: 56017 - protein, 178 aa, Glycine max
  peptide (1)..(178): Ceres Seq. ID no. 15224632
  misc_feature (1)..(147): Pfam Name: Proteasome A-type and B-type Pfam Description: Proteasome A-type and B-type
  misc_feature (1)..(151): Homolog of NCBI NO: 8394079 NR Description: proteasome (prosome, macropain) subunit, beta
  misc_feature (1)..(154): Homolog of NCBI NO: 30585195 NR Description: Homo sapiens proteasome (prosome, macropain)
  misc_feature (1)..(154): Homolog of NCBI NO: 4506195 NR Description: proteasome beta 2 subunit
  misc_feature (1)..(154): Homolog of NCBI NO: 19113828 NR Description: proteasome component; c7-I subfamily
  misc_feature (1)..(154): Homolog of NCBI NO: 29841035 NR Description: similar to NM_017284 proteasome (prosome,
  misc_feature (1)..(99): Homolog of NCBI NO: 14594929 NR Description: putative beta4 proteasome subunit [Nicotiana
  misc_feature (1)..(159): Homolog of NCBI NO: 15228805 NR Description: 20S proteasome beta subunit D (PBD1) [Arabidopsis
  misc_feature (1)..(158): Homolog of NCBI NO: 15233580 NR Description: 20S proteasome beta subunit D2 (PBD2)
  misc_feature (1)..(178): Homolog of NCBI NO: 17380213 NR Description: Proteasome subunit beta type 2 (20S proteasome
  misc_feature (1)..(178): Homolog of NCBI NO: 27552546 NR Description: 20S proteasome beta 4 subunit
MLLDSHKLMGASGEPGDRVQFTEFIQKNLHLYQFRNNMPLSTAATANFTRGELATALRKNPYSVNIILAGFDKDAGASMYYIDYIATLHKIDKGAFGYGSYFCLSLMDKLYRPDMSVEEAVDLVDKCIKEIRLRLVVAPQNFAIKIVDKDGARDYARREIGGDSPAAATATAAVATIA

SEQ ID NO: 56018 - DNA, 892 bp, Glycine max
  misc_feature (1)..(892): Ceres Seq. ID no. 13638917
ctctttcgctgcggctctcgcgactcatcctccccatcccaaaaccctcgaaaagcaaaggcggcggcgcgacatggcagaggtcgaagctgcgctcccggtggcggcgacagagaccccggaggtcgccgccgagggcgacgcgggtgcggccgaggcgaaggggccgcacaagctgcagcggcagtggaccttctggtacgacatccagaccaagcccaagcccggcgccgcctggggcacctcgctcaaaaagggctacaccttcgacaccgtcgaagagttctggtgcttgtatgatcagattttccgtccgagtaagctggtaggaagtgctgattttcatttattcaaggctggggtagaaccaaagtgggaagatccagagtgcgcaaatggaggcaaatggactgtgatatctagcaggaagaccaatcttgataccatgtggcttgaaacgtgtatggctctgattggagagcagttcgatgaaagccaggaaatttgtggtgttgttgctagtgtccgccagagacaggataagctttcattatggactaagactgccagtaacgaagctgttcaggtggacattggcaagaaatggaaggaggttattgactacaatgataagatggtctacagcttccacgatgactcaagaagtcagaaaccaagcagaggtggacgatacaccgtctaaggctgcacacatgatgaagaccgcagcttggaaaagtggccgtgtagtgttttaccgagattcgaaccgcctcagctaatgttgtttgaggcaattttccaatctactatgtcgttttgctctctgattgcttgtggtatgcagagatgtcgtatgcactcaattttcctcgcaatatcccttgatttt

SEQ ID NO: 56019 - protein, 233 aa, Glycine max
  peptide (1)..(233): Ceres Seq. ID no. 13638918
  misc_feature (30)..(233): Pfam Name: Eukaryotic initiation factor 4E Pfam Description: Eukaryotic initiation factor 4E
  misc_feature (38)..(233): Homolog of NCBI NO: 34905982 NR Description: eukaryotic translation initiation factor 4E
  misc_feature (38)..(233): Homolog of NCBI NO: 32698524 NR Description: eukaryotic translation initiation factor 4E
  misc_feature (43)..(224): Homolog of NCBI NO: 15238558 NR Description: eIF4Eiso protein (emb|CAA71579.1) [Arabidopsis
  misc_feature (13)..(224): Homolog of NCBI NO: 2209274 NR Description: eukaryotic initiation factor (iso)-4F p28 subunit
  misc_feature (47)..(233): Homolog of NCBI NO: 32698526 NR Description: eukaryotic translation initiation factor iso4E
  misc_feature (28)..(233): Homolog of NCBI NO: 6016335 NR Description: EUKARYOTIC TRANSLATION INITIATION FACTOR 4E (EIF4E) (MRNA CAP-BINDING PROTEIN) (EIF-(ISO)4F 25 KD SUBUNIT)
  misc_feature (25)..(233): Homolog of NCBI NO: 1352442 NR Description: EUKARYOTIC TRANSLATION INITIATION FACTOR 4E (EIF4E) (MRNA CAP-BINDING PROTEIN) (EIF-(ISO)4F 25 KD SUBUNIT)
  misc_feature (25)..(233): Homolog of NCBI NO: 37535224 NR Description: cap-binding protein p28 [Oryza sativa (japonica
  misc_feature (25)..(233): Homolog of NCBI NO: 170753 NR Description: initiation factor (iso)4F p28 subunit
  misc_feature (25)..(233): Homolog of NCBI NO: 547713 NR Description: EUKARYOTIC TRANSLATION INITIATION FACTOR 4E (EIF4E) (MRNA CAP-BINDING PROTEIN) (EIF-(ISO)4F 25 KD SUBUNIT)
SFAAALATHPPHPKTLEKQRRRRDMAEVEAALPVAATETPEVAAEGDAGAAEAKGPHKLQRQWTFWYDIQTKPKPGAAWGTSLKKGYTFDTVEEFWCLYDQIFRPSKLVGSADFHLFKAGVEPKWEDPECANGGKWTVISSRKTNLDTMWLETCMALIGEQFDESQEICGVVASVRQRQDKLSLWTKTASNEAVQVDIGKKWKEVIDYNDKMVYSFHDDSRSQKPSRGGRYTV

SEQ ID NO: 56020 - protein, 209 aa, Glycine max
  peptide (1)..(209): Ceres Seq. ID no. 13638919
  misc_feature (6)..(209): Pfam Name: Eukaryotic initiation factor 4E Pfam Description: Eukaryotic initiation factor 4E
  misc_feature (14)..(209): Homolog of NCBI NO: 34905982 NR Description: eukaryotic translation initiation factor 4E
  misc_feature (14)..(209): Homolog of NCBI NO: 32698524 NR Description: eukaryotic translation initiation factor 4E
  misc_feature (19)..(200): Homolog of NCBI NO: 15238558 NR Description: eIF4Eiso protein (emb|CAA71579.1) [Arabidopsis
  misc_feature (1)..(200): Homolog of NCBI NO: 2209274 NR Description: eukaryotic initiation factor (iso)-4F p28 subunit
  misc_feature (23)..(209): Homolog of NCBI NO: 32698526 NR Description: eukaryotic translation initiation factor iso4E
  misc_feature (4)..(209): Homolog of NCBI NO: 6016335 NR Description: EUKARYOTIC TRANSLATION INITIATION FACTOR 4E (EIF4E) (MRNA CAP-BINDING PROTEIN) (EIF-(ISO)4F 25 KD SUBUNIT)
  misc_feature (1)..(209): Homolog of NCBI NO: 1352442 NR Description: EUKARYOTIC TRANSLATION INITIATION FACTOR 4E (EIF4E) (MRNA CAP-BINDING PROTEIN) (EIF-(ISO)4F 25 KD SUBUNIT)
  misc_feature (1)..(209): Homolog of NCBI NO: 37535224 NR Description: cap-binding protein p28 [Oryza sativa (japonica
  misc_feature (1)..(209): Homolog of NCBI NO: 170753 NR Description: initiation factor (iso)4F p28 subunit
  misc_feature (1)..(209): Homolog of NCBI NO: 547713 NR Description: EUKARYOTIC TRANSLATION INITIATION FACTOR 4E (EIF4E) (MRNA CAP-BINDING PROTEIN) (EIF-(ISO)4F 25 KD SUBUNIT)
MAEVEAALPVAATETPEVAAEGDAGAAEAKGPHKLQRQWTFWYDIQTKPKPGAAWGTSLKKGYTFDTVEEFWCLYDQIFRPSKLVGSADFHLFKAGVEPKWEDPECANGGKWTVISSRKTNLDTMWLETCMALIGEQFDESQEICGVVASVRQRQDKLSLWTKTASNEAVQVDIGKKWKEVIDYNDKMVYSFHDDSRSQKPSRGGRYTV

SEQ ID NO: 56021 - DNA, 1105 bp, Glycine max
  misc_feature (1)..(1105): Ceres Seq. ID no. 14302008
atctccaaaaccatggatctctgcacttacttcaaatcccagccctcatggctcctcctcctcttcgccctcggctccctccaactcctcaaattcaccctctccctcctcaactccctctacatctacttcctccgccccgccaagaacctccgccgctacggctcctgggccatcatcaccggccccaccgacggcatcggcaaagccttcgcctttcagctcgcccgcaaggggctcaacctcgtcctcgtcgcccgcaaccccgacaagctcagagacgtctccgagtccatcagatccaagcactccaacgtcgagatcaagaccgtggtgatggacttctccggagatatcgatgatggagtgaggaggatcaaggagacgatcgaagggttggaggttgggattctgattaataacgcggggatgtcgtatccttacgcgaagtactttcacgaggtggatgaggagctgcttgggaacttgcttaagatcaatgttgaggggacgacgaaggttactcaggctgtgttggggaatatgctgaagaggaagcgaggggctattgttaatatgggttctggtgctgctgcgcttatcccttcgtatcctttctactctgtttacgccggtgctaaaacgtacgtggatcagttcacgaggtgtcttcatgttgagtacaagaagagtgggattgatgttcaatgccaggttcccttgtatgttgcgacaaagatgacatcaataagaagagcatcgttcttagtggcatctccagagggatacgcaaaggcagcactgcgttttgtagggtatgaagcacgctgcacaccttactggcctcacgccctcatgggttatgttgtctctgcattgcccgagagcgtctttgaatcctttaacattaagaggtgcctccagatcaggaagaaaggtatgcttaaagactcgaggaaaaaggaatgaaaacttttcgagggtgcatgattttcttctgcagcacttggtttcttgcaagtttctgtttagacttttgcaagacttgtacgctttagtttccgatgtttccaaggttgtttccttattttgaaaattaaaaacc

SEQ ID NO: 56022 - protein, 322 aa, Glycine max
  peptide (1)..(322): Ceres Seq. ID no. 14302009
  misc_feature (51)..(295): Homolog of NCBI NO: 24432037 NR Description: steroid dehydrogenase-like [Homo sapiens]
  misc_feature (10)..(321): Homolog of NCBI NO: 7489808 NR Description: probable beta-keto acyl reductase - maize
  misc_feature (113)..(322): Homolog of NCBI NO: 23505781 NR Description: At1g67730/F12A21_31 [Arabidopsis thaliana]
  misc_feature (113)..(322): Homolog of NCBI NO: 13605726 NR Description: At1g67730/F12A21_31 [Arabidopsis thaliana]
  misc_feature (10)..(321): Homolog of NCBI NO: 7489413 NR Description: probable b-keto acyl reductase (EC 1.1.-.-) -
  misc_feature (74)..(322): Homolog of NCBI NO: 2586125 NR Description: b-keto acyl reductase [Arabidopsis thaliana]
  misc_feature (39)..(322): Homolog of NCBI NO: 11072027 NR Description: F12A21.14 [Arabidopsis thaliana]
  misc_feature (5)..(322): Homolog of NCBI NO: 18408847 NR Description: short chain dehydrogenase/reductase family
  misc_feature (5)..(322): Homolog of NCBI NO: 28565601 NR Description: putative 3-ketoacyl-CoA reductase 2 [Brassica
  misc_feature (5)..(322): Homolog of NCBI NO: 28565597 NR Description: putative 3-ketoacyl-CoA reductase 1 [Brassica
ISKTMDLCTYFKSQPSWLLLLFALGSLQLLKFTLSLLNSLYIYFLRPAKNLRRYGSWAIITGPTDGIGKAFAFQLARKGLNLVLVARNPDKLRDVSESIRSKHSNVEIKTVVMDFSGDIDDGVRRIKETIEGLEVGILINNAGMSYPYAKYFHEVDEELLGNLLKINVEGTTKVTQAVLGNMLKRKRGAIVNMGSGAAALIPSYPFYSVYAGAKTYVDQFTRCLHVEYKKSGIDVQCQVPLYVATKMTSIRRASFLVASPEGYAKAALRFVGYEARCTPYWPHALMGYVVSALPESVFESFNIKRCLQIRKKGMLKDSRKKE

SEQ ID NO: 56023 - protein, 318 aa, Glycine max
  peptide (1)..(318): Ceres Seq. ID no. 14302010
  misc_feature (47)..(291): Homolog of NCBI NO: 24432037 NR Description: steroid dehydrogenase-like [Homo sapiens]
  misc_feature (6)..(317): Homolog of NCBI NO: 7489808 NR Description: probable beta-keto acyl reductase - maize
  misc_feature (109)..(318): Homolog of NCBI NO: 23505781 NR Description: At1g67730/F12A21_31 [Arabidopsis thaliana]
  misc_feature (109)..(318): Homolog of NCBI NO: 13605726 NR Description: At1g67730/F12A21_31 [Arabidopsis thaliana]
  misc_feature (6)..(317): Homolog of NCBI NO: 7489413 NR Description: probable b-keto acyl reductase (EC 1.1.-.-) -
  misc_feature (70)..(318): Homolog of NCBI NO: 2586125 NR Description: b-keto acyl reductase [Arabidopsis thaliana]
  misc_feature (35)..(318): Homolog of NCBI NO: 11072027 NR Description: F12A21.14 [Arabidopsis thaliana]
  misc_feature (1)..(318): Homolog of NCBI NO: 18408847 NR Description: short chain dehydrogenase/reductase family
  misc_feature (1)..(318): Homolog of NCBI NO: 28565601 NR Description: putative 3-ketoacyl-CoA reductase 2 [Brassica
  misc_feature (1)..(318): Homolog of NCBI NO: 28565597 NR Description: putative 3-ketoacyl-CoA reductase 1 [Brassica
MDLCTYFKSQPSWLLLLFALGSLQLLKFTLSLLNSLYIYFLRPAKNLRRYGSWAIITGPTDGIGKAFAFQLARKGLNLVLVARNPDKLRDVSESIRSKHSNVEIKTVVMDFSGDIDDGVRRIKETIEGLEVGILINNAGMSYPYAKYFHEVDEELLGNLLKINVEGTTKVTQAVLGNMLKRKRGAIVNMGSGAAALIPSYPFYSVYAGAKTYVDQFTRCLHVEYKKSGIDVQCQVPLYVATKMTSIRRASFLVASPEGYAKAALRFVGYEARCTPYWPHALMGYVVSALPESVFESFNIKRCLQIRKKGMLKDSRKKE

SEQ ID NO: 56024 - protein, 210 aa, Glycine max
  peptide (1)..(210): Ceres Seq. ID no. 14302011
  misc_feature (1)..(183): Homolog of NCBI NO: 24432037 NR Description: steroid dehydrogenase-like [Homo sapiens]
  misc_feature (1)..(209): Homolog of NCBI NO: 7489808 NR Description: probable beta-keto acyl reductase - maize
  misc_feature (1)..(210): Homolog of NCBI NO: 23505781 NR Description: At1g67730/F12A21_31 [Arabidopsis thaliana]
  misc_feature (1)..(210): Homolog of NCBI NO: 13605726 NR Description: At1g67730/F12A21_31 [Arabidopsis thaliana]
  misc_feature (1)..(209): Homolog of NCBI NO: 7489413 NR Description: probable b-keto acyl reductase (EC 1.1.-.-) -
  misc_feature (1)..(210): Homolog of NCBI NO: 2586125 NR Description: b-keto acyl reductase [Arabidopsis thaliana]
  misc_feature (1)..(210): Homolog of NCBI NO: 11072027 NR Description: F12A21.14 [Arabidopsis thaliana]
  misc_feature (1)..(210): Homolog of NCBI NO: 18408847 NR Description: short chain dehydrogenase/reductase family
  misc_feature (1)..(210): Homolog of NCBI NO: 28565601 NR Description: putative 3-ketoacyl-CoA reductase 2 [Brassica
  misc_feature (1)..(210): Homolog of NCBI NO: 28565597 NR Description: putative 3-ketoacyl-CoA reductase 1 [Brassica
MDFSGDIDDGVRRIKETIEGLEVGILINNAGMSYPYAKYFHEVDEELLGNLLKINVEGTTKVTQAVLGNMLKRKRGAIVNMGSGAAALIPSYPFYSVYAGAKTYVDQFTRCLHVEYKKSGIDVQCQVPLYVATKMTSIRRASFLVASPEGYAKAALRFVGYEARCTPYWPHALMGYVVSALPESVFESFNIKRCLQIRKKGMLKDSRKKE

SEQ ID NO: 56025 - DNA, 606 bp, Glycine max
  misc_feature (1)..(606): Ceres Seq. ID no. 12610977
agtgaaggagtcagcagtccagtccccccctgctgccggaagatatggcgatcgcgctcagattcgccgccaccccgccccgcctcgccgcgccgatacctccgacgagtgcccctcgcgcacatggaggagttgtgcgcgtcggcgcccagggcgggactcgctgtggcaggagactggcaatggcggccgcggattccgctcgctgtcgggccaagagagagggcgacggcgacggcgtcctcgcgggagtcgccgtccacggaggaaccggagcggaaggggaagatcagctgagcgtggtaatgaagttcggtggttcgtccgtgtcgtcggcggcgaagatgaaggaggtggcggggctcatccaagctttccccgaggagcggcccgtcgtcgtcctctccgccatggggaagaccaccaatctactcctcctcgtacgactgctttctggtcattttttcagacttacagccaaaaaaagttgtaaggctcactgtttcagtacatcaagaatcttcagtcacggaagtgttagttaaagtgaagtttgcatcttttgtcataatcaagctgaaattcgtcaagaatctgtcaagattc

SEQ ID NO: 56026 - protein, 166 aa, Glycine max
  peptide (1)..(166): Ceres Seq. ID no. 12610978
  misc_feature (1)..(132): Homolog of NCBI NO: 27573345 NR Description: putative aspartate kinase [Oryza sativa (japonica
  misc_feature (1)..(132): Homolog of NCBI NO: 34897430 NR Description: putative aspartate kinase
  misc_feature (1)..(132): Homolog of NCBI NO: 20161830 NR Description: putative aspartate kinase [Oryza sativa (japonica
  misc_feature (1)..(132): Homolog of NCBI NO: 34907074 NR Description: precursor monofunctional aspartokinase-like
MAIALRFAATPPRLAAPIPPTSAPRAHGGVVRVGAQGGTRCGRRLAMAAADSARCRAKREGDGDGVLAGVAVHGGTGAEGEDQLSVVMKFGGSSVSSAAKMKEVAGLIQAFPEERPVVVLSAMGKTTNLLLLVRLLSGHFFRLTAKKSCKAHCFSTSRIFSHGSVS

SEQ ID NO: 56027 - protein, 163 aa, Glycine max
  peptide (1)..(163): Ceres Seq. ID no. 12610979
VKESAVQSPPAAGRYGDRAQIRRHPAPPRRADTSDECPSRTWRSCARRRPGRDSLWQETGNGGRGFRSLSGQERGRRRRRPRGSRRPRRNRSGRGRSAERGNEVRWFVRVVGGEDEGGGGAHPSFPRGAARRRPLRHGEDHQSTPPRTTAFWSFFQTYSQKKL

SEQ ID NO: 56028 - protein, 120 aa, Glycine max
  peptide (1)..(120): Ceres Seq. ID no. 12610980
  misc_feature (1)..(86): Homolog of NCBI NO: 27573345 NR Description: putative aspartate kinase [Oryza sativa (japonica
  misc_feature (1)..(86): Homolog of NCBI NO: 34897430 NR Description: putative aspartate kinase
  misc_feature (1)..(86): Homolog of NCBI NO: 20161830 NR Description: putative aspartate kinase [Oryza sativa (japonica
  misc_feature (1)..(86): Homolog of NCBI NO: 34907074 NR Description: precursor monofunctional aspartokinase-like
MAAADSARCRAKREGDGDGVLAGVAVHGGTGAEGEDQLSVVMKFGGSSVSSAAKMKEVAGLIQAFPEERPVVVLSAMGKTTNLLLLVRLLSGHFFRLTAKKSCKAHCFSTSRIFSHGSVS

SEQ ID NO: 56029 - DNA, 980 bp, Glycine max
  misc_feature (1)..(980): Ceres Seq. ID no. 15173035
tacactccctctcttgttccatcacttctccgagagagtaaaacagttaactttatagtttttggatatatcagccaaaaggggtgtgaaagaacacaatgcaacaaagttcagcttcagggtcattgatgaagcaactgagtgtgaaggaggcttggaaatcaacatcaagtaggtggagtgggaaggacaagtatagcagtgttgggggagggagcattgaggggtgtgaggcaagtttgagccaaatggaaggtttttctatgtatgggaatgaggacaataatggggtggtgatggggaagaagagagtgatggtggtggtggatcacacttctcattccaagcatgcaatgatgtgggcactcactcatgtagctaataagggtgatttgctcactttgcttcatgttgtacctactcataggggttctgaatcttcttgctctacctatcttgtcaatcatcttggttcactttgcaaagattgcaagccagaggtggaagtggaagcacttgttatccaaggaccaaaactggccacagtgatgagccaagtgaagaagctggaggtttctctcttggtattgggccaaaagaagccctctcctctacttagctgcctgtgtggaagcaacagtatcagcagctcagaggagtttgctgagcactgcatcaacaatgcagaatgcttgacagtaggagtaaggaagagaagccaaggtaacaatggctacctcatcagcacaaggtggcagaagaacttctggctactggcttaaaaatttcgagttcttaactttagttaccagctatagttaggatctcacaaacaaaaaaaggggtcaaatgggaaaattaacacaataataatatgtacctcctgttctagttctaactacattgtcattgtactcatgatgtgactcggtggcatcaatttagttctatactatgattaatgaaacatgattgtgacc

SEQ ID NO: 56030 - protein, 227 aa, Glycine max
  peptide (1)..(227): Ceres Seq. ID no. 15173036
  misc_feature (70)..(204): Pfam Name: Universal stress protein family Pfam Description: Universal stress protein family
  misc_feature (121)..(227): Homolog of NCBI NO: 21592322 NR Description: unknown [Arabidopsis thaliana]
  misc_feature (121)..(227): Homolog of NCBI NO: 18409190 NR Description: expressed protein [Arabidopsis thaliana]
  misc_feature (68)..(105): Homolog of NCBI NO: 37535148 NR Description: unknown protein [Oryza sativa (japonica
  misc_feature (124)..(227): Homolog of NCBI NO: 37535148 NR Description: unknown protein [Oryza sativa (japonica
  misc_feature (71)..(227): Homolog of NCBI NO: 15228516 NR Description: hypothetical protein [Arabidopsis thaliana]
  misc_feature (32)..(227): Homolog of NCBI NO: 15237955 NR Description: hypothetical protein [Arabidopsis thaliana]
  misc_feature (73)..(227): Homolog of NCBI NO: 15227695 NR Description: expressed protein [Arabidopsis thaliana]
  misc_feature (24)..(227): Homolog of NCBI NO: 34907308 NR Description: hypothetical protein~similar to Arabidopsis
  misc_feature (9)..(227): Homolog of NCBI NO: 15219439 NR Description: expressed protein [Arabidopsis thaliana]
MQQSSASGSLMKQLSVKEAWKSTSSRWSGKDKYSSVGGGSIEGCEASLSQMEGFSMYGNEDNNGVVMGKKRVMVVVDHTSHSKHAMMWALTHVANKGDLLTLLHVVPTHRGSESSCSTYLVNHLGSLCKDCKPEVEVEALVIQGPKLATVMSQVKKLEVSLLVLGQKKPSPLLSCLCGSNSISSSEEFAEHCINNAECLTVGVRKRSQGNNGYLISTRWQKNFWLLA

SEQ ID NO: 56031 - protein, 217 aa, Glycine max
  peptide (1)..(217): Ceres Seq. ID no. 15173037
  misc_feature (60)..(194): Pfam Name: Universal stress protein family Pfam Description: Universal stress protein family
  misc_feature (111)..(217): Homolog of NCBI NO: 21592322 NR Description: unknown [Arabidopsis thaliana]
  misc_feature (111)..(217): Homolog of NCBI NO: 18409190 NR Description: expressed protein [Arabidopsis thaliana]
  misc_feature (58)..(95): Homolog of NCBI NO: 37535148 NR Description: unknown protein [Oryza sativa (japonica
  misc_feature (114)..(217): Homolog of NCBI NO: 37535148 NR Description: unknown protein [Oryza sativa (japonica
  misc_feature (61)..(217): Homolog of NCBI NO: 15228516 NR Description: hypothetical protein [Arabidopsis thaliana]
  misc_feature (22)..(217): Homolog of NCBI NO: 15237955 NR Description: hypothetical protein [Arabidopsis thaliana]
  misc_feature (63)..(217): Homolog of NCBI NO: 15227695 NR Description: expressed protein [Arabidopsis thaliana]
  misc_feature (14)..(217): Homolog of NCBI NO: 34907308 NR Description: hypothetical protein~similar to Arabidopsis
  misc_feature (1)..(217): Homolog of NCBI NO: 15219439 NR Description: expressed protein [Arabidopsis thaliana]
MKQLSVKEAWKSTSSRWSGKDKYSSVGGGSIEGCEASLSQMEGFSMYGNEDNNGVVMGKKRVMVVVDHTSHSKHAMMWALTHVANKGDLLTLLHVVPTHRGSESSCSTYLVNHLGSLCKDCKPEVEVEALVIQGPKLATVMSQVKKLEVSLLVLGQKKPSPLLSCLCGSNSISSSEEFAEHCINNAECLTVGVRKRSQGNNGYLISTRWQKNFWLLA

SEQ ID NO: 56032 - protein, 177 aa, Glycine max
  peptide (1)..(177): Ceres Seq. ID no. 15173038
  misc_feature (20)..(154): Pfam Name: Universal stress protein family Pfam Description: Universal stress protein family
  misc_feature (71)..(177): Homolog of NCBI NO: 21592322 NR Description: unknown [Arabidopsis thaliana]
  misc_feature (71)..(177): Homolog of NCBI NO: 18409190 NR Description: expressed protein [Arabidopsis thaliana]
  misc_feature (18)..(55): Homolog of NCBI NO: 37535148 NR Description: unknown protein [Oryza sativa (japonica
  misc_feature (74)..(177): Homolog of NCBI NO: 37535148 NR Description: unknown protein [Oryza sativa (japonica
  misc_feature (21)..(177): Homolog of NCBI NO: 15228516 NR Description: hypothetical protein [Arabidopsis thaliana]
  misc_feature (1)..(177): Homolog of NCBI NO: 15237955 NR Description: hypothetical protein [Arabidopsis thaliana]
  misc_feature (23)..(177): Homolog of NCBI NO: 15227695 NR Description: expressed protein [Arabidopsis thaliana]
  misc_feature (1)..(177): Homolog of NCBI NO: 34907308 NR Description: hypothetical protein~similar to Arabidopsis
  misc_feature (1)..(177): Homolog of NCBI NO: 15219439 NR Description: expressed protein [Arabidopsis thaliana]
MEGFSMYGNEDNNGVVMGKKRVMVVVDHTSHSKHAMMWALTHVANKGDLLTLLHVVPTHRGSESSCSTYLVNHLGSLCKDCKPEVEVEALVIQGPKLATVMSQVKKLEVSLLVLGQKKPSPLLSCLCGSNSISSSEEFAEHCINNAECLTVGVRKRSQGNNGYLISTRWQKNFWLLA

SEQ ID NO: 56033 - DNA, 1225 bp, Glycine max
  misc_feature (1)..(1225): Ceres Seq. ID no. 15177862
aaaccttatcccttcccccaaagcacagcgagagagaaagtaaagtgagccatgtctgcctctgcttcctccctttccctttcttccttcaaccctaaatccctccctctctgcatttcccgctccgcctccgttctcccaccttccctctccttcaaactctactccatcttcgcttcctccgccgtcaaatgctcctcctcccccgcccaacacccgtcgcgtttcgccagaaacgtggccgtatcatcggatttcgaggtggaggaagacgacgtgttcaccgacgatgactctcccccgccgcagcaagagcgcagctcctccttctccgcggacctcaaactcttcgtcggtaacctctccttcgatgtggatagcgctcagctcgctcagttgtttgagagcgccgggactgttgagatggttgaggttatctatgataaagtgactggcagaagcagaggttttggatttgtgacaatgtccactgcagctgaagtcgaagcagctgctcagcagtttaatggctatgaacttgagggcagagctttgagggttaacgctggccctcctccacctaagagggaggaatcattctccaggggaccaagaagtggtggttacggttcagaacgttctggttacggctctgaacgttccggctacgggtctcaacgttcaggacgttctggttacgggtctgagcgttccagctatggttctgggtcaggttcgggctcaggctcaggttcaggttcatcagaccgtgtgtatgtgggaaacctttcgtggggtgtggatgacacggctcttgagagcttgttcagcgagcaaggaaaggttgttgaggccagggtcatttacgacagggacactggtcgatccaagggttttgggtttgtgacactcggctctcctcaagaggtcacacgagccatcaactctttgaatggcgcagatttggatggaagacagattagagtctcggaggctgaggctagaccaccaaggcgccagttttgagcgaccatgtcacttcactgctctcaaagaaatgcagattcttgaggtgtatcatgtatgtcatcttggctgacgaacaagctatctatgtttcgagttttgggctttgtttctttattttaagtcgttttgggctttgcttttatttttgcagactacttacggttttggacttttacttctttcttcattatgctcg

SEQ ID NO: 56034 - protein, 324 aa, Glycine max
  peptide (1)..(324): Ceres Seq. ID no. 15177863
  misc_feature (99)..(170): Pfam Name: RNA recognition motif. (a.k.a. RRM, RBD, or RNP domain) Pfam Description: RNA recognition motif. (a.k.a. RRM, RBD, or RNP
  misc_feature (1)..(201): Homolog of NCBI NO: 1350820 NR Description: 30 kDa ribonucleoprotein, chloroplast precursor
  misc_feature (214)..(324): Homolog of NCBI NO: 12230584 NR Description: 29 kDa ribonucleoprotein A, chloroplast precursor
  misc_feature (1)..(191): Homolog of NCBI NO: 12230584 NR Description: 29 kDa ribonucleoprotein A, chloroplast precursor
  misc_feature (207)..(324): Homolog of NCBI NO: 21617920 NR Description: putative RNA-binding protein [Arabidopsis
  misc_feature (1)..(208): Homolog of NCBI NO: 21617920 NR Description: putative RNA-binding protein [Arabidopsis
  misc_feature (207)..(324): Homolog of NCBI NO: 15228102 NR Description: 29 kDa ribonucleoprotein, chloroplast
  misc_feature (1)..(208): Homolog of NCBI NO: 15228102 NR Description: 29 kDa ribonucleoprotein, chloroplast
  misc_feature (11)..(324): Homolog of NCBI NO: 681904 NR Description: cp29 [Arabidopsis thaliana]
  misc_feature (1)..(324): Homolog of NCBI NO: 15231817 NR Description: 29 kDa ribonucleoprotein, chloroplast
  misc_feature (1)..(324): Homolog of NCBI NO: 30693824 NR Description: 29 kDa ribonucleoprotein, chloroplast
MSASASSLSLSSFNPKSLPLCISRSASVLPPSLSFKLYSIFASSAVKCSSSPAQHPSRFARNVAVSSDFEVEEDDVFTDDDSPPPQQERSSSFSADLKLFVGNLSFDVDSAQLAQLFESAGTVEMVEVIYDKVTGRSRGFGFVTMSTAAEVEAAAQQFNGYELEGRALRVNAGPPPPKREESFSRGPRSGGYGSERSGYGSERSGYGSQRSGRSGYGSERSSYGSGSGSGSGSGSGSSDRVYVGNLSWGVDDTALESLFSEQGKVVEARVIYDRDTGRSKGFGFVTLGSPQEVTRAINSLNGADLDGRQIRVSEAEARPPRRQF

SEQ ID NO: 56035 - protein, 200 aa, Glycine max
  peptide (1)..(200): Ceres Seq. ID no. 15177864
  misc_feature (117)..(188): Pfam Name: RNA recognition motif. (a.k.a. RRM, RBD, or RNP domain) Pfam Description: RNA recognition motif. (a.k.a. RRM, RBD, or RNP
  misc_feature (1)..(77): Homolog of NCBI NO: 1350820 NR Description: 30 kDa ribonucleoprotein, chloroplast precursor
  misc_feature (90)..(200): Homolog of NCBI NO: 12230584 NR Description: 29 kDa ribonucleoprotein A, chloroplast precursor
  misc_feature (1)..(67): Homolog of NCBI NO: 12230584 NR Description: 29 kDa ribonucleoprotein A, chloroplast precursor
  misc_feature (83)..(200): Homolog of NCBI NO: 21617920 NR Description: putative RNA-binding protein [Arabidopsis
  misc_feature (1)..(84): Homolog of NCBI NO: 21617920 NR Description: putative RNA-binding protein [Arabidopsis
  misc_feature (83)..(200): Homolog of NCBI NO: 15228102 NR Description: 29 kDa ribonucleoprotein, chloroplast
  misc_feature (1)..(84): Homolog of NCBI NO: 15228102 NR Description: 29 kDa ribonucleoprotein, chloroplast
  misc_feature (1)..(200): Homolog of NCBI NO: 681904 NR Description: cp29 [Arabidopsis thaliana]
  misc_feature (1)..(200): Homolog of NCBI NO: 15231817 NR Description: 29 kDa ribonucleoprotein, chloroplast
  misc_feature (1)..(200): Homolog of NCBI NO: 30693824 NR Description: 29 kDa ribonucleoprotein, chloroplast
MVEVIYDKVTGRSRGFGFVTMSTAAEVEAAAQQFNGYELEGRALRVNAGPPPPKREESFSRGPRSGGYGSERSGYGSERSGYGSQRSGRSGYGSERSSYGSGSGSGSGSGSGSSDRVYVGNLSWGVDDTALESLFSEQGKVVEARVIYDRDTGRSKGFGFVTLGSPQEVTRAINSLNGADLDGRQIRVSEAEARPPRRQF

SEQ ID NO: 56036 - protein, 180 aa, Glycine max
  peptide (1)..(180): Ceres Seq. ID no. 15177865
  misc_feature (97)..(168): Pfam Name: RNA recognition motif. (a.k.a. RRM, RBD, or RNP domain) Pfam Description: RNA recognition motif. (a.k.a. RRM, RBD, or RNP
  misc_feature (1)..(57): Homolog of NCBI NO: 1350820 NR Description: 30 kDa ribonucleoprotein, chloroplast precursor
  misc_feature (70)..(180): Homolog of NCBI NO: 12230584 NR Description: 29 kDa ribonucleoprotein A, chloroplast precursor
  misc_feature (1)..(47): Homolog of NCBI NO: 12230584 NR Description: 29 kDa ribonucleoprotein A, chloroplast precursor
  misc_feature (63)..(180): Homolog of NCBI NO: 21617920 NR Description: putative RNA-binding protein [Arabidopsis
  misc_feature (1)..(64): Homolog of NCBI NO: 21617920 NR Description: putative RNA-binding protein [Arabidopsis
  misc_feature (63)..(180): Homolog of NCBI NO: 15228102 NR Description: 29 kDa ribonucleoprotein, chloroplast
  misc_feature (1)..(64): Homolog of NCBI NO: 15228102 NR Description: 29 kDa ribonucleoprotein, chloroplast
  misc_feature (1)..(180): Homolog of NCBI NO: 681904 NR Description: cp29 [Arabidopsis thaliana]
  misc_feature (1)..(180): Homolog of NCBI NO: 15231817 NR Description: 29 kDa ribonucleoprotein, chloroplast
  misc_feature (1)..(180): Homolog of NCBI NO: 30693824 NR Description: 29 kDa ribonucleoprotein, chloroplast
MSTAAEVEAAAQQFNGYELEGRALRVNAGPPPPKREESFSRGPRSGGYGSERSGYGSERSGYGSQRSGRSGYGSERSSYGSGSGSGSGSGSGSSDRVYVGNLSWGVDDTALESLFSEQGKVVEARVIYDRDTGRSKGFGFVTLGSPQEVTRAINSLNGADLDGRQIRVSEAEARPPRRQF

SEQ ID NO: 56037 - DNA, 878 bp, Glycine max
  misc_feature (1)..(878): Ceres Seq. ID no. 15172729
aacatcaaagcagcaagcagcacggaggtccaacaatggcggagaagggagtgaaggtgtttggcatgtgggcgagcccgatggccatccgggtggagtgggcgctccggctgaagggcgtcgggtacgagtacgtcgacgaggacctcgccagcaagagcgacgcgctgctccgccacaacccggtgaccaagaaggtgccggtgctggtccacgacggcaagccgatcgccgagtccaccatcatcgtcgagtacatcgacgaggcgtggaaggacggctaccccatcatgccggccgacccctacgaccgggctcaggcgaggttctgggccaggttcgccgacgacaagtgcaacgccgccatcttcccggtcttcacggcgaccggcgaggcgcagcgcgaggtggtgcgcgaggcccagcggtgcctgaagacgctggagaaggccctggaggggaagaagttcttcgggggcgacgccgtcggctacctcgacgtcgtggttgggtggtacgcgtattggctgcccatcatcgaggaggtctccggcgccgacgtggtcaccgacgaggagctgcctctgatgaaggcctggttcggccggttcctggccgtcgacgtggtgaaggagaccctgcccccgagggacaagctcctggcgctcaacaaggctcgccgtgagcagctctcggcgtagagcagcacttgttccgagccttccagctagtacttaagcttctgccatggattatccatgatggataaataagcggcgagcatttgcacattgtgcaacaaatgtttggagcttctttcagccgcctgcttcacactcccagtttccgttatataaacttcacccatgatgttatat

SEQ ID NO: 56038 - protein, 232 aa, Glycine max
  peptide (1)..(232): Ceres Seq. ID no. 15172730
  misc_feature (97)..(207): Pfam Name: Glutathione S-transferase, C-terminal domain Pfam Description: Glutathione S-transferase, C-terminal domain
  misc_feature (12)..(232): Homolog of NCBI NO: 10567808 NR Description: putative glutathione S-transferase T3
  misc_feature (21)..(230): Homolog of NCBI NO: 11385497 NR Description: glutathione S-transferase GST 23 [Zea mays]
  misc_feature (13)..(232): Homolog of NCBI NO: 15430731 NR Description: putative glutathione S-transferase OsGSTU17
  misc_feature (12)..(230): Homolog of NCBI NO: 11385523 NR Description: glutathione S-transferase GST 36 [Zea mays]
HQSSKQHGGPTMAEKGVKVFGMWASPMAIRVEWALRLKGVGYEYVDEDLASKSDALLRHNPVTKKVPVLVHDGKPIAESTIIVEYIDEAWKDGYPIMPADPYDRAQARFWARFADDKCNAAIFPVFTATGEAQREVVREAQRCLKTLEKALEGKKFFGGDAVGYLDVVVGWYAYWLPIIEEVSGADVVTDEELPLMKAWFGRFLAVDVVKETLPPRDKLLALNKARREQLSA

SEQ ID NO: 56039 - protein, 227 aa, Glycine max
  peptide (1)..(227): Ceres Seq. ID no. 15172731
TSKQQAARRSNNGGEGSEGVWHVGEPDGHPGGVGAPAEGRRVRVRRRGPRQQERRAAPPQPGDQEGAGAGPRRQADRRVHHHRRVHRRGVEGRLPHHAGRPLRPGSGEVLGQVRRRQVQRRHLPGLHGDRRGAARGGARGPAVPEDAGEGPGGEEVLRGRRRRLPRRRGWVVRVLAAHHRGGLRRRRGHRRGAASDEGLVRPVPGRRRGEGDPAPEGQAPGAQQGSP

SEQ ID NO: 56040 - protein, 221 aa, Glycine max
  peptide (1)..(221): Ceres Seq. ID no. 15172732
  misc_feature (86)..(196): Pfam Name: Glutathione S-transferase, C-terminal domain Pfam Description: Glutathione S-transferase, C-terminal domain
  misc_feature (1)..(221): Homolog of NCBI NO: 10567808 NR Description: putative glutathione S-transferase T3
  misc_feature (10)..(219): Homolog of NCBI NO: 11385497 NR Description: glutathione S-transferase GST 23 [Zea mays]
  misc_feature (2)..(221): Homolog of NCBI NO: 15430731 NR Description: putative glutathione S-transferase OsGSTU17
  misc_feature (1)..(219): Homolog of NCBI NO: 11385523 NR Description: glutathione S-transferase GST 36 [Zea mays]
MAEKGVKVFGMWASPMAIRVEWALRLKGVGYEYVDEDLASKSDALLRHNPVTKKVPVLVHDGKPIAESTIIVEYIDEAWKDGYPIMPADPYDRAQARFWARFADDKCNAAIFPVFTATGEAQREVVREAQRCLKTLEKALEGKKFFGGDAVGYLDVVVGWYAYWLPIIEEVSGADVVTDEELPLMKAWFGRFLAVDVVKETLPPRDKLLALNKARREQLSA

SEQ ID NO: 56041 - DNA, 721 bp, Glycine max
  misc_feature (1)..(721): Ceres Seq. ID no. 13595008
cgcacgaggatcaacagcagcagagagaagcaaaccggccggccggcgagatggcgcaggagagcctgaggctggtgtgcccgccggtgtcggcgcacgaggggcggctgccgcggcagtacacgctggaggggcagggcgcgaagaaggacatctcgccgccgctggagtggtacggggtgcccgacggcacgcggtcgctggcggtggtggtgcaggacgtcgacgcggacgagcgggtgccgtggacgcactgggtggtcgtcaacatctcgcccgaggagaaggggctgcccgagggcttctccggcgccgggggcaacgccaacgccggcggcggcgacggcggcgtccaggagggggtcaacgactggaagcagcccgggtggcgcggccccgtcccggactcccacggccaccgcatccagttccggctctacgcgctcgacgacgtgctcagcctcggcaacaaggtgactgtggacaaggtcatggaggccatcgaggggcacgtgctgggggaggccgagatcacggccgtgttctaaggagttcttgtggattttgacactcggctctgtgtgtgtgtgtgacctgcttgttacttcttgcgaattgtgtgtggtctgttctgtagcgtgcctgtatacgcatggccacgagcagcctttgtaattttgatccaataaatgaagtgacttcttatcagccgggtacggtt

SEQ ID NO: 56042 - protein, 188 aa, Glycine max
  peptide (1)..(188): Ceres Seq. ID no. 13595009
  misc_feature (18)..(174): Homolog of NCBI NO: 9453857 NR Description: EBNA-1 [Cynomolgus Epstein-Barr Virus TsB-B6]
  misc_feature (6)..(150): Homolog of NCBI NO: 29788817 NR Description: hypothetical protein [Oryza sativa (japonica
  misc_feature (2)..(156): Homolog of NCBI NO: 538695 NR Description: hypothetical protein (sdsB region) - Pseudomonas
  misc_feature (1)..(143): Homolog of NCBI NO: 9625624 NR Description: nuclear antigen EBNA1 [Human herpesvirus 4]
  misc_feature (1)..(135): Homolog of NCBI NO: 775215 NR Description: EBNA1 [Herpesvirus papio]
ARGSTAAERSKPAGRRDGAGEPEAGVPAGVGARGAAAAAVHAGGAGREEGHLAAAGVVRGARRHAVAGGGGAGRRRGRAGAVDALGGRQHLARGEGAARGLLRRRGQRQRRRRRRRRPGGGQRLEAARVARPRPGLPRPPHPVPALRARRRAQPRQQGDCGQGHGGHRGARAGGGRDHGRVLRSSCGF

SEQ ID NO: 56043 - protein, 181 aa, Glycine max
  peptide (1)..(181): Ceres Seq. ID no. 13595010
  misc_feature (30)..(181): Homolog of NCBI NO: 11499288 NR Description: conserved hypothetical protein [Archaeoglobus
  misc_feature (5)..(177): Homolog of NCBI NO: 20090292 NR Description: hypothetical protein (multi-domain)
  misc_feature (49)..(181): Homolog of NCBI NO: 30248206 NR Description: conserved hypothetical protein [Nitrosomonas
  misc_feature (21)..(181): Homolog of NCBI NO: 17548245 NR Description: CONSERVED HYPOTHETICAL PROTEIN [Ralstonia
  misc_feature (15)..(181): Homolog of NCBI NO: 23054005 NR Description: hypothetical protein [Geobacter metallireducens]
  misc_feature (34)..(181): Homolog of NCBI NO: 21673435 NR Description: conserved hypothetical protein [Chlorobium
  misc_feature (34)..(181): Homolog of NCBI NO: 15678301 NR Description: conserved protein [Methanothermobacter
  misc_feature (17)..(180): Homolog of NCBI NO: 15240946 NR Description: expressed protein [Arabidopsis thaliana]
  misc_feature (17)..(181): Homolog of NCBI NO: 10799810 NR Description: cold-regulated protein [Hordeum vulgare subsp.
  misc_feature (17)..(181): Homolog of NCBI NO: 26017213 NR Description: cold regulated protein [Triticum aestivum]
HEDQQQQREANRPAGEMAQESLRLVCPPVSAHEGRLPRQYTLEGQGAKKDISPPLEWYGVPDGTRSLAVVVQDVDADERVPWTHWVVVNISPEEKGLPEGFSGAGGNANAGGGDGGVQEGVNDWKQPGWRGPVPDSHGHRIQFRLYALDDVLSLGNKVTVDKVMEAIEGHVLGEAEITAVF

SEQ ID NO: 56044 - protein, 165 aa, Glycine max
  peptide (1)..(165): Ceres Seq. ID no. 13595011
  misc_feature (14)..(165): Homolog of NCBI NO: 11499288 NR Description: conserved hypothetical protein [Archaeoglobus
  misc_feature (1)..(161): Homolog of NCBI NO: 20090292 NR Description: hypothetical protein (multi-domain)
  misc_feature (33)..(165): Homolog of NCBI NO: 30248206 NR Description: conserved hypothetical protein [Nitrosomonas
  misc_feature (5)..(165): Homolog of NCBI NO: 17548245 NR Description: CONSERVED HYPOTHETICAL PROTEIN [Ralstonia
  misc_feature (1)..(165): Homolog of NCBI NO: 23054005 NR Description: hypothetical protein [Geobacter metallireducens]
  misc_feature (18)..(165): Homolog of NCBI NO: 21673435 NR Description: conserved hypothetical protein [Chlorobium
  misc_feature (18)..(165): Homolog of NCBI NO: 15678301 NR Description: conserved protein [Methanothermobacter
  misc_feature (1)..(164): Homolog of NCBI NO: 15240946 NR Description: expressed protein [Arabidopsis thaliana]
  misc_feature (1)..(165): Homolog of NCBI NO: 10799810 NR Description: cold-regulated protein [Hordeum vulgare subsp.
  misc_feature (1)..(165): Homolog of NCBI NO: 26017213 NR Description: cold regulated protein [Triticum aestivum]
MAQESLRLVCPPVSAHEGRLPRQYTLEGQGAKKDISPPLEWYGVPDGTRSLAVVVQDVDADERVPWTHWVVVNISPEEKGLPEGFSGAGGNANAGGGDGGVQEGVNDWKQPGWRGPVPDSHGHRIQFRLYALDDVLSLGNKVTVDKVMEAIEGHVLGEAEITAVF

SEQ ID NO: 56045 - DNA, 410 bp, Glycine max
  misc_feature (1)..(410): Ceres Seq. ID no. 13595367
acagccacatcctaggtcaccatggcttcttctccctctccgtcggctgctcgtgccctgctcgtcctcgccgcagcagctctggtgctgagctctgtgtcagccgcggctggctcgccgccgcttgccaagggcctgtcgttcgacttctacagcgccaagtgcccgcaggcggaggccatcgtcttctccttcctcaaggacgccgtccgcaaggacgtcggcctcgccgcggcgctcctccgcatccacttccacgactgcttcgtgcagggctgcgacggctccgtgctcctcgacamgaccamcggcgtcgacagcgagaaggtgtctcctccgaacgtcacsctccgtccgtccgcgttcaaggccatcaacgccatccgcgcgctcctccagagkgcgtgcgg

SEQ ID NO: 56046 - protein, 136 aa, Glycine max
  peptide (1)..(136): Ceres Seq. ID no. 13595368
  misc_feature (100)..(100): Xaa is any aa, unknown or other
  misc_feature (102)..(102): Xaa is any aa, unknown or other
  misc_feature (116)..(116): Xaa is any aa, unknown or other
  misc_feature (134)..(134): Xaa is any aa, unknown or other
SHILGHHGFFSLSVGCSCPARPRRSSSGAELCVSRGWLAAACQGPVVRLLQRQVPAGGGHRLLLPQGRRPQGRRPRRGAPPHPLPRLLRAGLRRLRAPRXDXRRRQREGVSSERHXPSVRVQGHQRHPRAPPEXVR

SEQ ID NO: 56047 - protein, 129 aa, Glycine max
  peptide (1)..(129): Ceres Seq. ID no. 13595369
  misc_feature (55)..(128): Pfam Name: Peroxidase Pfam Description: Peroxidase
  misc_feature (1)..(128): Homolog of NCBI NO: 478409 NR Description: peroxidase (EC 1.11.1.7), cationic - adzuki bean
  misc_feature (1)..(128): Homolog of NCBI NO: 34905830 NR Description: putative peroxidase [Oryza sativa (japonica
  misc_feature (3)..(128): Homolog of NCBI NO: 421984 NR Description: peroxidase (EC 1.11.1.7) BP-2B - barley
  misc_feature (3)..(128): Homolog of NCBI NO: 100603 NR Description: peroxidase (EC 1.11.1.7) BP-2A precursor - barley
  misc_feature (33)..(128): Homolog of NCBI NO: 2624498 NR Description: Crystal Structure Of Barley Grain Peroxidase 1
  misc_feature (8)..(128): Homolog of NCBI NO: 34905838 NR Description: putative peroxidase [Oryza sativa (japonica
  misc_feature (10)..(128): Homolog of NCBI NO: 22001285 NR Description: peroxidase 1 [Triticum aestivum]
  misc_feature (12)..(128): Homolog of NCBI NO: 82410 NR Description: peroxidase (EC 1.11.1.7) BP1 precursor - barley
  misc_feature (1)..(128): Homolog of NCBI NO: 34905826 NR Description: putative peroxidase [Oryza sativa (japonica
  misc_feature (1)..(128): Homolog of NCBI NO: 34905834 NR Description: putative peroxidase [Oryza sativa (japonica
  misc_feature (94)..(94): Xaa is any aa, unknown or other
  misc_feature (96)..(96): Xaa is any aa, unknown or other
  misc_feature (109)..(109): Xaa is any aa, unknown or other
  misc_feature (127)..(127): Xaa is any aa, unknown or other
MASSPSPSAARALLVLAAAALVLSSVSAAAGSPPLAKGLSFDFYSAKCPQAEAIVFSFLKDAVRKDVGLAAALLRIHFHDCFVQGCDGSVLLDXTXGVDSEKVSPPNVXLRPSAFKAINAIRALLQXAC

SEQ ID NO: 56048 - DNA, 1213 bp, Glycine max
  misc_feature (1)..(1213): Ceres Seq. ID no. 15177104
aaagccaaaagaaaccaaaccgaatcaagccgattatctgccggatcgaatttccgagggatggcaaccggtagcgaagctggaaagcccgcggaggtcgtgctggagtggcctaagcaggacaaaaagaggatgctgcatgctgtttaccgtgtgggagatctggaccgtaccattaagtgttacacagaatgctttgggatgaagctgttgaggaaaagagatgttcctgaagagaagtacaccaatgcgtttcttgggtttggacctgaggacactaattttgcacttgagctgacttacaagtatggtgttgacaagtatgacattggagcgggctttggacattttgccatcgcaaatgaggatgtgtacaagctggctgagacaattaaatcatcttcttgttgtaagatcactcgtgaacctggtcctgtcaagggagggtccactgtgattgcctttgcacaagacccagatggttacatgttcgagcttatccagaggggtccgacgcctgagcctctctgtcaagttatgcttcgtgttggtgaccttgatcggtctatcatgttctacgagaaggcccttgggatgaagcttctgaggaaaaaagatgtgcctcagtacaagtacacaattgccatgatgggctatgccgaggaggataagaccactgttctggagttgacatacaactatggtgtcacagaatataacaagggcaatgcatatgctcaggttgctattggcactgacgatgtgtacaagagtgctgaagcagttgagctggttaccaaagaactaggtggaaagattctacggcagcctgggccactaccggggctgaacacgaagatcacctctttccttgaccccgatggctggaaagtggttctggtggatcatgcggacttcctcaaggaactccactaaagatcagcaggccccacgcccgggagttgttgaagaggcaaaccttatgcagcaatggtctttgatgtaataaaatggcagcctcttccgctcgaccaacaaaaataaaagctactgtaccaccgaatacctatgccgtgattggcctagttagaggacttgctctgtacagtatgtgctatgatcgctgaacatgaatactcctactactgagatgggtctgcatgcgcagtcggagagtggtttccaatgatctgatatgttttctacctctgtt

SEQ ID NO: 56049 - protein, 311 aa, Glycine max
  peptide (1)..(311): Ceres Seq. ID no. 15177105
  misc_feature (44)..(166): Pfam Name: Glyoxalase/Bleomycin resistance Pfam Description: Glyoxalase/Bleomycin resistance
  misc_feature (7)..(310): Homolog of NCBI NO: 25350143 NR Description: protein F1N21.10 [imported] - Arabidopsis
  misc_feature (34)..(310): Homolog of NCBI NO: 2494843 NR Description: Putative lactoylglutathione lyase (Aldoketomutase) (Glyoxalase I) (Glx I) (Ketone-aldehyde mutase)
  misc_feature (31)..(310): Homolog of NCBI NO: 15810219 NR Description: putative lactoylglutathione lyase [Arabidopsis
  misc_feature (31)..(310): Homolog of NCBI NO: 15221116 NR Description: glyoxalase I, putative (lactoylglutathione lyase)
  misc_feature (7)..(310): Homolog of NCBI NO: 21537360 NR Description: glyoxalase I, putative [Arabidopsis thaliana]
  misc_feature (7)..(310): Homolog of NCBI NO: 15220397 NR Description: glyoxalase I, putative (lactoylglutathione lyase)
  misc_feature (21)..(310): Homolog of NCBI NO: 2213425 NR Description: hypothetical protein [Citrus x paradisi]
  misc_feature (21)..(310): Homolog of NCBI NO: 1808684 NR Description: hypothetical protein [Sporobolus stapfianus]
  misc_feature (21)..(310): Homolog of NCBI NO: 16580747 NR Description: glyoxalase I [Oryza sativa (japonica
  misc_feature (21)..(310): Homolog of NCBI NO: 4126809 NR Description: glyoxalase I [Oryza sativa (japonica
KAKRNQTESSRLSAGSNFRGMATGSEAGKPAEVVLEWPKQDKKRMLHAVYRVGDLDRTIKCYTECFGMKLLRKRDVPEEKYTNAFLGFGPEDTNFALELTYKYGVDKYDIGAGFGHFAIANEDVYKLAETIKSSSCCKITREPGPVKGGSTVIAFAQDPDGYMFELIQRGPTPEPLCQVMLRVGDLDRSIMFYEKALGMKLLRKKDVPQYKYTIAMMGYAEEDKTTVLELTYNYGVTEYNKGNAYAQVAIGTDDVYKSAEAVELVTKELGGKILRQPGPLPGLNTKITSFLDPDGWKVVLVDHADFLKELH

SEQ ID NO: 56050 - protein, 291 aa, Glycine max
  peptide (1)..(291): Ceres Seq. ID no. 15177106
  misc_feature (24)..(146): Pfam Name: Glyoxalase/Bleomycin resistance Pfam Description: Glyoxalase/Bleomycin resistance
  misc_feature (1)..(290): Homolog of NCBI NO: 25350143 NR Description: protein F1N21.10 [imported] - Arabidopsis
  misc_feature (14)..(290): Homolog of NCBI NO: 2494843 NR Description: Putative lactoylglutathione lyase (Aldoketomutase) (Glyoxalase I) (Glx I) (Ketone-aldehyde mutase)
  misc_feature (11)..(290): Homolog of NCBI NO: 15810219 NR Description: putative lactoylglutathione lyase [Arabidopsis
  misc_feature (11)..(290): Homolog of NCBI NO: 15221116 NR Description: glyoxalase I, putative (lactoylglutathione lyase)
  misc_feature (1)..(290): Homolog of NCBI NO: 21537360 NR Description: glyoxalase I, putative [Arabidopsis thaliana]
  misc_feature (1)..(290): Homolog of NCBI NO: 15220397 NR Description: glyoxalase I, putative (lactoylglutathione lyase)
  misc_feature (1)..(290): Homolog of NCBI NO: 2213425 NR Description: hypothetical protein [Citrus x paradisi]
  misc_feature (1)..(290): Homolog of NCBI NO: 1808684 NR Description: hypothetical protein [Sporobolus stapfianus]
  misc_feature (1)..(290): Homolog of NCBI NO: 16580747 NR Description: glyoxalase I [Oryza sativa (japonica
  misc_feature (1)..(290): Homolog of NCBI NO: 4126809 NR Description: glyoxalase I [Oryza sativa (japonica
MATGSEAGKPAEVVLEWPKQDKKRMLHAVYRVGDLDRTIKCYTECFGMKLLRKRDVPEEKYTNAFLGFGPEDTNFALELTYKYGVDKYDIGAGFGHFAIANEDVYKLAETIKSSSCCKITREPGPVKGGSTVIAFAQDPDGYMFELIQRGPTPEPLCQVMLRVGDLDRSIMFYEKALGMKLLRKKDVPQYKYTIAMMGYAEEDKTTVLELTYNYGVTEYNKGNAYAQVAIGTDDVYKSAEAVELVTKELGGKILRQPGPLPGLNTKITSFLDPDGWKVVLVDHADFLKELH

SEQ ID NO: 56051 - protein, 267 aa, Glycine max
  peptide (1)..(267): Ceres Seq. ID no. 15177107
  misc_feature (1)..(122): Pfam Name: Glyoxalase/Bleomycin resistance Pfam Description: Glyoxalase/Bleomycin resistance
  misc_feature (1)..(266): Homolog of NCBI NO: 25350143 NR Description: protein F1N21.10 [imported] - Arabidopsis
  misc_feature (1)..(266): Homolog of NCBI NO: 2494843 NR Description: Putative lactoylglutathione lyase (Aldoketomutase) (Glyoxalase I) (Glx I) (Ketone-aldehyde mutase)
  misc_feature (1)..(266): Homolog of NCBI NO: 15810219 NR Description: putative lactoylglutathione lyase [Arabidopsis
  misc_feature (1)..(266): Homolog of NCBI NO: 15221116 NR Description: glyoxalase I, putative (lactoylglutathione lyase)
  misc_feature (1)..(266): Homolog of NCBI NO: 21537360 NR Description: glyoxalase I, putative [Arabidopsis thaliana]
  misc_feature (1)..(266): Homolog of NCBI NO: 15220397 NR Description: glyoxalase I, putative (lactoylglutathione lyase)
  misc_feature (1)..(266): Homolog of NCBI NO: 2213425 NR Description: hypothetical protein [Citrus x paradisi]
  misc_feature (1)..(266): Homolog of NCBI NO: 1808684 NR Description: hypothetical protein [Sporobolus stapfianus]
  misc_feature (1)..(266): Homolog of NCBI NO: 16580747 NR Description: glyoxalase I [Oryza sativa (japonica
  misc_feature (1)..(266): Homolog of NCBI NO: 4126809 NR Description: glyoxalase I [Oryza sativa (japonica
MLHAVYRVGDLDRTIKCYTECFGMKLLRKRDVPEEKYTNAFLGFGPEDTNFALELTYKYGVDKYDIGAGFGHFAIANEDVYKLAETIKSSSCCKITREPGPVKGGSTVIAFAQDPDGYMFELIQRGPTPEPLCQVMLRVGDLDRSIMFYEKALGMKLLRKKDVPQYKYTIAMMGYAEEDKTTVLELTYNYGVTEYNKGNAYAQVAIGTDDVYKSAEAVELVTKELGGKILRQPGPLPGLNTKITSFLDPDGWKVVLVDHADFLKELH

SEQ ID NO: 56052 - DNA, 828 bp, Glycine max
  misc_feature (1)..(828): Ceres Seq. ID no. 13595187
acactctttctctcaatttctctctcttttaaaacactaatcactaaaatcttgattcactatatcgtcaaaaccaacgctaaatcaattaaactctctcaaagaaaacaagacaaagccctacttttgatggattcagggtcacaacgaccggggcctgttagcgaaggcgatccgggtccgtccatcgtaaccccctcttcaccgcctgcgacgcctagcaggtacgagtcgcagaaacgacgtgactggaccacgttcttgcagtacctcaagaaccacaagccgcctctttccttgtcacggtgtagcggagcacatgccatcgagttcctcaagtacttagatcagttcggtaagaccaaagtccacgtggcggcatgtccttactttggccatcagcaacctccgtctccttgcgcttgtcctctcaagcaagcctgggggtctctcgatgccctgatcggacggttgagagcagcctacgaagagaacggtggacggcccgagtcgaacccgttcgcggcacgtgcggttaggatttacttgagggaagtcagagaaagtcaagccaaggcccgtgggagaccctacgagaaaaagaaacggaaacggccaacaactgttaccaccgtgagagttgacgttgcttcgtcgagacaaagtgaaggagatggttgtaacatcggtgatccgtcgtatgtggccgaggctgtacctccttaattaagttattattattgtcatgatatattaaatacattatatatgtctggaactcacatcaccttcttgagttaactattgaaaatatttttgttctagttc

SEQ ID NO: 56053 - protein, 241 aa, Glycine max
  peptide (1)..(241): Ceres Seq. ID no. 13595188
  misc_feature (58)..(189): Pfam Name: Protein of unknown function (DUF640) Pfam Description: Protein of unknown function (DUF640)
  misc_feature (47)..(205): Homolog of NCBI NO: 18412120 NR Description: expressed protein [Arabidopsis thaliana]
  misc_feature (67)..(204): Homolog of NCBI NO: 15229310 NR Description: hypothetical protein [Arabidopsis thaliana]
  misc_feature (61)..(224): Homolog of NCBI NO: 15241821 NR Description: expressed protein [Arabidopsis thaliana]
  misc_feature (55)..(222): Homolog of NCBI NO: 18406012 NR Description: expressed protein [Arabidopsis thaliana]
  misc_feature (42)..(221): Homolog of NCBI NO: 18402578 NR Description: expressed protein [Arabidopsis thaliana]
  misc_feature (57)..(206): Homolog of NCBI NO: 37535384 NR Description: hypothetical protein [Oryza sativa (japonica
  misc_feature (47)..(206): Homolog of NCBI NO: 38344650 NR Description: OSJNBb0072M01.12 [Oryza sativa (japonica
  misc_feature (56)..(226): Homolog of NCBI NO: 15237680 NR Description: hypothetical protein [Arabidopsis thaliana]
  misc_feature (51)..(231): Homolog of NCBI NO: 34907938 NR Description: B1088C09.17 [Oryza sativa (japonica
  misc_feature (45)..(241): Homolog of NCBI NO: 18390725 NR Description: expressed protein [Arabidopsis thaliana]
TLFLSISLSFKTLITKILIHYIVKTNAKSIKLSQRKQDKALLLMDSGSQRPGPVSEGDPGPSIVTPSSPPATPSRYESQKRRDWTTFLQYLKNHKPPLSLSRCSGAHAIEFLKYLDQFGKTKVHVAACPYFGHQQPPSPCACPLKQAWGSLDALIGRLRAAYEENGGRPESNPFAARAVRIYLREVRESQAKARGRPYEKKKRKRPTTVTTVRVDVASSRQSEGDGCNIGDPSYVAEAVPP

SEQ ID NO: 56054 - protein, 198 aa, Glycine max
  peptide (1)..(198): Ceres Seq. ID no. 13595189
  misc_feature (15)..(146): Pfam Name: Protein of unknown function (DUF640) Pfam Description: Protein of unknown function (DUF640)
  misc_feature (4)..(162): Homolog of NCBI NO: 18412120 NR Description: expressed protein [Arabidopsis thaliana]
  misc_feature (24)..(161): Homolog of NCBI NO: 15229310 NR Description: hypothetical protein [Arabidopsis thaliana]
  misc_feature (18)..(181): Homolog of NCBI NO: 15241821 NR Description: expressed protein [Arabidopsis thaliana]
  misc_feature (12)..(179): Homolog of NCBI NO: 18406012 NR Description: expressed protein [Arabidopsis thaliana]
  misc_feature (1)..(178): Homolog of NCBI NO: 18402578 NR Description: expressed protein [Arabidopsis thaliana]
  misc_feature (14)..(163): Homolog of NCBI NO: 37535384 NR Description: hypothetical protein [Oryza sativa (japonica
  misc_feature (4)..(163): Homolog of NCBI NO: 38344650 NR Description: OSJNBb0072M01.12 [Oryza sativa (japonica
  misc_feature (13)..(183): Homolog of NCBI NO: 15237680 NR Description: hypothetical protein [Arabidopsis thaliana]
  misc_feature (8)..(188): Homolog of NCBI NO: 34907938 NR Description: B1088C09.17 [Oryza sativa (japonica
  misc_feature (2)..(198): Homolog of NCBI NO: 18390725 NR Description: expressed protein [Arabidopsis thaliana]
MDSGSQRPGPVSEGDPGPSIVTPSSPPATPSRYESQKRRDWTTFLQYLKNHKPPLSLSRCSGAHAIEFLKYLDQFGKTKVHVAACPYFGHQQPPSPCACPLKQAWGSLDALIGRLRAAYEENGGRPESNPFAARAVRIYLREVRESQAKARGRPYEKKKRKRPTTVTTVRVDVASSRQSEGDGCNIGDPSYVAEAVPP

SEQ ID NO: 56055 - DNA, 1404 bp, Glycine max
  misc_feature (1)..(1404): Ceres Seq. ID no. 12610323
aacaatgtcagatctgccgccggaaaaccccaatctgccgctcacttcatcgtcttcctctttgcaccattcctacagccggaagcagaaatctctgggccttctttgcaccaatttcctagctctgtacaatcgacatggaatcgaaaccattgggcttgatgacgccgcctccaaattaggagttgagagacggagaatctacgatattgttaatgttctggagagtgttggggttttaacaaaaagagcgaagaatcagtatacgtggaaaggattttctgcgattccggcagcgttgaaggagctacaagaagaaggtgctaaggacactttccaccgtttttataccaacgagaatgtcaaagtatctgatgatgaagatgatgaggaagagtcttcttctcagcctctttctagtagccagactgatacctccaaacctggctcccttgattcctctaaaatagataatcgacgagagaaatctttaggactgcttactcagaactttatcaagctctttgtttgctctgaagctaggatcatctcccttgacgaggctgcaaaattactacttggagatgcccacaatacatcaataatgagaacaaaagtgaggcggctttatgatattgcgaatgtcttgtcatcaatgaatctcattgagaagactcacaccttagattctagaaaaccagctttcaaatggttaggatacaatggtgagcctactttcacactcagcagcgatttgatgcaagccgaatcaacgaagagagtttttggaactgatctcactaacgtcagtgtcaagagaagcagaacccatgaaaatgctaccgagaggaggataaagatgaaacaacacgcaatagcagatagttcttataatcaaagctctgatgatgctcatgaatcaagacgctacaagtttggtctttttgcaccagccgctggtggtacatatccagctgctcgtttggaggacaactccaagagagcttttgatgttgagaatctagtttcggattatcgtcctacttaccaaaatcaagttttgaaagacctctttgcgcattacatggacgcttggaagtcatggtacagcgaagtcacgcagaagaatccattaccagatacatcaaaacgccattagagatattcttaatcttctcttactagtgaacatttcgttttgaccaatgtgggtttagtttctccacacaaattttaacggcaggaatccgacattttaagatgcagactgcaccatctctgtgccttcactgtaggctgtttagaaatcatcttttgcttgattccaatgccagttgtatgtaacttatatataatccccatcttttatttttaaagaatctcaaaagtgaaaacctaggttct

SEQ ID NO: 56056 - protein, 385 aa, Glycine max
  peptide (1)..(385): Ceres Seq. ID no. 12610324
  misc_feature (26)..(92): Pfam Name: Transcription factor E2F/dimerisation partner (TDP) Pfam Description: Transcription factor E2F/dimerisation partner
  misc_feature (26)..(340): Homolog of NCBI NO: 40254337 NR Description: E2F transcription factor 7 [Mus musculus]
  misc_feature (26)..(239): Homolog of NCBI NO: 26334515 NR Description: unnamed protein product [Mus musculus]
  misc_feature (26)..(342): Homolog of NCBI NO: 29741773 NR Description: similar to Transcription factor E2F dimerisation
  misc_feature (25)..(212): Homolog of NCBI NO: 19578317 NR Description: transcription factor E2Ff [Arabidopsis thaliana]
  misc_feature (25)..(371): Homolog of NCBI NO: 15242176 NR Description: DP-E2F-like 2
  misc_feature (25)..(352): Homolog of NCBI NO: 6094551 NR Description: hypothetical protein [Arabidopsis thaliana]
  misc_feature (25)..(372): Homolog of NCBI NO: 22330789 NR Description: DP-E2F-like protein 3
  misc_feature (51)..(358): Homolog of NCBI NO: 7487385 NR Description: hypothetical protein T24C20.40 - Arabidopsis
  misc_feature (2)..(358): Homolog of NCBI NO: 30692988 NR Description: DP-E2F-related protein 1 [Arabidopsis thaliana]
  misc_feature (2)..(383): Homolog of NCBI NO: 22331664 NR Description: DP-E2F-like protein 1
TMSDLPPENPNLPLTSSSSSLHHSYSRKQKSLGLLCTNFLALYNRHGIETIGLDDAASKLGVERRRIYDIVNVLESVGVLTKRAKNQYTWKGFSAIPAALKELQEEGAKDTFHRFYTNENVKVSDDEDDEEESSSQPLSSSQTDTSKPGSLDSSKIDNRREKSLGLLTQNFIKLFVCSEARIISLDEAAKLLLGDAHNTSIMRTKVRRLYDIANVLSSMNLIEKTHTLDSRKPAFKWLGYNGEPTFTLSSDLMQAESTKRVFGTDLTNVSVKRSRTHENATERRIKMKQHAIADSSYNQSSDDAHESRRYKFGLFAPAAGGTYPAARLEDNSKRAFDVENLVSDYRPTYQNQVLKDLFAHYMDAWKSWYSEVTQKNPLPDTSKRH

SEQ ID NO: 56057 - protein, 384 aa, Glycine max
  peptide (1)..(384): Ceres Seq. ID no. 12610325
  misc_feature (25)..(91): Pfam Name: Transcription factor E2F/dimerisation partner (TDP) Pfam Description: Transcription factor E2F/dimerisation partner
  misc_feature (25)..(339): Homolog of NCBI NO: 40254337 NR Description: E2F transcription factor 7 [Mus musculus]
  misc_feature (25)..(238): Homolog of NCBI NO: 26334515 NR Description: unnamed protein product [Mus musculus]
  misc_feature (25)..(341): Homolog of NCBI NO: 29741773 NR Description: similar to Transcription factor E2F dimerisation
  misc_feature (24)..(211): Homolog of NCBI NO: 19578317 NR Description: transcription factor E2Ff [Arabidopsis thaliana]
  misc_feature (24)..(370): Homolog of NCBI NO: 15242176 NR Description: DP-E2F-like 2
  misc_feature (24)..(351): Homolog of NCBI NO: 6094551 NR Description: hypothetical protein [Arabidopsis thaliana]
  misc_feature (24)..(371): Homolog of NCBI NO: 22330789 NR Description: DP-E2F-like protein 3
  misc_feature (50)..(357): Homolog of NCBI NO: 7487385 NR Description: hypothetical protein T24C20.40 - Arabidopsis
  misc_feature (1)..(357): Homolog of NCBI NO: 30692988 NR Description: DP-E2F-related protein 1 [Arabidopsis thaliana]
  misc_feature (1)..(382): Homolog of NCBI NO: 22331664 NR Description: DP-E2F-like protein 1
MSDLPPENPNLPLTSSSSSLHHSYSRKQKSLGLLCTNFLALYNRHGIETIGLDDAASKLGVERRRIYDIVNVLESVGVLTKRAKNQYTWKGFSAIPAALKELQEEGAKDTFHRFYTNENVKVSDDEDDEEESSSQPLSSSQTDTSKPGSLDSSKIDNRREKSLGLLTQNFIKLFVCSEARIISLDEAAKLLLGDAHNTSIMRTKVRRLYDIANVLSSMNLIEKTHTLDSRKPAFKWLGYNGEPTFTLSSDLMQAESTKRVFGTDLTNVSVKRSRTHENATERRIKMKQHAIADSSYNQSSDDAHESRRYKFGLFAPAAGGTYPAARLEDNSKRAFDVENLVSDYRPTYQNQVLKDLFAHYMDAWKSWYSEVTQKNPLPDTSKRH

SEQ ID NO: 56058 - DNA, 1147 bp, Glycine max
  misc_feature (1)..(1147): Ceres Seq. ID no. 13595271
accattacctagaacatcctaatcgaaaacagccctacctgccattttcctccgttcgttcatctccttcgcctcgccaccgtccctcctcctctcttccctccctcatccctcatctcgtgtcggctcgaaagtcgaaaccctagaccaaccaccctcccctagtacgtaggaacagggacagagatgtatgcagaccagatctccaccggccgcaagcgctccatccatgaccgccttgacgccgacctcccctccgaccgcggcggcgcggacgccgccggccgggctcgtaacgcgctgtccaagaggcaacgacaaactgatgataaatggaagcatgatctttaccgggatgatgaatcagcttcaagatcagttgatccacgggatttgcgattcaagcttcagaagaaaagctctcagcaagggtttgctggccaaaagggttccggggtacgtgatctacgtgagatgttatctggaacaatgcacgcacaaccatcaaatgttgaccctcaaaagaggaaaccggtgtcagaggttgtgaaagtcacaaggcgtgaaattgttgatgaaaggcctgtacgcctaagtaagaaagtatcaaaaccatcaacatccaagaagacttctcagccaaaggctgaaagtccactcgacagttttctgaaatcacttggacttgagaagtattctattaccttccaggcggaggaggttgacatggcggccctacgtcacatgactgaaagtgatctcaaggcgttgggcatcccgatgggtcctaggaagaagattacccttgccttggaatccagagcgtagggcaatgtccctggagtacaatgtagaaaagcagggagatgtggtaggtttttgctcatctgcaaatttggcatatcttggaaagcagtggtacaggtaaacaatgcggtgtctcttgtaatggcatgttgctgtaagattattagactgctgttgtttatctggtctgcatgctttcctggccagaccagctgatttaactgatgaggtatccgtgctgttgaagctgcggtgatgttctcgctgtatactattattatgccttttttttcattggaaactggcattattagagtaatagagttgagattcttcagtc

SEQ ID NO: 56059 - protein, 213 aa, Glycine max
  peptide (1)..(213): Ceres Seq. ID no. 13595272
  misc_feature (153)..(209): Pfam Name: SAM domain (Sterile alpha motif) Pfam Description: SAM domain (Sterile alpha motif)
  misc_feature (143)..(211): Homolog of NCBI NO: 22330538 NR Description: expressed protein [Arabidopsis thaliana]
  misc_feature (140)..(209): Homolog of NCBI NO: 38345636 NR Description: OSJNBb0048E02.6 [Oryza sativa (japonica
  misc_feature (1)..(209): Homolog of NCBI NO: 30695517 NR Description: expressed protein [Arabidopsis thaliana]
  misc_feature (1)..(212): Homolog of NCBI NO: 18397861 NR Description: expressed protein [Arabidopsis thaliana]
  misc_feature (1)..(199): Homolog of NCBI NO: 39546279 NR Description: OSJNBa0083D01.12 [Oryza sativa (japonica
MYADQISTGRKRSIHDRLDADLPSDRGGADAAGRARNALSKRQRQTDDKWKHDLYRDDESASRSVDPRDLRFKLQKKSSQQGFAGQKGSGVRDLREMLSGTMHAQPSNVDPQKRKPVSEVVKVTRREIVDERPVRLSKKVSKPSTSKKTSQPKAESPLDSFLKSLGLEKYSITFQAEEVDMAALRHMTESDLKALGIPMGPRKKITLALESRA

SEQ ID NO: 56060 - protein, 119 aa, Glycine max
  peptide (1)..(119): Ceres Seq. ID no. 13595273
MQTRSPPAASAPSMTALTPTSPPTAAARTPPAGLVTRCPRGNDKLMINGSMIFTGMMNQLQDQLIHGICDSSFRRKALSKGLLAKRVPGYVIYVRCYLEQCTHNHQMLTLKRGNRCQRL

SEQ ID NO: 56061 - protein, 117 aa, Glycine max
  peptide (1)..(117): Ceres Seq. ID no. 13595274
  misc_feature (57)..(113): Pfam Name: SAM domain (Sterile alpha motif) Pfam Description: SAM domain (Sterile alpha motif)
  misc_feature (47)..(115): Homolog of NCBI NO: 22330538 NR Description: expressed protein [Arabidopsis thaliana]
  misc_feature (44)..(113): Homolog of NCBI NO: 38345636 NR Description: OSJNBb0048E02.6 [Oryza sativa (japonica
  misc_feature (1)..(113): Homolog of NCBI NO: 30695517 NR Description: expressed protein [Arabidopsis thaliana]
  misc_feature (1)..(116): Homolog of NCBI NO: 18397861 NR Description: expressed protein [Arabidopsis thaliana]
  misc_feature (1)..(103): Homolog of NCBI NO: 39546279 NR Description: OSJNBa0083D01.12 [Oryza sativa (japonica
MLSGTMHAQPSNVDPQKRKPVSEVVKVTRREIVDERPVRLSKKVSKPSTSKKTSQPKAESPLDSFLKSLGLEKYSITFQAEEVDMAALRHMTESDLKALGIPMGPRKKITLALESRA

SEQ ID NO: 56062 - DNA, 1061 bp, Glycine max
  misc_feature (1)..(1061): Ceres Seq. ID no. 13595183
gctaggttttcagtctctcgcctccaccagcgcctccacgccgccgaggaacggagcaggaagtgacgccggaggaggacgctctgctcgtcgtccgccgcatctcgcgcccgcccaacccgaacgccccgaaaggccaccaaagccgtagccttcttcttcctagagctcccgcagcatgtcggcatccaccagcggcggcggggggctctcgccgcaggcggccgcggcgctccaggagggcgtcgggctggtgttcatgcggtggacggcgctgcagatggcggtggagaacgggtggggcggccgcgactcccgcgccaaggccgaccggctcgccgccgacgtcctcgccttcttcaccacctccaaaggtccatattattatgatgacttggaggagatgatgtttgacagcatatccgaatccttcaatgctgactttgaggatggaagtgttggggaggttgctgaacaagtattgattatgcatgaagaatgcctgcaaaacaactattcgtcgattgagaagctaaggaacacacgtgctcaaggaaatgctgtttcccaaagtagaatgatggtaactgatgaaggcgatgatagctcggatgatagctcggacgatgacgacggcgatgaaccagccagcgcagatgatatgtcggtggatgagccaaagcctcccaagcctgcccctgacgctgatgggtggactgttgtgccaccgaagcgcggcggccggggcaagaattaagcacagaagcaaaccctggcaacaaactgccatctgagaggccgttttggtctgaaggctttgaggtgtgattagcaaaaccttggcaaccacttcctgccacttgtgccattttggtcttggaggttttgaagtgttgcgcttcacctgtattacttcgattttgtcaggaatgttggttgtgtagcatgttttccttggttactctcttggtgttcagacttggcggcgaaagatctggattgtaagcgggtctgacatatccttatgcacattttgaactgatgcttatctgtatcgtcgc

SEQ ID NO: 56063 - protein, 192 aa, Glycine max
  peptide (1)..(192): Ceres Seq. ID no. 13595184
  misc_feature (30)..(186): Homolog of NCBI NO: 39588127 NR Description: Hypothetical protein CBG13670 [Caenorhabditis
  misc_feature (15)..(157): Homolog of NCBI NO: 40745755 NR Description: hypothetical protein AN2079.2 [Aspergillus
  misc_feature (12)..(165): Homolog of NCBI NO: 23489768 NR Description: hypothetical protein [Plasmodium yoelii yoelii]
  misc_feature (22)..(186): Homolog of NCBI NO: 27708338 NR Description: similar to hypothetical protein DT1P1A10
  misc_feature (30)..(186): Homolog of NCBI NO: 30424736 NR Description: RIKEN cDNA 2310007F12 [Mus musculus]
  misc_feature (30)..(186): Homolog of NCBI NO: 19483873 NR Description: 2310007F12Rik protein [Mus musculus]
  misc_feature (10)..(186): Homolog of NCBI NO: 24308388 NR Description: hypothetical protein DT1P1A10 [Homo sapiens]
  misc_feature (17)..(162): Homolog of NCBI NO: 23613422 NR Description: hypothetical protein [Plasmodium falciparum 3D7]
  misc_feature (11)..(186): Homolog of NCBI NO: 27545344 NR Description: hypothetical protein DT1P1A10 (human) - like
  misc_feature (11)..(191): Homolog of NCBI NO: 15241108 NR Description: expressed protein [Arabidopsis thaliana]
MSASTSGGGGLSPQAAAALQEGVGLVFMRWTALQMAVENGWGGRDSRAKADRLAADVLAFFTTSKGPYYYDDLEEMMFDSISESFNADFEDGSVGEVAEQVLIMHEECLQNNYSSIEKLRNTRAQGNAVSQSRMMVTDEGDDSSDDSSDDDDGDEPASADDMSVDEPKPPKPAPDADGWTVVPPKRGGRGKN

SEQ ID NO: 56064 - protein, 165 aa, Glycine max
  peptide (1)..(165): Ceres Seq. ID no. 13595185
  misc_feature (3)..(159): Homolog of NCBI NO: 39588127 NR Description: Hypothetical protein CBG13670 [Caenorhabditis
  misc_feature (1)..(130): Homolog of NCBI NO: 40745755 NR Description: hypothetical protein AN2079.2 [Aspergillus
  misc_feature (1)..(138): Homolog of NCBI NO: 23489768 NR Description: hypothetical protein [Plasmodium yoelii yoelii]
  misc_feature (1)..(159): Homolog of NCBI NO: 27708338 NR Description: similar to hypothetical protein DT1P1A10
  misc_feature (3)..(159): Homolog of NCBI NO: 30424736 NR Description: RIKEN cDNA 2310007F12 [Mus musculus]
  misc_feature (3)..(159): Homolog of NCBI NO: 19483873 NR Description: 2310007F12Rik protein [Mus musculus]
  misc_feature (1)..(159): Homolog of NCBI NO: 24308388 NR Description: hypothetical protein DT1P1A10 [Homo sapiens]
  misc_feature (1)..(135): Homolog of NCBI NO: 23613422 NR Description: hypothetical protein [Plasmodium falciparum 3D7]
  misc_feature (1)..(159): Homolog of NCBI NO: 27545344 NR Description: hypothetical protein DT1P1A10 (human) - like
  misc_feature (1)..(164): Homolog of NCBI NO: 15241108 NR Description: expressed protein [Arabidopsis thaliana]
MRWTALQMAVENGWGGRDSRAKADRLAADVLAFFTTSKGPYYYDDLEEMMFDSISESFNADFEDGSVGEVAEQVLIMHEECLQNNYSSIEKLRNTRAQGNAVSQSRMMVTDEGDDSSDDSSDDDDGDEPASADDMSVDEPKPPKPAPDADGWTVVPPKRGGRGKN

SEQ ID NO: 56065 - protein, 158 aa, Glycine max
  peptide (1)..(158): Ceres Seq. ID no. 13595186
  misc_feature (1)..(152): Homolog of NCBI NO: 39588127 NR Description: Hypothetical protein CBG13670 [Caenorhabditis
  misc_feature (1)..(123): Homolog of NCBI NO: 40745755 NR Description: hypothetical protein AN2079.2 [Aspergillus
  misc_feature (1)..(131): Homolog of NCBI NO: 23489768 NR Description: hypothetical protein [Plasmodium yoelii yoelii]
  misc_feature (1)..(152): Homolog of NCBI NO: 27708338 NR Description: similar to hypothetical protein DT1P1A10
  misc_feature (1)..(152): Homolog of NCBI NO: 30424736 NR Description: RIKEN cDNA 2310007F12 [Mus musculus]
  misc_feature (1)..(152): Homolog of NCBI NO: 19483873 NR Description: 2310007F12Rik protein [Mus musculus]
  misc_feature (1)..(152): Homolog of NCBI NO: 24308388 NR Description: hypothetical protein DT1P1A10 [Homo sapiens]
  misc_feature (1)..(128): Homolog of NCBI NO: 23613422 NR Description: hypothetical protein [Plasmodium falciparum 3D7]
  misc_feature (1)..(152): Homolog of NCBI NO: 27545344 NR Description: hypothetical protein DT1P1A10 (human) - like
  misc_feature (1)..(157): Homolog of NCBI NO: 15241108 NR Description: expressed protein [Arabidopsis thaliana]
MAVENGWGGRDSRAKADRLAADVLAFFTTSKGPYYYDDLEEMMFDSISESFNADFEDGSVGEVAEQVLIMHEECLQNNYSSIEKLRNTRAQGNAVSQSRMMVTDEGDDSSDDSSDDDDGDEPASADDMSVDEPKPPKPAPDADGWTVVPPKRGGRGKN

SEQ ID NO: 56066 - DNA, 931 bp, Glycine max
  misc_feature (1)..(931): Ceres Seq. ID no. 12611212
gcggtgtgaacgatgggctctctgtcggactcgcaggcgaatggcgaccgtcagccgccgccggcggaggcggaggatgccgggccgcaggtcgaggagggagataccggcgagaagatggagggcgtcgcatccatcgcgctgctaccctctggcgccatctccggccacttcatccgcctcccggactccgcctgctacggcctccagggcaccccgataccatgcgagagggaatgtagccgaggagatgattaccgccttataaagctatccatcattaattttaagaggaagacagagaaggtggttgtggtggaatgcaggggacatgatgctgctcgattacaaaacattgaccatttgcatggatgggaagatgacgttgttggactggttcaaaagaaacatgggaataagaaagtcttggtctctttcgaatgcgagacgctgaaggctgataaagccgctgaagaacatattagcaagtatatgccaaatctttgcggactggacgcagttgtaaacacggggaagatgagtatctccggcatcaacctagacgaggacgatgaaccaagcggcgacagctgagagcagaaacacgttgtcaatgtgttagctgcgacggtttctctgcctcgtcgatgccgtcgacaaagcaggactgtgtgtcgctgttacccacagcatgagttttatgcaacaaatcagcacttgtgcacttgaaacggagcgctgtgtagcaagtgtatacctaaacggaatgtgtgttgctgttgctgcctctggcatgatcctgctgaggcgattgtacacccttggacctaggtttggtgttgggtgggccattggcggcgcaagccttcgtccccgcccgtgctgtttgtcacgcatgtacgggcagatatcttgcatttcctgtttcctc

SEQ ID NO: 56067 - protein, 193 aa, Glycine max
  peptide (1)..(193): Ceres Seq. ID no. 12611213
  misc_feature (57)..(170): Homolog of NCBI NO: 11994768 NR Description: gene_id:MMF24.3~unknown protein [Arabidopsis
  misc_feature (28)..(188): Homolog of NCBI NO: 15228659 NR Description: hypothetical protein; protein id: At3g29280.1
MGSLSDSQANGDRQPPPAEAEDAGPQVEEGDTGEKMEGVASIALLPSGAISGHFIRLPDSACYGLQGTPIPCERECSRGDDYRLIKLSIINFKRKTEKVVVVECRGHDAARLQNIDHLHGWEDDVVGLVQKKHGNKKVLVSFECETLKADKAAEEHISKYMPNLCGLDAVVNTGKMSISGINLDEDDEPSGDS

SEQ ID NO: 56068 - protein, 158 aa, Glycine max
  peptide (1)..(158): Ceres Seq. ID no. 12611214
  misc_feature (22)..(135): Homolog of NCBI NO: 11994768 NR Description: gene_id:MMF24.3~unknown protein [Arabidopsis
  misc_feature (1)..(153): Homolog of NCBI NO: 15228659 NR Description: hypothetical protein; protein id: At3g29280.1
MEGVASIALLPSGAISGHFIRLPDSACYGLQGTPIPCERECSRGDDYRLIKLSIINFKRKTEKVVVVECRGHDAARLQNIDHLHGWEDDVVGLVQKKHGNKKVLVSFECETLKADKAAEEHISKYMPNLCGLDAVVNTGKMSISGINLDEDDEPSGDS

SEQ ID NO: 56069 - DNA, 708 bp, Glycine max
  misc_feature (1)..(708): Ceres Seq. ID no. 15172705
atcaccaccacttctaacacagcctcctcctcctcttcgatctctctctctctcgatcaaaatggctaacccaagagtcttcttcgacatgaccctcgacggcgcccccgccggccgcatcgtgatggagctttacaaagacacgaccccgaacaccgccgagaacttccgagccctctgcaccggcgagaaaggtgtcggaaagaaggggaagcctctccacttcaagggatcggccttccaccgcgtgatccccgggttcatgtgccagggaggcgatttcaccgccgggaacgggaccggcggggagtcgatctacggcgataagttcaaggacgagaacttcgcgaagaagcacaccggggcggggatcctctccatggcgaactctggtcccaacactaacggatctcagttttttatctgcaccgcggagacgtcgtggctcgatgggaagcacgtggtgtttgggaaggttgttgaaggtatggaggttgtgaaggcgatcgagaaggttggatcgtcttctgggacgacgaagaagaaggttgttgttgctgattgtggtcaggttgcttagatctgagtgatctgatgatgatgaatgttatcttttgcttttttaatgtttttttttctgatcgttcgagtttgtaaaaccctgagggttttttggatttgactgcctttgaataattatgaataact

SEQ ID NO: 56070 - protein, 192 aa, Glycine max
  peptide (1)..(192): Ceres Seq. ID no. 15172706
  misc_feature (21)..(192): Homolog of NCBI NO: 18376589 NR Description: putative cyclosporin A-binding protein [Picea
  misc_feature (21)..(192): Homolog of NCBI NO: 15234781 NR Description: peptidylprolyl isomerase ROC1 [Arabidopsis
  misc_feature (21)..(192): Homolog of NCBI NO: 29124975 NR Description: cyclophilin [Populus tremuloides]
  misc_feature (21)..(191): Homolog of NCBI NO: 118103 NR Description: Peptidyl-prolyl cis-trans isomerase (PPIase)
  misc_feature (21)..(191): Homolog of NCBI NO: 68406 NR Description: peptidylprolyl isomerase (EC 5.2.1.8) - tomato
  misc_feature (21)..(192): Homolog of NCBI NO: 15236211 NR Description: peptidylprolyl isomerase (cyclophilin)
  misc_feature (21)..(191): Homolog of NCBI NO: 11270316 NR Description: peptidylprolyl isomerase (EC 5.2.1.8)
  misc_feature (21)..(191): Homolog of NCBI NO: 11270322 NR Description: peptidylprolyl isomerase (EC 5.2.1.8)
  misc_feature (21)..(192): Homolog of NCBI NO: 3334157 NR Description: Peptidyl-prolyl cis-trans isomerase (PPIase)
  misc_feature (22)..(192): Homolog of NCBI NO: 18076088 NR Description: cyclophilin [Ricinus communis]
SPPLLTQPPPPLRSLSLSIKMANPRVFFDMTLDGAPAGRIVMELYKDTTPNTAENFRALCTGEKGVGKKGKPLHFKGSAFHRVIPGFMCQGGDFTAGNGTGGESIYGDKFKDENFAKKHTGAGILSMANSGPNTNGSQFFICTAETSWLDGKHVVFGKVVEGMEVVKAIEKVGSSSGTTKKKVVVADCGQVA

SEQ ID NO: 56071 - protein, 172 aa, Glycine max
  peptide (1)..(172): Ceres Seq. ID no. 15172707
  misc_feature (1)..(172): Homolog of NCBI NO: 18376589 NR Description: putative cyclosporin A-binding protein [Picea
  misc_feature (1)..(172): Homolog of NCBI NO: 15234781 NR Description: peptidylprolyl isomerase ROC1 [Arabidopsis
  misc_feature (1)..(172): Homolog of NCBI NO: 29124975 NR Description: cyclophilin [Populus tremuloides]
  misc_feature (1)..(171): Homolog of NCBI NO: 118103 NR Description: Peptidyl-prolyl cis-trans isomerase (PPIase)
  misc_feature (1)..(171): Homolog of NCBI NO: 68406 NR Description: peptidylprolyl isomerase (EC 5.2.1.8) - tomato
  misc_feature (1)..(172): Homolog of NCBI NO: 15236211 NR Description: peptidylprolyl isomerase (cyclophilin)
  misc_feature (1)..(171): Homolog of NCBI NO: 11270316 NR Description: peptidylprolyl isomerase (EC 5.2.1.8)
  misc_feature (1)..(171): Homolog of NCBI NO: 11270322 NR Description: peptidylprolyl isomerase (EC 5.2.1.8)
  misc_feature (1)..(172): Homolog of NCBI NO: 3334157 NR Description: Peptidyl-prolyl cis-trans isomerase (PPIase)
  misc_feature (2)..(172): Homolog of NCBI NO: 18076088 NR Description: cyclophilin [Ricinus communis]
MANPRVFFDMTLDGAPAGRIVMELYKDTTPNTAENFRALCTGEKGVGKKGKPLHFKGSAFHRVIPGFMCQGGDFTAGNGTGGESIYGDKFKDENFAKKHTGAGILSMANSGPNTNGSQFFICTAETSWLDGKHVVFGKVVEGMEVVKAIEKVGSSSGTTKKKVVVADCGQVA

SEQ ID NO: 56072 - protein, 163 aa, Glycine max
  peptide (1)..(163): Ceres Seq. ID no. 15172708
  misc_feature (1)..(163): Homolog of NCBI NO: 18376589 NR Description: putative cyclosporin A-binding protein [Picea
  misc_feature (1)..(163): Homolog of NCBI NO: 15234781 NR Description: peptidylprolyl isomerase ROC1 [Arabidopsis
  misc_feature (1)..(163): Homolog of NCBI NO: 29124975 NR Description: cyclophilin [Populus tremuloides]
  misc_feature (1)..(162): Homolog of NCBI NO: 118103 NR Description: Peptidyl-prolyl cis-trans isomerase (PPIase)
  misc_feature (1)..(162): Homolog of NCBI NO: 68406 NR Description: peptidylprolyl isomerase (EC 5.2.1.8) - tomato
  misc_feature (1)..(163): Homolog of NCBI NO: 15236211 NR Description: peptidylprolyl isomerase (cyclophilin)
  misc_feature (1)..(162): Homolog of NCBI NO: 11270316 NR Description: peptidylprolyl isomerase (EC 5.2.1.8)
  misc_feature (1)..(162): Homolog of NCBI NO: 11270322 NR Description: peptidylprolyl isomerase (EC 5.2.1.8)
  misc_feature (1)..(163): Homolog of NCBI NO: 3334157 NR Description: Peptidyl-prolyl cis-trans isomerase (PPIase)
  misc_feature (1)..(163): Homolog of NCBI NO: 18076088 NR Description: cyclophilin [Ricinus communis]
MTLDGAPAGRIVMELYKDTTPNTAENFRALCTGEKGVGKKGKPLHFKGSAFHRVIPGFMCQGGDFTAGNGTGGESIYGDKFKDENFAKKHTGAGILSMANSGPNTNGSQFFICTAETSWLDGKHVVFGKVVEGMEVVKAIEKVGSSSGTTKKKVVVADCGQVA

SEQ ID NO: 56073 - DNA, 801 bp, Glycine max
  misc_feature (1)..(801): Ceres Seq. ID no. 12610341
cttaaaagaaaaattagcaggcaatgtctgagaattctgataattgaagagaaaacagccgggttcgtgaaaaatatttgatcgtctggcgtaaatctaaccttgttcgcattcagcttttcttgtggaaggatagaaaaggttgagaagagacttgtgaatggcagacatacctagacacctgcgtgcttgtttggatatggggaaaatagctttcttagctatccttgtttctggaggaatcgtcttgcaaattctggcttgtgctctgtataataactggtggccaatgctaagtgtgataatgtatgtgcttctcccaatgcctttgctcttcttcgctggatcggacagtacatctctcttcaatgaatcagacaatagctggatcaatgcagcaaagttcttgactggtgcatcagcagttggaagcatcgccataccttcgattctaaaacacgctggactcatcggttggggagcattagcctttgatctctcttcctacgttgtcttcattgttgctattctgagttacatttgcataggagatgacagtgacaactactacagctacatataaaagtgacatacaaagtcatcatcattattttctcaagctctctgctcttttaccaccttgccgacggttcaaaaaggagaatctcttcttgagagggatcactcaattgtatgtatgattgaatgaatgaatgactgaatggctgttgtaagttgaaaactttatatgtttttgtgttggttttggtgtatagaatgaaaatatttcatttttttcct

SEQ ID NO: 56074 - protein, 140 aa, Glycine max
  peptide (1)..(140): Ceres Seq. ID no. 12610342
  misc_feature (14)..(135): Homolog of NCBI NO: 32564913 NR Description: vacuolar protein sorting 55, possibly
  misc_feature (16)..(105): Homolog of NCBI NO: 6322504 NR Description: Vacuolar Protein Sorting; Vps55p [Saccharomyces
  misc_feature (16)..(126): Homolog of NCBI NO: 31211645 NR Description: ENSANGP00000014293 [Anopheles gambiae]
  misc_feature (55)..(126): Homolog of NCBI NO: 34905898 NR Description: P0458E05.25 [Oryza sativa (japonica
  misc_feature (23)..(134): Homolog of NCBI NO: 18399269 NR Description: expressed protein
  misc_feature (17)..(134): Homolog of NCBI NO: 16648828 NR Description: AT3g11530/F24K9_21 [Arabidopsis thaliana]
  misc_feature (17)..(134): Homolog of NCBI NO: 12322900 NR Description: unknown protein; 72859-71336 [Arabidopsis
  misc_feature (1)..(139): Homolog of NCBI NO: 25518386 NR Description: hypothetical protein F5D14.18 - Arabidopsis
  misc_feature (1)..(140): Homolog of NCBI NO: 21554354 NR Description: unknown [Arabidopsis thaliana]
  misc_feature (1)..(140): Homolog of NCBI NO: 18398420 NR Description: Expressed protein
MADIPRHLRACLDMGKIAFLAILVSGGIVLQILACALYNNWWPMLSVIMYVLLPMPLLFFAGSDSTSLFNESDNSWINAAKFLTGASAVGSIAIPSILKHAGLIGWGALAFDLSSYVVFIVAILSYICIGDDSDNYYSYI

SEQ ID NO: 56075 - protein, 127 aa, Glycine max
  peptide (1)..(127): Ceres Seq. ID no. 12610343
  misc_feature (1)..(122): Homolog of NCBI NO: 32564913 NR Description: vacuolar protein sorting 55, possibly
  misc_feature (3)..(92): Homolog of NCBI NO: 6322504 NR Description: Vacuolar Protein Sorting; Vps55p [Saccharomyces
  misc_feature (3)..(113): Homolog of NCBI NO: 31211645 NR Description: ENSANGP00000014293 [Anopheles gambiae]
  misc_feature (42)..(113): Homolog of NCBI NO: 34905898 NR Description: P0458E05.25 [Oryza sativa (japonica
  misc_feature (10)..(121): Homolog of NCBI NO: 18399269 NR Description: expressed protein
  misc_feature (4)..(121): Homolog of NCBI NO: 16648828 NR Description: AT3g11530/F24K9_21 [Arabidopsis thaliana]
  misc_feature (4)..(121): Homolog of NCBI NO: 12322900 NR Description: unknown protein; 72859-71336 [Arabidopsis
  misc_feature (1)..(126): Homolog of NCBI NO: 25518386 NR Description: hypothetical protein F5D14.18 - Arabidopsis
  misc_feature (1)..(127): Homolog of NCBI NO: 21554354 NR Description: unknown [Arabidopsis thaliana]
  misc_feature (1)..(127): Homolog of NCBI NO: 18398420 NR Description: Expressed protein
MGKIAFLAILVSGGIVLQILACALYNNWWPMLSVIMYVLLPMPLLFFAGSDSTSLFNESDNSWINAAKFLTGASAVGSIAIPSILKHAGLIGWGALAFDLSSYVVFIVAILSYICIGDDSDNYYSYI

SEQ ID NO: 56076 - protein, 97 aa, Glycine max
  peptide (1)..(97): Ceres Seq. ID no. 12610344
  misc_feature (1)..(92): Homolog of NCBI NO: 32564913 NR Description: vacuolar protein sorting 55, possibly
  misc_feature (1)..(62): Homolog of NCBI NO: 6322504 NR Description: Vacuolar Protein Sorting; Vps55p [Saccharomyces
  misc_feature (1)..(83): Homolog of NCBI NO: 31211645 NR Description: ENSANGP00000014293 [Anopheles gambiae]
  misc_feature (12)..(83): Homolog of NCBI NO: 34905898 NR Description: P0458E05.25 [Oryza sativa (japonica
  misc_feature (1)..(91): Homolog of NCBI NO: 18399269 NR Description: expressed protein
  misc_feature (1)..(91): Homolog of NCBI NO: 16648828 NR Description: AT3g11530/F24K9_21 [Arabidopsis thaliana]
  misc_feature (1)..(91): Homolog of NCBI NO: 12322900 NR Description: unknown protein; 72859-71336 [Arabidopsis
  misc_feature (1)..(96): Homolog of NCBI NO: 25518386 NR Description: hypothetical protein F5D14.18 - Arabidopsis
  misc_feature (1)..(97): Homolog of NCBI NO: 21554354 NR Description: unknown [Arabidopsis thaliana]
  misc_feature (1)..(97): Homolog of NCBI NO: 18398420 NR Description: Expressed protein
MLSVIMYVLLPMPLLFFAGSDSTSLFNESDNSWINAAKFLTGASAVGSIAIPSILKHAGLIGWGALAFDLSSYVVFIVAILSYICIGDDSDNYYSYI

SEQ ID NO: 56077 - DNA, 711 bp, Glycine max
  misc_feature (1)..(711): Ceres Seq. ID no. 12610679
aaggtaatcaactcgctcctactgactcagtccgagtcacccgattcactaacgaatcttcactcttgttcacagaacttgagatgaaaggcggccaatcgaaagcagaagcaacgagcacagatcaaagactcaaaaccagaggaaggaagaagaagacggcgacgaaggacccaaacaaacctaagagacctccaagcgctttcttcgtcttcttagatgattttcgacgggagttcaaagaggcgaaccctaacaacaagtccgtcgccgccgttggtaaggctgctggagctaagtggaagtctatgactgaggaagagaaagctccttatgcttccaaggcagagaccaggaagagtgaatataataagagtatgcaacagtacaacatgaaactggctaatggaaccagtagaggtgaagatgatgagtccaagtctgaagttgacgaagctggaggagcaagcgaagcggaggaagaagacgatgattaaggaggctttctcgtctaggttactgccattgactgactcagatttgtggatgggattagtaatttaaatgtgtcccaaaaaaaaactgaaaaactggttatgctttgtgtttgtaatattaagaacctcagttgctacttcttcgtgtttaggtcagttgtatggtcggataggatcacttggatgctatgtctccttattaccttctgtgttt

SEQ ID NO: 56078 - protein, 164 aa, Glycine max
  peptide (1)..(164): Ceres Seq. ID no. 12610680
  misc_feature (61)..(130): Pfam Name: HMG (high mobility group) box Pfam Description: HMG (high mobility group) box
  misc_feature (28)..(164): Homolog of NCBI NO: 729736 NR Description: HMG1/2-LIKE PROTEIN
  misc_feature (28)..(164): Homolog of NCBI NO: 1052956 NR Description: high mobility group protein 2 HMG2 [Ipomoea nil]
  misc_feature (28)..(164): Homolog of NCBI NO: 7446213 NR Description: high mobility group protein HMG-1 - common
  misc_feature (28)..(151): Homolog of NCBI NO: 15237040 NR Description: HMG delta protein
  misc_feature (28)..(164): Homolog of NCBI NO: 7446212 NR Description: high mobility group protein - potato
  misc_feature (28)..(164): Homolog of NCBI NO: 541968 NR Description: high mobility group protein HMG-1 - garden pea
  misc_feature (28)..(164): Homolog of NCBI NO: 13877775 NR Description: putative HMG protein [Arabidopsis thaliana]
  misc_feature (28)..(164): Homolog of NCBI NO: 11346367 NR Description: high mobility group protein HMG-gamma
  misc_feature (28)..(164): Homolog of NCBI NO: 15227862 NR Description: putative HMG protein
  misc_feature (28)..(164): Homolog of NCBI NO: 21592453 NR Description: putative HMG protein [Arabidopsis thaliana]
GNQLAPTDSVRVTRFTNESSLLFTELEMKGGQSKAEATSTDQRLKTRGRKKKTATKDPNKPKRPPSAFFVFLDDFRREFKEANPNNKSVAAVGKAAGAKWKSMTEEEKAPYASKAETRKSEYNKSMQQYNMKLANGTSRGEDDESKSEVDEAGGASEAEEEDDD

SEQ ID NO: 56079 - protein, 137 aa, Glycine max
  peptide (1)..(137): Ceres Seq. ID no. 12610681
  misc_feature (34)..(103): Pfam Name: HMG (high mobility group) box Pfam Description: HMG (high mobility group) box
  misc_feature (1)..(137): Homolog of NCBI NO: 729736 NR Description: HMG1/2-LIKE PROTEIN
  misc_feature (1)..(137): Homolog of NCBI NO: 1052956 NR Description: high mobility group protein 2 HMG2 [Ipomoea nil]
  misc_feature (1)..(137): Homolog of NCBI NO: 7446213 NR Description: high mobility group protein HMG-1 - common
  misc_feature (1)..(124): Homolog of NCBI NO: 15237040 NR Description: HMG delta protein
  misc_feature (1)..(137): Homolog of NCBI NO: 7446212 NR Description: high mobility group protein - potato
  misc_feature (1)..(137): Homolog of NCBI NO: 541968 NR Description: high mobility group protein HMG-1 - garden pea
  misc_feature (1)..(137): Homolog of NCBI NO: 13877775 NR Description: putative HMG protein [Arabidopsis thaliana]
  misc_feature (1)..(137): Homolog of NCBI NO: 11346367 NR Description: high mobility group protein HMG-gamma
  misc_feature (1)..(137): Homolog of NCBI NO: 15227862 NR Description: putative HMG protein
  misc_feature (1)..(137): Homolog of NCBI NO: 21592453 NR Description: putative HMG protein [Arabidopsis thaliana]
MKGGQSKAEATSTDQRLKTRGRKKKTATKDPNKPKRPPSAFFVFLDDFRREFKEANPNNKSVAAVGKAAGAKWKSMTEEEKAPYASKAETRKSEYNKSMQQYNMKLANGTSRGEDDESKSEVDEAGGASEAEEEDDD

SEQ ID NO: 56080 - DNA, 1128 bp, Glycine max
  misc_feature (1)..(1128): Ceres Seq. ID no. 13595304
atttacctcgtcaggtcctcccaacaccataacttagcaggtaggttcgcttagagttcagccgaggtttctccatcagccaagcgcaatcggactaggaaagtgtactgcgactccggagtgagggataggaaggaggaggaggcttcagccgagacccaagggagaaagatctcgtatcagataggcaactgcagcagtagagttcaacaagcgaagggggaaatggcaattggacagaccatgccgaaggggtctctcgccacgagcttgagcttcccaagcagcggcagcacaaggattctggggaggaagagggtcgctgtttctccggctccaagcccctcaggcccgcactccccggttcggactctgcgcaagcagcgcagcattaggttccacatggacgacaccatctgcctccttgaatcgctgcctcaagatgtattggtcaaagtcctgtgcaaggtgaaccacagcgacctgaggcagctcctcctggtgtcgaagccagtcagcgaagcaacagtggttgctaaggagctgcatttcgccttcgcgacgccctcgaaggcctccgcggatgcggaggaagaagacgatggccccggggcgcccaagcaacacagggttgcacggtcgcgctgccggggcatgaatttggcaagcgtcgccgtcaatctgtcggagtcgttcagcagcttgatgtcagaggtgtaggtgtacataccacggcacgaattttcccgcttgtacttgtccatcggagcgctcttttttcttcataggccacgtcgaacaaactttagttagtgatatatgtagtgatcatcatatgtattagtagtaagttatatatggtcattcttcaatgatgcgattgaagaggacacgctgtcttatttctgtgtactgtatgtaatagtgtaagttatatgtaagcgtctgagtgttggagctcatcaaaagagtatttagtgtaagttwwwtgcaagcgtcagtgttggaactcatgagaagagaagtctcttctcactttgtgtatgctgtagtgtacgatctctgtatactcgtgtgcatgggaagtttctcttatcaataaaagtaaaagcagtttgttntcggtcg

SEQ ID NO: 56081 - protein, 164 aa, Glycine max
  peptide (1)..(164): Ceres Seq. ID no. 15221536
  misc_feature (24)..(116): Homolog of NCBI NO: 18412772 NR Description: F-box protein family [Arabidopsis thaliana]
  misc_feature (1)..(153): Homolog of NCBI NO: 28372904 NR Description: At1g61340 [Arabidopsis thaliana]
  misc_feature (1)..(153): Homolog of NCBI NO: 15219910 NR Description: F-box protein family [Arabidopsis thaliana]
  misc_feature (24)..(153): Homolog of NCBI NO: 18415709 NR Description: F-box protein family [Arabidopsis thaliana]
  misc_feature (24)..(153): Homolog of NCBI NO: 7485710 NR Description: hypothetical protein F18E5.130 - Arabidopsis
  misc_feature (1)..(164): Homolog of NCBI NO: 34393368 NR Description: unknown protein [Oryza sativa (japonica
MAIGQTMPKGSLATSLSFPSSGSTRILGRKRVAVSPAPSPSGPHSPVRTLRKQRSIRFHMDDTICLLESLPQDVLVKVLCKVNHSDLRQLLLVSKPVSEATVVAKELHFAFATPSKASADAEEEDDGPGAPKQHRVARSRCRGMNLASVAVNLSESFSSLMSEV

SEQ ID NO: 56082 - protein, 158 aa, Glycine max
  peptide (1)..(158): Ceres Seq. ID no. 15221537
  misc_feature (18)..(110): Homolog of NCBI NO: 18412772 NR Description: F-box protein family [Arabidopsis thaliana]
  misc_feature (1)..(147): Homolog of NCBI NO: 28372904 NR Description: At1g61340 [Arabidopsis thaliana]
  misc_feature (1)..(147): Homolog of NCBI NO: 15219910 NR Description: F-box protein family [Arabidopsis thaliana]
  misc_feature (18)..(147): Homolog of NCBI NO: 18415709 NR Description: F-box protein family [Arabidopsis thaliana]
  misc_feature (18)..(147): Homolog of NCBI NO: 7485710 NR Description: hypothetical protein F18E5.130 - Arabidopsis
  misc_feature (1)..(158): Homolog of NCBI NO: 34393368 NR Description: unknown protein [Oryza sativa (japonica
MPKGSLATSLSFPSSGSTRILGRKRVAVSPAPSPSGPHSPVRTLRKQRSIRFHMDDTICLLESLPQDVLVKVLCKVNHSDLRQLLLVSKPVSEATVVAKELHFAFATPSKASADAEEEDDGPGAPKQHRVARSRCRGMNLASVAVNLSESFSSLMSEV

SEQ ID NO: 56083 - protein, 105 aa, Glycine max
  peptide (1)..(105): Ceres Seq. ID no. 15221538
  misc_feature (1)..(57): Homolog of NCBI NO: 18412772 NR Description: F-box protein family [Arabidopsis thaliana]
  misc_feature (1)..(94): Homolog of NCBI NO: 28372904 NR Description: At1g61340 [Arabidopsis thaliana]
  misc_feature (1)..(94): Homolog of NCBI NO: 15219910 NR Description: F-box protein family [Arabidopsis thaliana]
  misc_feature (1)..(94): Homolog of NCBI NO: 18415709 NR Description: F-box protein family [Arabidopsis thaliana]
  misc_feature (1)..(94): Homolog of NCBI NO: 7485710 NR Description: hypothetical protein F18E5.130 - Arabidopsis
  misc_feature (1)..(105): Homolog of NCBI NO: 34393368 NR Description: unknown protein [Oryza sativa (japonica
MDDTICLLESLPQDVLVKVLCKVNHSDLRQLLLVSKPVSEATVVAKELHFAFATPSKASADAEEEDDGPGAPKQHRVARSRCRGMNLASVAVNLSESFSSLMSEV

SEQ ID NO: 56084 - DNA, 978 bp, Glycine max
  misc_feature (1)..(978): Ceres Seq. ID no. 13595376
acctagaacatcctaatcgaaaaaaaaaaactccgattccgagtaccataggacccaacggtaaaaggatggcgaccaaagcagccccaccgaccctggtggtctcgcaccattagaatccccttccccaacccaaatcggccgccgccgagccctcgaccgtcaccggagccgccgagccaaccaccgaagcgcctcgaacccctcgtcctcctcctcgtgcctgccatcctccaccggatcggcgcggatcggaggctcccgcgaagcgattcctcctgtcaggcagtcgagatgtcggagtaccagaacgtcgttggggggaggctcaagctgaaggggaaaccgctggatgtcaaggagggcggagtcaagaagaagaataagaagaagcaccgccgcgaggagtcgtctcaaggcgagcacggcgagctccgcgaaggtggaagctctgaattgccaggtgaccctgacaatgagttcagtgaagctgacaagctgggagaggaagggagtgcgcaagccgattatgatcacctcactccagctgagaggcgttacattgaacagaagcagaagatcgacgtacacaagttggccaaggtggctgacaagtcgcacagggaccgcatccaggacttcaaccagtacctcgcaaatcttagtgagcactatgatatcccgaaggtcggccctggttaattaaggtccgcaagtgctccagtgtgctggacctatgcatgtagctcgtcaatttcgcgtgggtgtgctctgaaacaatggatgattgtgttgtcttcagagataaactgagtatctctgcacttataagctgattgcactttatctctgtttaaagaccatgtttaatatacttccaagtgttctgagtaaaaaaaaaaaaaaaaaagcttatcgataccgtcgacctcgagggggggcccgkttaaacmcaataaagttggaacgggagggggg

SEQ ID NO: 56085 - protein, 135 aa, Glycine max
  peptide (1)..(135): Ceres Seq. ID no. 15221565
  misc_feature (68)..(132): Homolog of NCBI NO: 13385950 NR Description: RIKEN cDNA 2510049I19 [Mus musculus]
  misc_feature (68)..(132): Homolog of NCBI NO: 13325257 NR Description: Similar to CG15432 gene product [Homo sapiens]
  misc_feature (68)..(132): Homolog of NCBI NO: 7661696 NR Description: DKFZP586O0120 protein [Homo sapiens]
  misc_feature (68)..(132): Homolog of NCBI NO: 7512937 NR Description: hypothetical protein DKFZp586O0120.1 - human
  misc_feature (8)..(135): Homolog of NCBI NO: 19114925 NR Description: hypothetical protein [Schizosaccharomyces pombe]
  misc_feature (8)..(135): Homolog of NCBI NO: 23509013 NR Description: hypothetical protein, conserved [Plasmodium
  misc_feature (1)..(135): Homolog of NCBI NO: 40746298 NR Description: hypothetical protein AN0678.2 [Aspergillus
  misc_feature (69)..(135): Homolog of NCBI NO: 20269115 NR Description: CGI-144-like protein [Lycopersicon esculentum]
  misc_feature (1)..(135): Homolog of NCBI NO: 18394403 NR Description: expressed protein [Arabidopsis thaliana]
MSEYQNVVGGRLKLKGKPLDVKEGGVKKKNKKKHRREESSQGEHGELREGGSSELPGDPDNEFSEADKLGEEGSAQADYDHLTPAERRYIEQKQKIDVHKLAKVADKSHRDRIQDFNQYLANLSEHYDIPKVGPG

SEQ ID NO: 56086 - protein, 117 aa, Glycine max
  peptide (1)..(117): Ceres Seq. ID no. 15221566
MSRRAESRRRIRRSTAARSRLKASTASSAKVEALNCQVTLTMSSVKLTSWERKGVRKPIMITSLQLRGVTLNRSRRSTYTSWPRWLTSRTGTASRTSTSTSQILVSTMISRRSALVN

SEQ ID NO: 56087 - protein, 76 aa, Glycine max
  peptide (1)..(76): Ceres Seq. ID no. 15221567
MSSVKLTSWERKGVRKPIMITSLQLRGVTLNRSRRSTYTSWPRWLTSRTGTASRTSTSTSQILVSTMISRRSALVN

SEQ ID NO: 56088 - DNA, 809 bp, Glycine max
  misc_feature (1)..(809): Ceres Seq. ID no. 13595377
ccatcccaccacattcaagtcgaagaagctcctcgatctccatcactgcaaccagccacttgagctctgaatctttgaagctcagccagttcgccgcgaccaccgagagcctcaagtttcgccatgtcgagcgccggccagaagcagcagcagcagcagcaggcgaagaagccggcggcggcggaggacgtcgagatcaagaaggtcttctcccgcttcgacacggacggcgacggccggatctcgccgtccgagctggcggccgtgtcgcgcgccatcgcgccgccggccaccgagtccgcgcagggccgcgaggtggcgtccatgatggacgagctcgacaccgaccgcgacggctacgtggacctcggcgagttcgccgccttccacggccgcggccgcgaggagcgcgagctcgacgccgagctgcgcgacgccttcgacgtctacgacatcaacggcgacggccgcatctccgtcgccgagctcagcaaggtcctgagccgcatcggcgagggatgcagcaccgaggagtgcgagaagatgatcgcctccgtcgacgtcgacggcgacggctgcgtcggattcgaggagttcaagaagatgatgaccgccggtgacgccggcgcaccacctcaacccgaagcgatcgccgtgcctgacagcaacaaacccaagaaggagtgatacatgtgcttttgcttgtaaaaaaattgtaatccgagggagcgaattagttgtcagtccctgttggccatagtcttctggtctgaaaaaaaatgggaataaggatcaatgtgcaattgccg

SEQ ID NO: 56089 - protein, 205 aa, Glycine max
  peptide (1)..(205): Ceres Seq. ID no. 13595378
IPPHSSRRSSSISITATSHLSSESLKLSQFAATTESLKFRHVERRPEAAAAAAGEEAGGGGGRRDQEGLLPLRHGRRRPDLAVRAGGRVARHRAAGHRVRAGPRGGVHDGRARHRPRRLRGPRRVRRLPRPRPRGARARRRAARRLRRLRHQRRRPHLRRRAQQGPEPHRRGMQHRGVREDDRLRRRRRRRLRRIRGVQEDDDRR

SEQ ID NO: 56090 - protein, 187 aa, Glycine max
  peptide (1)..(187): Ceres Seq. ID no. 13595379
  misc_feature (64)..(92): Pfam Name: EF hand Pfam Description: EF hand
  misc_feature (13)..(165): Homolog of NCBI NO: 15221781 NR Description: polcalcin (calcium-binding pollen allergen),
  misc_feature (16)..(174): Homolog of NCBI NO: 6901654 NR Description: calcium-binding protein [Olea europaea]
  misc_feature (15)..(164): Homolog of NCBI NO: 15219514 NR Description: calcium-binding protein, putative [Arabidopsis
  misc_feature (17)..(169): Homolog of NCBI NO: 19386815 NR Description: B1147A04.10 [Oryza sativa (japonica
  misc_feature (24)..(162): Homolog of NCBI NO: 18408502 NR Description: calmodulin-related protein, putative [Arabidopsis
  misc_feature (24)..(162): Homolog of NCBI NO: 21618074 NR Description: calmodulin-related protein [Arabidopsis thaliana]
  misc_feature (1)..(164): Homolog of NCBI NO: 15221030 NR Description: calcium-binding protein, putative [Arabidopsis
  misc_feature (8)..(163): Homolog of NCBI NO: 14589311 NR Description: calcium binding protein [Sesbania rostrata]
  misc_feature (24)..(169): Homolog of NCBI NO: 15240340 NR Description: calmodulin-related protein 2, touch-induced
  misc_feature (1)..(169): Homolog of NCBI NO: 34895640 NR Description: OSJNBa0083M16.33 [Oryza sativa (japonica
MSSAGQKQQQQQQAKKPAAAEDVEIKKVFSRFDTDGDGRISPSELAAVSRAIAPPATESAQGREVASMMDELDTDRDGYVDLGEFAAFHGRGREERELDAELRDAFDVYDINGDGRISVAELSKVLSRIGEGCSTEECEKMIASVDVDGDGCVGFEEFKKMMTAGDAGAPPQPEAIAVPDSNKPKKE

SEQ ID NO: 56091 - protein, 120 aa, Glycine max
  peptide (1)..(120): Ceres Seq. ID no. 13595380
  misc_feature (1)..(25): Pfam Name: EF hand Pfam Description: EF hand
  misc_feature (1)..(98): Homolog of NCBI NO: 15221781 NR Description: polcalcin (calcium-binding pollen allergen),
  misc_feature (1)..(107): Homolog of NCBI NO: 6901654 NR Description: calcium-binding protein [Olea europaea]
  misc_feature (1)..(97): Homolog of NCBI NO: 15219514 NR Description: calcium-binding protein, putative [Arabidopsis
  misc_feature (1)..(102): Homolog of NCBI NO: 19386815 NR Description: B1147A04.10 [Oryza sativa (japonica
  misc_feature (1)..(95): Homolog of NCBI NO: 18408502 NR Description: calmodulin-related protein, putative [Arabidopsis
  misc_feature (1)..(95): Homolog of NCBI NO: 21618074 NR Description: calmodulin-related protein [Arabidopsis thaliana]
  misc_feature (1)..(97): Homolog of NCBI NO: 15221030 NR Description: calcium-binding protein, putative [Arabidopsis
  misc_feature (1)..(96): Homolog of NCBI NO: 14589311 NR Description: calcium binding protein [Sesbania rostrata]
  misc_feature (1)..(102): Homolog of NCBI NO: 15240340 NR Description: calmodulin-related protein 2, touch-induced
  misc_feature (1)..(102): Homolog of NCBI NO: 34895640 NR Description: OSJNBa0083M16.33 [Oryza sativa (japonica
MMDELDTDRDGYVDLGEFAAFHGRGREERELDAELRDAFDVYDINGDGRISVAELSKVLSRIGEGCSTEECEKMIASVDVDGDGCVGFEEFKKMMTAGDAGAPPQPEAIAVPDSNKPKKE

SEQ ID NO: 56092 - DNA, 679 bp, Glycine max
  misc_feature (1)..(679): Ceres Seq. ID no. 13595826
acaaccaatcatacaaaaacacacacaacagataaaaagaagaaaatcttcggttgataaaaactatttaaatgaagaggaacggtgaaactaagcggcggaggaacgtggcggaagaggcggagcagggaggaggagatccggcgatgtgggaggatcttgatcggaatttcagacaagtgcaatctgttttggacagaaacagatcacttatccagcaagtcaacgacaatcaccagtcaagaatggcagataacatgtccaagaacgttgctttgatccaagaactcaatggaaacatctctaaggttgcttcgatgtattctgacctcaacaccaatttctcctcggcgtttcacggtggaaagaacggacgcgacggtggtggaactaccggaaccagagctaattaaccaaccctgatcaaattgatctttcttagttggaccggccggtttgaaaatttcgaatcagtcggtttaacatataattttttttttgttgtcacggaacatatgatctaaacctgttatataagttatgttattgcaatgattgtcgttagaataatccgtgggagaaaacccattgtttgggttattttaattatggttttgagtctttttcaacgtgtctctactctactgcaatttctctgataataacaataaatatttag

SEQ ID NO: 56093 - protein, 113 aa, Glycine max
  peptide (1)..(113): Ceres Seq. ID no. 13595827
  misc_feature (23)..(105): Homolog of NCBI NO: 8778455 NR Description: F1L3.15 [Arabidopsis thaliana]
  misc_feature (23)..(105): Homolog of NCBI NO: 25406197 NR Description: hypothetical protein F28P22.18 [imported] -
  misc_feature (23)..(105): Homolog of NCBI NO: 18410139 NR Description: expressed protein [Arabidopsis thaliana]
  misc_feature (20)..(107): Homolog of NCBI NO: 4680201 NR Description: hypothetical protein [Sorghum bicolor]
  misc_feature (20)..(110): Homolog of NCBI NO: 38637104 NR Description: unknown protein [Oryza sativa (japonica
  misc_feature (23)..(111): Homolog of NCBI NO: 18396289 NR Description: expressed protein [Arabidopsis thaliana]
  misc_feature (17)..(107): Homolog of NCBI NO: 4680489 NR Description: hypothetical protein [Oryza sativa]
  misc_feature (23)..(110): Homolog of NCBI NO: 15227672 NR Description: hypothetical protein [Arabidopsis thaliana]
  misc_feature (2)..(113): Homolog of NCBI NO: 34499881 NR Description: early flowering 4 [Mesembryanthemum crystallinum]
  misc_feature (1)..(112): Homolog of NCBI NO: 18405258 NR Description: expressed protein [Arabidopsis thaliana]
MKRNGETKRRRNVAEEAEQGGGDPAMWEDLDRNFRQVQSVLDRNRSLIQQVNDNHQSRMADNMSKNVALIQELNGNISKVASMYSDLNTNFSSAFHGGKNGRDGGGTTGTRAN

SEQ ID NO: 56094 - protein, 88 aa, Glycine max
  peptide (1)..(88): Ceres Seq. ID no. 13595828
  misc_feature (1)..(80): Homolog of NCBI NO: 8778455 NR Description: F1L3.15 [Arabidopsis thaliana]
  misc_feature (1)..(80): Homolog of NCBI NO: 25406197 NR Description: hypothetical protein F28P22.18 [imported] -
  misc_feature (1)..(80): Homolog of NCBI NO: 18410139 NR Description: expressed protein [Arabidopsis thaliana]
  misc_feature (1)..(82): Homolog of NCBI NO: 4680201 NR Description: hypothetical protein [Sorghum bicolor]
  misc_feature (1)..(85): Homolog of NCBI NO: 38637104 NR Description: unknown protein [Oryza sativa (japonica
  misc_feature (1)..(86): Homolog of NCBI NO: 18396289 NR Description: expressed protein [Arabidopsis thaliana]
  misc_feature (1)..(82): Homolog of NCBI NO: 4680489 NR Description: hypothetical protein [Oryza sativa]
  misc_feature (1)..(85): Homolog of NCBI NO: 15227672 NR Description: hypothetical protein [Arabidopsis thaliana]
  misc_feature (1)..(88): Homolog of NCBI NO: 34499881 NR Description: early flowering 4 [Mesembryanthemum crystallinum]
  misc_feature (1)..(87): Homolog of NCBI NO: 18405258 NR Description: expressed protein [Arabidopsis thaliana]
MWEDLDRNFRQVQSVLDRNRSLIQQVNDNHQSRMADNMSKNVALIQELNGNISKVASMYSDLNTNFSSAFHGGKNGRDGGGTTGTRAN

SEQ ID NO: 56095 - DNA, 1010 bp, Glycine max
  misc_feature (1)..(1010): Ceres Seq. ID no. 13595084
cgtcgcctcgtgcgcatcaccacttcaccacaatccccatttcccaaagctcgaccaaagccgtgacactcctcccccacctcgtcccaaaccctagccacccccgccgatcccaatggccgccgcccaccaccggcccctccacgccctcctcggcggcggcgcagtcgccgacctgctcctctggaggcggaggaacgcctccgcggcggccgtcgcgggcgccacgctcgtctggttcctcttcgagcgcgccgggtacagcctcgcgtcggtcctctccaacgccctcctcctcctcgtcgtcatcctcttcttctgggccaagtccgcctcgctgctcaacagacctcttccaccactgcctaatctagaggtctcagatggggtcgttgagaaagttgtaggtcgggctcttgtatggataaacaaggtgttggctgttgcccatgacattgccatcaagagagaccggacagtttttatacaggttataatggctctatgggtggtttcatgtattgggatgctcttcaacttctttacgctcatttacattggtgtactactcgctctgttggttcccccggtatatgagaggcaccaggatgttattgatgaaaaggttggtttagcacacagcatactgtcaaggcagttgagtaccgtcgctagcaagacagggcaaccacctaaacaaaagaaggctgagtagaagaaatattttggcccatttggaagctctccagttgttctactatgttacaaacaccgtgatccatccaccgctgagagtatttctggatatccagggcataatgtttaactgctgatacgtgggtttagatgcacgctcttcaatctgggaagtggaatgatttgtatattgtttccatgaacatgaaacttgtcgaggtttaccatgggcacatcttgtggataatgctgtatacctttctctacgtgcgatgttgtgtcttgcatgtacaaatgcggtgcttgctcgtgtc

SEQ ID NO: 56096 - protein, 199 aa, Glycine max
  peptide (1)..(199): Ceres Seq. ID no. 13595085
  misc_feature (17)..(185): Homolog of NCBI NO: 30681541 NR Description: reticulon family [Arabidopsis thaliana]
  misc_feature (1)..(181): Homolog of NCBI NO: 18406991 NR Description: expressed protein [Arabidopsis thaliana]
  misc_feature (8)..(168): Homolog of NCBI NO: 34904202 NR Description: P0492F05.25 [Oryza sativa (japonica
  misc_feature (9)..(185): Homolog of NCBI NO: 26450318 NR Description: unknown protein [Arabidopsis thaliana]
  misc_feature (7)..(167): Homolog of NCBI NO: 15232423 NR Description: expressed protein [Arabidopsis thaliana]
  misc_feature (23)..(181): Homolog of NCBI NO: 25411624 NR Description: hypothetical protein At2g15280 [imported] -
  misc_feature (9)..(181): Homolog of NCBI NO: 30679374 NR Description: expressed protein [Arabidopsis thaliana]
  misc_feature (9)..(197): Homolog of NCBI NO: 21593206 NR Description: unknown [Arabidopsis thaliana]
  misc_feature (9)..(197): Homolog of NCBI NO: 18402246 NR Description: expressed protein [Arabidopsis thaliana]
  misc_feature (1)..(199): Homolog of NCBI NO: 38345298 NR Description: OSJNBa0043A12.26 [Oryza sativa (japonica
MAAAHHRPLHALLGGGAVADLLLWRRRNASAAAVAGATLVWFLFERAGYSLASVLSNALLLLVVILFFWAKSASLLNRPLPPLPNLEVSDGVVEKVVGRALVWINKVLAVAHDIAIKRDRTVFIQVIMALWVVSCIGMLFNFFTLIYIGVLLALLVPPVYERHQDVIDEKVGLAHSILSRQLSTVASKTGQPPKQKKAE

SEQ ID NO: 56097 - protein, 123 aa, Glycine max
  peptide (1)..(123): Ceres Seq. ID no. 13595086
  misc_feature (3)..(117): Pfam Name: Herpes virus major outer envelope glycoprotein (BLLF1) Pfam Description: Herpes virus major outer envelope glycoprotein
  misc_feature (1)..(109): Homolog of NCBI NO: 32699068 NR Description: hypothetical protein FLJ35107 [Homo sapiens]
SPRAHHHFTTIPISQSSTKAVTLLPHLVPNPSHPRRSQWPPPTTGPSTPSSAAAQSPTCSSGGGGTPPRRPSRAPRSSGSSSSAPGTASRRSSPTPSSSSSSSSSSGPSPPRCSTDLFHHCLI

SEQ ID NO: 56098 - DNA, 654 bp, Glycine max
  misc_feature (1)..(654): Ceres Seq. ID no. 13638986
actgttctctaatctaaatctaatttcacctttcctacaaaacctaaaacctttttcttattacacaacctaaaagtctctaagtttctgacaatgtcggaagagttcgacgaatctgagatcattttctccgacagcttcttcccaattcgccgccgcgaggacgtgatcgagaaagagaatcgtccggttaatttccgagaaaactccgaaagcagaatgagaaacacatcgaggctgagtaaaacgacgccgttgccttcaccggcggttttctcatcgtcgcttccagtgaatattccgggaaggaggtattctgaggatgaggaatattcggaagacggaggaaggagaatggttccgccgcatctgatcgttggacggaggatcgaaagcggtcaaatggcgttttccgtttgtacaggtcagggaaggactcttaaaggccgagatctgagccgggttcgtaattcggttctcaggttaaccggttttttggaggcttaaatatggaccggtttttgatttattaaaaaaattcgtcttccaatttttttttttatttagcggaagaaatcagttgtctgatattgttgttagtttagtcacttgaacgaatgtcaaaaggaaaatgtcaaaaagaacatttatttc

SEQ ID NO: 56099 - protein, 137 aa, Glycine max
  peptide (1)..(137): Ceres Seq. ID no. 13638987
  misc_feature (1)..(136): Pfam Name: Protein of unknown function, DUF584 Pfam Description: Protein of unknown function, DUF584
  misc_feature (6)..(136): Homolog of NCBI NO: 15230636 NR Description: expressed protein [Arabidopsis thaliana]
  misc_feature (62)..(133): Homolog of NCBI NO: 34910794 NR Description: P0042A10.26 [Oryza sativa (japonica
  misc_feature (75)..(136): Homolog of NCBI NO: 25354620 NR Description: hypothetical protein AT4g04630 [imported] -
  misc_feature (75)..(136): Homolog of NCBI NO: 26452217 NR Description: unknown protein [Arabidopsis thaliana]
  misc_feature (75)..(136): Homolog of NCBI NO: 18412629 NR Description: expressed protein [Arabidopsis thaliana]
  misc_feature (27)..(136): Homolog of NCBI NO: 30684599 NR Description: expressed protein [Arabidopsis thaliana]
  misc_feature (1)..(136): Homolog of NCBI NO: 7485420 NR Description: hypothetical protein F13C5.150 - Arabidopsis
  misc_feature (52)..(137): Homolog of NCBI NO: 34910798 NR Description: P0042A10.28 [Oryza sativa (japonica
  misc_feature (1)..(137): Homolog of NCBI NO: 18403527 NR Description: expressed protein [Arabidopsis thaliana]
  misc_feature (1)..(137): Homolog of NCBI NO: 15220508 NR Description: expressed protein [Arabidopsis thaliana]
MSEEFDESEIIFSDSFFPIRRREDVIEKENRPVNFRENSESRMRNTSRLSKTTPLPSPAVFSSSLPVNIPGRRYSEDEEYSEDGGRRMVPPHLIVGRRIESGQMAFSVCTGQGRTLKGRDLSRVRNSVLRLTGFLEA

SEQ ID NO: 56100 - protein, 95 aa, Glycine max
  peptide (1)..(95): Ceres Seq. ID no. 13638988
  misc_feature (1)..(94): Pfam Name: Protein of unknown function, DUF584 Pfam Description: Protein of unknown function, DUF584
  misc_feature (1)..(94): Homolog of NCBI NO: 15230636 NR Description: expressed protein [Arabidopsis thaliana]
  misc_feature (20)..(91): Homolog of NCBI NO: 34910794 NR Description: P0042A10.26 [Oryza sativa (japonica
  misc_feature (33)..(94): Homolog of NCBI NO: 25354620 NR Description: hypothetical protein AT4g04630 [imported] -
  misc_feature (33)..(94): Homolog of NCBI NO: 26452217 NR Description: unknown protein [Arabidopsis thaliana]
  misc_feature (33)..(94): Homolog of NCBI NO: 18412629 NR Description: expressed protein [Arabidopsis thaliana]
  misc_feature (1)..(94): Homolog of NCBI NO: 30684599 NR Description: expressed protein [Arabidopsis thaliana]
  misc_feature (1)..(94): Homolog of NCBI NO: 7485420 NR Description: hypothetical protein F13C5.150 - Arabidopsis
  misc_feature (10)..(95): Homolog of NCBI NO: 34910798 NR Description: P0042A10.28 [Oryza sativa (japonica
  misc_feature (1)..(95): Homolog of NCBI NO: 18403527 NR Description: expressed protein [Arabidopsis thaliana]
  misc_feature (1)..(95): Homolog of NCBI NO: 15220508 NR Description: expressed protein [Arabidopsis thaliana]
MRNTSRLSKTTPLPSPAVFSSSLPVNIPGRRYSEDEEYSEDGGRRMVPPHLIVGRRIESGQMAFSVCTGQGRTLKGRDLSRVRNSVLRLTGFLEA

SEQ ID NO: 56101 - DNA, 1165 bp, Glycine max
  misc_feature (1)..(1165): Ceres Seq. ID no. 12611235
agagcgagggcgaccaataaattcctaatttttcccacttttccaccccgggattccccgcctcttgttccaatcgattggtgggcgtcctcgttcttggcttcccgattgaatccgtgggaagccagagataattctctctccgctgcgaatttttttttggtggtttgagttcttgatttgtttgcgaggaagccatcatgagcgccggaagcgccagtttcctcgagatccagccctcggagctggcatttccctttgaattgatgaagcagagctcgtgctccatgcaactcgcaaataagaccgaccgttatgtagcattcaaggtcaaaactaccaacccaaagcagtactgtgtgcgccctaatatcggcgttgtacttcctgggtcgacttgtgatgttacagttacaatgcaagcgcagagggaagcacctgctgatctgcagtgtaaggacaagttcctagttcaaagtgttgcagctgagaatggcgcagcaactcaagatattagtgcagcaatgttcaacaaagagccagggaaggttgttgatgaatgcaagctgcgtgtaatttatgtgccaacatcttcacctagcccgttctctgaagattcagaacaagggagttctgctcgttcattggaaaacgggacccctaattctacattgccacaatctgtatttagatcatctggtgaagcatcaaaggataagtcctcggaggcgacgtccatgatttccaagctaactgaggagaaaatgtctgctgttcagcaaaaccagaagttgagacaagagctggatgtcctacgcaaagagagcagcaaaagcaacggcggtttctcaatcaccttcttgattgtggtgggtattctgggcatcatcgctggtttcatcctcaagaagacataggagaagagtagtccccaacaaagttacattcccaggaaaggacggataccagcaacatcccttgtgtttttactcctaaaaggagcgcctgttctattctaacttgtaacggcttagaagctttggtttgtgtacattacatggtggttttcatgattttaatcacatcgagtagacttgttttaattataattcttaacagctgcaagttatgtcacgttcaccataacctttaattcattctggtc

SEQ ID NO: 56102 - protein, 238 aa, Glycine max
  peptide (1)..(238): Ceres Seq. ID no. 12611236
  misc_feature (176)..(237): Homolog of NCBI NO: 37535894 NR Description: putative vesicle-associated membrane protein
  misc_feature (3)..(184): Homolog of NCBI NO: 37535894 NR Description: putative vesicle-associated membrane protein
  misc_feature (5)..(202): Homolog of NCBI NO: 7486542 NR Description: hypothetical protein F6N15.21 - Arabidopsis
  misc_feature (1)..(238): Homolog of NCBI NO: 11288305 NR Description: hypothetical protein T4C21.10 - Arabidopsis
  misc_feature (5)..(238): Homolog of NCBI NO: 21554053 NR Description: putative VAMP-associated protein [Arabidopsis
  misc_feature (1)..(238): Homolog of NCBI NO: 18411661 NR Description: putative protein
  misc_feature (5)..(238): Homolog of NCBI NO: 15225415 NR Description: putative VAMP-associated protein
  misc_feature (5)..(237): Homolog of NCBI NO: 21592874 NR Description: putative proline-rich protein [Arabidopsis
  misc_feature (5)..(237): Homolog of NCBI NO: 18411240 NR Description: putative proline-rich protein
  misc_feature (1)..(238): Homolog of NCBI NO: 11288307 NR Description: 27k vesicle-associated membrane
MSAGSASFLEIQPSELAFPFELMKQSSCSMQLANKTDRYVAFKVKTTNPKQYCVRPNIGVVLPGSTCDVTVTMQAQREAPADLQCKDKFLVQSVAAENGAATQDISAAMFNKEPGKVVDECKLRVIYVPTSSPSPFSEDSEQGSSARSLENGTPNSTLPQSVFRSSGEASKDKSSEATSMISKLTEEKMSAVQQNQKLRQELDVLRKESSKSNGGFSITFLIVVGILGIIAGFILKKT

SEQ ID NO: 56103 - protein, 216 aa, Glycine max
  peptide (1)..(216): Ceres Seq. ID no. 12611237
  misc_feature (154)..(215): Homolog of NCBI NO: 37535894 NR Description: putative vesicle-associated membrane protein
  misc_feature (1)..(162): Homolog of NCBI NO: 37535894 NR Description: putative vesicle-associated membrane protein
  misc_feature (1)..(180): Homolog of NCBI NO: 7486542 NR Description: hypothetical protein F6N15.21 - Arabidopsis
  misc_feature (1)..(216): Homolog of NCBI NO: 11288305 NR Description: hypothetical protein T4C21.10 - Arabidopsis
  misc_feature (1)..(216): Homolog of NCBI NO: 21554053 NR Description: putative VAMP-associated protein [Arabidopsis
  misc_feature (1)..(216): Homolog of NCBI NO: 18411661 NR Description: putative protein
  misc_feature (1)..(216): Homolog of NCBI NO: 15225415 NR Description: putative VAMP-associated protein
  misc_feature (1)..(215): Homolog of NCBI NO: 21592874 NR Description: putative proline-rich protein [Arabidopsis
  misc_feature (1)..(215): Homolog of NCBI NO: 18411240 NR Description: putative proline-rich protein
  misc_feature (1)..(216): Homolog of NCBI NO: 11288307 NR Description: 27k vesicle-associated membrane
MKQSSCSMQLANKTDRYVAFKVKTTNPKQYCVRPNIGVVLPGSTCDVTVTMQAQREAPADLQCKDKFLVQSVAAENGAATQDISAAMFNKEPGKVVDECKLRVIYVPTSSPSPFSEDSEQGSSARSLENGTPNSTLPQSVFRSSGEASKDKSSEATSMISKLTEEKMSAVQQNQKLRQELDVLRKESSKSNGGFSITFLIVVGILGIIAGFILKKT

SEQ ID NO: 56104 - protein, 209 aa, Glycine max
  peptide (1)..(209): Ceres Seq. ID no. 12611238
  misc_feature (147)..(208): Homolog of NCBI NO: 37535894 NR Description: putative vesicle-associated membrane protein
  misc_feature (1)..(155): Homolog of NCBI NO: 37535894 NR Description: putative vesicle-associated membrane protein
  misc_feature (1)..(173): Homolog of NCBI NO: 7486542 NR Description: hypothetical protein F6N15.21 - Arabidopsis
  misc_feature (1)..(209): Homolog of NCBI NO: 11288305 NR Description: hypothetical protein T4C21.10 - Arabidopsis
  misc_feature (1)..(209): Homolog of NCBI NO: 21554053 NR Description: putative VAMP-associated protein [Arabidopsis
  misc_feature (1)..(209): Homolog of NCBI NO: 18411661 NR Description: putative protein
  misc_feature (1)..(209): Homolog of NCBI NO: 15225415 NR Description: putative VAMP-associated protein
  misc_feature (1)..(208): Homolog of NCBI NO: 21592874 NR Description: putative proline-rich protein [Arabidopsis
  misc_feature (1)..(208): Homolog of NCBI NO: 18411240 NR Description: putative proline-rich protein
  misc_feature (1)..(209): Homolog of NCBI NO: 11288307 NR Description: 27k vesicle-associated membrane
MQLANKTDRYVAFKVKTTNPKQYCVRPNIGVVLPGSTCDVTVTMQAQREAPADLQCKDKFLVQSVAAENGAATQDISAAMFNKEPGKVVDECKLRVIYVPTSSPSPFSEDSEQGSSARSLENGTPNSTLPQSVFRSSGEASKDKSSEATSMISKLTEEKMSAVQQNQKLRQELDVLRKESSKSNGGFSITFLIVVGILGIIAGFILKKT

SEQ ID NO: 56105 - DNA, 750 bp, Glycine max
  misc_feature (1)..(750): Ceres Seq. ID no. 13639786
accggtaaagtaactagtggcaagtggtactgtaaaacatcacatcgtcgcaccgtgacggtgttcggccgagccggtcgatcgacacggcagccagcatgaaggcgtcctgcttactggtcgtgcttctgctcgccgtcgccacggggagcaggctctcgctcgccgcccgcgagggcagcaccctgggcggcgagctcggcgagctcatcgccaaggccggcagcttcctcacgtcggcgcgccgcgcgggagcagacggctggcactccgccacggccgcggaggtggacgcctcggcgaagaaggggcacggccatccggcggggccgaggaagcgtctgaagaagtcgtcggtgaactgcatcccggccgacatgtgccggaagaagaaggtgctgtgcggcaagcggtgctacaagacgtcgcacgctgccggcgccggcctcgaccacgtcccctccaaccggtgcgtcgtcaggtgcaagaagtgcgtgcccacctgctagatcgatcgttggttgctcctacccttccctcttctgggttacgtgtcgtgtcgtgtcgtggtgctcgatccgtgcatgctagctacatttgcttttccttccatagggttcatgcatcagttgaataagcaggcgggcttcccgccatcatgcatgcagtataggtagtggatgggttctactctaaaagaaatgcaccacggttgtgtgctaagtttgaacgtgatctcatctcatcttt

SEQ ID NO: 56106 - protein, 136 aa, Glycine max
  peptide (1)..(136): Ceres Seq. ID no. 13639787
  misc_feature (1)..(136): Homolog of NCBI NO: 21742079 NR Description: OSJNBa0074L08.2 [Oryza sativa (japonica
MKASCLLVVLLLAVATGSRLSLAAREGSTLGGELGELIAKAGSFLTSARRAGADGWHSATAAEVDASAKKGHGHPAGPRKRLKKSSVNCIPADMCRKKKVLCGKRCYKTSHAAGAGLDHVPSNRCVVRCKKCVPTC

SEQ ID NO: 56107 - DNA, 1003 bp, Glycine max
  misc_feature (1)..(1003): Ceres Seq. ID no. 13504028
ttgacaatgtgaaatccatataatgtagtgcttgatttgggatgcttgttattgttattccatactgaaaaggtgtgtccttgtggttaactttcattaactatgttgctattgccagatgaattgaagccttctaatgtgggtcttgaacaagaggcgcaattggtgcgtggatggaaaggttctttgaatggcaccaatggcaaaaaggggcgcaatggaagttatcagtatccaccctccattaagtacattcacttgcatgaatgtgacaaattctctatgggaatcttctgtatgtctcctggttccgttattccgcttcataaccatcccggaatgactgttttgagcaagcttctttatggttcattacttgtgaggtcatatgattggctggatttacctgggccagatgatccatctcaagctagaccagcaaaacttgtgaaagattgtcagatgagtgccccctgtaacaccacagttctttatccaagcaagggtggcaacattcattgtttcaaagccttaaccccttgcgctctctttgacgttctttcccctccttactcatcagaagatggaagacactgctcatatttcaggaagtcaactaggaaagatcttccaggtgttgagcttgatcagctgagtggtgtaaagccatctgaaataacctggctagaagagatccaagcacctgaaaacctggtggttagaagaggtgtttacaaaggccctactataagacgatgaaggatacaactaatttgtatttacataacattagccaggcatgactagaaactaaatatgatggggatataaattaaaggtggtatatcttgggaataattgaccatctgctttatatgattgttaactgtacatactgtgataaatgatggcagttaatgttgatcatgccttgtgtatccttgttctaactagcccctttttagattattagaggaatagcaccaacatggtgatctttggc

SEQ ID NO: 56108 - protein, 218 aa, Glycine max
  peptide (1)..(218): Ceres Seq. ID no. 13504029
  misc_feature (6)..(217): Homolog of NCBI NO: 10176982 NR Description: contains similarity to unknown
  misc_feature (6)..(217): Homolog of NCBI NO: 15451150 NR Description: Unknown protein [Arabidopsis thaliana]
  misc_feature (6)..(217): Homolog of NCBI NO: 18394617 NR Description: expressed protein [Arabidopsis thaliana]
  misc_feature (10)..(216): Homolog of NCBI NO: 34906308 NR Description: unnamed protein product [Oryza sativa (japonica
  misc_feature (6)..(216): Homolog of NCBI NO: 15242218 NR Description: expressed protein [Arabidopsis thaliana]
  misc_feature (4)..(218): Homolog of NCBI NO: 38345647 NR Description: OSJNBb0040D15.1 [Oryza sativa (japonica
  misc_feature (6)..(217): Homolog of NCBI NO: 21536850 NR Description: unknown [Arabidopsis thaliana]
  misc_feature (6)..(217): Homolog of NCBI NO: 25370572 NR Description: hypothetical protein At2g42670 [imported] -
  misc_feature (6)..(218): Homolog of NCBI NO: 15231104 NR Description: expressed protein [Arabidopsis thaliana]
  misc_feature (6)..(217): Homolog of NCBI NO: 18406030 NR Description: expressed protein [Arabidopsis thaliana]
MLLLPDELKPSNVGLEQEAQLVRGWKGSLNGTNGKKGRNGSYQYPPSIKYIHLHECDKFSMGIFCMSPGSVIPLHNHPGMTVLSKLLYGSLLVRSYDWLDLPGPDDPSQARPAKLVKDCQMSAPCNTTVLYPSKGGNIHCFKALTPCALFDVLSPPYSSEDGRHCSYFRKSTRKDLPGVELDQLSGVKPSEITWLEEIQAPENLVVRRGVYKGPTIRR

SEQ ID NO: 56109 - protein, 158 aa, Glycine max
  peptide (1)..(158): Ceres Seq. ID no. 13504030
  misc_feature (1)..(157): Homolog of NCBI NO: 10176982 NR Description: contains similarity to unknown
  misc_feature (1)..(157): Homolog of NCBI NO: 15451150 NR Description: Unknown protein [Arabidopsis thaliana]
  misc_feature (1)..(157): Homolog of NCBI NO: 18394617 NR Description: expressed protein [Arabidopsis thaliana]
  misc_feature (1)..(156): Homolog of NCBI NO: 34906308 NR Description: unnamed protein product [Oryza sativa (japonica
  misc_feature (1)..(156): Homolog of NCBI NO: 15242218 NR Description: expressed protein [Arabidopsis thaliana]
  misc_feature (1)..(158): Homolog of NCBI NO: 38345647 NR Description: OSJNBb0040D15.1 [Oryza sativa (japonica
  misc_feature (1)..(157): Homolog of NCBI NO: 21536850 NR Description: unknown [Arabidopsis thaliana]
  misc_feature (1)..(157): Homolog of NCBI NO: 25370572 NR Description: hypothetical protein At2g42670 [imported] -
  misc_feature (1)..(158): Homolog of NCBI NO: 15231104 NR Description: expressed protein [Arabidopsis thaliana]
  misc_feature (1)..(157): Homolog of NCBI NO: 18406030 NR Description: expressed protein [Arabidopsis thaliana]
MGIFCMSPGSVIPLHNHPGMTVLSKLLYGSLLVRSYDWLDLPGPDDPSQARPAKLVKDCQMSAPCNTTVLYPSKGGNIHCFKALTPCALFDVLSPPYSSEDGRHCSYFRKSTRKDLPGVELDQLSGVKPSEITWLEEIQAPENLVVRRGVYKGPTIRR

SEQ ID NO: 56110 - protein, 153 aa, Glycine max
  peptide (1)..(153): Ceres Seq. ID no. 13504031
  misc_feature (1)..(152): Homolog of NCBI NO: 10176982 NR Description: contains similarity to unknown
  misc_feature (1)..(152): Homolog of NCBI NO: 15451150 NR Description: Unknown protein [Arabidopsis thaliana]
  misc_feature (1)..(152): Homolog of NCBI NO: 18394617 NR Description: expressed protein [Arabidopsis thaliana]
  misc_feature (1)..(151): Homolog of NCBI NO: 34906308 NR Description: unnamed protein product [Oryza sativa (japonica
  misc_feature (1)..(151): Homolog of NCBI NO: 15242218 NR Description: expressed protein [Arabidopsis thaliana]
  misc_feature (1)..(153): Homolog of NCBI NO: 38345647 NR Description: OSJNBb0040D15.1 [Oryza sativa (japonica
  misc_feature (1)..(152): Homolog of NCBI NO: 21536850 NR Description: unknown [Arabidopsis thaliana]
  misc_feature (1)..(152): Homolog of NCBI NO: 25370572 NR Description: hypothetical protein At2g42670 [imported] -
  misc_feature (1)..(153): Homolog of NCBI NO: 15231104 NR Description: expressed protein [Arabidopsis thaliana]
  misc_feature (1)..(152): Homolog of NCBI NO: 18406030 NR Description: expressed protein [Arabidopsis thaliana]
MSPGSVIPLHNHPGMTVLSKLLYGSLLVRSYDWLDLPGPDDPSQARPAKLVKDCQMSAPCNTTVLYPSKGGNIHCFKALTPCALFDVLSPPYSSEDGRHCSYFRKSTRKDLPGVELDQLSGVKPSEITWLEEIQAPENLVVRRGVYKGPTIRR

SEQ ID NO: 56111 - DNA, 794 bp, Glycine max
  misc_feature (1)..(794): Ceres Seq. ID no. 12583773
gacacgaaacacgcagaagtgttgtggcattcggtagataaaaatctctcgaaacataggcttataaaatgccaaagattgggccattttggtaatttcatgttacaagatatgttttctgcgttccccttttgcctatataaatgctagtatgtagagtgagcaagtcactaactcaattagaattcttcaaaaaactctagaatttgcatgcactgttcttcatacaatggcattacgcgagcttattgtgatggggttattgctgctggtttgtcttgcaaaggtttcatctgatgttaacatagaaaaggagcaagatgaagaatttcgctttcctgttgaccatcttatcgtgagaggcgggaacagaaggctaatgcaggacatagattgtggaggattgtgcaagacaaggtgcagtgcccattcaaggccaaatgtgtgcaacagggcttgtggcacatgttgtgtgaggtgcaagtgtgttccacctggaacttccggcaacagggagctttgtgggacctgctatactgatatgaccacccatggtaacaagaccaagtgcccgtaaagcccatagaaggtgagccctatccaattgggcccttcacacacctagctaatcacaccaagcaaagctagcatagtttagtaaataataaatgtgttatctacacttttgtagatttggatttgtcatctttaagatgtgttctagtttttatctttgttataaaggtatggtactatatgaatcaagtatataaactttgcgcttagattactcc

SEQ ID NO: 56112 - protein, 115 aa, Glycine max
  peptide (1)..(115): Ceres Seq. ID no. 12583774
  misc_feature (39)..(115): Pfam Name: Gibberellin regulated protein Pfam Description: Gibberellin regulated protein
  misc_feature (1)..(115): Homolog of NCBI NO: 15219934 NR Description: putative gibberellin-regulated protein; protein
  misc_feature (1)..(115): Homolog of NCBI NO: 15233952 NR Description: gibberellin-regulated protein GASA3 precursor
  misc_feature (54)..(115): Homolog of NCBI NO: 21592790 NR Description: unknown [Arabidopsis thaliana]
  misc_feature (54)..(115): Homolog of NCBI NO: 15242165 NR Description: putative protein
  misc_feature (39)..(115): Homolog of NCBI NO: 3094012 NR Description: cold-regulated LTCOR12 [Lavatera thuringiaca]
  misc_feature (54)..(115): Homolog of NCBI NO: 5102600 NR Description: GEG protein [Gerbera hybrid cultivar]
  misc_feature (54)..(115): Homolog of NCBI NO: 14625943 NR Description: snakin2 [Solanum tuberosum]
  misc_feature (39)..(115): Homolog of NCBI NO: 2792297 NR Description: GAST-like gene product [Fragaria x ananassa]
  misc_feature (54)..(115): Homolog of NCBI NO: 14625945 NR Description: snakin2 [Solanum tuberosum]
  misc_feature (39)..(115): Homolog of NCBI NO: 2253442 NR Description: LTCOR11 [Lavatera thuringiaca]
MALRELIVMGLLLLVCLAKVSSDVNIEKEQDEEFRFPVDHLIVRGGNRRLMQDIDCGGLCKTRCSAHSRPNVCNRACGTCCVRCKCVPPGTSGNRELCGTCYTDMTTHGNKTKCP

SEQ ID NO: 56113 - protein, 107 aa, Glycine max
  peptide (1)..(107): Ceres Seq. ID no. 12583775
  misc_feature (31)..(107): Pfam Name: Gibberellin regulated protein Pfam Description: Gibberellin regulated protein
  misc_feature (1)..(107): Homolog of NCBI NO: 15219934 NR Description: putative gibberellin-regulated protein; protein
  misc_feature (1)..(107): Homolog of NCBI NO: 15233952 NR Description: gibberellin-regulated protein GASA3 precursor
  misc_feature (46)..(107): Homolog of NCBI NO: 21592790 NR Description: unknown [Arabidopsis thaliana]
  misc_feature (46)..(107): Homolog of NCBI NO: 15242165 NR Description: putative protein
  misc_feature (31)..(107): Homolog of NCBI NO: 3094012 NR Description: cold-regulated LTCOR12 [Lavatera thuringiaca]
  misc_feature (46)..(107): Homolog of NCBI NO: 5102600 NR Description: GEG protein [Gerbera hybrid cultivar]
  misc_feature (46)..(107): Homolog of NCBI NO: 14625943 NR Description: snakin2 [Solanum tuberosum]
  misc_feature (31)..(107): Homolog of NCBI NO: 2792297 NR Description: GAST-like gene product [Fragaria x ananassa]
  misc_feature (46)..(107): Homolog of NCBI NO: 14625945 NR Description: snakin2 [Solanum tuberosum]
  misc_feature (31)..(107): Homolog of NCBI NO: 2253442 NR Description: LTCOR11 [Lavatera thuringiaca]
MGLLLLVCLAKVSSDVNIEKEQDEEFRFPVDHLIVRGGNRRLMQDIDCGGLCKTRCSAHSRPNVCNRACGTCCVRCKCVPPGTSGNRELCGTCYTDMTTHGNKTKCP

SEQ ID NO: 56114 - protein, 65 aa, Glycine max
  peptide (1)..(65): Ceres Seq. ID no. 12583776
  misc_feature (1)..(65): Pfam Name: Gibberellin regulated protein Pfam Description: Gibberellin regulated protein
  misc_feature (1)..(65): Homolog of NCBI NO: 15219934 NR Description: putative gibberellin-regulated protein; protein
  misc_feature (1)..(65): Homolog of NCBI NO: 15233952 NR Description: gibberellin-regulated protein GASA3 precursor
  misc_feature (4)..(65): Homolog of NCBI NO: 21592790 NR Description: unknown [Arabidopsis thaliana]
  misc_feature (4)..(65): Homolog of NCBI NO: 15242165 NR Description: putative protein
  misc_feature (1)..(65): Homolog of NCBI NO: 3094012 NR Description: cold-regulated LTCOR12 [Lavatera thuringiaca]
  misc_feature (4)..(65): Homolog of NCBI NO: 5102600 NR Description: GEG protein [Gerbera hybrid cultivar]
  misc_feature (4)..(65): Homolog of NCBI NO: 14625943 NR Description: snakin2 [Solanum tuberosum]
  misc_feature (1)..(65): Homolog of NCBI NO: 2792297 NR Description: GAST-like gene product [Fragaria x ananassa]
  misc_feature (4)..(65): Homolog of NCBI NO: 14625945 NR Description: snakin2 [Solanum tuberosum]
  misc_feature (1)..(65): Homolog of NCBI NO: 2253442 NR Description: LTCOR11 [Lavatera thuringiaca]
MQDIDCGGLCKTRCSAHSRPNVCNRACGTCCVRCKCVPPGTSGNRELCGTCYTDMTTHGNKTKCP

SEQ ID NO: 56115 - DNA, 633 bp, Glycine max
  misc_feature (1)..(633): Ceres Seq. ID no. 12610457
tgtggctgagaattaattattattatcaattatgggtctctcaaatttcccaagtgcatctgaaggggtgctacctgcttgtgataaacacggttctctcagtggcagtgttgaagaacatgtttagatccatgctccaagtagtacttggtggcagtgctgctgctaatggttcaaacattgaacatgatgaaagttcatcatcatcatgggaaaggagggtgtcaataactcagtacaagtcattgtgccacagccacgacataggaggaacaagtatggctatggtggagtgctgcgtttgtttgtgtcgttttgaagccaatcaagaggtcagtgatttgccttgcaagcattacttccacagaggttgcttggacaaatggtttgataacaaacacaccacttgtcccttgtgccgttccatcgactagacatgcagacatatacatacaaaggttgattaattaccattagagatatagctagctagttaattagttgttgctatatactgttaactggttatagtgaaaagaatcaatgcctcttttcatttctttactttagatttgtaaaactccttcaaccaactcagtttctctttgttttagtttttatggaacgtaagag

SEQ ID NO: 56116 - protein, 143 aa, Glycine max
  peptide (1)..(143): Ceres Seq. ID no. 12610458
  misc_feature (98)..(139): Pfam Name: Zinc finger, C3HC4 type (RING finger) Pfam Description: Zinc finger, C3HC4 type (RING finger)
  misc_feature (93)..(140): Homolog of NCBI NO: 7487667 NR Description: hypothetical protein T5C23.110 - Arabidopsis
  misc_feature (88)..(140): Homolog of NCBI NO: 37534730 NR Description: putative RING zinc finger protein
  misc_feature (97)..(140): Homolog of NCBI NO: 33146524 NR Description: putative RES protein [Oryza sativa (japonica
  misc_feature (98)..(141): Homolog of NCBI NO: 15233117 NR Description: RING finger protein
  misc_feature (57)..(140): Homolog of NCBI NO: 29477113 NR Description: Similar to hypothetical protein LOC51255 [Danio
  misc_feature (48)..(140): Homolog of NCBI NO: 34903102 NR Description: unnamed protein product [Oryza sativa (japonica
  misc_feature (10)..(140): Homolog of NCBI NO: 15239242 NR Description: putative protein; protein id: At5g66070.1
  misc_feature (23)..(141): Homolog of NCBI NO: 15228108 NR Description: putative RING zinc finger protein
  misc_feature (23)..(141): Homolog of NCBI NO: 20340241 NR Description: putative RING zinc finger protein-like protein
  misc_feature (25)..(142): Homolog of NCBI NO: 25403249 NR Description: protein F21J9.24 [imported] - Arabidopsis
WLRINYYYQLWVSQISQVHLKGCYLLVINTVLSVAVLKNMFRSMLQVVLGGSAAANGSNIEHDESSSSSWERRVSITQYKSLCHSHDIGGTSMAMVECCVCLCRFEANQEVSDLPCKHYFHRGCLDKWFDNKHTTCPLCRSID

SEQ ID NO: 56117 - protein, 104 aa, Glycine max
  peptide (1)..(104): Ceres Seq. ID no. 12610459
  misc_feature (59)..(100): Pfam Name: Zinc finger, C3HC4 type (RING finger) Pfam Description: Zinc finger, C3HC4 type (RING finger)
  misc_feature (54)..(101): Homolog of NCBI NO: 7487667 NR Description: hypothetical protein T5C23.110 - Arabidopsis
  misc_feature (49)..(101): Homolog of NCBI NO: 37534730 NR Description: putative RING zinc finger protein
  misc_feature (58)..(101): Homolog of NCBI NO: 33146524 NR Description: putative RES protein [Oryza sativa (japonica
  misc_feature (59)..(102): Homolog of NCBI NO: 15233117 NR Description: RING finger protein
  misc_feature (18)..(101): Homolog of NCBI NO: 29477113 NR Description: Similar to hypothetical protein LOC51255 [Danio
  misc_feature (9)..(101): Homolog of NCBI NO: 34903102 NR Description: unnamed protein product [Oryza sativa (japonica
  misc_feature (1)..(101): Homolog of NCBI NO: 15239242 NR Description: putative protein; protein id: At5g66070.1
  misc_feature (1)..(102): Homolog of NCBI NO: 15228108 NR Description: putative RING zinc finger protein
  misc_feature (1)..(102): Homolog of NCBI NO: 20340241 NR Description: putative RING zinc finger protein-like protein
  misc_feature (1)..(103): Homolog of NCBI NO: 25403249 NR Description: protein F21J9.24 [imported] - Arabidopsis
MFRSMLQVVLGGSAAANGSNIEHDESSSSSWERRVSITQYKSLCHSHDIGGTSMAMVECCVCLCRFEANQEVSDLPCKHYFHRGCLDKWFDNKHTTCPLCRSID

SEQ ID NO: 56118 - protein, 100 aa, Glycine max
  peptide (1)..(100): Ceres Seq. ID no. 12610460
  misc_feature (55)..(96): Pfam Name: Zinc finger, C3HC4 type (RING finger) Pfam Description: Zinc finger, C3HC4 type (RING finger)
  misc_feature (50)..(97): Homolog of NCBI NO: 7487667 NR Description: hypothetical protein T5C23.110 - Arabidopsis
  misc_feature (45)..(97): Homolog of NCBI NO: 37534730 NR Description: putative RING zinc finger protein
  misc_feature (54)..(97): Homolog of NCBI NO: 33146524 NR Description: putative RES protein [Oryza sativa (japonica
  misc_feature (55)..(98): Homolog of NCBI NO: 15233117 NR Description: RING finger protein
  misc_feature (14)..(97): Homolog of NCBI NO: 29477113 NR Description: Similar to hypothetical protein LOC51255 [Danio
  misc_feature (5)..(97): Homolog of NCBI NO: 34903102 NR Description: unnamed protein product [Oryza sativa (japonica
  misc_feature (1)..(97): Homolog of NCBI NO: 15239242 NR Description: putative protein; protein id: At5g66070.1
  misc_feature (1)..(98): Homolog of NCBI NO: 15228108 NR Description: putative RING zinc finger protein
  misc_feature (1)..(98): Homolog of NCBI NO: 20340241 NR Description: putative RING zinc finger protein-like protein
  misc_feature (1)..(99): Homolog of NCBI NO: 25403249 NR Description: protein F21J9.24 [imported] - Arabidopsis
MLQVVLGGSAAANGSNIEHDESSSSSWERRVSITQYKSLCHSHDIGGTSMAMVECCVCLCRFEANQEVSDLPCKHYFHRGCLDKWFDNKHTTCPLCRSID

SEQ ID NO: 56119 - DNA, 808 bp, Glycine max
  misc_feature (1)..(808): Ceres Seq. ID no. 12610475
aggacgagccggcggcgcagccagtcagaggagcggcggcggcgcgagctctgtctccggggagaagccgaggagcgagtgagcagcagccactccgtgcgttgcggggtggggaggcaactccgtgagctcgtcttcgtgcggccgccggcgccggtggtgaccaggccaggtccgccatgtcggccttcaccggcgtgtccatcgccgacggctacaagcggtgcggctgcgagacgctggccgtggacgcccgcggggacagcggctaccacctgctcatggtcaacggctactcgcgcaccaaagagctgattcccaccggccagagcatcaccgccaactctttcaatgtgggaggccatgactggttgatcgagtactaccctaacggcgagaaccttctctacgacaccgatgacgacgacgaagagcccgtggaggtcaggttcagtttcagcttggtggaccaggtggagaagcagatgcccatgtacattcgtgcaacccgcagcttctccagcaccacttcaatctggggcaacgacaggtttatcagaaagagcgattcattcctgataaaatccttatgttctataccataagagaacctacctcaaggccaacacgttccctagtggaaaatgatgctgatgcttgttctatactatatgttggtgatgcattctttcagcattgccatgagcctctgttttctttctactcctctgttttcttagtttttttcctgaaagagtatgtttctttcagtggaagcactatgcatgtttacgtcattcattcattc

SEQ ID NO: 56120 - protein, 141 aa, Glycine max
  peptide (1)..(141): Ceres Seq. ID no. 12610476
  misc_feature (22)..(128): Homolog of NCBI NO: 21740758 NR Description: OSJNBa0088K19.10 [Oryza sativa (japonica
  misc_feature (22)..(130): Homolog of NCBI NO: 37534548 NR Description: putative speckle-type protein
  misc_feature (29)..(130): Homolog of NCBI NO: 37534534 NR Description: putative speckle-type protein
  misc_feature (17)..(128): Homolog of NCBI NO: 37534516 NR Description: putative speckle-type protein
  misc_feature (22)..(128): Homolog of NCBI NO: 37534570 NR Description: putative speckle-type protein
  misc_feature (22)..(130): Homolog of NCBI NO: 37534532 NR Description: putative speckle-type protein
  misc_feature (29)..(130): Homolog of NCBI NO: 37534558 NR Description: putative speckle-type protein
  misc_feature (22)..(130): Homolog of NCBI NO: 37534574 NR Description: putative speckle-type protein
  misc_feature (3)..(128): Homolog of NCBI NO: 37534594 NR Description: putative speckle-type protein
  misc_feature (3)..(130): Homolog of NCBI NO: 37534588 NR Description: putative speckle-type protein
MSAFTGVSIADGYKRCGCETLAVDARGDSGYHLLMVNGYSRTKELIPTGQSITANSFNVGGHDWLIEYYPNGENLLYDTDDDDEEPVEVRFSFSLVDQVEKQMPMYIRATRSFSSTTSIWGNDRFIRKSDSFLIKSLCSIP

SEQ ID NO: 56121 - protein, 107 aa, Glycine max
  peptide (1)..(107): Ceres Seq. ID no. 12610477
  misc_feature (1)..(94): Homolog of NCBI NO: 21740758 NR Description: OSJNBa0088K19.10 [Oryza sativa (japonica
  misc_feature (1)..(96): Homolog of NCBI NO: 37534548 NR Description: putative speckle-type protein
  misc_feature (1)..(96): Homolog of NCBI NO: 37534534 NR Description: putative speckle-type protein
  misc_feature (1)..(94): Homolog of NCBI NO: 37534516 NR Description: putative speckle-type protein
  misc_feature (1)..(94): Homolog of NCBI NO: 37534570 NR Description: putative speckle-type protein
  misc_feature (1)..(96): Homolog of NCBI NO: 37534532 NR Description: putative speckle-type protein
  misc_feature (1)..(96): Homolog of NCBI NO: 37534558 NR Description: putative speckle-type protein
  misc_feature (1)..(96): Homolog of NCBI NO: 37534574 NR Description: putative speckle-type protein
  misc_feature (1)..(94): Homolog of NCBI NO: 37534594 NR Description: putative speckle-type protein
  misc_feature (1)..(96): Homolog of NCBI NO: 37534588 NR Description: putative speckle-type protein
MVNGYSRTKELIPTGQSITANSFNVGGHDWLIEYYPNGENLLYDTDDDDEEPVEVRFSFSLVDQVEKQMPMYIRATRSFSSTTSIWGNDRFIRKSDSFLIKSLCSIP

SEQ ID NO: 56122 - protein, 104 aa, Glycine max
  peptide (1)..(104): Ceres Seq. ID no. 12610478
  misc_feature (8)..(82): Pfam Name: TT viral ORF2 Pfam Description: TT viral ORF2
RTSRRRSQSEERRRRELCLRGEAEERVSSSHSVRCGVGRQLRELVFVRPPAPVVTRPGPPCRPSPACPSPTATSGAAARRWPWTPAGTAATTCSWSTATRAPKS

SEQ ID NO: 56123 - DNA, 1213 bp, Glycine max
  misc_feature (1)..(1213): Ceres Seq. ID no. 12610790
attaaccccaggcacgcctcccgctgcaaccaacccgagtccttccaccctgcacagaatctcagcccaacccacaggtctcgactcaagccatgggcgccggcgacaagacggccgcgggcatgccgcgcatcggcatgggcacggcggtgcaggggcccaagccggaccccatccgccgcgccgtcctccgcgccatcgaggtagggtaccgccacttcgacacggccgcgcactacgagaccgaggcccccatcggcgaggccgccgccgaggccgtgcgctccggcgccgtcgcctcccgggacgacctcttcatcacctccaagctctggtgcagcgatgcgcaccgcgacagggtcgtccccgccctcaggcagacgctccggaatctccagatggagtacgtggacctgtacctcgtccactggccggtgtccatgaagcccgggcggttcaaggcccccttcacggcggaggacttcgtgccgttcgacatgcgggccgtgtgggaggccatggaggagtgccacaggctgggcctcgccaaggccatcggcgtcgccaatttctcctgcaagaagcttgagaccctcctctccttcgccaccatccctcccaccgtcaatcaggtggaggtgaacccggtgtggcagcagaggaagctgagggagttctgcaggggcaagggcatccagctgtgcgcctactcgccgctgggggccaagggcacgcactggggcagcgacgccgtgatggacgcgggcgtcctgcaggagatcgccgcgtccaggggcaagagtgtggcgcaggtgtgcctgaggtgggtgtacgagcagggggactgcctcatcgtcaagagcttcgacgaggcccggatgcgggagaacctggacgtggacggctgggagctcaccgaggaggagcaccgcaggatcgcggagatcccgcagcgcaagatcaacctcggcaagcgctacgtgtccgagcacgggccctacaagtccctcgaggagctctgggacggtgagatatgagtgatcactggagaggctggctggccggtgcgacgggttctgttgggttgtcatccttggccatggatgggtggttgatcgggggacgatttccctttgaataaaatcatgttctgcattgtgtttcagtgaataaatggagatgtttactaccggatttaaggagagttactaag

SEQ ID NO: 56124 - protein, 314 aa, Glycine max
  peptide (1)..(314): Ceres Seq. ID no. 12610791
  misc_feature (1)..(314): Homolog of NCBI NO: 15218960 NR Description: aldo/keto reductase, putative
  misc_feature (11)..(314): Homolog of NCBI NO: 25283477 NR Description: probable Aldo/keto reductase F23H11.26
  misc_feature (11)..(314): Homolog of NCBI NO: 15218958 NR Description: aldo/keto reductase, putative; protein id:
  misc_feature (11)..(313): Homolog of NCBI NO: 40781598 NR Description: reductase 2 [Hydrangea macrophylla]
  misc_feature (11)..(314): Homolog of NCBI NO: 40781599 NR Description: reductase 1 [Hydrangea macrophylla]
  misc_feature (10)..(314): Homolog of NCBI NO: 6478216 NR Description: putative NADPH-dependent oxidoreductase [Papaver
  misc_feature (11)..(314): Homolog of NCBI NO: 37530540 NR Description: putative NADPH-dependent oxidoreductase
  misc_feature (11)..(312): Homolog of NCBI NO: 37530524 NR Description: putative NADPH-dependent oxidoreductase
  misc_feature (11)..(314): Homolog of NCBI NO: 37530522 NR Description: putative NADPH-dependent oxidoreductase
  misc_feature (2)..(314): Homolog of NCBI NO: 27357979 NR Description: Putative NADPH-dependent oxidoreductase
MGAGDKTAAGMPRIGMGTAVQGPKPDPIRRAVLRAIEVGYRHFDTAAHYETEAPIGEAAAEAVRSGAVASRDDLFITSKLWCSDAHRDRVVPALRQTLRNLQMEYVDLYLVHWPVSMKPGRFKAPFTAEDFVPFDMRAVWEAMEECHRLGLAKAIGVANFSCKKLETLLSFATIPPTVNQVEVNPVWQQRKLREFCRGKGIQLCAYSPLGAKGTHWGSDAVMDAGVLQEIAASRGKSVAQVCLRWVYEQGDCLIVKSFDEARMRENLDVDGWELTEEEHRRIAEIPQRKINLGKRYVSEHGPYKSLEELWDGEI

SEQ ID NO: 56125 - protein, 304 aa, Glycine max
  peptide (1)..(304): Ceres Seq. ID no. 12610792
  misc_feature (1)..(304): Homolog of NCBI NO: 15218960 NR Description: aldo/keto reductase, putative
  misc_feature (1)..(304): Homolog of NCBI NO: 25283477 NR Description: probable Aldo/keto reductase F23H11.26
  misc_feature (1)..(304): Homolog of NCBI NO: 15218958 NR Description: aldo/keto reductase, putative; protein id:
  misc_feature (1)..(303): Homolog of NCBI NO: 40781598 NR Description: reductase 2 [Hydrangea macrophylla]
  misc_feature (1)..(304): Homolog of NCBI NO: 40781599 NR Description: reductase 1 [Hydrangea macrophylla]
  misc_feature (1)..(304): Homolog of NCBI NO: 6478216 NR Description: putative NADPH-dependent oxidoreductase [Papaver
  misc_feature (1)..(304): Homolog of NCBI NO: 37530540 NR Description: putative NADPH-dependent oxidoreductase
  misc_feature (1)..(302): Homolog of NCBI NO: 37530524 NR Description: putative NADPH-dependent oxidoreductase
  misc_feature (1)..(304): Homolog of NCBI NO: 37530522 NR Description: putative NADPH-dependent oxidoreductase
  misc_feature (1)..(304): Homolog of NCBI NO: 27357979 NR Description: Putative NADPH-dependent oxidoreductase
MPRIGMGTAVQGPKPDPIRRAVLRAIEVGYRHFDTAAHYETEAPIGEAAAEAVRSGAVASRDDLFITSKLWCSDAHRDRVVPALRQTLRNLQMEYVDLYLVHWPVSMKPGRFKAPFTAEDFVPFDMRAVWEAMEECHRLGLAKAIGVANFSCKKLETLLSFATIPPTVNQVEVNPVWQQRKLREFCRGKGIQLCAYSPLGAKGTHWGSDAVMDAGVLQEIAASRGKSVAQVCLRWVYEQGDCLIVKSFDEARMRENLDVDGWELTEEEHRRIAEIPQRKINLGKRYVSEHGPYKSLEELWDGEI

SEQ ID NO: 56126 - protein, 299 aa, Glycine max
  peptide (1)..(299): Ceres Seq. ID no. 12610793
  misc_feature (1)..(299): Homolog of NCBI NO: 15218960 NR Description: aldo/keto reductase, putative
  misc_feature (1)..(299): Homolog of NCBI NO: 25283477 NR Description: probable Aldo/keto reductase F23H11.26
  misc_feature (1)..(299): Homolog of NCBI NO: 15218958 NR Description: aldo/keto reductase, putative; protein id:
  misc_feature (1)..(298): Homolog of NCBI NO: 40781598 NR Description: reductase 2 [Hydrangea macrophylla]
  misc_feature (1)..(299): Homolog of NCBI NO: 40781599 NR Description: reductase 1 [Hydrangea macrophylla]
  misc_feature (1)..(299): Homolog of NCBI NO: 6478216 NR Description: putative NADPH-dependent oxidoreductase [Papaver
  misc_feature (1)..(299): Homolog of NCBI NO: 37530540 NR Description: putative NADPH-dependent oxidoreductase
  misc_feature (1)..(297): Homolog of NCBI NO: 37530524 NR Description: putative NADPH-dependent oxidoreductase
  misc_feature (1)..(299): Homolog of NCBI NO: 37530522 NR Description: putative NADPH-dependent oxidoreductase
  misc_feature (1)..(299): Homolog of NCBI NO: 27357979 NR Description: Putative NADPH-dependent oxidoreductase
MGTAVQGPKPDPIRRAVLRAIEVGYRHFDTAAHYETEAPIGEAAAEAVRSGAVASRDDLFITSKLWCSDAHRDRVVPALRQTLRNLQMEYVDLYLVHWPVSMKPGRFKAPFTAEDFVPFDMRAVWEAMEECHRLGLAKAIGVANFSCKKLETLLSFATIPPTVNQVEVNPVWQQRKLREFCRGKGIQLCAYSPLGAKGTHWGSDAVMDAGVLQEIAASRGKSVAQVCLRWVYEQGDCLIVKSFDEARMRENLDVDGWELTEEEHRRIAEIPQRKINLGKRYVSEHGPYKSLEELWDGEI

SEQ ID NO: 56127 - DNA, 1479 bp, Glycine max
  misc_feature (1)..(1479): Ceres Seq. ID no. 15175496
gatcctagctctctcctcaggccttttctttctctctctctctcgcgagctcctcgctctctagattcttttctaggatgggtactgccagcggtgccgtggccctgctgctggtggtgctaggagccagcgtctccagctccagtgggcagctgcaggtggggttctactccaagtcgtgccccagcgccgagtccaccgtcgcgtccgtcgtccggggaaccgccgccgccgactccaccatcctccccgccctcctccggctccagttccacgactgcttcgtcagggggtgcgacgcgtcggtgctgatcaagggcgggaacaacaacgcggaggtggacaacaacaagcaccaggggctccgcgggatggacgtcatcgaaaacgccaaggcgcagctcgagtccgagtgccccggcgtcgtctcgtgcgccgacatcgtcgtcctcgccgcgcgcgacgccgtcgcattcaccggcgggccgtcgttcgacgtgccgacggggcgccgcgacgggaaggtgtccaacgtgcgggacggcgacgtgctgccggacgtgcgcgactccgcccaggtgctccgctccaagttccgcgccagcggcctcgacgacaaggacctcgtcctcctcagctcggcgcacacggtgggcacaacggcgtgcttcttcatccaggaccggctctacaagttcccgctcccgggcggcgggctcgggtcagatccgtcgatcccggacggcttcctgtcggagctcaagtcccggtgcgcgccgggggactccaactcgcgcgtctccctggaccgcggcagcgagcgcgtgttcgacacctccatcctccgcaacatccgcaacggcttcgcggtgatcgcctccgacgccgcgctctacaacgacaccagcaccgtcgacgtggtggactcctactcgggcctcctcagcaccatcttcgggccctacttccggcaggacttcgcggactccatggtgaagatgggcagcatcggcgtgctcaccggcgccagcggggaggtcaggaaggtctgctccaagttcaactgagagagacccatccatggatccagattccattcattgcgctgccggccggagtactggtactggttggctagctggagatgaaaagcactagctagcccatgcggacatgcatctcgtgggtgcatggcccggtctcgtggcgctttcatggcttttcttcttcttcaatttattgtgtacatgttattgaaaagagagaggggaaatttagtggattcatgtgattctggcgccaaggtctagtacgtacggccaaggatctgtgcagttttctcttttgcagcggctggaagcgagattaaattcatatagctagggtatatataagatgtgcttctgtatgcttgtatgtacactacacacaccatatgtgcaattaagtggaggtgtaatttatggtcttgtcttgggt

SEQ ID NO: 56128 - protein, 329 aa, Glycine max
  peptide (1)..(329): Ceres Seq. ID no. 15175497
  misc_feature (42)..(288): Pfam Name: Peroxidase Pfam Description: Peroxidase
  misc_feature (1)..(329): Homolog of NCBI NO: 15236089 NR Description: cationic peroxidase, putative [Arabidopsis
  misc_feature (6)..(329): Homolog of NCBI NO: 19698450 NR Description: class III peroxidase [Gossypium hirsutum]
  misc_feature (1)..(329): Homolog of NCBI NO: 6979323 NR Description: putative peroxidase [Oryza sativa]
MGTASGAVALLLVVLGASVSSSSGQLQVGFYSKSCPSAESTVASVVRGTAAADSTILPALLRLQFHDCFVRGCDASVLIKGGNNNAEVDNNKHQGLRGMDVIENAKAQLESECPGVVSCADIVVLAARDAVAFTGGPSFDVPTGRRDGKVSNVRDGDVLPDVRDSAQVLRSKFRASGLDDKDLVLLSSAHTVGTTACFFIQDRLYKFPLPGGGLGSDPSIPDGFLSELKSRCAPGDSNSRVSLDRGSERVFDTSILRNIRNGFAVIASDAALYNDTSTVDVVDSYSGLLSTIFGPYFRQDFADSMVKMGSIGVLTGASGEVRKVCSKFN

SEQ ID NO: 56129 - protein, 231 aa, Glycine max
  peptide (1)..(231): Ceres Seq. ID no. 15175498
  misc_feature (1)..(190): Pfam Name: Peroxidase Pfam Description: Peroxidase
  misc_feature (1)..(231): Homolog of NCBI NO: 15236089 NR Description: cationic peroxidase, putative [Arabidopsis
  misc_feature (1)..(231): Homolog of NCBI NO: 19698450 NR Description: class III peroxidase [Gossypium hirsutum]
  misc_feature (1)..(231): Homolog of NCBI NO: 6979323 NR Description: putative peroxidase [Oryza sativa]
MDVIENAKAQLESECPGVVSCADIVVLAARDAVAFTGGPSFDVPTGRRDGKVSNVRDGDVLPDVRDSAQVLRSKFRASGLDDKDLVLLSSAHTVGTTACFFIQDRLYKFPLPGGGLGSDPSIPDGFLSELKSRCAPGDSNSRVSLDRGSERVFDTSILRNIRNGFAVIASDAALYNDTSTVDVVDSYSGLLSTIFGPYFRQDFADSMVKMGSIGVLTGASGEVRKVCSKFN

SEQ ID NO: 56130 - DNA, 438 bp, Glycine max
  misc_feature (1)..(438): Ceres Seq. ID no. 13582222
agattagtcacactcttcgcaagcacacaaaaaaaaaaaacccccaaatagcgtaaggataagcctcgccggcgacgaaatcagggtttcatcgaacaagaagatggctcacgcttgcgtctccacatcagcttcctctctcaggtttacagccggattcgtctccgcgagtcccaacgcctcctctttcgattctcagaagctttccctccctttcgagcctcttcgttcaagaaagacgaagaagttggttagcggcagaaagacggctccgaaggctgtatactccggcaatgtctggactccggagactccttcgcctcaaggagtttggtccatcagagatgatttacaagtcccttcttcgccgtattttcctgtgtacgctcaaggacaaggaccacctcctatggtgcaagagcgtttccagagtatcat

SEQ ID NO: 56131 - protein, 111 aa, Glycine max
  peptide (1)..(111): Ceres Seq. ID no. 13582223
  misc_feature (1)..(110): Homolog of NCBI NO: 15485610 NR Description: Clp protease 2 proteolytic subunit [Lycopersicon
  misc_feature (1)..(110): Homolog of NCBI NO: 18378982 NR Description: ATP-dependent Clp protease proteolytic subunit
MAHACVSTSASSLRFTAGFVSASPNASSFDSQKLSLPFEPLRSRKTKKLVSGRKTAPKAVYSGNVWTPETPSPQGVWSIRDDLQVPSSPYFPVYAQGQGPPPMVQERFQSI

SEQ ID NO: 56132 - DNA, 1005 bp, Glycine max
  misc_feature (1)..(1005): Ceres Seq. ID no. 13595093
ctagaacatcctaatcgaaaaacaacacttgactgatcttttctctcatcctcagacgcaacaagcagcttgttgcaacacacaaaaatggatcaaaccatgctgctaacttccggcatctctgcaaaccatttcttgaggaacaagaaccctctggctcagcccaaagttcaccatctcttcctctccggaaactctccggttactctaccatctcgaataccatcgttggttcctctcgctatcttcaaacccaaaaccaaagctgctcccaaaaaggttgagaaagtgaagccaaaggttgaagacggtatcttcggaacgtctggtgggataggattcacgaagcagaacgagctctttgtgggccgtgttgctatgatcggtttcgctgcatcgttgctaggtgaggcgttgactgggaaagggatattagcacagctgaatttggagacaggaataccgatttacgaagcagagccattgcttctcttcttcatattgttcactctgttgggtgccattggagctcttggagacagaggaaaattcgtcgacgatcctcccaccggactcgagaaagccgtcattcctcccggcaaaggcgttcgctctgccctcggtctcaaagaacaaggtcctttgtttgggttcacgaaggcgaacgagttgttcgtaggaagattggcacaattgggaatagcattttcattgataggagagattattacagggaaaggagcacttgctcaactcaacattgagactggtattccaattcaagatatcgaaccactcgtcctcttaaacgttgctttcttcttcgctgctgccattaatcctggtaatggaaagttcattactgatgatggtgaagaaagctaaactctctatgtactttccagttagtagtttgggagaccattatcatgttgagacaaaaaagaaatggacatcttaaactattgtaatacttaaatccttttgttttaacttggtttttct

SEQ ID NO: 56133 - protein, 265 aa, Glycine max
  peptide (1)..(265): Ceres Seq. ID no. 13595094
  misc_feature (60)..(213): Pfam Name: Chlorophyll A-B binding protein Pfam Description: Chlorophyll A-B binding protein
  misc_feature (111)..(265): Homolog of NCBI NO: 6006279 NR Description: photosystem II 22 kDa protein [Arabidopsis
  misc_feature (36)..(264): Homolog of NCBI NO: 7489520 NR Description: photosystem II 22-K chlorophyll-binding protein -
  misc_feature (36)..(264): Homolog of NCBI NO: 38345525 NR Description: OSJNBa0039K24.28 [Oryza sativa (japonica
  misc_feature (1)..(264): Homolog of NCBI NO: 34908652 NR Description: putative photosystem II subunit (22KDa) precursor
  misc_feature (1)..(264): Homolog of NCBI NO: 18203444 NR Description: Photosystem II 22 kDa protein, chloroplast
  misc_feature (1)..(264): Homolog of NCBI NO: 18202913 NR Description: Photosystem II 22 kDa protein, chloroplast
  misc_feature (1)..(264): Homolog of NCBI NO: 1709846 NR Description: Photosystem II 22 kDa protein, chloroplast
  misc_feature (8)..(264): Homolog of NCBI NO: 400890 NR Description: Photosystem II 22 kDa protein, chloroplast
  misc_feature (1)..(265): Homolog of NCBI NO: 15294226 NR Description: unknown protein [Arabidopsis thaliana]
  misc_feature (1)..(265): Homolog of NCBI NO: 15219418 NR Description: photosystem II 22kDa protein -related
MDQTMLLTSGISANHFLRNKNPLAQPKVHHLFLSGNSPVTLPSRIPSLVPLAIFKPKTKAAPKKVEKVKPKVEDGIFGTSGGIGFTKQNELFVGRVAMIGFAASLLGEALTGKGILAQLNLETGIPIYEAEPLLLFFILFTLLGAIGALGDRGKFVDDPPTGLEKAVIPPGKGVRSALGLKEQGPLFGFTKANELFVGRLAQLGIAFSLIGEIITGKGALAQLNIETGIPIQDIEPLVLLNVAFFFAAAINPGNGKFITDDGEES

SEQ ID NO: 56134 - protein, 261 aa, Glycine max
  peptide (1)..(261): Ceres Seq. ID no. 13595095
  misc_feature (56)..(209): Pfam Name: Chlorophyll A-B binding protein Pfam Description: Chlorophyll A-B binding protein
  misc_feature (107)..(261): Homolog of NCBI NO: 6006279 NR Description: photosystem II 22 kDa protein [Arabidopsis
  misc_feature (32)..(260): Homolog of NCBI NO: 7489520 NR Description: photosystem II 22-K chlorophyll-binding protein -
  misc_feature (32)..(260): Homolog of NCBI NO: 38345525 NR Description: OSJNBa0039K24.28 [Oryza sativa (japonica
  misc_feature (1)..(260): Homolog of NCBI NO: 34908652 NR Description: putative photosystem II subunit (22KDa) precursor
  misc_feature (1)..(260): Homolog of NCBI NO: 18203444 NR Description: Photosystem II 22 kDa protein, chloroplast
  misc_feature (1)..(260): Homolog of NCBI NO: 18202913 NR Description: Photosystem II 22 kDa protein, chloroplast
  misc_feature (1)..(260): Homolog of NCBI NO: 1709846 NR Description: Photosystem II 22 kDa protein, chloroplast
  misc_feature (4)..(260): Homolog of NCBI NO: 400890 NR Description: Photosystem II 22 kDa protein, chloroplast
  misc_feature (1)..(261): Homolog of NCBI NO: 15294226 NR Description: unknown protein [Arabidopsis thaliana]
  misc_feature (1)..(261): Homolog of NCBI NO: 15219418 NR Description: photosystem II 22kDa protein -related
MLLTSGISANHFLRNKNPLAQPKVHHLFLSGNSPVTLPSRIPSLVPLAIFKPKTKAAPKKVEKVKPKVEDGIFGTSGGIGFTKQNELFVGRVAMIGFAASLLGEALTGKGILAQLNLETGIPIYEAEPLLLFFILFTLLGAIGALGDRGKFVDDPPTGLEKAVIPPGKGVRSALGLKEQGPLFGFTKANELFVGRLAQLGIAFSLIGEIITGKGALAQLNIETGIPIQDIEPLVLLNVAFFFAAAINPGNGKFITDDGEES

SEQ ID NO: 56135 - protein, 168 aa, Glycine max
  peptide (1)..(168): Ceres Seq. ID no. 13595096
  misc_feature (1)..(116): Pfam Name: Chlorophyll A-B binding protein Pfam Description: Chlorophyll A-B binding protein
  misc_feature (14)..(168): Homolog of NCBI NO: 6006279 NR Description: photosystem II 22 kDa protein [Arabidopsis
  misc_feature (1)..(167): Homolog of NCBI NO: 7489520 NR Description: photosystem II 22-K chlorophyll-binding protein -
  misc_feature (1)..(167): Homolog of NCBI NO: 38345525 NR Description: OSJNBa0039K24.28 [Oryza sativa (japonica
  misc_feature (1)..(167): Homolog of NCBI NO: 34908652 NR Description: putative photosystem II subunit (22KDa) precursor
  misc_feature (1)..(167): Homolog of NCBI NO: 18203444 NR Description: Photosystem II 22 kDa protein, chloroplast
  misc_feature (1)..(167): Homolog of NCBI NO: 18202913 NR Description: Photosystem II 22 kDa protein, chloroplast
  misc_feature (1)..(167): Homolog of NCBI NO: 1709846 NR Description: Photosystem II 22 kDa protein, chloroplast
  misc_feature (1)..(167): Homolog of NCBI NO: 400890 NR Description: Photosystem II 22 kDa protein, chloroplast
  misc_feature (1)..(168): Homolog of NCBI NO: 15294226 NR Description: unknown protein [Arabidopsis thaliana]
  misc_feature (1)..(168): Homolog of NCBI NO: 15219418 NR Description: photosystem II 22kDa protein -related
MIGFAASLLGEALTGKGILAQLNLETGIPIYEAEPLLLFFILFTLLGAIGALGDRGKFVDDPPTGLEKAVIPPGKGVRSALGLKEQGPLFGFTKANELFVGRLAQLGIAFSLIGEIITGKGALAQLNIETGIPIQDIEPLVLLNVAFFFAAAINPGNGKFITDDGEES

SEQ ID NO: 56136 - DNA, 1076 bp, Glycine max
  misc_feature (1)..(1076): Ceres Seq. ID no. 12583280
accatcacacaatatccagaaccatctcactgtcatggcgttccgacgccctctcgcattccaccatgagtgcatgctcgtgatcgccttcgtgctggtctcctgtctcgccggcgccgccacggcgaagcagacgggccagctgaccgtgttctggggccggaacgccggcgagggcacgctgcgcgaggcctgcgacacggggctctactccaccgtcgtcatctccttctacagcgtcttcgggcacggccgctactggggcgacctctccggccaccctctcgccggcgtcggtgccgacatcaagcactgccagtccaggaacatcctcgtcctcctctccatcggcgggcccgggaacggctactccctcccgtcctccgcctccgccgcagccgtcgccgacaacctctggaacgcgcacctcggcgggcgccggaacggcgtgtaccgcccgttcggcgacgccgccgtcgacggcatcgacttctacatcgaccagggcgcccccgaccactacgacgagctggccagccgccttgacgggtacaaccggttctaccgcggccggaagggtgtgcgcctgacggccacgccgcggtgcgggttgcccgaccgccgcctgggggcggcgctccggacggggctgttcgagcgcatccacgtcaggttctacggcaacgacacatgctcgctggggaagggcggcacgtacggcgtggtagggcagtgggagaagtggacggcggcgttcccgaggacgcaggtgtacctgggcctcgcgccggcggagagtggcgtgccggagggggcgcagggcaccgtcgccgtttacctcaagtacctgtactacgacctgctgcccaaggtgcagaaggccaacaactatggcggggtcatggtctgggacaggttcgccgacaagaagacacgctggagcagcgtcgtcagcggatgggcctgatcgtttatatcgctggtttacagctacggatcggagtacatactactcctactgtgtatgcgtgtgtatgaataaaacggcatccatatgataatgatatatggatgtg

SEQ ID NO: 56137 - protein, 321 aa, Glycine max
  peptide (1)..(321): Ceres Seq. ID no. 12583281
  misc_feature (46)..(308): Pfam Name: Glycosyl hydrolases family 18 Pfam Description: Glycosyl hydrolases family 18
  misc_feature (25)..(321): Homolog of NCBI NO: 34913272 NR Description: putative xylanase inhibitor protein
  misc_feature (29)..(317): Homolog of NCBI NO: 38346492 NR Description: OSJNBa0020I02.6 [Oryza sativa (japonica
  misc_feature (26)..(321): Homolog of NCBI NO: 4884518 NR Description: class III chitinase homologue (OsChib3H-c) [Oryza
  misc_feature (26)..(321): Homolog of NCBI NO: 7451380 NR Description: chitinase (EC 3.2.1.14) III C10923 - rice
  misc_feature (26)..(321): Homolog of NCBI NO: 4884516 NR Description: class III chitinase homologue (OsChib3H-b) [Oryza
  misc_feature (25)..(321): Homolog of NCBI NO: 7451379 NR Description: chitinase (EC 3.2.1.14) III C10122 - rice
  misc_feature (12)..(315): Homolog of NCBI NO: 7451377 NR Description: chitinase (EC 3.2.1.14) III C00481 - rice
  misc_feature (12)..(314): Homolog of NCBI NO: 7451381 NR Description: chitinase (EC 3.2.1.14) III C10150 - rice
  misc_feature (26)..(321): Homolog of NCBI NO: 7451378 NR Description: chitinase (EC 3.2.1.14) III C10701 - rice
  misc_feature (12)..(321): Homolog of NCBI NO: 18693099 NR Description: putative xylanase inhibitor protein
PSHNIQNHLTVMAFRRPLAFHHECMLVIAFVLVSCLAGAATAKQTGQLTVFWGRNAGEGTLREACDTGLYSTVVISFYSVFGHGRYWGDLSGHPLAGVGADIKHCQSRNILVLLSIGGPGNGYSLPSSASAAAVADNLWNAHLGGRRNGVYRPFGDAAVDGIDFYIDQGAPDHYDELASRLDGYNRFYRGRKGVRLTATPRCGLPDRRLGAALRTGLFERIHVRFYGNDTCSLGKGGTYGVVGQWEKWTAAFPRTQVYLGLAPAESGVPEGAQGTVAVYLKYLYYDLLPKVQKANNYGGVMVWDRFADKKTRWSSVVSGWA

SEQ ID NO: 56138 - protein, 310 aa, Glycine max
  peptide (1)..(310): Ceres Seq. ID no. 12583282
  misc_feature (35)..(297): Pfam Name: Glycosyl hydrolases family 18 Pfam Description: Glycosyl hydrolases family 18
  misc_feature (14)..(310): Homolog of NCBI NO: 34913272 NR Description: putative xylanase inhibitor protein
  misc_feature (18)..(306): Homolog of NCBI NO: 38346492 NR Description: OSJNBa0020I02.6 [Oryza sativa (japonica
  misc_feature (15)..(310): Homolog of NCBI NO: 4884518 NR Description: class III chitinase homologue (OsChib3H-c) [Oryza
  misc_feature (15)..(310): Homolog of NCBI NO: 7451380 NR Description: chitinase (EC 3.2.1.14) III C10923 - rice
  misc_feature (15)..(310): Homolog of NCBI NO: 4884516 NR Description: class III chitinase homologue (OsChib3H-b) [Oryza
  misc_feature (14)..(310): Homolog of NCBI NO: 7451379 NR Description: chitinase (EC 3.2.1.14) III C10122 - rice
  misc_feature (1)..(304): Homolog of NCBI NO: 7451377 NR Description: chitinase (EC 3.2.1.14) III C00481 - rice
  misc_feature (1)..(303): Homolog of NCBI NO: 7451381 NR Description: chitinase (EC 3.2.1.14) III C10150 - rice
  misc_feature (15)..(310): Homolog of NCBI NO: 7451378 NR Description: chitinase (EC 3.2.1.14) III C10701 - rice
  misc_feature (1)..(310): Homolog of NCBI NO: 18693099 NR Description: putative xylanase inhibitor protein
MAFRRPLAFHHECMLVIAFVLVSCLAGAATAKQTGQLTVFWGRNAGEGTLREACDTGLYSTVVISFYSVFGHGRYWGDLSGHPLAGVGADIKHCQSRNILVLLSIGGPGNGYSLPSSASAAAVADNLWNAHLGGRRNGVYRPFGDAAVDGIDFYIDQGAPDHYDELASRLDGYNRFYRGRKGVRLTATPRCGLPDRRLGAALRTGLFERIHVRFYGNDTCSLGKGGTYGVVGQWEKWTAAFPRTQVYLGLAPAESGVPEGAQGTVAVYLKYLYYDLLPKVQKANNYGGVMVWDRFADKKTRWSSVVSGWA

SEQ ID NO: 56139 - protein, 297 aa, Glycine max
  peptide (1)..(297): Ceres Seq. ID no. 12583283
  misc_feature (22)..(284): Pfam Name: Glycosyl hydrolases family 18 Pfam Description: Glycosyl hydrolases family 18
  misc_feature (1)..(297): Homolog of NCBI NO: 34913272 NR Description: putative xylanase inhibitor protein
  misc_feature (5)..(293): Homolog of NCBI NO: 38346492 NR Description: OSJNBa0020I02.6 [Oryza sativa (japonica
  misc_feature (2)..(297): Homolog of NCBI NO: 4884518 NR Description: class III chitinase homologue (OsChib3H-c) [Oryza
  misc_feature (2)..(297): Homolog of NCBI NO: 7451380 NR Description: chitinase (EC 3.2.1.14) III C10923 - rice
  misc_feature (2)..(297): Homolog of NCBI NO: 4884516 NR Description: class III chitinase homologue (OsChib3H-b) [Oryza
  misc_feature (1)..(297): Homolog of NCBI NO: 7451379 NR Description: chitinase (EC 3.2.1.14) III C10122 - rice
  misc_feature (1)..(291): Homolog of NCBI NO: 7451377 NR Description: chitinase (EC 3.2.1.14) III C00481 - rice
  misc_feature (1)..(290): Homolog of NCBI NO: 7451381 NR Description: chitinase (EC 3.2.1.14) III C10150 - rice
  misc_feature (2)..(297): Homolog of NCBI NO: 7451378 NR Description: chitinase (EC 3.2.1.14) III C10701 - rice
  misc_feature (1)..(297): Homolog of NCBI NO: 18693099 NR Description: putative xylanase inhibitor protein
MLVIAFVLVSCLAGAATAKQTGQLTVFWGRNAGEGTLREACDTGLYSTVVISFYSVFGHGRYWGDLSGHPLAGVGADIKHCQSRNILVLLSIGGPGNGYSLPSSASAAAVADNLWNAHLGGRRNGVYRPFGDAAVDGIDFYIDQGAPDHYDELASRLDGYNRFYRGRKGVRLTATPRCGLPDRRLGAALRTGLFERIHVRFYGNDTCSLGKGGTYGVVGQWEKWTAAFPRTQVYLGLAPAESGVPEGAQGTVAVYLKYLYYDLLPKVQKANNYGGVMVWDRFADKKTRWSSVVSGWA

SEQ ID NO: 56140 - DNA, 1004 bp, Glycine max
  misc_feature (1)..(1004): Ceres Seq. ID no. 13594962
ccccctcacaactcgccaacgccaaatccgtctccgccaccggccagccagcgagcgattcgccgccgccgccgtcaccgccgccgccggcgtcaagcccctctctccacccagcaggctcaccctcgcggcccccgccccctcacgggccccgcgtctcccgcgagaaccgcgcccgcccgcctagggtttccgccgccgccggagaggaggggagaagcggaaccagggcgagatggccggacggctcctcgggcagctcctcgtcatgggcggcgccgtcgtcggcagggccgtggtccaggcctaccgccaggccatcgtcaatgcacaaagaaccggagctgctcaggaagctgtgaatggtattcgaagggctagcaaggctatgaccgagcaagaagcccggcaaatattaggtatcagtgaaaagacgagttgggaagagatcgtaaagaagtacgacacgatgtttgagaagaacgccaagagcggaagcttctatctccagtcgaaagtccaccgggccaaagaatgtctggagtccatataccatgataagcccgacataatgaactgagatggccagcgtttcatctaatcgatcgattttgtcgtcgatgtcctgtctgagctatgctgggctgctgcatcaggtcaaatttggttgtaacaggaagtttgttccacttgactcgaataatatattcaacaaaaggaacaccgtcaccgtttgatttgtttttctggaggcgatgcctcgtttccatgcaaattcagatgttgacactttgtgttgttgccatcatctgcaatgtttgattgttgtagcagcttgtgttttgaacctgatatcccatgttgctagcattgacccgtaattttgaagcgcgattatggggttagacacctactttctcccttgaaagtacgctggttggaaaatgtaatctttgatgttggtatggttccaaagatgtaatctctatcacagcatccttccc

SEQ ID NO: 56141 - protein, 126 aa, Glycine max
  peptide (1)..(126): Ceres Seq. ID no. 13594963
PPHNSPTPNPSPPPASQRAIRRRRRHRRRRRQAPLSTQQAHPRGPRPLTGPASPARTAPARLGFPPPPERRGEAEPGRDGRTAPRAAPRHGRRRRRQGRGPGLPPGHRQCTKNRSCSGSCEWYSKG

SEQ ID NO: 56142 - protein, 119 aa, Glycine max
  peptide (1)..(119): Ceres Seq. ID no. 13594964
PSQLANAKSVSATGQPASDSPPPPSPPPPASSPSLHPAGSPSRPPPPHGPRVSRENRARPPRVSAAAGEEGRSGTRARWPDGSSGSSSSWAAPSSAGPWSRPTARPSSMHKEPELLRKL

SEQ ID NO: 56143 - protein, 114 aa, Glycine max
  peptide (1)..(114): Ceres Seq. ID no. 13594965
  misc_feature (2)..(112): Pfam Name: Uncharacterised protein family (UPF0108) Pfam Description: Uncharacterised protein family (UPF0108)
  misc_feature (1)..(103): Homolog of NCBI NO: 24640407 NR Description: CG1409-PA [Drosophila melanogaster]
  misc_feature (1)..(103): Homolog of NCBI NO: 21064209 NR Description: AT29287p [Drosophila melanogaster]
  misc_feature (4)..(104): Homolog of NCBI NO: 19112141 NR Description: conserved hypothetical protein; similar to S.
  misc_feature (12)..(106): Homolog of NCBI NO: 10176880 NR Description: gene_id:MAC9.20~unknown protein [Arabidopsis
  misc_feature (1)..(106): Homolog of NCBI NO: 18424521 NR Description: auxin-regulated protein [Arabidopsis thaliana]
  misc_feature (12)..(111): Homolog of NCBI NO: 37535410 NR Description: putative pol polyprotein [Oryza sativa (japonica
  misc_feature (2)..(109): Homolog of NCBI NO: 11357639 NR Description: hypothetical protein F25L23.140 - Arabidopsis
  misc_feature (1)..(109): Homolog of NCBI NO: 18411133 NR Description: expressed protein [Arabidopsis thaliana]
  misc_feature (1)..(112): Homolog of NCBI NO: 34905796 NR Description: P0401G10.24 [Oryza sativa (japonica
MAGRLLGQLLVMGGAVVGRAVVQAYRQAIVNAQRTGAAQEAVNGIRRASKAMTEQEARQILGISEKTSWEEIVKKYDTMFEKNAKSGSFYLQSKVHRAKECLESIYHDKPDIMN

SEQ ID NO: 56144 - DNA, 990 bp, Glycine max
  misc_feature (1)..(990): Ceres Seq. ID no. 13595308
aaaccgtccaacaaacctctttcccctccccgcatcccaagcctcccagctccatcgccacacgctcgaacccactcctctcacgctcaagcgcacaccgcaccaaccagagcagccatggctctcaccggcggcgccaccaccgcagcgtgcatcctcgtcctcctcgcgctcgccgacgccgcgggggcggctacccgggcgccagcgccggcgccggcgccggactgcatggaggcgttgattagcctcgcagactgcctcgactatgtgacgcccagcaccaagtcggctcggccttccaaggcttgctgcacggaggtgaagaccgccgtcggcacccccgccaccgtgaagtgcctctgcgctgccatggacgccaagacaactccgataccgatcaacatgacacgggtgctcgctctccccaccgcctgcggccaatccgcctccgtcttgaacaagtgccacgctgcacatgggccgggtggtgctcctgctgaagcaccgtcaccttcagcatccagtggcggcgcgaccgcttcaccaccgaaggcgaatgtggcggcgaggtctccgggcggctccgccaccgttctcttggcaactgtggtgacttcgctgctcgccttctattacctctgagggccaacatctcagcctctctcacgtgttatgttgcacagaccttgtgactctgcgttgcgcggtgttgtaatctgagtttactttgtttatcgggatgggttattatcatgtagtgtcgtggactgaatattgagtgcgtagtaaattgcaatgtaccgtggactgggtattttgaagtcgttgccagttatgacactttatttacttttgaatgcgcagatgactttgttgactttggaatgcgcagatgatctgctacgatcttcttttgggctaaaaaaaaaaaaaaaaaagcttatcgatannnnnnnraacctcgaaggggggggcccggtacccaat

SEQ ID NO: 56145 - protein, 214 aa, Glycine max
  peptide (1)..(214): Ceres Seq. ID no. 15221539
  misc_feature (53)..(199): Homolog of NCBI NO: 21592774 NR Description: unknown [Arabidopsis thaliana]
  misc_feature (53)..(199): Homolog of NCBI NO: 18407534 NR Description: protease inhibitor/seed storage/lipid transfer
  misc_feature (40)..(213): Homolog of NCBI NO: 25553595 NR Description: OJ1656_E11.26 [Oryza sativa (japonica
  misc_feature (59)..(209): Homolog of NCBI NO: 7487610 NR Description: hypothetical protein T3F12.2 - Arabidopsis
  misc_feature (46)..(183): Homolog of NCBI NO: 10176956 NR Description: contains similarity to nonspecific lipid-transfer
  misc_feature (46)..(210): Homolog of NCBI NO: 21618136 NR Description: nonspecific lipid-transfer protein-like protein
  misc_feature (44)..(183): Homolog of NCBI NO: 34394120 NR Description: hypothetical protein [Oryza sativa (japonica
  misc_feature (46)..(210): Homolog of NCBI NO: 18424785 NR Description: protease inhibitor/seed storage/lipid transfer
  misc_feature (52)..(173): Homolog of NCBI NO: 34913126 NR Description: hypothetical protein~predicted by FGENESH etc.
  misc_feature (52)..(214): Homolog of NCBI NO: 33146785 NR Description: unknown protein [Oryza sativa (japonica
KPSNKPLSPPRIPSLPAPSPHARTHSSHAQAHTAPTRAAMALTGGATTAACILVLLALADAAGAATRAPAPAPAPDCMEALISLADCLDYVTPSTKSARPSKACCTEVKTAVGTPATVKCLCAAMDAKTTPIPINMTRVLALPTACGQSASVLNKCHAAHGPGGAPAEAPSPSASSGGATASPPKANVAARSPGGSATVLLATVVTSLLAFYYL

SEQ ID NO: 56146 - protein, 175 aa, Glycine max
  peptide (1)..(175): Ceres Seq. ID no. 15221540
  misc_feature (14)..(160): Homolog of NCBI NO: 21592774 NR Description: unknown [Arabidopsis thaliana]
  misc_feature (14)..(160): Homolog of NCBI NO: 18407534 NR Description: protease inhibitor/seed storage/lipid transfer
  misc_feature (1)..(174): Homolog of NCBI NO: 25553595 NR Description: OJ1656_E11.26 [Oryza sativa (japonica
  misc_feature (20)..(170): Homolog of NCBI NO: 7487610 NR Description: hypothetical protein T3F12.2 - Arabidopsis
  misc_feature (7)..(144): Homolog of NCBI NO: 10176956 NR Description: contains similarity to nonspecific lipid-transfer
  misc_feature (7)..(171): Homolog of NCBI NO: 21618136 NR Description: nonspecific lipid-transfer protein-like protein
  misc_feature (5)..(144): Homolog of NCBI NO: 34394120 NR Description: hypothetical protein [Oryza sativa (japonica
  misc_feature (7)..(171): Homolog of NCBI NO: 18424785 NR Description: protease inhibitor/seed storage/lipid transfer
  misc_feature (13)..(134): Homolog of NCBI NO: 34913126 NR Description: hypothetical protein~predicted by FGENESH etc.
  misc_feature (13)..(175): Homolog of NCBI NO: 33146785 NR Description: unknown protein [Oryza sativa (japonica
MALTGGATTAACILVLLALADAAGAATRAPAPAPAPDCMEALISLADCLDYVTPSTKSARPSKACCTEVKTAVGTPATVKCLCAAMDAKTTPIPINMTRVLALPTACGQSASVLNKCHAAHGPGGAPAEAPSPSASSGGATASPPKANVAARSPGGSATVLLATVVTSLLAFYYL

SEQ ID NO: 56147 - protein, 137 aa, Glycine max
  peptide (1)..(137): Ceres Seq. ID no. 15221541
  misc_feature (1)..(122): Homolog of NCBI NO: 21592774 NR Description: unknown [Arabidopsis thaliana]
  misc_feature (1)..(122): Homolog of NCBI NO: 18407534 NR Description: protease inhibitor/seed storage/lipid transfer
  misc_feature (1)..(136): Homolog of NCBI NO: 25553595 NR Description: OJ1656_E11.26 [Oryza sativa (japonica
  misc_feature (1)..(132): Homolog of NCBI NO: 7487610 NR Description: hypothetical protein T3F12.2 - Arabidopsis
  misc_feature (1)..(106): Homolog of NCBI NO: 10176956 NR Description: contains similarity to nonspecific lipid-transfer
  misc_feature (1)..(133): Homolog of NCBI NO: 21618136 NR Description: nonspecific lipid-transfer protein-like protein
  misc_feature (1)..(106): Homolog of NCBI NO: 34394120 NR Description: hypothetical protein [Oryza sativa (japonica
  misc_feature (1)..(133): Homolog of NCBI NO: 18424785 NR Description: protease inhibitor/seed storage/lipid transfer
  misc_feature (1)..(96): Homolog of NCBI NO: 34913126 NR Description: hypothetical protein~predicted by FGENESH etc.
  misc_feature (1)..(137): Homolog of NCBI NO: 33146785 NR Description: unknown protein [Oryza sativa (japonica
MEALISLADCLDYVTPSTKSARPSKACCTEVKTAVGTPATVKCLCAAMDAKTTPIPINMTRVLALPTACGQSASVLNKCHAAHGPGGAPAEAPSPSASSGGATASPPKANVAARSPGGSATVLLATVVTSLLAFYYL

SEQ ID NO: 56148 - DNA, 831 bp, Glycine max
  misc_feature (1)..(831): Ceres Seq. ID no. 15172691
atctcaatttcgctgtacagaagagcttgattcccagagagacaaacccgacccgacaacccggaagaatcgaaaaaaatgggaaaggacggtctgagcgacgaccaggtctcatcgatgaaggaggcattcatgctcttcgacaccgacggtgacggcaaaatcgccccctccgagctcgggatcctgatgcgatccctcggcgggaacccgacccaagcccagctgaaatcgatcaccgcctccgagagcctaaccgccccgttcgatttcaaccgtttcctggatctcatggcgaagcacctgaagacggagcccttcgatcgccagctccgcgacgccttcaaggtgctcgacaaggaaggcactgggttcgttgccgttgcggatctgaggcatatcctcaccagcatcggcgagaagctggagcctaacgagttcgatgagtggatcaaggaggtggatgttggatccgatgggaagatccggtatgaggatttcattgcgaggatggtcgccaagtgagatctaatctgagtcctttgtttccaagtttgaattttgaaattcgaatttttattttgaagtatgttttaatttttttacataaagtttcagtctttatgctcttgtggtttggtttggtttggatcagtgaatctaattgattccagtctgtttactgttcgttgttttattttgttttaactaactctattgttgtgtgcttgtgattcctacttttattccaaggatgttaagtttcgctcttatgcccttataaatttgtaattcgttggtttggatcatgatcatggagtctgattgagt

SEQ ID NO: 56149 - protein, 148 aa, Glycine max
  peptide (1)..(148): Ceres Seq. ID no. 15172692
  misc_feature (120)..(148): Pfam Name: EF hand Pfam Description: EF hand
  misc_feature (4)..(148): Homolog of NCBI NO: 4959618 NR Description: calmodulin mutant SYNCAM45 [synthetic construct]
  misc_feature (4)..(148): Homolog of NCBI NO: 4959645 NR Description: calmodulin mutant SYNCAM31 [synthetic construct]
  misc_feature (4)..(148): Homolog of NCBI NO: 4959636 NR Description: calmodulin mutant SYNCAM36 [synthetic construct]
  misc_feature (4)..(148): Homolog of NCBI NO: 4959168 NR Description: calmodulin mutant SYNCAM62 [synthetic construct]
  misc_feature (1)..(148): Homolog of NCBI NO: 29367559 NR Description: putative serine/threonine kinase
  misc_feature (1)..(148): Homolog of NCBI NO: 28629126 NR Description: putative serine/threonine kinase [Vitis vinifera]
  misc_feature (1)..(147): Homolog of NCBI NO: 6630454 NR Description: F23N19.18 [Arabidopsis thaliana]
  misc_feature (1)..(148): Homolog of NCBI NO: 15221593 NR Description: calmodulin, putative [Arabidopsis thaliana]
  misc_feature (1)..(147): Homolog of NCBI NO: 25402719 NR Description: protein F5O11.4 [imported] - Arabidopsis thaliana
  misc_feature (1)..(148): Homolog of NCBI NO: 15221284 NR Description: calmodulin, putative [Arabidopsis thaliana]
MGKDGLSDDQVSSMKEAFMLFDTDGDGKIAPSELGILMRSLGGNPTQAQLKSITASESLTAPFDFNRFLDLMAKHLKTEPFDRQLRDAFKVLDKEGTGFVAVADLRHILTSIGEKLEPNEFDEWIKEVDVGSDGKIRYEDFIARMVAK

SEQ ID NO: 56150 - protein, 135 aa, Glycine max
  peptide (1)..(135): Ceres Seq. ID no. 15172693
  misc_feature (107)..(135): Pfam Name: EF hand Pfam Description: EF hand
  misc_feature (1)..(135): Homolog of NCBI NO: 4959618 NR Description: calmodulin mutant SYNCAM45 [synthetic construct]
  misc_feature (1)..(135): Homolog of NCBI NO: 4959645 NR Description: calmodulin mutant SYNCAM31 [synthetic construct]
  misc_feature (1)..(135): Homolog of NCBI NO: 4959636 NR Description: calmodulin mutant SYNCAM36 [synthetic construct]
  misc_feature (1)..(135): Homolog of NCBI NO: 4959168 NR Description: calmodulin mutant SYNCAM62 [synthetic construct]
  misc_feature (1)..(135): Homolog of NCBI NO: 29367559 NR Description: putative serine/threonine kinase
  misc_feature (1)..(135): Homolog of NCBI NO: 28629126 NR Description: putative serine/threonine kinase [Vitis vinifera]
  misc_feature (1)..(134): Homolog of NCBI NO: 6630454 NR Description: F23N19.18 [Arabidopsis thaliana]
  misc_feature (1)..(135): Homolog of NCBI NO: 15221593 NR Description: calmodulin, putative [Arabidopsis thaliana]
  misc_feature (1)..(134): Homolog of NCBI NO: 25402719 NR Description: protein F5O11.4 [imported] - Arabidopsis thaliana
  misc_feature (1)..(135): Homolog of NCBI NO: 15221284 NR Description: calmodulin, putative [Arabidopsis thaliana]
MKEAFMLFDTDGDGKIAPSELGILMRSLGGNPTQAQLKSITASESLTAPFDFNRFLDLMAKHLKTEPFDRQLRDAFKVLDKEGTGFVAVADLRHILTSIGEKLEPNEFDEWIKEVDVGSDGKIRYEDFIARMVAK

SEQ ID NO: 56151 - protein, 130 aa, Glycine max
  peptide (1)..(130): Ceres Seq. ID no. 15172694
  misc_feature (102)..(130): Pfam Name: EF hand Pfam Description: EF hand
  misc_feature (1)..(130): Homolog of NCBI NO: 4959618 NR Description: calmodulin mutant SYNCAM45 [synthetic construct]
  misc_feature (1)..(130): Homolog of NCBI NO: 4959636 NR Description: calmodulin mutant SYNCAM36 [synthetic construct]
  misc_feature (1)..(130): Homolog of NCBI NO: 4959645 NR Description: calmodulin mutant SYNCAM31 [synthetic construct]
  misc_feature (1)..(130): Homolog of NCBI NO: 4959168 NR Description: calmodulin mutant SYNCAM62 [synthetic construct]
  misc_feature (1)..(130): Homolog of NCBI NO: 29367559 NR Description: putative serine/threonine kinase
  misc_feature (1)..(130): Homolog of NCBI NO: 28629126 NR Description: putative serine/threonine kinase [Vitis vinifera]
  misc_feature (1)..(129): Homolog of NCBI NO: 6630454 NR Description: F23N19.18 [Arabidopsis thaliana]
  misc_feature (1)..(130): Homolog of NCBI NO: 15221593 NR Description: calmodulin, putative [Arabidopsis thaliana]
  misc_feature (1)..(129): Homolog of NCBI NO: 25402719 NR Description: protein F5O11.4 [imported] - Arabidopsis thaliana
  misc_feature (1)..(130): Homolog of NCBI NO: 15221284 NR Description: calmodulin, putative [Arabidopsis thaliana]
MLFDTDGDGKIAPSELGILMRSLGGNPTQAQLKSITASESLTAPFDFNRFLDLMAKHLKTEPFDRQLRDAFKVLDKEGTGFVAVADLRHILTSIGEKLEPNEFDEWIKEVDVGSDGKIRYEDFIARMVAK

SEQ ID NO: 56152 - DNA, 1022 bp, Glycine max
  misc_feature (1)..(1022): Ceres Seq. ID no. 13594966
aaaaccaacagctgctactccagcatccacccatccatctctcatcttcttcttcttgcgaccaaacgagcgtctagctagctaaagattcgaacgatggccgttcttgtggcgaggcaggggcgcgagctgcagcggtacagcacgagcaccggcgggcgcatcgtggtggggtgcatcccgtaccggatgcgcgacggcggcgacagcgacggcgagggcgagctggaggtgctggtcatcagctcgcagaaggggcacggcatgatgtttcccaagggcgggtgggagctggacgagtccatggacgacgcggcacggcgcgaggccctcgaggaggccggcgtccgcggggagatgggcaaggtgctcggctgctggcactaccagagccgccgctaccagaccacctacgagggcatcatgtacccgctccgcgtcaccgacgagctccagcagtggcccgagatggcgtcccgcaagcgcacctgggcaactgtgcagcaggtcatggagggatgccagcactgctggatgcgggaggcgctcgaggagctcgtcgcccggcacgccaagccgcagtccgccctgtgagcagccaagcgggctggcggggtgactggagctcgagcgcgcgcgactctcgcgagaagaggccgggagcgagcaccaacgtccgtccgtcgtcctcgtcgtctctctctcttctttcctcggtgcagcggcaggcctgccggcgtgtccggtgtcgtacgacgaccggaccggagcatatatttggccgcccttgccggagagacggactgggatccacgatggcacgcgcgcgtcgacgctttcctgaggcgcagagtcgtcgtcgccgtcgtcgcggcaaataatggggacgaacttagaaatgtgtgaggtagagatcgaaagcgaacggggcaggaaaacttgtcaaaacactgccgaacgaacatgctcacgattctttccttaggctctgggagtaaaagatcaaattgtaaattaattct

SEQ ID NO: 56153 - protein, 165 aa, Glycine max
  peptide (1)..(165): Ceres Seq. ID no. 13594967
  misc_feature (22)..(157): Pfam Name: NUDIX domain Pfam Description: NUDIX domain
  misc_feature (1)..(155): Homolog of NCBI NO: 18391450 NR Description: MutT/nudix family protein [Arabidopsis thaliana]
  misc_feature (1)..(153): Homolog of NCBI NO: 18399682 NR Description: MutT/nudix family protein [Arabidopsis thaliana]
  misc_feature (1)..(151): Homolog of NCBI NO: 34900054 NR Description: MutT-like protein~contains ESTs
  misc_feature (1)..(151): Homolog of NCBI NO: 38175436 NR Description: MutT-like protein [Oryza sativa (japonica
  misc_feature (1)..(155): Homolog of NCBI NO: 15221055 NR Description: MutT/nudix family protein [Arabidopsis thaliana]
  misc_feature (4)..(162): Homolog of NCBI NO: 25367539 NR Description: unknown protein [imported] - Arabidopsis thaliana
  misc_feature (4)..(162): Homolog of NCBI NO: 22330598 NR Description: MutT/nudix family protein [Arabidopsis thaliana]
  misc_feature (1)..(157): Homolog of NCBI NO: 15223919 NR Description: MutT/nudix family protein [Arabidopsis thaliana]
  misc_feature (1)..(163): Homolog of NCBI NO: 21595695 NR Description: unknown [Arabidopsis thaliana]
  misc_feature (1)..(163): Homolog of NCBI NO: 18379275 NR Description: MutT/nudix family protein [Arabidopsis thaliana]
MAVLVARQGRELQRYSTSTGGRIVVGCIPYRMRDGGDSDGEGELEVLVISSQKGHGMMFPKGGWELDESMDDAARREALEEAGVRGEMGKVLGCWHYQSRRYQTTYEGIMYPLRVTDELQQWPEMASRKRTWATVQQVMEGCQHCWMREALEELVARHAKPQSAL

SEQ ID NO: 56154 - protein, 134 aa, Glycine max
  peptide (1)..(134): Ceres Seq. ID no. 13594968
  misc_feature (1)..(126): Pfam Name: NUDIX domain Pfam Description: NUDIX domain
  misc_feature (1)..(124): Homolog of NCBI NO: 18391450 NR Description: MutT/nudix family protein [Arabidopsis thaliana]
  misc_feature (1)..(122): Homolog of NCBI NO: 18399682 NR Description: MutT/nudix family protein [Arabidopsis thaliana]
  misc_feature (1)..(120): Homolog of NCBI NO: 34900054 NR Description: MutT-like protein~contains ESTs
  misc_feature (1)..(120): Homolog of NCBI NO: 38175436 NR Description: MutT-like protein [Oryza sativa (japonica
  misc_feature (1)..(124): Homolog of NCBI NO: 15221055 NR Description: MutT/nudix family protein [Arabidopsis thaliana]
  misc_feature (1)..(131): Homolog of NCBI NO: 25367539 NR Description: unknown protein [imported] - Arabidopsis thaliana
  misc_feature (1)..(131): Homolog of NCBI NO: 22330598 NR Description: MutT/nudix family protein [Arabidopsis thaliana]
  misc_feature (1)..(126): Homolog of NCBI NO: 15223919 NR Description: MutT/nudix family protein [Arabidopsis thaliana]
  misc_feature (1)..(132): Homolog of NCBI NO: 21595695 NR Description: unknown [Arabidopsis thaliana]
  misc_feature (1)..(132): Homolog of NCBI NO: 18379275 NR Description: MutT/nudix family protein [Arabidopsis thaliana]
MRDGGDSDGEGELEVLVISSQKGHGMMFPKGGWELDESMDDAARREALEEAGVRGEMGKVLGCWHYQSRRYQTTYEGIMYPLRVTDELQQWPEMASRKRTWATVQQVMEGCQHCWMREALEELVARHAKPQSAL

SEQ ID NO: 56155 - protein, 120 aa, Glycine max
  peptide (1)..(120): Ceres Seq. ID no. 13594969
MPALLDAGGARGARRPARQAAVRPVSSQAGWRGDWSSSARDSREKRPGASTNVRPSSSSSLSLLSSVQRQACRRVRCRTTTGPEHIFGRPCRRDGLGSTMARARRRFPEAQSRRRRRRGK

SEQ ID NO: 56156 - DNA, 1265 bp, Glycine max
  misc_feature (1)..(1265): Ceres Seq. ID no. 13581959
ctctcagatgctccggttgtcacgttttctctgctgaaatatttacttttaggatgctaagatgataaagatccacccttgctgtcatttacctgttaacatcttattctctccgttctttgcttgcttattagctgagacggctagtacatgttaacagtatcacccttagggatcagtttcttccagtagtgcccctctgtttttccttttaccttctaagttcatgaagtatacattggagtccaggaaggttcgtcacaagaatgttgtgcaatttattggtgcatgcactaaacccccaaggctatgcatagtcacagaatttatgtccggtgggagtgtgtatgattatcttcataagcataaaggtatcttcaagctccctgccttagttggagttgcaatggatgtgtcaaaaggcatgagctacttacaccaaaataatattattcatcgggatctgaaaaccgccaatcttcttatggatgagaacgggatggttaaagttgctgattttggtgttgcacgtgttaaagttcagtctggagtaatgactgcagaaaccgggacataccgttggatggccccggaggttatagaacacaagccctacgaccacaaggctgatgtttttagttttggaattttgttgtgggaactgctcactgggaagattccttacgagtacctgacaccattacaagcagctgtaggtgtggttcagaagggattgcggcccacaataccaaaaaatgctcatgcaaagcttgcggagctccttcagaagtgctggcagcaggaccctgctgaaaggccagatttctccgagatattagaagctctcaagaaaatagcagaggaggtcggagatgagcacgacggaaagcacaaggacaaaagcctggggggattcttttcgtctctgagggggcgaggacactaaggtggcgctggtgtacatggcttgcaatccgttcggacgggcctgagcgaagatcagcgcctgtttatcagcatacccagtgccagtacattgagatggacagtgaactgggccggatggcaacttttcagctgtagctccactcatcggccacagccaatagtttttttttttgtctggttatttacttccgggttctgttacatgtaacataggaagagaatgcttgtggactgtacattgtttaatctgattttaacaggctgtaacttgcacatgaaataataagcctagcttagggcatgctgtgattctttct

SEQ ID NO: 56157 - protein, 239 aa, Glycine max
  peptide (1)..(239): Ceres Seq. ID no. 13581960
  misc_feature (8)..(207): Pfam Name: Protein kinase domain Pfam Description: Protein kinase domain
  misc_feature (10)..(214): Homolog of NCBI NO: 15235845 NR Description: protein kinase family [Arabidopsis thaliana]
  misc_feature (95)..(239): Homolog of NCBI NO: 33772207 NR Description: protein kinase [Malus x domestica]
  misc_feature (1)..(214): Homolog of NCBI NO: 27085278 NR Description: serine/threonine protein kinase
  misc_feature (1)..(235): Homolog of NCBI NO: 7485889 NR Description: hypothetical protein F20M13.30 - Arabidopsis
  misc_feature (8)..(212): Homolog of NCBI NO: 34901608 NR Description: P0571D04.18 [Oryza sativa (japonica
  misc_feature (8)..(226): Homolog of NCBI NO: 34393850 NR Description: putative serine/threonine protein kinase
  misc_feature (1)..(214): Homolog of NCBI NO: 15227883 NR Description: protein kinase family [Arabidopsis thaliana]
  misc_feature (8)..(239): Homolog of NCBI NO: 7486654 NR Description: hypothetical protein F8D20.290 - Arabidopsis
  misc_feature (8)..(239): Homolog of NCBI NO: 22329194 NR Description: protein kinase family [Arabidopsis thaliana]
  misc_feature (1)..(235): Homolog of NCBI NO: 18420244 NR Description: protein kinase family [Arabidopsis thaliana]
MKYTLESRKVRHKNVVQFIGACTKPPRLCIVTEFMSGGSVYDYLHKHKGIFKLPALVGVAMDVSKGMSYLHQNNIIHRDLKTANLLMDENGMVKVADFGVARVKVQSGVMTAETGTYRWMAPEVIEHKPYDHKADVFSFGILLWELLTGKIPYEYLTPLQAAVGVVQKGLRPTIPKNAHAKLAELLQKCWQQDPAERPDFSEILEALKKIAEEVGDEHDGKHKDKSLGGFFSSLRGRGH

SEQ ID NO: 56158 - protein, 205 aa, Glycine max
  peptide (1)..(205): Ceres Seq. ID no. 13581961
  misc_feature (1)..(173): Pfam Name: Protein kinase domain Pfam Description: Protein kinase domain
  misc_feature (1)..(180): Homolog of NCBI NO: 15235845 NR Description: protein kinase family [Arabidopsis thaliana]
  misc_feature (61)..(205): Homolog of NCBI NO: 33772207 NR Description: protein kinase [Malus x domestica]
  misc_feature (1)..(180): Homolog of NCBI NO: 27085278 NR Description: serine/threonine protein kinase
  misc_feature (1)..(201): Homolog of NCBI NO: 7485889 NR Description: hypothetical protein F20M13.30 - Arabidopsis
  misc_feature (1)..(178): Homolog of NCBI NO: 34901608 NR Description: P0571D04.18 [Oryza sativa (japonica
  misc_feature (1)..(192): Homolog of NCBI NO: 34393850 NR Description: putative serine/threonine protein kinase
  misc_feature (1)..(180): Homolog of NCBI NO: 15227883 NR Description: protein kinase family [Arabidopsis thaliana]
  misc_feature (1)..(205): Homolog of NCBI NO: 7486654 NR Description: hypothetical protein F8D20.290 - Arabidopsis
  misc_feature (1)..(205): Homolog of NCBI NO: 22329194 NR Description: protein kinase family [Arabidopsis thaliana]
  misc_feature (1)..(201): Homolog of NCBI NO: 18420244 NR Description: protein kinase family [Arabidopsis thaliana]
MSGGSVYDYLHKHKGIFKLPALVGVAMDVSKGMSYLHQNNIIHRDLKTANLLMDENGMVKVADFGVARVKVQSGVMTAETGTYRWMAPEVIEHKPYDHKADVFSFGILLWELLTGKIPYEYLTPLQAAVGVVQKGLRPTIPKNAHAKLAELLQKCWQQDPAERPDFSEILEALKKIAEEVGDEHDGKHKDKSLGGFFSSLRGRGH

SEQ ID NO: 56159 - protein, 179 aa, Glycine max
  peptide (1)..(179): Ceres Seq. ID no. 13581962
  misc_feature (1)..(147): Pfam Name: Protein kinase domain Pfam Description: Protein kinase domain
  misc_feature (1)..(154): Homolog of NCBI NO: 15235845 NR Description: protein kinase family [Arabidopsis thaliana]
  misc_feature (35)..(179): Homolog of NCBI NO: 33772207 NR Description: protein kinase [Malus x domestica]
  misc_feature (1)..(154): Homolog of NCBI NO: 27085278 NR Description: serine/threonine protein kinase
  misc_feature (1)..(175): Homolog of NCBI NO: 7485889 NR Description: hypothetical protein F20M13.30 - Arabidopsis
  misc_feature (1)..(152): Homolog of NCBI NO: 34901608 NR Description: P0571D04.18 [Oryza sativa (japonica
  misc_feature (1)..(166): Homolog of NCBI NO: 34393850 NR Description: putative serine/threonine protein kinase
  misc_feature (1)..(154): Homolog of NCBI NO: 15227883 NR Description: protein kinase family [Arabidopsis thaliana]
  misc_feature (1)..(179): Homolog of NCBI NO: 7486654 NR Description: hypothetical protein F8D20.290 - Arabidopsis
  misc_feature (1)..(179): Homolog of NCBI NO: 22329194 NR Description: protein kinase family [Arabidopsis thaliana]
  misc_feature (1)..(175): Homolog of NCBI NO: 18420244 NR Description: protein kinase family [Arabidopsis thaliana]
MDVSKGMSYLHQNNIIHRDLKTANLLMDENGMVKVADFGVARVKVQSGVMTAETGTYRWMAPEVIEHKPYDHKADVFSFGILLWELLTGKIPYEYLTPLQAAVGVVQKGLRPTIPKNAHAKLAELLQKCWQQDPAERPDFSEILEALKKIAEEVGDEHDGKHKDKSLGGFFSSLRGRGH

SEQ ID NO: 56160 - DNA, 1424 bp, Glycine max
  misc_feature (1)..(1424): Ceres Seq. ID no. 13595337
ctaaaccacccctgaaaaccctcagacgaacgaaagacctagcgctcctctcccttcgtctctcgcgactggcggcggcggtcgaacgaggccacccgacggcggcagagcgagtaggtgctttccaagcttcgccagaggtgtaaacccttcgctagaggcctcagtccctttcccgcgcggcttgagcaagatgagcaagatggcgatcagggttcccaagtccatgcgcgccaagcgtgagctcctcaagcacgcgcccaagctcgttgagaatggcaagaagatgcttattcttcatggtacaaagaccagcgcagttttgaactctgtgctggcagatcttttccacctgaagcgtgatcatgctgtcaagtacaccaagaagaacgacagcatcaggccatttgagagcgggggtgaaacttccctggagttcttctcccttaaatctgactgcagcctcttagtgtatggttctcactcaaagaagaggcccaacaatcttgttctgggaaggacttacgatcaccacatatatgacctcgttgaagtgggagttgagaactacaaatccatagaatcctatgcatatgataaaaagttggcacctaaacttgggacaaagcctttctttgctttcattggggagcactttgagagtgttgaaggactgaagcatttgaaggaaatgctgcttgatcatttcaaaggagaggtggtagagaatctgaaccttgctggtgtagatcggatattcgtgtgcacagcaatttctcctactaccgtctacatgatgcactgcgctctccgtctaaaaaggtcaggcacatctattcctagaatggagctggttgaagttgggccttcagtggacctggtacttaggcggcaccgacaagcagctgaaagtttacagaaagaagctatgaaggctcctggtcatgctaagaaggtgaaaaatgtcaccaataatccagttgaaggcaagcagggcaggatctacattccagaccaggaggtctcaaaattgaccgtaacaagcaacataaagggtctgaagcgggagcgccgtgacgccaagaaaaacaaggagcactcgaagaagcaaaaggtggccgaaaaccctgagtgaccactggagaaggctagtatctgtaaccggtcagtttaaggactttcggtcgataggttcagtggtaaatagtccagtaccatcttttaaggctatcaaacctgtgtacggacttaggcatcagtatcgaggcagcctctctatcagacataagcatgaaattttggagcaacatatgctacaagtattttttttactgttgttattcgcccctgatattagccaatcagagacgactgttgtgatgacatggttaagtttggttatcatggacattatgccttttctg

SEQ ID NO: 56161 - protein, 313 aa, Glycine max
  peptide (1)..(313): Ceres Seq. ID no. 13595338
  misc_feature (9)..(307): Homolog of NCBI NO: 34935586 NR Description: similar to RIKEN cDNA 2810470K21 gene [Rattus
  misc_feature (9)..(256): Homolog of NCBI NO: 10437105 NR Description: unnamed protein product [Homo sapiens]
  misc_feature (9)..(307): Homolog of NCBI NO: 28461332 NR Description: Similar to RIKEN cDNA 2810470K21 gene [Xenopus
  misc_feature (9)..(311): Homolog of NCBI NO: 12850727 NR Description: unnamed protein product [Mus musculus]
  misc_feature (9)..(307): Homolog of NCBI NO: 27705690 NR Description: similar to RIKEN cDNA 2810470K21 gene
  misc_feature (6)..(311): Homolog of NCBI NO: 7670547 NR Description: unnamed protein product [Mus musculus]
  misc_feature (9)..(307): Homolog of NCBI NO: 39930469 NR Description: brix domain containing 1 [Homo sapiens]
  misc_feature (4)..(309): Homolog of NCBI NO: 21554561 NR Description: unknown [Arabidopsis thaliana]
  misc_feature (4)..(309): Homolog of NCBI NO: 18403828 NR Description: expressed protein [Arabidopsis thaliana]
  misc_feature (5)..(313): Homolog of NCBI NO: 34914658 NR Description: P0504D03.20 [Oryza sativa (japonica
MSKMAIRVPKSMRAKRELLKHAPKLVENGKKMLILHGTKTSAVLNSVLADLFHLKRDHAVKYTKKNDSIRPFESGGETSLEFFSLKSDCSLLVYGSHSKKRPNNLVLGRTYDHHIYDLVEVGVENYKSIESYAYDKKLAPKLGTKPFFAFIGEHFESVEGLKHLKEMLLDHFKGEVVENLNLAGVDRIFVCTAISPTTVYMMHCALRLKRSGTSIPRMELVEVGPSVDLVLRRHRQAAESLQKEAMKAPGHAKKVKNVTNNPVEGKQGRIYIPDQEVSKLTVTSNIKGLKRERRDAKKNKEHSKKQKVAENPE

SEQ ID NO: 56162 - protein, 310 aa, Glycine max
  peptide (1)..(310): Ceres Seq. ID no. 13595339
  misc_feature (6)..(304): Homolog of NCBI NO: 34935586 NR Description: similar to RIKEN cDNA 2810470K21 gene [Rattus
  misc_feature (6)..(253): Homolog of NCBI NO: 10437105 NR Description: unnamed protein product [Homo sapiens]
  misc_feature (6)..(304): Homolog of NCBI NO: 28461332 NR Description: Similar to RIKEN cDNA 2810470K21 gene [Xenopus
  misc_feature (6)..(308): Homolog of NCBI NO: 12850727 NR Description: unnamed protein product [Mus musculus]
  misc_feature (6)..(304): Homolog of NCBI NO: 27705690 NR Description: similar to RIKEN cDNA 2810470K21 gene
  misc_feature (3)..(308): Homolog of NCBI NO: 7670547 NR Description: unnamed protein product [Mus musculus]
  misc_feature (6)..(304): Homolog of NCBI NO: 39930469 NR Description: brix domain containing 1 [Homo sapiens]
  misc_feature (1)..(306): Homolog of NCBI NO: 21554561 NR Description: unknown [Arabidopsis thaliana]
  misc_feature (1)..(306): Homolog of NCBI NO: 18403828 NR Description: expressed protein [Arabidopsis thaliana]
  misc_feature (2)..(310): Homolog of NCBI NO: 34914658 NR Description: P0504D03.20 [Oryza sativa (japonica
MAIRVPKSMRAKRELLKHAPKLVENGKKMLILHGTKTSAVLNSVLADLFHLKRDHAVKYTKKNDSIRPFESGGETSLEFFSLKSDCSLLVYGSHSKKRPNNLVLGRTYDHHIYDLVEVGVENYKSIESYAYDKKLAPKLGTKPFFAFIGEHFESVEGLKHLKEMLLDHFKGEVVENLNLAGVDRIFVCTAISPTTVYMMHCALRLKRSGTSIPRMELVEVGPSVDLVLRRHRQAAESLQKEAMKAPGHAKKVKNVTNNPVEGKQGRIYIPDQEVSKLTVTSNIKGLKRERRDAKKNKEHSKKQKVAENPE

SEQ ID NO: 56163 - protein, 302 aa, Glycine max
  peptide (1)..(302): Ceres Seq. ID no. 13595340
  misc_feature (1)..(296): Homolog of NCBI NO: 34935586 NR Description: similar to RIKEN cDNA 2810470K21 gene [Rattus
  misc_feature (1)..(245): Homolog of NCBI NO: 10437105 NR Description: unnamed protein product [Homo sapiens]
  misc_feature (1)..(296): Homolog of NCBI NO: 28461332 NR Description: Similar to RIKEN cDNA 2810470K21 gene [Xenopus
  misc_feature (1)..(300): Homolog of NCBI NO: 12850727 NR Description: unnamed protein product [Mus musculus]
  misc_feature (1)..(296): Homolog of NCBI NO: 27705690 NR Description: similar to RIKEN cDNA 2810470K21 gene
  misc_feature (1)..(300): Homolog of NCBI NO: 7670547 NR Description: unnamed protein product [Mus musculus]
  misc_feature (1)..(296): Homolog of NCBI NO: 39930469 NR Description: brix domain containing 1 [Homo sapiens]
  misc_feature (1)..(298): Homolog of NCBI NO: 21554561 NR Description: unknown [Arabidopsis thaliana]
  misc_feature (1)..(298): Homolog of NCBI NO: 18403828 NR Description: expressed protein [Arabidopsis thaliana]
  misc_feature (1)..(302): Homolog of NCBI NO: 34914658 NR Description: P0504D03.20 [Oryza sativa (japonica
MRAKRELLKHAPKLVENGKKMLILHGTKTSAVLNSVLADLFHLKRDHAVKYTKKNDSIRPFESGGETSLEFFSLKSDCSLLVYGSHSKKRPNNLVLGRTYDHHIYDLVEVGVENYKSIESYAYDKKLAPKLGTKPFFAFIGEHFESVEGLKHLKEMLLDHFKGEVVENLNLAGVDRIFVCTAISPTTVYMMHCALRLKRSGTSIPRMELVEVGPSVDLVLRRHRQAAESLQKEAMKAPGHAKKVKNVTNNPVEGKQGRIYIPDQEVSKLTVTSNIKGLKRERRDAKKNKEHSKKQKVAENPE

SEQ ID NO: 56164 - DNA, 1283 bp, Glycine max
  misc_feature (1)..(1283): Ceres Seq. ID no. 13595392
cttgccttagttttagacgccggcgccgtagagcccgttccccctcacgcggccagcgaccatgtcgagtggcctgaacatgtccctagatgacctcatcaagcaatccaagtccaggcccaaagccaaccccgccttctcttccgggcccacccgccgggcggcgccgtccgcccggaccatgccctacccgccgtctgctcccaaggccgccaccgccgactctctgtacggtgtctactccgagcacgttgccgccatggcaacctccccgccaccgccggcggtggccgggccacaggcactcgagacgggcacgaagctgcacatctccaacctcgactccagcgtcaccgtcgaggacgtccaggaactcttttcagagattggtgagctcaaacgttattctgttaactacgataaggatgggaagtctcagggaagtgcggaagttgtctttgcaagaaaagtagatgctttggatgctattgagagatataatggtgttctgcttgatgggaagccaatgaagatagagctcattggaaataagaccgagccacacccaacagaacctttgatgtacaacggcacttcttctaactacaatgcaatgccaaacagtctgcttcagagaggtggcccgagagggccatttcatggtaatggtcgttctggaggcagtggtcagggcggtgctggcaaaagaggaatgtttcaaggcaacgttcgtcctggaaacactgtccaggacggtggtgggcggggacagggtagagccagggggcatgatcgcagccgagttccgacctctgctgcggatcttgatgctgaactggagcagtatcatgcagcagcagtgaagcaaaaatgaggctctgatgtatattttatactccctccttccatatataagtgacgtagttttagtccaaatttaaactaaaaccacgtcacttatttatgaactgagggagtatatacatagactgttgcattattagttttctgcttttagtcgtcaggtaccatgttgagaaaagttggaaggcattaattcgacatttacatctgctgcgctttttatatccctactccgagtgctggatatattgtattacctaattttgaaacatgggtgttctcttggggtttatttggatagtaagattacaaagaactagttcttgttaaattcaatttctaactgaatcttggatatgtcatatcatcttgtttggattgtctaactgaatctttagatataaaatcctgagttttgc

SEQ ID NO: 56165 - protein, 270 aa, Glycine max
  peptide (1)..(270): Ceres Seq. ID no. 13595393
  misc_feature (1)..(216): Homolog of NCBI NO: 21555029 NR Description: transcriptional coactivator-like protein
  misc_feature (1)..(221): Homolog of NCBI NO: 30697310 NR Description: RNA and export factor binding protein, putative
  misc_feature (1)..(221): Homolog of NCBI NO: 30697313 NR Description: RNA and export factor binding protein, putative
  misc_feature (1)..(267): Homolog of NCBI NO: 25404603 NR Description: hypothetical protein T6J19.1 [imported] -
  misc_feature (1)..(267): Homolog of NCBI NO: 30693141 NR Description: RNA and export factor binding protein, putative
  misc_feature (27)..(268): Homolog of NCBI NO: 11358209 NR Description: hypothetical protein T22P11.120 - Arabidopsis
  misc_feature (27)..(268): Homolog of NCBI NO: 30679669 NR Description: RNA and export factor binding protein, putative
  misc_feature (167)..(270): Homolog of NCBI NO: 34900544 NR Description: P0565A07.3 [Oryza sativa (japonica
  misc_feature (1)..(190): Homolog of NCBI NO: 34900544 NR Description: P0565A07.3 [Oryza sativa (japonica
  misc_feature (1)..(270): Homolog of NCBI NO: 33146678 NR Description: putative RNA and export factor binding protein
MSSGLNMSLDDLIKQSKSRPKANPAFSSGPTRRAAPSARTMPYPPSAPKAATADSLYGVYSEHVAAMATSPPPPAVAGPQALETGTKLHISNLDSSVTVEDVQELFSEIGELKRYSVNYDKDGKSQGSAEVVFARKVDALDAIERYNGVLLDGKPMKIELIGNKTEPHPTEPLMYNGTSSNYNAMPNSLLQRGGPRGPFHGNGRSGGSGQGGAGKRGMFQGNVRPGNTVQDGGGRGQGRARGHDRSRVPTSAADLDAELEQYHAAAVKQK

SEQ ID NO: 56166 - protein, 264 aa, Glycine max
  peptide (1)..(264): Ceres Seq. ID no. 13595394
  misc_feature (1)..(210): Homolog of NCBI NO: 21555029 NR Description: transcriptional coactivator-like protein
  misc_feature (1)..(215): Homolog of NCBI NO: 30697310 NR Description: RNA and export factor binding protein, putative
  misc_feature (1)..(215): Homolog of NCBI NO: 30697313 NR Description: RNA and export factor binding protein, putative
  misc_feature (1)..(261): Homolog of NCBI NO: 25404603 NR Description: hypothetical protein T6J19.1 [imported] -
  misc_feature (1)..(261): Homolog of NCBI NO: 30693141 NR Description: RNA and export factor binding protein, putative
  misc_feature (21)..(262): Homolog of NCBI NO: 11358209 NR Description: hypothetical protein T22P11.120 - Arabidopsis
  misc_feature (21)..(262): Homolog of NCBI NO: 30679669 NR Description: RNA and export factor binding protein, putative
  misc_feature (161)..(264): Homolog of NCBI NO: 34900544 NR Description: P0565A07.3 [Oryza sativa (japonica
  misc_feature (1)..(184): Homolog of NCBI NO: 34900544 NR Description: P0565A07.3 [Oryza sativa (japonica
  misc_feature (1)..(264): Homolog of NCBI NO: 33146678 NR Description: putative RNA and export factor binding protein
MSLDDLIKQSKSRPKANPAFSSGPTRRAAPSARTMPYPPSAPKAATADSLYGVYSEHVAAMATSPPPPAVAGPQALETGTKLHISNLDSSVTVEDVQELFSEIGELKRYSVNYDKDGKSQGSAEVVFARKVDALDAIERYNGVLLDGKPMKIELIGNKTEPHPTEPLMYNGTSSNYNAMPNSLLQRGGPRGPFHGNGRSGGSGQGGAGKRGMFQGNVRPGNTVQDGGGRGQGRARGHDRSRVPTSAADLDAELEQYHAAAVKQK

SEQ ID NO: 56167 - protein, 230 aa, Glycine max
  peptide (1)..(230): Ceres Seq. ID no. 13595395
  misc_feature (1)..(176): Homolog of NCBI NO: 21555029 NR Description: transcriptional coactivator-like protein
  misc_feature (1)..(181): Homolog of NCBI NO: 30697310 NR Description: RNA and export factor binding protein, putative
  misc_feature (1)..(181): Homolog of NCBI NO: 30697313 NR Description: RNA and export factor binding protein, putative
  misc_feature (1)..(227): Homolog of NCBI NO: 25404603 NR Description: hypothetical protein T6J19.1 [imported] -
  misc_feature (1)..(227): Homolog of NCBI NO: 30693141 NR Description: RNA and export factor binding protein, putative
  misc_feature (1)..(228): Homolog of NCBI NO: 11358209 NR Description: hypothetical protein T22P11.120 - Arabidopsis
  misc_feature (1)..(228): Homolog of NCBI NO: 30679669 NR Description: RNA and export factor binding protein, putative
  misc_feature (127)..(230): Homolog of NCBI NO: 34900544 NR Description: P0565A07.3 [Oryza sativa (japonica
  misc_feature (1)..(150): Homolog of NCBI NO: 34900544 NR Description: P0565A07.3 [Oryza sativa (japonica
  misc_feature (1)..(230): Homolog of NCBI NO: 33146678 NR Description: putative RNA and export factor binding protein
MPYPPSAPKAATADSLYGVYSEHVAAMATSPPPPAVAGPQALETGTKLHISNLDSSVTVEDVQELFSEIGELKRYSVNYDKDGKSQGSAEVVFARKVDALDAIERYNGVLLDGKPMKIELIGNKTEPHPTEPLMYNGTSSNYNAMPNSLLQRGGPRGPFHGNGRSGGSGQGGAGKRGMFQGNVRPGNTVQDGGGRGQGRARGHDRSRVPTSAADLDAELEQYHAAAVKQK

SEQ ID NO: 56168 - DNA, 661 bp, Glycine max
  misc_feature (1)..(661): Ceres Seq. ID no. 12610112
attaacccgctccaaaaccctgagctgcgcacccaccggcgatgtcggcgacggccatccgctccggcgagctcctcgcttttcccgccgcgctgaggcgtggcctgcccgtggcttctgcctcggtggtcgcgttccggttgagggcgccagtggccgggcgcgtggcggtcagggttgtcgcggcggcggcggagggggcaggggcggaggcggaggcggaagggaagccgaagccgaagaagaagagggcagcgagcgggatcatgaagcctaagccgatttctccggagctaagggagtttgtcggaggcgcggcggagctgccccggacagaggcgctcaagatcatctgggcgcacatcaagggaaacaacctccaggatcccgagaacaagaagataatagtctgcgatgagaaactgaagaagatatttggagggcgtgaccgtgttgggtttcttgagatctctgggctcctcaatccccatttccagaaatgatagggtttatgtagatgttgcactttttctgtattagctaagacagttgtatcagcatatttagctgaacctggtatggagggtccgtaattctggtttgagaatggtacgtctagtatttgcagtaaatggctttgctggtttttggctcgtgattt

SEQ ID NO: 56169 - protein, 153 aa, Glycine max
  peptide (1)..(153): Ceres Seq. ID no. 12610113
  misc_feature (24)..(153): Homolog of NCBI NO: 21593643 NR Description: unknown [Arabidopsis thaliana]
  misc_feature (24)..(153): Homolog of NCBI NO: 18396594 NR Description: expressed protein
  misc_feature (38)..(153): Homolog of NCBI NO: 33667910 NR Description: SWIb domain-containing protein [Solanum chacoense]
  misc_feature (44)..(151): Homolog of NCBI NO: 21553903 NR Description: unknown [Arabidopsis thaliana]
  misc_feature (23)..(151): Homolog of NCBI NO: 15235320 NR Description: putative protein
  misc_feature (23)..(151): Homolog of NCBI NO: 14423526 NR Description: putative protein [Arabidopsis thaliana]
  misc_feature (5)..(151): Homolog of NCBI NO: 19698859 NR Description: unknown protein [Arabidopsis thaliana]
  misc_feature (37)..(151): Homolog of NCBI NO: 21593713 NR Description: unknown [Arabidopsis thaliana]
  misc_feature (5)..(151): Homolog of NCBI NO: 18397658 NR Description: expressed protein
  misc_feature (2)..(153): Homolog of NCBI NO: 14488372 NR Description: hypothetical protein [Oryza sativa (japonica
MSATAIRSGELLAFPAALRRGLPVASASVVAFRLRAPVAGRVAVRVVAAAAEGAGAEAEAEGKPKPKKKRAASGIMKPKPISPELREFVGGAAELPRTEALKIIWAHIKGNNLQDPENKKIIVCDEKLKKIFGGRDRVGFLEISGLLNPHFQK

SEQ ID NO: 56170 - protein, 91 aa, Glycine max
  peptide (1)..(91): Ceres Seq. ID no. 12610114
  misc_feature (31)..(91): Pfam Name: Protein of unknown function, DUF584 Pfam Description: Protein of unknown function, DUF584
LTRSKTLSCAPTGDVGDGHPLRRAPRFSRRAEAWPARGFCLGGRVPVEGASGRARGGQGCRGGGGGGRGGGGGGREAEAEEEEGSERDHEA

SEQ ID NO: 56171 - protein, 78 aa, Glycine max
  peptide (1)..(78): Ceres Seq. ID no. 12610115
  misc_feature (1)..(78): Homolog of NCBI NO: 21593643 NR Description: unknown [Arabidopsis thaliana]
  misc_feature (1)..(78): Homolog of NCBI NO: 18396594 NR Description: expressed protein
  misc_feature (1)..(78): Homolog of NCBI NO: 33667910 NR Description: SWIb domain-containing protein [Solanum chacoense]
  misc_feature (1)..(76): Homolog of NCBI NO: 21553903 NR Description: unknown [Arabidopsis thaliana]
  misc_feature (1)..(76): Homolog of NCBI NO: 15235320 NR Description: putative protein
  misc_feature (1)..(76): Homolog of NCBI NO: 14423526 NR Description: putative protein [Arabidopsis thaliana]
  misc_feature (1)..(76): Homolog of NCBI NO: 19698859 NR Description: unknown protein [Arabidopsis thaliana]
  misc_feature (1)..(76): Homolog of NCBI NO: 21593713 NR Description: unknown [Arabidopsis thaliana]
  misc_feature (1)..(76): Homolog of NCBI NO: 18397658 NR Description: expressed protein
  misc_feature (1)..(78): Homolog of NCBI NO: 14488372 NR Description: hypothetical protein [Oryza sativa (japonica
MKPKPISPELREFVGGAAELPRTEALKIIWAHIKGNNLQDPENKKIIVCDEKLKKIFGGRDRVGFLEISGLLNPHFQK

SEQ ID NO: 56172 - DNA, 660 bp, Glycine max
  misc_feature (1)..(660): Ceres Seq. ID no. 13594979
accaagcaattcaaacaacacggtaacacgcaaactccgagaaaatccccaaatcacataaaattagggttacgaatcggggaaagttgtctctcctttcaccctaattcgatgcctataggtttcaggaaccaagtgatgcggtcgttctcgtggatcatcatccctttactcttattgctattctgcttgatcggctcctcacaagcagcggacgagaaatcaagcggcgacgtgtgcaatacggtttcggatccgggcgggtgcccaataaactgtttccgggcggatccggtttgcggagccgacggagtcacgtactggtgcggttgtcccgacgcggcgtgccacggagctcgcgtggtgaaaacgggagcctgcgacgcgggtaacgcgggaagcgcttctgtgccgggtcaagctttgttactgatccatatcgtttggctcttcttgctcggactctctcttctcgtcggtgctttctgaatggattagataataaggaaattgatcccaattcgtttctgtagcttcttcttttgtcgtgatttatagatcagcacttgtgtttgagatgattcatgcttctgtagatcacacgttatgtgtttgtatgtgtaacgttgagttggtttctcttaatggatttgcttcgtc

SEQ ID NO: 56173 - protein, 162 aa, Glycine max
  peptide (1)..(162): Ceres Seq. ID no. 13594980
  misc_feature (80)..(127): Pfam Name: Kazal-type serine protease inhibitor domain Pfam Description: Kazal-type serine protease inhibitor domain
  misc_feature (53)..(160): Homolog of NCBI NO: 34909170 NR Description: P0468B07.28 [Oryza sativa (japonica
  misc_feature (67)..(162): Homolog of NCBI NO: 21555759 NR Description: unknown [Arabidopsis thaliana]
  misc_feature (67)..(162): Homolog of NCBI NO: 18411677 NR Description: expressed protein [Arabidopsis thaliana]
  misc_feature (55)..(162): Homolog of NCBI NO: 21554106 NR Description: unknown [Arabidopsis thaliana]
  misc_feature (55)..(162): Homolog of NCBI NO: 18412211 NR Description: expressed protein [Arabidopsis thaliana]
TKQFKQHGNTQTPRKSPNHIKLGLRIGESCLSFHPNSMPIGFRNQVMRSFSWIIIPLLLLLFCLIGSSQAADEKSSGDVCNTVSDPGGCPINCFRADPVCGADGVTYWCGCPDAACHGARVVKTGACDAGNAGSASVPGQALLLIHIVWLFLLGLSLLVGAF

SEQ ID NO: 56174 - protein, 125 aa, Glycine max
  peptide (1)..(125): Ceres Seq. ID no. 13594981
  misc_feature (43)..(90): Pfam Name: Kazal-type serine protease inhibitor domain Pfam Description: Kazal-type serine protease inhibitor domain
  misc_feature (16)..(123): Homolog of NCBI NO: 34909170 NR Description: P0468B07.28 [Oryza sativa (japonica
  misc_feature (30)..(125): Homolog of NCBI NO: 21555759 NR Description: unknown [Arabidopsis thaliana]
  misc_feature (30)..(125): Homolog of NCBI NO: 18411677 NR Description: expressed protein [Arabidopsis thaliana]
  misc_feature (18)..(125): Homolog of NCBI NO: 21554106 NR Description: unknown [Arabidopsis thaliana]
  misc_feature (18)..(125): Homolog of NCBI NO: 18412211 NR Description: expressed protein [Arabidopsis thaliana]
MPIGFRNQVMRSFSWIIIPLLLLLFCLIGSSQAADEKSSGDVCNTVSDPGGCPINCFRADPVCGADGVTYWCGCPDAACHGARVVKTGACDAGNAGSASVPGQALLLIHIVWLFLLGLSLLVGAF

SEQ ID NO: 56175 - protein, 116 aa, Glycine max
  peptide (1)..(116): Ceres Seq. ID no. 13594982
  misc_feature (34)..(81): Pfam Name: Kazal-type serine protease inhibitor domain Pfam Description: Kazal-type serine protease inhibitor domain
  misc_feature (7)..(114): Homolog of NCBI NO: 34909170 NR Description: P0468B07.28 [Oryza sativa (japonica
  misc_feature (21)..(116): Homolog of NCBI NO: 21555759 NR Description: unknown [Arabidopsis thaliana]
  misc_feature (21)..(116): Homolog of NCBI NO: 18411677 NR Description: expressed protein [Arabidopsis thaliana]
  misc_feature (9)..(116): Homolog of NCBI NO: 21554106 NR Description: unknown [Arabidopsis thaliana]
  misc_feature (9)..(116): Homolog of NCBI NO: 18412211 NR Description: expressed protein [Arabidopsis thaliana]
MRSFSWIIIPLLLLLFCLIGSSQAADEKSSGDVCNTVSDPGGCPINCFRADPVCGADGVTYWCGCPDAACHGARVVKTGACDAGNAGSASVPGQALLLIHIVWLFLLGLSLLVGAF

SEQ ID NO: 56176 - DNA, 472 bp, Glycine max
  misc_feature (1)..(472): Ceres Seq. ID no. 13582224
cccaaaacccatggttggacccaaggatcaccagcgctttcaagcttcttatgcaactatattaaaggcccatatgactgctataaagaagagagaaaggaaagacaagaagaagcctgcaaaggcagataaaagagaaggaagttcaaagagactgaaaagattttggcttgttttgttttcattagtgttcctatcacaaatggactagatacctgtccttctaccaaagggtcttctgttcatagttccttgccaaagtctcgggtgtgtgagtattcggcagagcgaagggagatatctacaaaaggcacttcaatgctcaagtgaaggtgttacgactaacccttggatcatgaccagcgcacagactatgatttcgttagtctggctagcctaccctatattaaataacctgtaaaagaacacatgatatatctaggcaaatctatatatatatctcattccatcc

SEQ ID NO: 56177 - protein, 69 aa, Glycine max
  peptide (1)..(69): Ceres Seq. ID no. 13582225
  misc_feature (8)..(54): Homolog of NCBI NO: 6094345 NR Description: SIGNAL RECOGNITION PARTICLE 14 KD PROTEIN (SRP14)
  misc_feature (5)..(49): Homolog of NCBI NO: 15224325 NR Description: signal recognition particle protein 14kD, ATSRP14
  misc_feature (5)..(49): Homolog of NCBI NO: 6175053 NR Description: Signal recognition particle 14 kDa protein
PKPMVGPKDHQRFQASYATILKAHMTAIKKRERKDKKKPAKADKREGSSKRLKRFWLVLFSLVFLSQMD

SEQ ID NO: 56178 - protein, 66 aa, Glycine max
  peptide (1)..(66): Ceres Seq. ID no. 13582226
  misc_feature (5)..(51): Homolog of NCBI NO: 6094345 NR Description: SIGNAL RECOGNITION PARTICLE 14 KD PROTEIN (SRP14)
  misc_feature (2)..(46): Homolog of NCBI NO: 15224325 NR Description: signal recognition particle protein 14kD, ATSRP14
  misc_feature (2)..(46): Homolog of NCBI NO: 6175053 NR Description: Signal recognition particle 14 kDa protein
MVGPKDHQRFQASYATILKAHMTAIKKRERKDKKKPAKADKREGSSKRLKRFWLVLFSLVFLSQMD

SEQ ID NO: 56179 - protein, 45 aa, Glycine max
  peptide (1)..(45): Ceres Seq. ID no. 13582227
  misc_feature (1)..(30): Homolog of NCBI NO: 6094345 NR Description: SIGNAL RECOGNITION PARTICLE 14 KD PROTEIN (SRP14)
  misc_feature (1)..(25): Homolog of NCBI NO: 15224325 NR Description: signal recognition particle protein 14kD, ATSRP14
  misc_feature (1)..(25): Homolog of NCBI NO: 6175053 NR Description: Signal recognition particle 14 kDa protein
MTAIKKRERKDKKKPAKADKREGSSKRLKRFWLVLFSLVFLSQMD

SEQ ID NO: 56180 - DNA, 718 bp, Glycine max
  misc_feature (1)..(718): Ceres Seq. ID no. 12611008
gtgtgattcatatctgcttctcagacgaactctctctgcttaatccaaattttaacgcgttctttcgaatttgcccctccaattttaatttaattacgtaaatgtccggaactctaatctacttaggcgttaactcccttcgatcctcgccgggaaatagccttcgtcaaccgaagccaaccagactccacaacggaaacgcgcggctctccaccggagctacgtcgtttagagcttcggcagcgcagactctcaacgccgaaccagccgtaacggaatccgttcgccggcgagcgtcgaacctctacgaactgctgagagtggacgaaacggcgtcgttgacggagattaagacggcgtaccggagcttagctaaggttcaccatccggacgcgtcgtcggaatcggacggacgagatttcatggagattcacaaagcttacgcgacgctggcggatccgacgacgagagcgatctacgattcgacgctgggagcaagagggagacgagtgcacgctggagcgatggggaggacgagtcgggtttacccgacgacccggagatgggagacggatcagtgttggtagtttagtctttaggtttccgattacttttttttactcaatttccccttttcattattttttttactaaggggtaaataagttttttttaccacagatggtttaatgaatagagaggatgtacatttttgggg

SEQ ID NO: 56181 - protein, 161 aa, Glycine max
  peptide (1)..(161): Ceres Seq. ID no. 12611009
  misc_feature (67)..(130): Pfam Name: DnaJ domain Pfam Description: DnaJ domain
  misc_feature (63)..(154): Homolog of NCBI NO: 23129135 NR Description: hypothetical protein [Nostoc punctiforme]
  misc_feature (68)..(130): Homolog of NCBI NO: 13507741 NR Description: similar to j-domain of DnaJ [Mycoplasma
  misc_feature (65)..(130): Homolog of NCBI NO: 23136752 NR Description: hypothetical protein [Cytophaga hutchinsonii]
  misc_feature (68)..(150): Homolog of NCBI NO: 34894012 NR Description: P0672D08.16 [Oryza sativa (japonica
  misc_feature (66)..(146): Homolog of NCBI NO: 31544486 NR Description: CbpA/DnaJ [Mycoplasma gallisepticum R]
  misc_feature (13)..(161): Homolog of NCBI NO: 9843641 NR Description: J11 protein [Arabidopsis thaliana]
  misc_feature (13)..(161): Homolog of NCBI NO: 15233446 NR Description: DnaJ-like protein; protein id: At4g36040.1
  misc_feature (18)..(161): Homolog of NCBI NO: 7488763 NR Description: DnaJ protein homolog - kidney bean (fragment)
  misc_feature (11)..(161): Homolog of NCBI NO: 15227919 NR Description: putative DnaJ protein
  misc_feature (1)..(161): Homolog of NCBI NO: 15231204 NR Description: DnaJ protein, putative
MSGTLIYLGVNSLRSSPGNSLRQPKPTRLHNGNARLSTGATSFRASAAQTLNAEPAVTESVRRRASNLYELLRVDETASLTEIKTAYRSLAKVHHPDASSESDGRDFMEIHKAYATLADPTTRAIYDSTLGARGRRVHAGAMGRTSRVYPTTRRWETDQCW

SEQ ID NO: 56182 - DNA, 991 bp, Glycine max
  misc_feature (1)..(991): Ceres Seq. ID no. 12611286
aagcagatcgcgcacccgacgcgatccagaccgcccagcacagacgccgacccacgccgctggcactcccgtctctcggcgatcctcccttctctggcgaccggctgtcaccccgtccgccctcgccgccagatccgcgcggccacgcccacccggcctcgctcctcctctcgggcctcggcagatctacgcgggcggcgaccctccctagccatgattaatttcgtgctcctaatcagccgccagggtaaggtgaggctcaccaagtggtactcgccttacacccagaaggagaggactaaggtcatccgtgagcttagtgggctcattcttactcgagggccaaaactctgcaactttgtcgagtggagaggttacaaggttgtgtacagaaggtatgccagcctctatttctgcatgtgtattgatgctgatgacaatgagcttgaagtccttgaaattatccatcattttgttgagatactcgaccgctatttcggcagtgtatgcgagctggatttgatattcaatttccacaaggcttactacgtactggatgagattctcatttctggtgagcttcaggagtctagcaagaagaatgttgcaagacttattgctgcacaggattcattggtagaggctgctaaagaggaagctggctccatcagtaacatcatcgcccaggctacgaagtaaaagtccgcgtctgatgatgcccctctgctctttggtttatgcttatgttggtaaatttgatgtaatagctcctttgctgtatccattttcccaaagaaatacgactccctggattcaggcctgttcagaatgagtgatatgtaattacaatgcatgtgttcctttgcaactgaatttggaatcttccaaagataaaactgtcatggagattgttcaccagtagtctgtttagtgggtatttaagaaatatttgtaaattcttggtcttaattcggcagagcattatcttgtg

SEQ ID NO: 56183 - protein, 232 aa, Glycine max
  peptide (1)..(232): Ceres Seq. ID no. 12611287
  misc_feature (73)..(213): Pfam Name: Clathrin adaptor complex small chain Pfam Description: Clathrin adaptor complex small chain
  misc_feature (55)..(218): Homolog of NCBI NO: 34880078 NR Description: similar to Adapter-related protein complex 1 subunit) (Golgi adaptor HA1/AP1 adaptin sigma-1B subunit)
  misc_feature (72)..(180): Homolog of NCBI NO: 30690340 NR Description: clathrin assembly protein AP19 homolog
  misc_feature (72)..(223): Homolog of NCBI NO: 23480730 NR Description: clathrin assembly protein AP19, small subunit
  misc_feature (72)..(217): Homolog of NCBI NO: 23508378 NR Description: clathrin assembly protein AP19, putative
  misc_feature (72)..(232): Homolog of NCBI NO: 32129329 NR Description: putative clathrin assembly protein
  misc_feature (72)..(232): Homolog of NCBI NO: 2231698 NR Description: clathrin assembly protein AP19 [Arabidopsis
  misc_feature (72)..(231): Homolog of NCBI NO: 15237005 NR Description: clathrin assembly protein AP19 homolog
  misc_feature (72)..(232): Homolog of NCBI NO: 18398407 NR Description: clathrin assembly protein AP19, small subunit
  misc_feature (72)..(232): Homolog of NCBI NO: 1762309 NR Description: AP-1 Golgi-related complex component
  misc_feature (70)..(232): Homolog of NCBI NO: 34897116 NR Description: putative clathrin assembly protein [Oryza sativa]
KQIAHPTRSRPPSTDADPRRWHSRLSAILPSLATGCHPVRPRRQIRAATPTRPRSSSRASADLRGRRPSLAMINFVLLISRQGKVRLTKWYSPYTQKERTKVIRELSGLILTRGPKLCNFVEWRGYKVVYRRYASLYFCMCIDADDNELEVLEIIHHFVEILDRYFGSVCELDLIFNFHKAYYVLDEILISGELQESSKKNVARLIAAQDSLVEAAKEEAGSISNIIAQATK

SEQ ID NO: 56184 - protein, 161 aa, Glycine max
  peptide (1)..(161): Ceres Seq. ID no. 12611288
  misc_feature (2)..(142): Pfam Name: Clathrin adaptor complex small chain Pfam Description: Clathrin adaptor complex small chain
  misc_feature (1)..(147): Homolog of NCBI NO: 34880078 NR Description: similar to Adapter-related protein complex 1 subunit) (Golgi adaptor HA1/AP1 adaptin sigma-1B subunit)
  misc_feature (1)..(109): Homolog of NCBI NO: 30690340 NR Description: clathrin assembly protein AP19 homolog
  misc_feature (1)..(152): Homolog of NCBI NO: 23480730 NR Description: clathrin assembly protein AP19, small subunit
  misc_feature (1)..(146): Homolog of NCBI NO: 23508378 NR Description: clathrin assembly protein AP19, putative
  misc_feature (1)..(161): Homolog of NCBI NO: 32129329 NR Description: putative clathrin assembly protein
  misc_feature (1)..(161): Homolog of NCBI NO: 2231698 NR Description: clathrin assembly protein AP19 [Arabidopsis
  misc_feature (1)..(160): Homolog of NCBI NO: 15237005 NR Description: clathrin assembly protein AP19 homolog
  misc_feature (1)..(161): Homolog of NCBI NO: 18398407 NR Description: clathrin assembly protein AP19, small subunit
  misc_feature (1)..(161): Homolog of NCBI NO: 1762309 NR Description: AP-1 Golgi-related complex component
  misc_feature (1)..(161): Homolog of NCBI NO: 34897116 NR Description: putative clathrin assembly protein [Oryza sativa]
MINFVLLISRQGKVRLTKWYSPYTQKERTKVIRELSGLILTRGPKLCNFVEWRGYKVVYRRYASLYFCMCIDADDNELEVLEIIHHFVEILDRYFGSVCELDLIFNFHKAYYVLDEILISGELQESSKKNVARLIAAQDSLVEAAKEEAGSISNIIAQATK

SEQ ID NO: 56185 - DNA, 749 bp, Glycine max
  misc_feature (1)..(749): Ceres Seq. ID no. 15178083
acagcagtcgctctccaaaagcctttctttccctttctctccacagtacgagaagagtagttctaggtagagatgacgagcttcaagggccttgtaggcgaggggagcacggcgctgccgcacgtcctcgccgtggacgacagctcggtggaccgcgccgtcatctccggcatcctccgcagctccaagttccgcgtgaccgccgtggacagcgggaagagggccctggagcttcttggctccgagaccaatgtgagcatgataatcaccgactactggatgccggagatgacgggctacgagctcctcaagaaggtcaaggggtcgtccaagctgagggagatccccgtggtgatcatgtcctcggagaacgtgcctacaaggatcaacaggtgcctggaggagggagccgaggatttcctgctgaagcccgtccagccgtccgacgtgtcgcgcctctgcagccgcgtcctccgctgagcgccgagtggtccggtaactccggttgcaccgtcggacgcccctgcactgcactacatggcgtgcggattcagtgttttggccttctgggacatggtgcgcatatgatggccgtcagtgtgaatgcatgcagcctgtgttttgcttctgctaagtaggatgtgccctgtttccccctgttatgtagcagtcgacgtatatccctgtcagtgttctgtgcttcagtctcgtggatcagtgttcagtaaaaaggaagtttgcctcaagac

SEQ ID NO: 56186 - protein, 211 aa, Glycine max
  peptide (1)..(211): Ceres Seq. ID no. 15178084
SSRSPKAFLSLSLHSTRRVVLGRDDELQGPCRRGEHGAAARPRRGRQLGGPRRHLRHPPQLQVPRDRRGQREEGPGASWLRDQCEHDNHRLLDAGDDGLRAPQEGQGVVQAEGDPRGDHVLGERAYKDQQVPGGGSRGFPAEARPAVRRVAPLQPRPPLSAEWSGNSGCTVGRPCTALHGVRIQCFGLLGHGAHMMAVSVNACSLCFASAK

SEQ ID NO: 56187 - protein, 135 aa, Glycine max
  peptide (1)..(135): Ceres Seq. ID no. 15178085
  misc_feature (16)..(125): Pfam Name: Response regulator receiver domain Pfam Description: Response regulator receiver domain
  misc_feature (17)..(60): Homolog of NCBI NO: 12060384 NR Description: response regulator 4 [Zea mays]
  misc_feature (58)..(135): Homolog of NCBI NO: 12060384 NR Description: response regulator 4 [Zea mays]
  misc_feature (17)..(56): Homolog of NCBI NO: 34906626 NR Description: putative response regulator
  misc_feature (58)..(135): Homolog of NCBI NO: 34906626 NR Description: putative response regulator
  misc_feature (3)..(133): Homolog of NCBI NO: 11358973 NR Description: response regulator Cip1 [imported] - maize
  misc_feature (17)..(133): Homolog of NCBI NO: 11358972 NR Description: repsonse regulator ZmRR2 [imported] - maize
  misc_feature (9)..(133): Homolog of NCBI NO: 32488053 NR Description: OSJNBa0018M05.2 [Oryza sativa (japonica
  misc_feature (10)..(135): Homolog of NCBI NO: 34901288 NR Description: similar to response regulator
  misc_feature (16)..(135): Homolog of NCBI NO: 32489852 NR Description: OSJNBb0065J09.12 [Oryza sativa (japonica
  misc_feature (1)..(135): Homolog of NCBI NO: 11041692 NR Description: response regulator [Zea mays]
MTSFKGLVGEGSTALPHVLAVDDSSVDRAVISGILRSSKFRVTAVDSGKRALELLGSETNVSMIITDYWMPEMTGYELLKKVKGSSKLREIPVVIMSSENVPTRINRCLEEGAEDFLLKPVQPSDVSRLCSRVLR

SEQ ID NO: 56188 - DNA, 1098 bp, Glycine max
  misc_feature (1)..(1098): Ceres Seq. ID no. 15173129
aattagtccagttcgtcggttggtggtggtggcgtgcgtgcctgggcgactctgcctcaaaccctcatcaggtccctcgatcgccgcgctcgagttggttatatagaactgaagggaggtaaggtgagtataagcatcagagggagtacatagcatgagtaataccagcggcgcacggcgtgccgcaaggaggcaatcgctggatggatctgctgataaagttgttgtggacttggatgcaagctcgccggtggcggggaaccatcatgggctctcggtcttccctggtgcacgcacatcgcctattgatgtggaagctctcgatgatgaagtgcaggccctatcgccttcacaagtgcctccctcgggggtgaaccggagaactagagggcaacctgtgacacaattttctctggatgaagatgctgtcctggaagagaattggagaattataaggcaatgtgcgacaccattttatcttgatgaagatgctgccatggaagagaatcggagaactagaagtcaatttttgacaccactttatctggatgaagatgctgccctggaagataatgcagctatgccttctcatagcacttggaacaaacgccaaagggttgcgcctttgatatgtctctccccagaaagggaagaagggtccagcctgcagtcgaacaatgcggtgcaaattagccaagagcctgctaaggtggtggttccaaaggaaccgaatttcacttgcccggtgtgccttaacaagctggtggagccttcgacaacaaaatgtggccatgatgttgtgggcagagtgcatcaagcaagccatccagtttcagaagaaatgccctacttgccgcaaggccctgaggaagaacaacttccatcgtatttaccttccgaactcggatggttaaggtcagcatcggatcaatcgccaaagagtatcatcacatagattatggttgctgaggaacctgtagcaggtgctcagatgaacaattgattaagttgactgctgtacgtatcattagatggttggtctatgatgtaactgagattaagcttgaagctgagataaaacagtggatagcatcttcg

SEQ ID NO: 56189 - protein, 266 aa, Glycine max
  peptide (1)..(266): Ceres Seq. ID no. 15173130
  misc_feature (169)..(213): Homolog of NCBI NO: 15231414 NR Description: RING zinc finger protein -related [Arabidopsis
  misc_feature (47)..(213): Homolog of NCBI NO: 18422940 NR Description: zinc finger (C3HC4-type RING finger) protein
  misc_feature (47)..(213): Homolog of NCBI NO: 21954077 NR Description: unknown protein [Arabidopsis thaliana]
  misc_feature (47)..(213): Homolog of NCBI NO: 21537318 NR Description: unknown [Arabidopsis thaliana]
MSNTSGARRAARRQSLDGSADKVVVDLDASSPVAGNHHGLSVFPGARTSPIDVEALDDEVQALSPSQVPPSGVNRRTRGQPVTQFSLDEDAVLEENWRIIRQCATPFYLDEDAAMEENRRTRSQFLTPLYLDEDAALEDNAAMPSHSTWNKRQRVAPLICLSPEREEGSSLQSNNAVQISQEPAKVVVPKEPNFTCPVCLNKLVEPSTTKCGHDVVGRVHQASHPVSEEMPYLPQGPEEEQLPSYLPSELGWLRSASDQSPKSIIT

SEQ ID NO: 56190 - protein, 152 aa, Glycine max
  peptide (1)..(152): Ceres Seq. ID no. 15173131
  misc_feature (55)..(99): Homolog of NCBI NO: 15231414 NR Description: RING zinc finger protein -related [Arabidopsis
  misc_feature (1)..(99): Homolog of NCBI NO: 18422940 NR Description: zinc finger (C3HC4-type RING finger) protein
  misc_feature (1)..(99): Homolog of NCBI NO: 21954077 NR Description: unknown protein [Arabidopsis thaliana]
  misc_feature (1)..(99): Homolog of NCBI NO: 21537318 NR Description: unknown [Arabidopsis thaliana]
MEENRRTRSQFLTPLYLDEDAALEDNAAMPSHSTWNKRQRVAPLICLSPEREEGSSLQSNNAVQISQEPAKVVVPKEPNFTCPVCLNKLVEPSTTKCGHDVVGRVHQASHPVSEEMPYLPQGPEEEQLPSYLPSELGWLRSASDQSPKSIIT

SEQ ID NO: 56191 - DNA, 980 bp, Glycine max
  misc_feature (1)..(980): Ceres Seq. ID no. 12611293
cccagctcactcactcactcactctcacacacccactttacttcctccactcttcaggtcacatcggcagctgctagccaagtagccaagccaacgaagagatcgagaaagcgagagcgtagcaagaaggtggcatcatggcgacggcggtgcagtggccggtgatggtggtggtggtgatgatgggggcggtgatggcggcgcgcgtgggggcggacatggacgcggaccggagcgagtgcgcggagcagctggtggggttggcgccgtgcctgcagtacgtgcaggggcaggcgcggtcgccggcgccggactgctgcggcgggctgagccaggtgctggacaagagccccaagtgcctgtgcgtgctggtcaaggacaaggacgaccccaacctgggcatcaagatcaacgcctccctcgcgctcgccctcccctccgcctgccgcaacaccaaggccaacgtctcccactgcccagagctgctgcacctccctccgaactccaaggacgccgccatcttcagccccggcggcgacaagggctccgctgcagctctagccaaggacaacacggcgtcgacggccaactcccgcgcgcagcaggcggccagcgccggcaccgcctcctcgacggcgaccgccggcgtcgcactggcggcgttgctcgccggctaccttgcgctgctcctgcccgctgacttcctggccgccgcctcctccttctagtccatctccgtacgtgcgcgtctgtctcctcccccctacggcgctaccgaagatcgatcaggagcaggggagccaggaaccagtgactctgtttgggggaatgaaatgcctcaagtaggatcgatcatgcatgttgtagtatgtgacagagatggtagtggtggtagtggttggtttgttttggtgctgtattgaactcttatgttttcgctgtatggatgacgcaacaattccacacttacggatgcggcc

SEQ ID NO: 56192 - protein, 196 aa, Glycine max
  peptide (1)..(196): Ceres Seq. ID no. 12611294
  misc_feature (35)..(113): Pfam Name: Protease inhibitor/seed storage/LTP family Pfam Description: Protease inhibitor/seed storage/LTP family
  misc_feature (9)..(186): Homolog of NCBI NO: 15217777 NR Description: lipid transfer protein, putative
  misc_feature (9)..(186): Homolog of NCBI NO: 21553541 NR Description: lipid transfer protein, putative [Arabidopsis
  misc_feature (1)..(139): Homolog of NCBI NO: 25553602 NR Description: OJ1656_E11.34 [Oryza sativa (japonica
  misc_feature (10)..(153): Homolog of NCBI NO: 21555220 NR Description: unknown [Arabidopsis thaliana]
  misc_feature (6)..(153): Homolog of NCBI NO: 15231070 NR Description: putative protein
  misc_feature (26)..(161): Homolog of NCBI NO: 21537387 NR Description: unknown [Arabidopsis thaliana]
  misc_feature (10)..(161): Homolog of NCBI NO: 18405294 NR Description: expressed protein
  misc_feature (11)..(194): Homolog of NCBI NO: 34394084 NR Description: lipid transfer protein-like
  misc_feature (1)..(170): Homolog of NCBI NO: 15224863 NR Description: unknown protein; protein id: At2g44300.1
  misc_feature (1)..(169): Homolog of NCBI NO: 15224862 NR Description: unknown protein; protein id: At2g44290.1
MATAVQWPVMVVVVMMGAVMAARVGADMDADRSECAEQLVGLAPCLQYVQGQARSPAPDCCGGLSQVLDKSPKCLCVLVKDKDDPNLGIKINASLALALPSACRNTKANVSHCPELLHLPPNSKDAAIFSPGGDKGSAAALAKDNTASTANSRAQQAASAGTASSTATAGVALAALLAGYLALLLPADFLAAASSF

SEQ ID NO: 56193 - protein, 187 aa, Glycine max
  peptide (1)..(187): Ceres Seq. ID no. 12611295
  misc_feature (26)..(104): Pfam Name: Protease inhibitor/seed storage/LTP family Pfam Description: Protease inhibitor/seed storage/LTP family
  misc_feature (1)..(177): Homolog of NCBI NO: 15217777 NR Description: lipid transfer protein, putative
  misc_feature (1)..(177): Homolog of NCBI NO: 21553541 NR Description: lipid transfer protein, putative [Arabidopsis
  misc_feature (1)..(130): Homolog of NCBI NO: 25553602 NR Description: OJ1656_E11.34 [Oryza sativa (japonica
  misc_feature (1)..(144): Homolog of NCBI NO: 21555220 NR Description: unknown [Arabidopsis thaliana]
  misc_feature (1)..(144): Homolog of NCBI NO: 15231070 NR Description: putative protein
  misc_feature (17)..(152): Homolog of NCBI NO: 21537387 NR Description: unknown [Arabidopsis thaliana]
  misc_feature (1)..(152): Homolog of NCBI NO: 18405294 NR Description: expressed protein
  misc_feature (2)..(185): Homolog of NCBI NO: 34394084 NR Description: lipid transfer protein-like
  misc_feature (1)..(161): Homolog of NCBI NO: 15224863 NR Description: unknown protein; protein id: At2g44300.1
  misc_feature (1)..(160): Homolog of NCBI NO: 15224862 NR Description: unknown protein; protein id: At2g44290.1
MVVVVMMGAVMAARVGADMDADRSECAEQLVGLAPCLQYVQGQARSPAPDCCGGLSQVLDKSPKCLCVLVKDKDDPNLGIKINASLALALPSACRNTKANVSHCPELLHLPPNSKDAAIFSPGGDKGSAAALAKDNTASTANSRAQQAASAGTASSTATAGVALAALLAGYLALLLPADFLAAASSF

SEQ ID NO: 56194 - protein, 182 aa, Glycine max
  peptide (1)..(182): Ceres Seq. ID no. 12611296
  misc_feature (21)..(99): Pfam Name: Protease inhibitor/seed storage/LTP family Pfam Description: Protease inhibitor/seed storage/LTP family
  misc_feature (1)..(172): Homolog of NCBI NO: 15217777 NR Description: lipid transfer protein, putative
  misc_feature (1)..(172): Homolog of NCBI NO: 21553541 NR Description: lipid transfer protein, putative [Arabidopsis
  misc_feature (1)..(125): Homolog of NCBI NO: 25553602 NR Description: OJ1656_E11.34 [Oryza sativa (japonica
  misc_feature (1)..(139): Homolog of NCBI NO: 21555220 NR Description: unknown [Arabidopsis thaliana]
  misc_feature (1)..(139): Homolog of NCBI NO: 15231070 NR Description: putative protein
  misc_feature (12)..(147): Homolog of NCBI NO: 21537387 NR Description: unknown [Arabidopsis thaliana]
  misc_feature (1)..(147): Homolog of NCBI NO: 18405294 NR Description: expressed protein
  misc_feature (1)..(180): Homolog of NCBI NO: 34394084 NR Description: lipid transfer protein-like
  misc_feature (1)..(156): Homolog of NCBI NO: 15224863 NR Description: unknown protein; protein id: At2g44300.1
  misc_feature (1)..(155): Homolog of NCBI NO: 15224862 NR Description: unknown protein; protein id: At2g44290.1
MMGAVMAARVGADMDADRSECAEQLVGLAPCLQYVQGQARSPAPDCCGGLSQVLDKSPKCLCVLVKDKDDPNLGIKINASLALALPSACRNTKANVSHCPELLHLPPNSKDAAIFSPGGDKGSAAALAKDNTASTANSRAQQAASAGTASSTATAGVALAALLAGYLALLLPADFLAAASSF

SEQ ID NO: 56195 - DNA, 795 bp, Glycine max
  misc_feature (1)..(795): Ceres Seq. ID no. 13639196
actcaggacaataagtttaaagccatcaaatccaaaaaaaaatatttgttttaataatctaagcttcatcaatggcgaatcaagcagctatagcatttttctttttcgttttggcggtcttctccaacttggagctctcgtcttctacgcttttccatggcaaggtctcttgccttgactgccaccgcggtttcgacttctcaggcgttaaggttctcctaaagtgcgaaggcgagaagaaacacataaccacgatggcgacttcagacggatctttccggtcagtgcttccgaccaatgacagaaaacactccatgaactgtcttgcaaagctcttgggaggtcctgagcaactttatgctcataaacacaacatggtctctgaactggttaagtcaaaacacgataccaaggttcttactacctcaaacccactttccttctctctctcatgccctaaaccaactggagataatgtcggaaacatgataggagattcgaagactgttaattttcctgggacaggaggttttggattcccacctgctagcttctttcccttcttaccaatcattggcatcccatgattttaattaaatgtgcttgataagacgggggacgtatttattcataaatgttgttgtttatgtgaatttaagtgagcgaacaaaattgtttttgttttgtgagatataattaaggtttgtttatgtgataagaaaatgttggttatcggcttcttggatccgttgctttgtaccatgtttgtgataataataaagattgcattagtcc

SEQ ID NO: 56196 - protein, 171 aa, Glycine max
  peptide (1)..(171): Ceres Seq. ID no. 13639197
  misc_feature (7)..(171): Homolog of NCBI NO: 30683502 NR Description: expressed protein [Arabidopsis thaliana]
  misc_feature (1)..(171): Homolog of NCBI NO: 21594030 NR Description: unknown [Arabidopsis thaliana]
  misc_feature (1)..(171): Homolog of NCBI NO: 18420486 NR Description: expressed protein [Arabidopsis thaliana]
MANQAAIAFFFFVLAVFSNLELSSSTLFHGKVSCLDCHRGFDFSGVKVLLKCEGEKKHITTMATSDGSFRSVLPTNDRKHSMNCLAKLLGGPEQLYAHKHNMVSELVKSKHDTKVLTTSNPLSFSLSCPKPTGDNVGNMIGDSKTVNFPGTGGFGFPPASFFPFLPIIGIP

SEQ ID NO: 56197 - protein, 110 aa, Glycine max
  peptide (1)..(110): Ceres Seq. ID no. 13639198
  misc_feature (1)..(110): Homolog of NCBI NO: 30683502 NR Description: expressed protein [Arabidopsis thaliana]
  misc_feature (1)..(110): Homolog of NCBI NO: 21594030 NR Description: unknown [Arabidopsis thaliana]
  misc_feature (1)..(110): Homolog of NCBI NO: 18420486 NR Description: expressed protein [Arabidopsis thaliana]
MATSDGSFRSVLPTNDRKHSMNCLAKLLGGPEQLYAHKHNMVSELVKSKHDTKVLTTSNPLSFSLSCPKPTGDNVGNMIGDSKTVNFPGTGGFGFPPASFFPFLPIIGIP

SEQ ID NO: 56198 - protein, 90 aa, Glycine max
  peptide (1)..(90): Ceres Seq. ID no. 13639199
  misc_feature (1)..(90): Homolog of NCBI NO: 30683502 NR Description: expressed protein [Arabidopsis thaliana]
  misc_feature (1)..(90): Homolog of NCBI NO: 21594030 NR Description: unknown [Arabidopsis thaliana]
  misc_feature (1)..(90): Homolog of NCBI NO: 18420486 NR Description: expressed protein [Arabidopsis thaliana]
MNCLAKLLGGPEQLYAHKHNMVSELVKSKHDTKVLTTSNPLSFSLSCPKPTGDNVGNMIGDSKTVNFPGTGGFGFPPASFFPFLPIIGIP

SEQ ID NO: 56199 - DNA, 959 bp, Glycine max
  misc_feature (1)..(959): Ceres Seq. ID no. 12610239
atatcattatcaatatcaacatatagagagatgcagatacgtttcaaaagaagaagaggataactagcgaatctttattttttttgttataaaagtcaacagaatctttactgatccctcgtagacttttcttctagggcttatccgaattttatcatcaaattaaaatctaatcaaccactaaccacatcctcccatctccagattcatcgtcgcgggtagacggagaagaagatatggcggttactatgaagcatatgtcgttgatcgtctctttgttcggcgtcttgtccttccttcttggggtcatcgcggagaacaagaagcctgcgtctgggactcctataaacgggaagggagtagttatctgcaaatatccatctgatccaactgtcgccttgggttacctttctgctgcctttctccttgcctccacaatagctggatacaaatccttgttcatgtcttacaagggaaggtctgttcccaactctgtcttgttcaaaagcaccaccttctctgtcttcttcaacattgccttgatcacatctggactggcactgtctctgttgctatggccaaccattacagagcaacttcacttgacacgtaatgtccatcggaacttagagaccagttgccccacggctaagaccggtctgcttggtggaggtgcctttgtttcattagactcgtgccttttctggttggtcgctctgatgctcgctgataacgcacgtgaagaccattttgatgaaactgagaacaggaacgtcaatgggaactcttcctctagggatgttaatctcaagattgatgcttgagagaataatctgcatccgattattagtattgggttttaataaatggttttttacattattctattacttgtttgattaagaaaataactattcgtttcttctggttcttctatgttcttaataatatttgatctt

SEQ ID NO: 56200 - protein, 195 aa, Glycine max
  peptide (1)..(195): Ceres Seq. ID no. 12610240
  misc_feature (1)..(190): Homolog of NCBI NO: 8099143 NR Description: hypothetical protein [Oryza sativa]
  misc_feature (1)..(195): Homolog of NCBI NO: 15235839 NR Description: putative protein
MAVTMKHMSLIVSLFGVLSFLLGVIAENKKPASGTPINGKGVVICKYPSDPTVALGYLSAAFLLASTIAGYKSLFMSYKGRSVPNSVLFKSTTFSVFFNIALITSGLALSLLLWPTITEQLHLTRNVHRNLETSCPTAKTGLLGGGAFVSLDSCLFWLVALMLADNAREDHFDETENRNVNGNSSSRDVNLKIDA

SEQ ID NO: 56201 - protein, 191 aa, Glycine max
  peptide (1)..(191): Ceres Seq. ID no. 12610241
  misc_feature (1)..(186): Homolog of NCBI NO: 8099143 NR Description: hypothetical protein [Oryza sativa]
  misc_feature (1)..(191): Homolog of NCBI NO: 15235839 NR Description: putative protein
MKHMSLIVSLFGVLSFLLGVIAENKKPASGTPINGKGVVICKYPSDPTVALGYLSAAFLLASTIAGYKSLFMSYKGRSVPNSVLFKSTTFSVFFNIALITSGLALSLLLWPTITEQLHLTRNVHRNLETSCPTAKTGLLGGGAFVSLDSCLFWLVALMLADNAREDHFDETENRNVNGNSSSRDVNLKIDA

SEQ ID NO: 56202 - protein, 188 aa, Glycine max
  peptide (1)..(188): Ceres Seq. ID no. 12610242
  misc_feature (1)..(183): Homolog of NCBI NO: 8099143 NR Description: hypothetical protein [Oryza sativa]
  misc_feature (1)..(188): Homolog of NCBI NO: 15235839 NR Description: putative protein
MSLIVSLFGVLSFLLGVIAENKKPASGTPINGKGVVICKYPSDPTVALGYLSAAFLLASTIAGYKSLFMSYKGRSVPNSVLFKSTTFSVFFNIALITSGLALSLLLWPTITEQLHLTRNVHRNLETSCPTAKTGLLGGGAFVSLDSCLFWLVALMLADNAREDHFDETENRNVNGNSSSRDVNLKIDA

SEQ ID NO: 56203 - DNA, 875 bp, Glycine max
  misc_feature (1)..(875): Ceres Seq. ID no. 13582167
agtaatcggaaaattctagagcatcgagagtttcttcaatggcgaatctccccaccgttctcgttaccggcgctagtggcaaaacaggtcagattgtgtacaagaagctgaaggagaggtcagacaagtttgtggcgaaggggttagtgagaactcctcaagggaaagaggagattggaggagaagatgatgtgttcattggtgatataagggatgctgatagcattacccctgcgattcaagggatcgatgcgcttgtgattctcactagcgctgtgcccaagatgaaacctgggtttgatcccactaaaggtggaagacctgagttcattttcgatgatggacaataccctgaacaggttgattggattggccagaagaaccaaatagatgctgccaaggctgctggtgttaagcatattgtcttggttgggtccatgggtggaacaaatcctgatcatcctctcaacaaactgggaaatgggaacatactgatttggaagaggaaagctgaacagtaccttgctgattctggtactccttacacaataatcagagctggaggacttctagacaaagaaggaggtgcacgagagctcctagttggcaaagacgatgagcttcttcaaacagacaccaaaaccgtccccagggctgatgttgctgaagtctgcattcaggcattgctgttcgaggaagctaagaataaagcatttgatctcggttcaaaaccagagggaaccagttctcccaccaatgacttcaaggctctcttctctcaagtcatcgctcgtttttagatcttctatctctattgcaactgaataatttgtgttgtaatgtaccaaaccttttaaaataaaatctccgggttc

SEQ ID NO: 56204 - protein, 253 aa, Glycine max; identical to SEQ ID NO: 1068
  peptide (1)..(253): Ceres Seq. ID no. 13582168
  misc_feature (106)..(237): Pfam Name: Isoflavone reductase Pfam Description: Isoflavone reductase
  misc_feature (106)..(239): Homolog of NCBI NO: 37523053 NR Description: hypothetical protein gll3484 [Gloeobacter
  misc_feature (92)..(248): Homolog of NCBI NO: 17230243 NR Description: hypothetical protein [Nostoc sp. PCC 7120]
  misc_feature (92)..(249): Homolog of NCBI NO: 23130188 NR Description: hypothetical protein [Nostoc punctiforme]
  misc_feature (92)..(249): Homolog of NCBI NO: 16330694 NR Description: hypothetical protein [Synechocystis sp. PCC 6803]
  misc_feature (1)..(253): Homolog of NCBI NO: 7485430 NR Description: hypothetical protein At2g37660 [imported] -
  misc_feature (1)..(253): Homolog of NCBI NO: 14719331 NR Description: putative 3-beta hydroxysteroid
  misc_feature (1)..(253): Homolog of NCBI NO: 18404496 NR Description: expressed protein [Arabidopsis thaliana]
  misc_feature (1)..(253): Homolog of NCBI NO: 34897418 NR Description: unknown protein [Oryza sativa (japonica
  misc_feature (1)..(248): Homolog of NCBI NO: 11358410 NR Description: hypothetical protein T7H20.290 - Arabidopsis
  misc_feature (1)..(253): Homolog of NCBI NO: 18413869 NR Description: expressed protein [Arabidopsis thaliana]

SEQ ID NO: 56205 - protein, 171 aa, Glycine max; identical to SEQ ID NO: 1069
  peptide (1)..(171): Ceres Seq. ID no. 13582169
  misc_feature (24)..(155): Pfam Name: Isoflavone reductase Pfam Description: Isoflavone reductase
  misc_feature (24)..(157): Homolog of NCBI NO: 37523053 NR Description: hypothetical protein gll3484 [Gloeobacter
  misc_feature (10)..(166): Homolog of NCBI NO: 17230243 NR Description: hypothetical protein [Nostoc sp. PCC 7120]
  misc_feature (10)..(167): Homolog of NCBI NO: 23130188 NR Description: hypothetical protein [Nostoc punctiforme]
  misc_feature (10)..(167): Homolog of NCBI NO: 16330694 NR Description: hypothetical protein [Synechocystis sp. PCC 6803]
  misc_feature (1)..(171): Homolog of NCBI NO: 7485430 NR Description: hypothetical protein At2g37660 [imported] -
  misc_feature (1)..(171): Homolog of NCBI NO: 14719331 NR Description: putative 3-beta hydroxysteroid
  misc_feature (1)..(171): Homolog of NCBI NO: 18404496 NR Description: expressed protein [Arabidopsis thaliana]
  misc_feature (1)..(171): Homolog of NCBI NO: 34897418 NR Description: unknown protein [Oryza sativa (japonica
  misc_feature (1)..(166): Homolog of NCBI NO: 11358410 NR Description: hypothetical protein T7H20.290 - Arabidopsis
  misc_feature (1)..(171): Homolog of NCBI NO: 18413869 NR Description: expressed protein [Arabidopsis thaliana]

SEQ ID NO: 56206 - DNA, 817 bp, Glycine max
  misc_feature (1)..(817): Ceres Seq. ID no. 12610243
aaaaagcttaaactaaaacccccaagaaacggagatgggtttggtcacagaggaggtgagagctaaggcagagatgtacacgggagatgagatatgccgggagaagacaaaatgcttcctcaaggaaatatctatgcccaatggcttactacctttgaaggacatagaagaggctgggtatgacagagagtcaggtgttgtgtggctgaagcagaaacagagcatcacccacaagttcgaaaatatcgataagctcgtctcctatggaaccgaggtcactgccgtggtcaaaaccgggaagatcaagaagctcactggtgtcaaggccaaggagcttcttatttgggtcagtgtcagtgagatctatacagaggagaaagagaagatcacctttaagtcaccaaccacactgtccaggactttccctgtctcagcttttattgtcccagaggaagtggaaccagccaaggaagagcctgctaaggagaagagcagtgaagccaccgaggaggtcaccgaggaagaacctgccaaggaggctgccaaggttgaacctgccaaagaggctgttgccgtcaaggaggcctaaccaagcttatcactgcttctatagtaaaaagagaccaaaatcttttgaagtgtgcttcaacaatttaaaccgacctttgagagttagtgcttctcactgctcttactctcatctattacctaccactcgttgctgcttatttttacctgtaataagatgtcaacatcatcctgttcttacaagtattaccgtataattatttataaactacactgaagttggttctgt

SEQ ID NO: 56207 - protein, 184 aa, Glycine max
  peptide (1)..(184): Ceres Seq. ID no. 12610244
  misc_feature (3)..(149): Pfam Name: Protein of unknown function, DUF538 Pfam Description: Protein of unknown function, DUF538
  misc_feature (6)..(139): Homolog of NCBI NO: 33146557 NR Description: unknown protein [Oryza sativa (japonica
  misc_feature (6)..(140): Homolog of NCBI NO: 34915378 NR Description: hypothetical protein~similar to Oryza sativa
  misc_feature (6)..(166): Homolog of NCBI NO: 34903866 NR Description: unnamed protein product [Oryza sativa (japonica
  misc_feature (6)..(139): Homolog of NCBI NO: 34915410 NR Description: hypothetical protein~similar to Arabidopsis
  misc_feature (1)..(169): Homolog of NCBI NO: 18405887 NR Description: expressed protein
  misc_feature (1)..(184): Homolog of NCBI NO: 18391006 NR Description: expressed protein
MGLVTEEVRAKAEMYTGDEICREKTKCFLKEISMPNGLLPLKDIEEAGYDRESGVVWLKQKQSITHKFENIDKLVSYGTEVTAVVKTGKIKKLTGVKAKELLIWVSVSEIYTEEKEKITFKSPTTLSRTFPVSAFIVPEEVEPAKEEPAKEKSSEATEEVTEEEPAKEAAKVEPAKEAVAVKEA

SEQ ID NO: 56208 - protein, 173 aa, Glycine max
  peptide (1)..(173): Ceres Seq. ID no. 12610245
MEPRSLPWSKPGRSRSSLVSRPRSFLFGSVSVRSIQRRKRRSPLSHQPHCPGLSLSQLLLSQRKWNQPRKSLLRRRAVKPPRRSPRKNLPRRLPRLNLPKRLLPSRRPNQAYHCFYSKKRPKSFEVCFNNLNRPLRVSASHCSYSHLLPTTRCCLFLPVIRCQHHPVLTSITV

SEQ ID NO: 56209 - protein, 171 aa, Glycine max
  peptide (1)..(171): Ceres Seq. ID no. 12610246
  misc_feature (1)..(136): Pfam Name: Protein of unknown function, DUF538 Pfam Description: Protein of unknown function, DUF538
  misc_feature (1)..(126): Homolog of NCBI NO: 33146557 NR Description: unknown protein [Oryza sativa (japonica
  misc_feature (1)..(127): Homolog of NCBI NO: 34915378 NR Description: hypothetical protein~similar to Oryza sativa
  misc_feature (1)..(153): Homolog of NCBI NO: 34903866 NR Description: unnamed protein product [Oryza sativa (japonica
  misc_feature (1)..(126): Homolog of NCBI NO: 34915410 NR Description: hypothetical protein~similar to Arabidopsis
  misc_feature (1)..(156): Homolog of NCBI NO: 18405887 NR Description: expressed protein
  misc_feature (1)..(171): Homolog of NCBI NO: 18391006 NR Description: expressed protein
MYTGDEICREKTKCFLKEISMPNGLLPLKDIEEAGYDRESGVVWLKQKQSITHKFENIDKLVSYGTEVTAVVKTGKIKKLTGVKAKELLIWVSVSEIYTEEKEKITFKSPTTLSRTFPVSAFIVPEEVEPAKEEPAKEKSSEATEEVTEEEPAKEAAKVEPAKEAVAVKEA

SEQ ID NO: 56210 - DNA, 852 bp, Glycine max
  misc_feature (1)..(852): Ceres Seq. ID no. 12610597
acaccacccggagaactgagctgagatactacttctgttctcttctccccccttttccgagccccccacccgtcatctctccagcctccagtctccgccgacgccatggggcaggtctgggcgtctctgcaagagaagctccaagggcggcactggaaggagaggcaggtgcggaagatcaccgacagggtgttcgaccggctcaccgaggatacccggaagcccgagaaggacgccctcaagttcgaggaggtctacatcgccgtcctctgcgtctacaatgacatcaacaagtacttgccggggccgcactacgaccctccgtccaaggagaggctcaaggaactcatgaaagagtttgacatcgacatgaacggtctcctggatcgcgaggagttcgcggagttcatccggaagctgaccgccgagtcactctgcgcgatcagcctcaagctgatcatcacgctggtcgccgcccctgcgctggcgctggcgaccaagagggcaaccgagggcgtccccggcgtcggcaaggtagtgcacaaggtgcccaatgccatctatgccgccgccatcaccatggctgccgtgctcatccagagatccgccgagggcgtcgagtagaagcggcatcgcgccgtgaactgtagatgcaccaggcaaccagggagggtgtaaatgtgctgtgatttgccgtgtgaagggtgatgccctgtgggacttatagttttttctgtaataccttcctgtctgtgcttcttggtgttgctagcctggtgtgattcaaaaagacagtattcgctgcttgttgacatgataaattcttggactaaataaagccgtggtcctgct

SEQ ID NO: 56211 - protein, 172 aa, Glycine max
  peptide (1)..(172): Ceres Seq. ID no. 12610598
  misc_feature (41)..(163): Homolog of NCBI NO: 26453144 NR Description: unknown protein [Arabidopsis thaliana]
  misc_feature (41)..(163): Homolog of NCBI NO: 18420040 NR Description: Expressed protein
  misc_feature (1)..(165): Homolog of NCBI NO: 38344138 NR Description: OSJNBa0041A02.5 [Oryza sativa (japonica
  misc_feature (1)..(164): Homolog of NCBI NO: 18408144 NR Description: expressed protein
  misc_feature (1)..(172): Homolog of NCBI NO: 38344137 NR Description: OSJNBa0041A02.4 [Oryza sativa (japonica
MGQVWASLQEKLQGRHWKERQVRKITDRVFDRLTEDTRKPEKDALKFEEVYIAVLCVYNDINKYLPGPHYDPPSKERLKELMKEFDIDMNGLLDREEFAEFIRKLTAESLCAISLKLIITLVAAPALALATKRATEGVPGVGKVVHKVPNAIYAAAITMAAVLIQRSAEGVE

SEQ ID NO: 56212 - protein, 93 aa, Glycine max
  peptide (1)..(93): Ceres Seq. ID no. 12610599
TTRRTELRYYFCSLLPPFPSPPPVISPASSLRRRHGAGLGVSAREAPRAALEGEAGAEDHRQGVRPAHRGYPEAREGRPQVRGGLHRRPLRLQ

SEQ ID NO: 56213 - protein, 91 aa, Glycine max
  peptide (1)..(91): Ceres Seq. ID no. 12610600
  misc_feature (1)..(82): Homolog of NCBI NO: 26453144 NR Description: unknown protein [Arabidopsis thaliana]
  misc_feature (1)..(82): Homolog of NCBI NO: 18420040 NR Description: Expressed protein
  misc_feature (1)..(84): Homolog of NCBI NO: 38344138 NR Description: OSJNBa0041A02.5 [Oryza sativa (japonica
  misc_feature (1)..(83): Homolog of NCBI NO: 18408144 NR Description: expressed protein
  misc_feature (1)..(91): Homolog of NCBI NO: 38344137 NR Description: OSJNBa0041A02.4 [Oryza sativa (japonica
MKEFDIDMNGLLDREEFAEFIRKLTAESLCAISLKLIITLVAAPALALATKRATEGVPGVGKVVHKVPNAIYAAAITMAAVLIQRSAEGVE

SEQ ID NO: 56214 - DNA, 945 bp, Glycine max
  misc_feature (1)..(945): Ceres Seq. ID no. 12610607
gctagggttcgaatcagattatctgcaacaacaacaaaaaaaatggcgttggctggtcgtatcagatccgggatctccttcttcaagaccatctccgtctctgattccgtctcctccgctagatctcacctccgtggagcgccgcttatccccgcgttgagagattatgcaacagcttcggctcagaagaccggcaatgttaaggtgcctgtggctttagttggtgaatctggcaactttgcttcgtggctatacattgcagctgtgaaaatgaactctttggagaagatcgagtctgatctttctgagctggttgaggctatgaagacaagccctattttttcgcagtttactaaagatccctctgttcctagagagacaagactcgctgctattgtggatgtttgtgataaagcaaagtttgcggaacccaccaagaacttcctctctttgttagctgagaacgggaagctgaagaatttagacgtgattgtgaagaaattcatgcagctgacaacagcacataggggagacgtcaaggttttggttaccacagtcatgccgcttccccctgctgaggagaaggagttgaaggagacactccaggagataattggagaagggaagaaagtaactgtggaacaaaagattgatccgagtatctatggagggctaatagtagagtttcaacaaaaggtgttggacatgtctatcaggacaagggcacagcagatggagaggctcctccgtgaacctgttgacctcagcaacctttgaagattttccctaaagaaaacgtgcttgtgatgatgctaccaccagttgacaaataaaatatgacactctcctgaggaacaacatacagacacttgtgtcatgttttaaattttatcatttcattttacagttgttgttttccttcgaaataagcttttttgaagacgt

SEQ ID NO: 56215 - protein, 258 aa, Glycine max
  peptide (1)..(258): Ceres Seq. ID no. 12610608
  misc_feature (78)..(249): Pfam Name: ATP synthase delta (OSCP) subunit Pfam Description: ATP synthase delta (OSCP) subunit
  misc_feature (67)..(251): Homolog of NCBI NO: 913531 NR Description: H+-ATPase subunit, OSCP=oligomysin sensitivity
  misc_feature (67)..(253): Homolog of NCBI NO: 4502303 NR Description: ATP synthase, H+ transporting, mitochondrial F1
  misc_feature (54)..(189): Homolog of NCBI NO: 32400863 NR Description: F1-ATPase [Triticum aestivum]
  misc_feature (15)..(255): Homolog of NCBI NO: 23507248 NR Description: oligomycin sensitivity conferring protein [Silene
  misc_feature (15)..(255): Homolog of NCBI NO: 23507246 NR Description: oligomycin sensitivity conferring protein [Silene
  misc_feature (15)..(254): Homolog of NCBI NO: 4774163 NR Description: F1-ATP synthase delta subunit [Ipomoea batatas]
  misc_feature (15)..(254): Homolog of NCBI NO: 114682 NR Description: ATP synthase delta chain, mitochondrial precursor
  misc_feature (17)..(258): Homolog of NCBI NO: 1655482 NR Description: delta subunit of mitochondrial F1-ATPase
  misc_feature (17)..(258): Homolog of NCBI NO: 15240628 NR Description: delta subunit of mitochondrial F1-ATPase
  misc_feature (17)..(258): Homolog of NCBI NO: 14190495 NR Description: AT5g13450/T22N19_100 [Arabidopsis thaliana]
ARVRIRLSATTTKKMALAGRIRSGISFFKTISVSDSVSSARSHLRGAPLIPALRDYATASAQKTGNVKVPVALVGESGNFASWLYIAAVKMNSLEKIESDLSELVEAMKTSPIFSQFTKDPSVPRETRLAAIVDVCDKAKFAEPTKNFLSLLAENGKLKNLDVIVKKFMQLTTAHRGDVKVLVTTVMPLPPAEEKELKETLQEIIGEGKKVTVEQKIDPSIYGGLIVEFQQKVLDMSIRTRAQQMERLLREPVDLSNL

SEQ ID NO: 56216 - protein, 244 aa, Glycine max
  peptide (1)..(244): Ceres Seq. ID no. 12610609
  misc_feature (64)..(235): Pfam Name: ATP synthase delta (OSCP) subunit Pfam Description: ATP synthase delta (OSCP) subunit
  misc_feature (53)..(237): Homolog of NCBI NO: 913531 NR Description: H+-ATPase subunit, OSCP=oligomysin sensitivity
  misc_feature (53)..(239): Homolog of NCBI NO: 4502303 NR Description: ATP synthase, H+ transporting, mitochondrial F1
  misc_feature (40)..(175): Homolog of NCBI NO: 32400863 NR Description: F1-ATPase [Triticum aestivum]
  misc_feature (1)..(241): Homolog of NCBI NO: 23507248 NR Description: oligomycin sensitivity conferring protein [Silene
  misc_feature (1)..(241): Homolog of NCBI NO: 23507246 NR Description: oligomycin sensitivity conferring protein [Silene
  misc_feature (1)..(240): Homolog of NCBI NO: 4774163 NR Description: F1-ATP synthase delta subunit [Ipomoea batatas]
  misc_feature (1)..(240): Homolog of NCBI NO: 114682 NR Description: ATP synthase delta chain, mitochondrial precursor
  misc_feature (3)..(244): Homolog of NCBI NO: 1655482 NR Description: delta subunit of mitochondrial F1-ATPase
  misc_feature (3)..(244): Homolog of NCBI NO: 15240628 NR Description: delta subunit of mitochondrial F1-ATPase
  misc_feature (3)..(244): Homolog of NCBI NO: 14190495 NR Description: AT5g13450/T22N19_100 [Arabidopsis thaliana]
MALAGRIRSGISFFKTISVSDSVSSARSHLRGAPLIPALRDYATASAQKTGNVKVPVALVGESGNFASWLYIAAVKMNSLEKIESDLSELVEAMKTSPIFSQFTKDPSVPRETRLAAIVDVCDKAKFAEPTKNFLSLLAENGKLKNLDVIVKKFMQLTTAHRGDVKVLVTTVMPLPPAEEKELKETLQEIIGEGKKVTVEQKIDPSIYGGLIVEFQQKVLDMSIRTRAQQMERLLREPVDLSNL

SEQ ID NO: 56217 - protein, 168 aa, Glycine max
  peptide (1)..(168): Ceres Seq. ID no. 12610610
  misc_feature (1)..(159): Pfam Name: ATP synthase delta (OSCP) subunit Pfam Description: ATP synthase delta (OSCP) subunit
  misc_feature (1)..(161): Homolog of NCBI NO: 913531 NR Description: H+-ATPase subunit, OSCP=oligomysin sensitivity
  misc_feature (1)..(163): Homolog of NCBI NO: 4502303 NR Description: ATP synthase, H+ transporting, mitochondrial F1
  misc_feature (1)..(99): Homolog of NCBI NO: 32400863 NR Description: F1-ATPase [Triticum aestivum]
  misc_feature (1)..(165): Homolog of NCBI NO: 23507248 NR Description: oligomycin sensitivity conferring protein [Silene
  misc_feature (1)..(165): Homolog of NCBI NO: 23507246 NR Description: oligomycin sensitivity conferring protein [Silene
  misc_feature (1)..(164): Homolog of NCBI NO: 4774163 NR Description: F1-ATP synthase delta subunit [Ipomoea batatas]
  misc_feature (1)..(164): Homolog of NCBI NO: 114682 NR Description: ATP synthase delta chain, mitochondrial precursor
  misc_feature (1)..(168): Homolog of NCBI NO: 1655482 NR Description: delta subunit of mitochondrial F1-ATPase
  misc_feature (1)..(168): Homolog of NCBI NO: 15240628 NR Description: delta subunit of mitochondrial F1-ATPase
  misc_feature (1)..(168): Homolog of NCBI NO: 14190495 NR Description: AT5g13450/T22N19_100 [Arabidopsis thaliana]
MNSLEKIESDLSELVEAMKTSPIFSQFTKDPSVPRETRLAAIVDVCDKAKFAEPTKNFLSLLAENGKLKNLDVIVKKFMQLTTAHRGDVKVLVTTVMPLPPAEEKELKETLQEIIGEGKKVTVEQKIDPSIYGGLIVEFQQKVLDMSIRTRAQQMERLLREPVDLSNL

SEQ ID NO: 56218 - DNA, 950 bp, Glycine max
  misc_feature (1)..(950): Ceres Seq. ID no. 13582073
gaccccccgctccgctcgtctgccgccgcccacacaccaaaccctaaccctaccgccgccgccgccatggccgacccgcggatgttcccatcgggatcaaacggcccggaagaccacgcccccggccgccggaagtacaacccctaccaggacctcaacatgccctacaactacaagaacctctacgacctccccacctcgccggagttcctcttcgaggaggagtccgcggtgcagcgccgatcctggggcgagaacctcacttactacacgggcatcgggtacctctctggcgccgtgggcggcgccgccctcggcctccgcgacgccgccgcgggcgcggagcccggggagaccgccaagatccgcgccaaccgcttgctcaacgcctgcggcagctccggccgccgttacggcaacaggctcggggtcatcgggctgatgtacgccgggatggagagcggcatggtcgcggcacgcgaccaagacgactggatcaacagcgtcgccgcagggctcggcaccggcgcgctcttccgcgccgctaacgggccgcggtctgccgccgtcgcgggcgctgtcggcggggtccttgctgccgccgccttggccgggaagcagcttgcgaagcgatacgtacaggcaatatgaatctcttcctgttctctcagatcaattgatcaaatcaatcagtcgccaagaatggattatttttgcgtttgtcgttctccagtttagctgctccattagagaatgcataatatctatgctgtgttagtcacatgtatacgatcggaatggatgattttggctttgttacaatgtcggatgccagcatgatgttatacatttttcgggtgttgctgagcaataagagtctatttgatattttgcagcgattacagttgtgaaacatgtactgcagtatttagtaagaatgttcttcagtc

SEQ ID NO: 56219 - protein, 216 aa, Glycine max
  peptide (1)..(216): Ceres Seq. ID no. 13582074
  misc_feature (76)..(209): Pfam Name: Tim17/Tim22/Tim23 family Pfam Description: Tim17/Tim22/Tim23 family
  misc_feature (114)..(212): Homolog of NCBI NO: 34394286 NR Description: hypothetical protein [Oryza sativa (japonica
  misc_feature (42)..(84): Homolog of NCBI NO: 12039278 NR Description: putative inner mitochondrial membrane protein
  misc_feature (151)..(216): Homolog of NCBI NO: 12039278 NR Description: putative inner mitochondrial membrane protein
  misc_feature (38)..(123): Homolog of NCBI NO: 38344267 NR Description: OSJNBa0005N02.5 [Oryza sativa (japonica
  misc_feature (23)..(213): Homolog of NCBI NO: 15229350 NR Description: inner mitochondrial membrane protein -related
  misc_feature (34)..(212): Homolog of NCBI NO: 13641346 NR Description: translocase of inner mitochondrial membrane TIM23
  misc_feature (34)..(212): Homolog of NCBI NO: 18394498 NR Description: inner mitochondrial membrane protein -related
  misc_feature (33)..(213): Homolog of NCBI NO: 15218593 NR Description: inner mitochondrial membrane protein [Arabidopsis
  misc_feature (23)..(216): Homolog of NCBI NO: 34902184 NR Description: Putative mitochondrial inner membrane protein
  misc_feature (23)..(216): Homolog of NCBI NO: 37536126 NR Description: putaive mitochondrial inner membrane protein
DPPLRSSAAAHTPNPNPTAAAAMADPRMFPSGSNGPEDHAPGRRKYNPYQDLNMPYNYKNLYDLPTSPEFLFEEESAVQRRSWGENLTYYTGIGYLSGAVGGAALGLRDAAAGAEPGETAKIRANRLLNACGSSGRRYGNRLGVIGLMYAGMESGMVAARDQDDWINSVAAGLGTGALFRAANGPRSAAVAGAVGGVLAAAALAGKQLAKRYVQAI

SEQ ID NO: 56220 - protein, 194 aa, Glycine max
  peptide (1)..(194): Ceres Seq. ID no. 13582075
  misc_feature (54)..(187): Pfam Name: Tim17/Tim22/Tim23 family Pfam Description: Tim17/Tim22/Tim23 family
  misc_feature (92)..(190): Homolog of NCBI NO: 34394286 NR Description: hypothetical protein [Oryza sativa (japonica
  misc_feature (20)..(62): Homolog of NCBI NO: 12039278 NR Description: putative inner mitochondrial membrane protein
  misc_feature (129)..(194): Homolog of NCBI NO: 12039278 NR Description: putative inner mitochondrial membrane protein
  misc_feature (16)..(101): Homolog of NCBI NO: 38344267 NR Description: OSJNBa0005N02.5 [Oryza sativa (japonica
  misc_feature (1)..(191): Homolog of NCBI NO: 15229350 NR Description: inner mitochondrial membrane protein -related
  misc_feature (12)..(190): Homolog of NCBI NO: 13641346 NR Description: translocase of inner mitochondrial membrane TIM23
  misc_feature (12)..(190): Homolog of NCBI NO: 18394498 NR Description: inner mitochondrial membrane protein -related
  misc_feature (11)..(191): Homolog of NCBI NO: 15218593 NR Description: inner mitochondrial membrane protein [Arabidopsis
  misc_feature (1)..(194): Homolog of NCBI NO: 34902184 NR Description: Putative mitochondrial inner membrane protein
  misc_feature (1)..(194): Homolog of NCBI NO: 37536126 NR Description: putaive mitochondrial inner membrane protein
MADPRMFPSGSNGPEDHAPGRRKYNPYQDLNMPYNYKNLYDLPTSPEFLFEEESAVQRRSWGENLTYYTGIGYLSGAVGGAALGLRDAAAGAEPGETAKIRANRLLNACGSSGRRYGNRLGVIGLMYAGMESGMVAARDQDDWINSVAAGLGTGALFRAANGPRSAAVAGAVGGVLAAAALAGKQLAKRYVQAI

SEQ ID NO: 56221 - protein, 189 aa, Glycine max
  peptide (1)..(189): Ceres Seq. ID no. 13582076
  misc_feature (49)..(182): Pfam Name: Tim17/Tim22/Tim23 family Pfam Description: Tim17/Tim22/Tim23 family
  misc_feature (87)..(185): Homolog of NCBI NO: 34394286 NR Description: hypothetical protein [Oryza sativa (japonica
  misc_feature (15)..(57): Homolog of NCBI NO: 12039278 NR Description: putative inner mitochondrial membrane protein
  misc_feature (124)..(189): Homolog of NCBI NO: 12039278 NR Description: putative inner mitochondrial membrane protein
  misc_feature (11)..(96): Homolog of NCBI NO: 38344267 NR Description: OSJNBa0005N02.5 [Oryza sativa (japonica
  misc_feature (1)..(186): Homolog of NCBI NO: 15229350 NR Description: inner mitochondrial membrane protein -related
  misc_feature (7)..(185): Homolog of NCBI NO: 13641346 NR Description: translocase of inner mitochondrial membrane TIM23
  misc_feature (7)..(185): Homolog of NCBI NO: 18394498 NR Description: inner mitochondrial membrane protein -related
  misc_feature (6)..(186): Homolog of NCBI NO: 15218593 NR Description: inner mitochondrial membrane protein [Arabidopsis
  misc_feature (1)..(189): Homolog of NCBI NO: 34902184 NR Description: Putative mitochondrial inner membrane protein
  misc_feature (1)..(189): Homolog of NCBI NO: 37536126 NR Description: putaive mitochondrial inner membrane protein
MFPSGSNGPEDHAPGRRKYNPYQDLNMPYNYKNLYDLPTSPEFLFEEESAVQRRSWGENLTYYTGIGYLSGAVGGAALGLRDAAAGAEPGETAKIRANRLLNACGSSGRRYGNRLGVIGLMYAGMESGMVAARDQDDWINSVAAGLGTGALFRAANGPRSAAVAGAVGGVLAAAALAGKQLAKRYVQAI

SEQ ID NO: 56222 - DNA, 1327 bp, Glycine max
  misc_feature (1)..(1327): Ceres Seq. ID no. 13595164
ctagaacmcccctccyratcgaaaaacttctgttcatccatttgtccaagacattcgagcttgttaagttctagtagttttatttgttgcagagttagtaccagagaaatggagccacaggaaggaaggaaagggataccatctctgctgtcctcgcagggggagtgcattgccaccaacatcacacagctcattggttggacaccactgatagaactgagaaacatcactgagaaagacagcataggtgctcggctgattgggaagattgagccgtaccagcccctttcctctgtgaaggatcggagtgctctcagattgattgaagatgcagaggagaaaggcttgatcacacctggcatcacaacactgctgggggtcacaagtggtaatcttggcatcggcgtggcgttcattgctgctcagaaaggatacaagttcatcgccctcatgcctgctaaactctcgcttgataagcagatactgatgcgataccttggcgtagaagtggtattagttgatgctgtacagcatggattcaaagctttacttgatagggtagaacagatgaagaaggatgtggaagatgtgtatgttctagatcaattcaccaatcctgcaaatcccgatgcccacttcagatggactggacctgagatatggaaagatacagcaggcaaagtggacatatttatagctgcttcaggttcaggaggcaccatcacaggcgtggggaggtatctcaagacgaagaacccatctgtaaaattaatatgcgttgaaccagctgaaagtccagtgatttcaggtggcgagccagccttccacaacatcctaggaatagggcctggttttgtcccagaaatattggatagatcccagatagatgaaattgtaacagtaactactcaagaagctatggacatggctagaagattggcaagggaagaaggattgcttgttggcatatcttcaggggcaaatgcagctgcctgcttaaaggttgcatcaagagaggagaacaggggaaagatgattgtgacaatgttttccagtggtgcagagaggtatctgaactcggagctctttgcgcaggttaaggaagagtgcgtcaacgtcaacatgaccttctgatgtccatatcaaggcaatgacaccgtaggggtgatccagaagtctagtgttatcttacactggcttataagaagcggaggtctcagttactcaaataccagacactgttttgttaggagacaaaacgaaatgcactagcgtkrmmaabtaaatactccctctgttcactccctctgttcacaaaaaaaaaaaa

SEQ ID NO: 56223 - protein, 377 aa, Glycine max
  peptide (1)..(377): Ceres Seq. ID no. 15221496
  misc_feature (61)..(353): Pfam Name: Pyridoxal-phosphate dependent enzyme Pfam Description: Pyridoxal-phosphate dependent enzyme
  misc_feature (57)..(375): Homolog of NCBI NO: 12081917 NR Description: cytosolic cysteine synthase [Solanum tuberosum]
  misc_feature (46)..(370): Homolog of NCBI NO: 11131628 NR Description: Cysteine synthase, chloroplast precursor sulfhydrylase) (O-acetylserine (Thiol)-lyase) (CSase B) (CS-B)
  misc_feature (54)..(373): Homolog of NCBI NO: 2245144 NR Description: O-acetylserine(thiol) lyase [Brassica juncea]
  misc_feature (57)..(369): Homolog of NCBI NO: 231970 NR Description: Cysteine synthase (O-acetylserine sulfhydrylase)
  misc_feature (50)..(373): Homolog of NCBI NO: 11131901 NR Description: Cysteine synthase (O-acetylserine sulfhydrylase)
  misc_feature (12)..(373): Homolog of NCBI NO: 421795 NR Description: cysteine synthase (EC 4.2.99.8) B precursor,
  misc_feature (12)..(373): Homolog of NCBI NO: 12644209 NR Description: CYSTEINE SYNTHASE, CHLOROPLAST PRECURSOR SULFHYDRYLASE) (O-ACETYLSERINE (THIOL)-LYASE) (CSASE B) (CS-B)
  misc_feature (12)..(373): Homolog of NCBI NO: 303902 NR Description: cysteine synthase [Spinacia oleracea]
  misc_feature (37)..(377): Homolog of NCBI NO: 4574141 NR Description: cysteine synthase [Oryza sativa]
  misc_feature (36)..(377): Homolog of NCBI NO: 4574137 NR Description: cysteine synthase [Oryza sativa]
  misc_feature (3)..(3): Xaa is any aa, unknown or other
  misc_feature (6)..(6): Xaa is any aa, unknown or other
LEXPSXSKNFCSSICPRHSSLLSSSSFICCRVSTREMEPQEGRKGIPSLLSSQGECIATNITQLIGWTPLIELRNITEKDSIGARLIGKIEPYQPLSSVKDRSALRLIEDAEEKGLITPGITTLLGVTSGNLGIGVAFIAAQKGYKFIALMPAKLSLDKQILMRYLGVEVVLVDAVQHGFKALLDRVEQMKKDVEDVYVLDQFTNPANPDAHFRWTGPEIWKDTAGKVDIFIAASGSGGTITGVGRYLKTKNPSVKLICVEPAESPVISGGEPAFHNILGIGPGFVPEILDRSQIDEIVTVTTQEAMDMARRLAREEGLLVGISSGANAAACLKVASREENRGKMIVTMFSSGAERYLNSELFAQVKEECVNVNMTF

SEQ ID NO: 56224 - protein, 341 aa, Glycine max
  peptide (1)..(341): Ceres Seq. ID no. 15221497
  misc_feature (25)..(317): Pfam Name: Pyridoxal-phosphate dependent enzyme Pfam Description: Pyridoxal-phosphate dependent enzyme
  misc_feature (21)..(339): Homolog of NCBI NO: 12081917 NR Description: cytosolic cysteine synthase [Solanum tuberosum]
  misc_feature (10)..(334): Homolog of NCBI NO: 11131628 NR Description: Cysteine synthase, chloroplast precursor sulfhydrylase) (O-acetylserine (Thiol)-lyase) (CSase B) (CS-B)
  misc_feature (18)..(337): Homolog of NCBI NO: 2245144 NR Description: O-acetylserine(thiol) lyase [Brassica juncea]
  misc_feature (21)..(333): Homolog of NCBI NO: 231970 NR Description: Cysteine synthase (O-acetylserine sulfhydrylase)
  misc_feature (14)..(337): Homolog of NCBI NO: 11131901 NR Description: Cysteine synthase (O-acetylserine sulfhydrylase)
  misc_feature (1)..(337): Homolog of NCBI NO: 421795 NR Description: cysteine synthase (EC 4.2.99.8) B precursor,
  misc_feature (1)..(337): Homolog of NCBI NO: 12644209 NR Description: CYSTEINE SYNTHASE, CHLOROPLAST PRECURSOR SULFHYDRYLASE) (O-ACETYLSERINE (THIOL)-LYASE) (CSASE B) (CS-B)
  misc_feature (1)..(337): Homolog of NCBI NO: 303902 NR Description: cysteine synthase [Spinacia oleracea]
  misc_feature (1)..(341): Homolog of NCBI NO: 4574141 NR Description: cysteine synthase [Oryza sativa]
  misc_feature (1)..(341): Homolog of NCBI NO: 4574137 NR Description: cysteine synthase [Oryza sativa]
MEPQEGRKGIPSLLSSQGECIATNITQLIGWTPLIELRNITEKDSIGARLIGKIEPYQPLSSVKDRSALRLIEDAEEKGLITPGITTLLGVTSGNLGIGVAFIAAQKGYKFIALMPAKLSLDKQILMRYLGVEVVLVDAVQHGFKALLDRVEQMKKDVEDVYVLDQFTNPANPDAHFRWTGPEIWKDTAGKVDIFIAASGSGGTITGVGRYLKTKNPSVKLICVEPAESPVISGGEPAFHNILGIGPGFVPEILDRSQIDEIVTVTTQEAMDMARRLAREEGLLVGISSGANAAACLKVASREENRGKMIVTMFSSGAERYLNSELFAQVKEECVNVNMTF

SEQ ID NO: 56225 - protein, 227 aa, Glycine max
  peptide (1)..(227): Ceres Seq. ID no. 15221498
  misc_feature (1)..(203): Pfam Name: Pyridoxal-phosphate dependent enzyme Pfam Description: Pyridoxal-phosphate dependent enzyme
  misc_feature (1)..(225): Homolog of NCBI NO: 12081917 NR Description: cytosolic cysteine synthase [Solanum tuberosum]
  misc_feature (1)..(220): Homolog of NCBI NO: 11131628 NR Description: Cysteine synthase, chloroplast precursor sulfhydrylase) (O-acetylserine (Thiol)-lyase) (CSase B) (CS-B)
  misc_feature (1)..(223): Homolog of NCBI NO: 2245144 NR Description: O-acetylserine(thiol) lyase [Brassica juncea]
  misc_feature (1)..(219): Homolog of NCBI NO: 231970 NR Description: Cysteine synthase (O-acetylserine sulfhydrylase)
  misc_feature (1)..(223): Homolog of NCBI NO: 11131901 NR Description: Cysteine synthase (O-acetylserine sulfhydrylase)
  misc_feature (1)..(223): Homolog of NCBI NO: 421795 NR Description: cysteine synthase (EC 4.2.99.8) B precursor,
  misc_feature (1)..(223): Homolog of NCBI NO: 12644209 NR Description: CYSTEINE SYNTHASE, CHLOROPLAST PRECURSOR SULFHYDRYLASE) (O-ACETYLSERINE (THIOL)-LYASE) (CSASE B) (CS-B)
  misc_feature (1)..(223): Homolog of NCBI NO: 303902 NR Description: cysteine synthase [Spinacia oleracea]
  misc_feature (1)..(227): Homolog of NCBI NO: 4574141 NR Description: cysteine synthase [Oryza sativa]
  misc_feature (1)..(227): Homolog of NCBI NO: 4574137 NR Description: cysteine synthase [Oryza sativa]
MPAKLSLDKQILMRYLGVEVVLVDAVQHGFKALLDRVEQMKKDVEDVYVLDQFTNPANPDAHFRWTGPEIWKDTAGKVDIFIAASGSGGTITGVGRYLKTKNPSVKLICVEPAESPVISGGEPAFHNILGIGPGFVPEILDRSQIDEIVTVTTQEAMDMARRLAREEGLLVGISSGANAAACLKVASREENRGKMIVTMFSSGAERYLNSELFAQVKEECVNVNMTF

SEQ ID NO: 56226 - DNA, 774 bp, Glycine max
  misc_feature (1)..(774): Ceres Seq. ID no. 12610615
atagatagatccatagaagaagggcaggggcagaggcgcggagcagaggaaatcaagaaggcggggaagatcgtcggagcggcgatggaggggtgggacaagggcacgaagagcgtggtgggcgagatcccgctgctgtcgacgcgggcgggcccccgggacggcgatgcgtggcggcagcggctcaaggaggagtaccgcgctctcatcgcctacacctccgtcaacaaggccaaggacaacgactggttccgcatcgccgccgccaacccggagggcacccgctgggagggcacctgctggtacgtccacaacctccgccgctacgagttccccctccagttcgacatccccgtcgcctacccccaggtcgcccccgagatcgagctccccaccctcgacggcaagacccacaagatgtaccgcggggggaagatctgcctcaccgtgcacttcaagccgctgtgggccaagaactgcccgcggttcgggctcgcccacgctctctgcctcggactcgcgccgtggctcgccgcggaggtgcccatcctggtcgactcgggcatggtgaagcacaaggacgatgaggctgctcctgcagatgccgctgctgcgtctggctctgccgctgcctcttagctgcaagacagttacagtatgccttttttgttgtcgctgacagtgacagttacagtatgatggttgtcaaggggattggaggattgaaaatccactcggttgtggactaataagagccagcaatacctatactcg

SEQ ID NO: 56227 - protein, 212 aa, Glycine max
  peptide (1)..(212): Ceres Seq. ID no. 12610616
  misc_feature (33)..(193): Homolog of NCBI NO: 39590862 NR Description: Hypothetical protein CBG10119 [Caenorhabditis
  misc_feature (33)..(194): Homolog of NCBI NO: 19922352 NR Description: CG8386-PA [Drosophila melanogaster]
  misc_feature (33)..(194): Homolog of NCBI NO: 13528771 NR Description: Similar to hypothetical protein [Homo sapiens]
  misc_feature (33)..(194): Homolog of NCBI NO: 31223805 NR Description: ENSANGP00000010523 [Anopheles gambiae]
  misc_feature (33)..(194): Homolog of NCBI NO: 13384768 NR Description: RIKEN cDNA 1110021H02; EST AA062310 [Mus
  misc_feature (33)..(194): Homolog of NCBI NO: 7705481 NR Description: hypothetical protein HSPC155 [Homo sapiens]
  misc_feature (33)..(194): Homolog of NCBI NO: 6831734 NR Description: Protein CGI-126 (Protein HSPC155)
  misc_feature (29)..(202): Homolog of NCBI NO: 24899705 NR Description: Similar to CGI-126 protein [Arabidopsis thaliana]
  misc_feature (29)..(202): Homolog of NCBI NO: 18396376 NR Description: expressed protein
  misc_feature (29)..(212): Homolog of NCBI NO: 37532272 NR Description: unknown protein [Oryza sativa (japonica
IDRSIEEGQGQRRGAEEIKKAGKIVGAAMEGWDKGTKSVVGEIPLLSTRAGPRDGDAWRQRLKEEYRALIAYTSVNKAKDNDWFRIAAANPEGTRWEGTCWYVHNLRRYEFPLQFDIPVAYPQVAPEIELPTLDGKTHKMYRGGKICLTVHFKPLWAKNCPRFGLAHALCLGLAPWLAAEVPILVDSGMVKHKDDEAAPADAAAASGSAAAS

SEQ ID NO: 56228 - protein, 184 aa, Glycine max
  peptide (1)..(184): Ceres Seq. ID no. 12610617
  misc_feature (5)..(165): Homolog of NCBI NO: 39590862 NR Description: Hypothetical protein CBG10119 [Caenorhabditis
  misc_feature (5)..(166): Homolog of NCBI NO: 19922352 NR Description: CG8386-PA [Drosophila melanogaster]
  misc_feature (5)..(166): Homolog of NCBI NO: 13528771 NR Description: Similar to hypothetical protein [Homo sapiens]
  misc_feature (5)..(166): Homolog of NCBI NO: 31223805 NR Description: ENSANGP00000010523 [Anopheles gambiae]
  misc_feature (5)..(166): Homolog of NCBI NO: 13384768 NR Description: RIKEN cDNA 1110021H02; EST AA062310 [Mus
  misc_feature (5)..(166): Homolog of NCBI NO: 7705481 NR Description: hypothetical protein HSPC155 [Homo sapiens]
  misc_feature (5)..(166): Homolog of NCBI NO: 6831734 NR Description: Protein CGI-126 (Protein HSPC155)
  misc_feature (1)..(174): Homolog of NCBI NO: 24899705 NR Description: Similar to CGI-126 protein [Arabidopsis thaliana]
  misc_feature (1)..(174): Homolog of NCBI NO: 18396376 NR Description: expressed protein
  misc_feature (1)..(184): Homolog of NCBI NO: 37532272 NR Description: unknown protein [Oryza sativa (japonica
MEGWDKGTKSVVGEIPLLSTRAGPRDGDAWRQRLKEEYRALIAYTSVNKAKDNDWFRIAAANPEGTRWEGTCWYVHNLRRYEFPLQFDIPVAYPQVAPEIELPTLDGKTHKMYRGGKICLTVHFKPLWAKNCPRFGLAHALCLGLAPWLAAEVPILVDSGMVKHKDDEAAPADAAAASGSAAAS

SEQ ID NO: 56229 - protein, 134 aa, Glycine max
  peptide (1)..(134): Ceres Seq. ID no. 12610618
  misc_feature (1)..(128): Pfam Name: Glycoprotein GG/GX Pfam Description: Glycoprotein GG/GX
  misc_feature (1)..(133): Homolog of NCBI NO: 25143299 NR Description: pre-mRNA splicing SR protein related RSR-1 (68.2
  misc_feature (1)..(131): Homolog of NCBI NO: 111978 NR Description: mucin - rat
  misc_feature (5)..(134): Homolog of NCBI NO: 1076205 NR Description: hypothetical protein WP6 - Chlamydomonas
  misc_feature (1)..(130): Homolog of NCBI NO: 25143299 NR Description: pre-mRNA splicing SR protein related RSR-1 (68.2
  misc_feature (1)..(128): Homolog of NCBI NO: 1076211 NR Description: hypothetical protein VSP-3 - Chlamydomonas
  misc_feature (1)..(134): Homolog of NCBI NO: 38175466 NR Description: putative high-affinity potassium transporter
  misc_feature (1)..(122): Homolog of NCBI NO: 29250753 NR Description: GLP_49_63778_65430 [Giardia lamblia ATCC 50803]
  misc_feature (1)..(127): Homolog of NCBI NO: 28574039 NR Description: Salivary gland secretion 1 CG3047-PA
  misc_feature (1)..(134): Homolog of NCBI NO: 29250753 NR Description: GLP_49_63778_65430 [Giardia lamblia ATCC 50803]
  misc_feature (1)..(128): Homolog of NCBI NO: 25989119 NR Description: unknown [Streptomyces aureofaciens]
MRGGSGSRRSTALSSPTPPSTRPRTTTGSASPPPTRRAPAGRAPAGTSTTSAATSSPSSSTSPSPTPRSPPRSSSPPSTARPTRCTAGGRSASPCTSSRCGPRTARGSGSPTLSASDSRRGSPRRCPSWSTRAW

SEQ ID NO: 56230 - DNA, 784 bp, Glycine max
  misc_feature (1)..(784): Ceres Seq. ID no. 12610253
aaaatgtttgttgtgtctcttctcttcccaaactctcttcttctattccaaagacccttttgaagtaatcgatggagtttcagtctctttccggattctaccttcttctttccttaaccattctcttccttgcaccctttcacgctcaagctaaaattaaagtcacttactgcgataagaaggcagactatcctgtgaaggtgtctggagttgaaatatcaccagaccctgtggagagtggcaagcctgctacctttaagatctcggctacttctagtaaagctatttatggtggagaagttgtaattggagtttcatacgttggggtgcctgtccatactgaaagaattgatctctgtcatgaagtatcctgtcctgttgccaatggcaattttctgatttctcacacccaaacattgccttcgattactccaccgggaccctactctctgaagatgacactgaagaatgatcgggacgaggtgttaacttgcattaagtttaattttaaaattgtttttggatcttttgtgtctgatatgtaaagtgtcctttgcatgcctgatctgggggaacttttttgctttgttgtgaagtgttttattgtattttgtactggatatcacctttcaattcgagtcgtatcttgtaaggccaatgttctctagtgtcagagtaatgtcaatgacattagactcatgatgttgtataaggtccatgactggaaatttttctttctgtatgatttgcacagtacaatccatagttctaaattgcggtcgag

SEQ ID NO: 56231 - protein, 157 aa, Glycine max
  peptide (1)..(157): Ceres Seq. ID no. 12610254
  misc_feature (32)..(148): Pfam Name: ML domain Pfam Description: ML domain
  misc_feature (21)..(143): Homolog of NCBI NO: 4322563 NR Description: phosphatidylglycerol/phosphatidylinositol
  misc_feature (28)..(142): Homolog of NCBI NO: 32406256 NR Description: hypothetical protein [Neurospora crassa]
  misc_feature (11)..(122): Homolog of NCBI NO: 21618166 NR Description: unknown [Arabidopsis thaliana]
  misc_feature (11)..(122): Homolog of NCBI NO: 18397991 NR Description: Expressed protein
  misc_feature (6)..(157): Homolog of NCBI NO: 21593850 NR Description: unknown [Arabidopsis thaliana]
  misc_feature (6)..(157): Homolog of NCBI NO: 15240063 NR Description: putative protein
  misc_feature (11)..(152): Homolog of NCBI NO: 34899866 NR Description: OJ1714_H10.15 [Oryza sativa (japonica
  misc_feature (3)..(157): Homolog of NCBI NO: 21554315 NR Description: unknown [Arabidopsis thaliana]
  misc_feature (3)..(157): Homolog of NCBI NO: 18399355 NR Description: expressed protein
  misc_feature (11)..(154): Homolog of NCBI NO: 15229872 NR Description: putative protein
MEFQSLSGFYLLLSLTILFLAPFHAQAKIKVTYCDKKADYPVKVSGVEISPDPVESGKPATFKISATSSKAIYGGEVVIGVSYVGVPVHTERIDLCHEVSCPVANGNFLISHTQTLPSITPPGPYSLKMTLKNDRDEVLTCIKFNFKIVFGSFVSDM

SEQ ID NO: 56232 - DNA, 615 bp, Glycine max
  misc_feature (1)..(615): Ceres Seq. ID no. 13639061
gtctgacagcgctggccgatcaagctcgctcgctcgcaccgacgacgacgactaggaagaagaggaacggccgatggagcacggcgaggggaggcacgaggcggcgctgagggcggtgcagagggcgccggccaagccgtggcgcggcgccggcgccccgccgccgcccagggtgtaccgggtggagccccgggacttccgggagctcgtgcagaggctcaccggcgccggcacggccacgaccggctcgccggccgtgggagcgaggaaggcgccgggtcatgcggccgcggcgcacgggcgcagggaggccgcccccgtggagcagttcgactactcgtcgtggttctccgcgccgctgctcagccccgcgtccatgccggccggcatggacgcccaccatggcgctctgcggtaggagagttgtggtacggtcgccgctcgccgccactcggcacttgtaaaatcgagctacatgccacagttccatcgcttcttccctcctcgttatttcctttcgagggatgatgacacatgacagtgctttcgctcgtgtacgtaattgagtatagttctttttatgaatataataaatgaattattagtttgctctgc

SEQ ID NO: 56233 - protein, 114 aa, Glycine max
  peptide (1)..(114): Ceres Seq. ID no. 13639062
  misc_feature (8)..(102): Homolog of NCBI NO: 15227762 NR Description: hypothetical protein [Arabidopsis thaliana]
  misc_feature (6)..(111): Homolog of NCBI NO: 12039291 NR Description: hypothetical protein [Oryza sativa]
MEHGEGRHEAALRAVQRAPAKPWRGAGAPPPPRVYRVEPRDFRELVQRLTGAGTATTGSPAVGARKAPGHAAAAHGRREAAPVEQFDYSSWFSAPLLSPASMPAGMDAHHGALR

SEQ ID NO: 56234 - protein, 60 aa, Glycine max
  peptide (1)..(60): Ceres Seq. ID no. 13639063
MRPRRTGAGRPPPWSSSTTRRGSPRRCSAPRPCRPAWTPTMALCGRRVVVRSPLAATRHL

SEQ ID NO: 56235 - DNA, 766 bp, Glycine max
  misc_feature (1)..(766): Ceres Seq. ID no. 12610334
gtttttcctatcctctccctcttcttcatctctcgtatacaatcaaaaccaacacatacagagagacacgaaccaaagagtgcaaaatggcagcgacgtctctctccatcgcaaccacattccgctcctcgtcttacctcactcacgcttctccccatggcttcttcccttcccgacccaacacaacattccgcatctgttcaccttcctccacaccgacccaccgtgcaacccacctccgtcccgtctccgccgtcgaagctccggagaagatcgagaagattgggtccgagatctcttctctgactctcgaggaagcccgcgtcctcgtggactaccttcaggacaagttcggtgtgtcgccgctctcgttagctcccgctgcggcggctgtggctgctccgggagacggtggcggtgcggcggctgcggtggaggagcagacggagttcgacgtggtgattaacgaagtgccgagcagtgcgcgtatcgcggtgattaaagcggtgagggctttgactagcttggcgttgaaggaagcgaaggagcttatcgaagggttgccgaagaagtttaaggaaggtgtgacgaaggatgaagctgaagaagctaagaagcagcttgaagaagctggcgctaaggtctcgattgcttaaagaatgtgtgggtctttttttgctgtgttgttagtatagttggcgaatgagaattgttgattaaatttttgaaaaaaaaaaaaaaaaaagcttatcgataccgtcgacct

SEQ ID NO: 56236 - protein, 217 aa, Glycine max
  peptide (1)..(217): Ceres Seq. ID no. 12610335
  misc_feature (149)..(217): Pfam Name: Ribosomal protein L7/L12 C-terminal domain Pfam Description: Ribosomal protein L7/L12 C-terminal domain
  misc_feature (29)..(217): Homolog of NCBI NO: 133088 NR Description: 50S RIBOSOMAL PROTEIN L12, CHLOROPLAST PRECURSOR
  misc_feature (29)..(217): Homolog of NCBI NO: 20020 NR Description: ribosomal protein L12-1a [Nicotiana tabacum]
  misc_feature (29)..(216): Homolog of NCBI NO: 133085 NR Description: 50S RIBOSOMAL PROTEIN L12, CHLOROPLAST PRECURSOR
  misc_feature (29)..(217): Homolog of NCBI NO: 548746 NR Description: 50S RIBOSOMAL PROTEIN L12, CHLOROPLAST PRECURSOR
  misc_feature (29)..(216): Homolog of NCBI NO: 541896 NR Description: ribosomal protein L12.B precursor, chloroplast -
  misc_feature (29)..(216): Homolog of NCBI NO: 15232275 NR Description: 50S ribosomal protein L12-B; protein id:
  misc_feature (29)..(217): Homolog of NCBI NO: 21592776 NR Description: 50S ribosomal protein L12-C [Arabidopsis thaliana]
  misc_feature (29)..(217): Homolog of NCBI NO: 541897 NR Description: ribosomal protein L12.C precursor, chloroplast -
  misc_feature (29)..(217): Homolog of NCBI NO: 15232276 NR Description: 50S ribosomal protein L12-C
  misc_feature (29)..(217): Homolog of NCBI NO: 15232274 NR Description: 50S ribosomal protein L12-A
FSYPLPLLHLSYTIKTNTYRETRTKECKMAATSLSIATTFRSSSYLTHASPHGFFPSRPNTTFRICSPSSTPTHRATHLRPVSAVEAPEKIEKIGSEISSLTLEEARVLVDYLQDKFGVSPLSLAPAAAAVAAPGDGGGAAAAVEEQTEFDVVINEVPSSARIAVIKAVRALTSLALKEAKELIEGLPKKFKEGVTKDEAEEAKKQLEEAGAKVSIA

SEQ ID NO: 56237 - protein, 189 aa, Glycine max
  peptide (1)..(189): Ceres Seq. ID no. 12610336
  misc_feature (121)..(189): Pfam Name: Ribosomal protein L7/L12 C-terminal domain Pfam Description: Ribosomal protein L7/L12 C-terminal domain
  misc_feature (1)..(189): Homolog of NCBI NO: 133088 NR Description: 50S RIBOSOMAL PROTEIN L12, CHLOROPLAST PRECURSOR
  misc_feature (1)..(189): Homolog of NCBI NO: 20020 NR Description: ribosomal protein L12-1a [Nicotiana tabacum]
  misc_feature (1)..(188): Homolog of NCBI NO: 133085 NR Description: 50S RIBOSOMAL PROTEIN L12, CHLOROPLAST PRECURSOR
  misc_feature (1)..(189): Homolog of NCBI NO: 548746 NR Description: 50S RIBOSOMAL PROTEIN L12, CHLOROPLAST PRECURSOR
  misc_feature (1)..(188): Homolog of NCBI NO: 541896 NR Description: ribosomal protein L12.B precursor, chloroplast -
  misc_feature (1)..(188): Homolog of NCBI NO: 15232275 NR Description: 50S ribosomal protein L12-B; protein id:
  misc_feature (1)..(189): Homolog of NCBI NO: 21592776 NR Description: 50S ribosomal protein L12-C [Arabidopsis thaliana]
  misc_feature (1)..(189): Homolog of NCBI NO: 541897 NR Description: ribosomal protein L12.C precursor, chloroplast -
  misc_feature (1)..(189): Homolog of NCBI NO: 15232276 NR Description: 50S ribosomal protein L12-C
  misc_feature (1)..(189): Homolog of NCBI NO: 15232274 NR Description: 50S ribosomal protein L12-A
MAATSLSIATTFRSSSYLTHASPHGFFPSRPNTTFRICSPSSTPTHRATHLRPVSAVEAPEKIEKIGSEISSLTLEEARVLVDYLQDKFGVSPLSLAPAAAAVAAPGDGGGAAAAVEEQTEFDVVINEVPSSARIAVIKAVRALTSLALKEAKELIEGLPKKFKEGVTKDEAEEAKKQLEEAGAKVSIA

SEQ ID NO: 56238 - protein, 154 aa, Glycine max
  peptide (1)..(154): Ceres Seq. ID no. 12610337
FFLSSPSSSSLVYNQNQHIQRDTNQRVQNGSDVSLHRNHIPLLVLPHSRFSPWLLPFPTQHNIPHLFTFLHTDPPCNPPPSRLRRRSSGEDREDWVRDLFSDSRGSPRPRGLPSGQVRCVAALVSSRCGGCGCSGRRWRCGGCGGGADGVRRGD

SEQ ID NO: 56239 - DNA, 1087 bp, Glycine max
  misc_feature (1)..(1087): Ceres Seq. ID no. 13595050
accagctccatcgcaagggacaatactaccactctagccacttactactggagctagcaggcgccaccccacccaccaaccaacgacaacgagcgcgccgcgagcgcacgccggagcaagcatgtcgatgtcggtgtccatgtccgggaaggcgagcgacccgggttccgcctggttcggcggcggcagcaggagcccgcaaccggggccgacgcacaacgtgcggctcatcgccatggccgttgccgcgttcgtctccgtgctcggcctctccctgctcctgcacctctacatctgccgcgtccgccgcaggaaccgcaggcaggcggaggcagccgcggcggctctggaggccggctcggcggcccccaagccggccaaggttggcctggacccgtccgccatcgcggcgctgccgacagcggcgtacaaggagacgggcgagccgggcagcggcgcaagcgagtgcaccatctgcctcggcgccatgcaggagggcgaggcggtgcgcgtgctgccggcctgcgcccacgtgttccacgtcccctgcgtcgacacgtggctcgcgtccagctcgtcgtgcccggtctgccgcgccctggtggagccgccgccgtcgccggccgcgccagcgtgggtgcaggagaagcagggcctggagaaggagtgtggtgcaagtgggagctcggcgccgccatgtgggctgggggcgtcgctgatgaggatgctgagcagggagaggccgctggcgcggaggccgacgcagggtgaccacgcgcacccgatggaaatgcatgtcgaggacttggaaagccagcagccccagctgcaacactctgtggatagcaattagtctacttttctgttcttcttttttgggttttcgccattcgccgctgctcgattgcaaatcttgcatttgggtggccgattcagaggtgtgaaatacggaaatacacccctgaaagtgtcctatgttttaattaggcactggcgcttgtggatgtgcttggagctcacccatatctctcgtatttgtgcaaacaagggatcatggatatataaatagagctccgttttctcttcc

SEQ ID NO: 56240 - protein, 243 aa, Glycine max
  peptide (1)..(243): Ceres Seq. ID no. 13595051
  misc_feature (116)..(157): Pfam Name: Zinc finger, C3HC4 type (RING finger) Pfam Description: Zinc finger, C3HC4 type (RING finger)
  misc_feature (34)..(210): Homolog of NCBI NO: 21593806 NR Description: putative RING zinc finger protein [Arabidopsis
  misc_feature (41)..(163): Homolog of NCBI NO: 15233714 NR Description: zinc finger (C3HC4-type RING finger) protein
  misc_feature (1)..(188): Homolog of NCBI NO: 34907826 NR Description: P0485B12.26 [Oryza sativa (japonica
  misc_feature (14)..(163): Homolog of NCBI NO: 34903930 NR Description: OSJNBa0038J17.10 [Oryza sativa (japonica
  misc_feature (36)..(189): Homolog of NCBI NO: 15228830 NR Description: RING-H2 zinc finger protein ATL5 [Arabidopsis
  misc_feature (36)..(189): Homolog of NCBI NO: 4928401 NR Description: RING-H2 zinc finger protein ATL5 [Arabidopsis
  misc_feature (35)..(192): Homolog of NCBI NO: 38569180 NR Description: OSJNBa0086B14.4 [Oryza sativa (japonica
  misc_feature (35)..(197): Homolog of NCBI NO: 34903920 NR Description: OSJNBa0038J17.5 [Oryza sativa (japonica
  misc_feature (19)..(230): Homolog of NCBI NO: 15227929 NR Description: RING zinc finger protein -related [Arabidopsis
  misc_feature (1)..(237): Homolog of NCBI NO: 34909640 NR Description: P0503C12.20 [Oryza sativa (japonica
MSMSVSMSGKASDPGSAWFGGGSRSPQPGPTHNVRLIAMAVAAFVSVLGLSLLLHLYICRVRRRNRRQAEAAAAALEAGSAAPKPAKVGLDPSAIAALPTAAYKETGEPGSGASECTICLGAMQEGEAVRVLPACAHVFHVPCVDTWLASSSSCPVCRALVEPPPSPAAPAWVQEKQGLEKECGASGSSAPPCGLGASLMRMLSRERPLARRPTQGDHAHPMEMHVEDLESQQPQLQHSVDSN

SEQ ID NO: 56241 - protein, 241 aa, Glycine max
  peptide (1)..(241): Ceres Seq. ID no. 13595052
  misc_feature (114)..(155): Pfam Name: Zinc finger, C3HC4 type (RING finger) Pfam Description: Zinc finger, C3HC4 type (RING finger)
  misc_feature (32)..(208): Homolog of NCBI NO: 21593806 NR Description: putative RING zinc finger protein [Arabidopsis
  misc_feature (39)..(161): Homolog of NCBI NO: 15233714 NR Description: zinc finger (C3HC4-type RING finger) protein
  misc_feature (1)..(186): Homolog of NCBI NO: 34907826 NR Description: P0485B12.26 [Oryza sativa (japonica
  misc_feature (12)..(161): Homolog of NCBI NO: 34903930 NR Description: OSJNBa0038J17.10 [Oryza sativa (japonica
  misc_feature (34)..(187): Homolog of NCBI NO: 15228830 NR Description: RING-H2 zinc finger protein ATL5 [Arabidopsis
  misc_feature (34)..(187): Homolog of NCBI NO: 4928401 NR Description: RING-H2 zinc finger protein ATL5 [Arabidopsis
  misc_feature (33)..(190): Homolog of NCBI NO: 38569180 NR Description: OSJNBa0086B14.4 [Oryza sativa (japonica
  misc_feature (33)..(195): Homolog of NCBI NO: 34903920 NR Description: OSJNBa0038J17.5 [Oryza sativa (japonica
  misc_feature (17)..(228): Homolog of NCBI NO: 15227929 NR Description: RING zinc finger protein -related [Arabidopsis
  misc_feature (1)..(235): Homolog of NCBI NO: 34909640 NR Description: P0503C12.20 [Oryza sativa (japonica
MSVSMSGKASDPGSAWFGGGSRSPQPGPTHNVRLIAMAVAAFVSVLGLSLLLHLYICRVRRRNRRQAEAAAAALEAGSAAPKPAKVGLDPSAIAALPTAAYKETGEPGSGASECTICLGAMQEGEAVRVLPACAHVFHVPCVDTWLASSSSCPVCRALVEPPPSPAAPAWVQEKQGLEKECGASGSSAPPCGLGASLMRMLSRERPLARRPTQGDHAHPMEMHVEDLESQQPQLQHSVDSN

SEQ ID NO: 56242 - protein, 238 aa, Glycine max
  peptide (1)..(238): Ceres Seq. ID no. 13595053
  misc_feature (119)..(221): Pfam Name: Cupin Pfam Description: Cupin
  misc_feature (30)..(221): Homolog of NCBI NO: 37530468 NR Description: hypothetical protein [Oryza sativa (japonica
QLHRKGQYYHSSHLLLELAGATPPTNQRQRARRERTPEQACRCRCPCPGRRATRVPPGSAAAAGARNRGRRTTCGSSPWPLPRSSPCSASPCSCTSTSAASAAGTAGRRRQPRRLWRPARRPPSRPRLAWTRPPSRRCRQRRTRRRASRAAAQASAPSASAPCRRARRCACCRPAPTCSTSPASTRGSRPARRARSAAPWWSRRRRRPRQRGCRRSRAWRRSVVQVGARRRHVGWGRR

SEQ ID NO: 56243 - DNA, 782 bp, Glycine max
  misc_feature (1)..(782): Ceres Seq. ID no. 12611019
aacaaacccctcacccctcgcccccgccgcccccgcccccgccgccaaacacccatcgccatgcggccaccgagaggcggcggaggtttccgcggacgcggcggcgaccgaggtggccgcttcggtggaggcggccgcggcggcggcggtaggggccgcttcggtggaggcggcggcgggttccgcgacgagggccctccagccgaggtcgtcgaggtgtcgacgttcctgcacgcctgcgagggggacgcggtaacgaagctgacgaacgagaaagtgccctacttcaacgcgcccatatacctccagaacaagacccagatcggcaaagtcgacgagatcttcggccccatcaacgaatcatatttctcggtcaagatgttcgagggagtcattgcaacatcttacaacgaaggtgacaagttcttcattgaccccatgaagctgctgcccctctcacgcttcctgccgcagccaaagggctcgactccaagaggtggtggtcgcggtggaagaggtggtggtcgcggtggaagaggtggccgtggtggattccgtggaagaggtgcaccaaggggtcgtggacctcccaggggtggagggcgtggtttcagaggacgaggcagattctaggatgtagttttaagtttgctgattgttgaaacatgatgctctacattatctgttcagctggaaacattatgctaagtcagctgcaagcgcactttgtgtggaagttgattcaatatttgtatgaatgaaatgttgtcaagtgttgagtt

SEQ ID NO: 56244 - protein, 210 aa, Glycine max
  peptide (1)..(210): Ceres Seq. ID no. 12611020
  misc_feature (63)..(163): Pfam Name: Gar1 protein RNA binding region Pfam Description: Gar1 protein RNA binding region
  misc_feature (25)..(208): Homolog of NCBI NO: 9506713 NR Description: nucleolar protein family A, member 1; GAR1
  misc_feature (26)..(208): Homolog of NCBI NO: 28913737 NR Description: Similar to nucleolar protein family A, member 1
  misc_feature (26)..(208): Homolog of NCBI NO: 9506713 NR Description: nucleolar protein family A, member 1; GAR1
  misc_feature (26)..(208): Homolog of NCBI NO: 26344814 NR Description: unnamed protein product [Mus musculus]
  misc_feature (25)..(208): Homolog of NCBI NO: 18256903 NR Description: Similar to nucleolar protein family A, member 1
  misc_feature (26)..(208): Homolog of NCBI NO: 13384710 NR Description: nucleolar protein family A, member 1
  misc_feature (21)..(209): Homolog of NCBI NO: 15238764 NR Description: putative protein; protein id: At5g18180.1
  misc_feature (21)..(210): Homolog of NCBI NO: 6006850 NR Description: putative GAR1 protein [Arabidopsis thaliana]
  misc_feature (21)..(210): Homolog of NCBI NO: 21536739 NR Description: putative GAR1 protein [Arabidopsis thaliana]
  misc_feature (21)..(210): Homolog of NCBI NO: 18396707 NR Description: putative GAR1 protein
NKPLTPRPRRPRPRRQTPIAMRPPRGGGGFRGRGGDRGGRFGGGGRGGGGRGRFGGGGGGFRDEGPPAEVVEVSTFLHACEGDAVTKLTNEKVPYFNAPIYLQNKTQIGKVDEIFGPINESYFSVKMFEGVIATSYNEGDKFFIDPMKLLPLSRFLPQPKGSTPRGGGRGGRGGGRGGRGGRGGFRGRGAPRGRGPPRGGGRGFRGRGRF

SEQ ID NO: 56245 - protein, 190 aa, Glycine max
  peptide (1)..(190): Ceres Seq. ID no. 12611021
  misc_feature (43)..(143): Pfam Name: Gar1 protein RNA binding region Pfam Description: Gar1 protein RNA binding region
  misc_feature (5)..(188): Homolog of NCBI NO: 9506713 NR Description: nucleolar protein family A, member 1; GAR1
  misc_feature (6)..(188): Homolog of NCBI NO: 28913737 NR Description: Similar to nucleolar protein family A, member 1
  misc_feature (6)..(188): Homolog of NCBI NO: 9506713 NR Description: nucleolar protein family A, member 1; GAR1
  misc_feature (6)..(188): Homolog of NCBI NO: 26344814 NR Description: unnamed protein product [Mus musculus]
  misc_feature (5)..(188): Homolog of NCBI NO: 18256903 NR Description: Similar to nucleolar protein family A, member 1
  misc_feature (6)..(188): Homolog of NCBI NO: 13384710 NR Description: nucleolar protein family A, member 1
  misc_feature (1)..(189): Homolog of NCBI NO: 15238764 NR Description: putative protein; protein id: At5g18180.1
  misc_feature (1)..(190): Homolog of NCBI NO: 6006850 NR Description: putative GAR1 protein [Arabidopsis thaliana]
  misc_feature (1)..(190): Homolog of NCBI NO: 21536739 NR Description: putative GAR1 protein [Arabidopsis thaliana]
  misc_feature (1)..(190): Homolog of NCBI NO: 18396707 NR Description: putative GAR1 protein
MRPPRGGGGFRGRGGDRGGRFGGGGRGGGGRGRFGGGGGGFRDEGPPAEVVEVSTFLHACEGDAVTKLTNEKVPYFNAPIYLQNKTQIGKVDEIFGPINESYFSVKMFEGVIATSYNEGDKFFIDPMKLLPLSRFLPQPKGSTPRGGGRGGRGGGRGGRGGRGGFRGRGAPRGRGPPRGGGRGFRGRGRF

SEQ ID NO: 56246 - DNA, 852 bp, Glycine max
  misc_feature (1)..(852): Ceres Seq. ID no. 12610648
tcccacaacaccccacccgcccctctccccctccccaatctccgacccgaaccccagcggcggagccgacgaagaggaggagaccaaggctcgacggacaaggggaagacctccgctccctcggcgatcgcgacaccaccctcctcatcaagatggtgctgatgcaggcagatccgttcctgagcgagctgaccaacatgtacgagcggagcacggagaagggctccgtgtgggtcaccatgaagcgatcgtcgatgaagtgtcaggctaggttgaagaagatggcgagtaagggggagcctgttgagtaccggtgcctggtccgcgccactgatggcaagaggaacatctccacctcgctgtctgcaaaggagtatctgaaattccaagcttcatatgccctggtccttaaagcccatatgcacgctttgaagaagagggagaggaaggacaggaagaagacggtcgaggcagagaagatacccgagaaggaaccgaagaagcagaagaaatcatcttcgaaaaaatccgcagggtctaagtagtgaggtacttgcagaatttgactgagacctttttcgcccacatgtgcggtcaagacgttgtcacccgttttacccttaattcatgtccgcgagatgaagcctgtgaatacctatatagagacgcctcgtcgcctggcatttttgaagctgcgttttgttctggttgtaagcctccctggatggcatgggcatgctttcttgaactgctagatctgaccaccaaagtcttagttcaggttggaatggttcgccggtttgatggttttatgcctatggtatgaatgaagaatctgtagcttggttgttg

SEQ ID NO: 56247 - protein, 180 aa, Glycine max
  peptide (1)..(180): Ceres Seq. ID no. 12610649
  misc_feature (54)..(143): Pfam Name: Signal recognition particle 14kD protein Pfam Description: Signal recognition particle 14kD protein
  misc_feature (51)..(153): Homolog of NCBI NO: 2507409 NR Description: SIGNAL RECOGNITION PARTICLE 14 KD PROTEIN (SRP14)
  misc_feature (52)..(154): Homolog of NCBI NO: 11513833 NR Description: Chain B, Core Of The Alu Domain Of The Mammalian
  misc_feature (51)..(157): Homolog of NCBI NO: 31543653 NR Description: signal recognition particle 14kDa (homologous Alu
  misc_feature (51)..(157): Homolog of NCBI NO: 586035 NR Description: Signal recognition particle 14 kDa protein
  misc_feature (51)..(157): Homolog of NCBI NO: 1082198 NR Description: Alu RNA-binding protein - human
  misc_feature (51)..(153): Homolog of NCBI NO: 6678133 NR Description: signal recognition particle (homologous Alu RNA
  misc_feature (50)..(179): Homolog of NCBI NO: 5107800 NR Description: Signal Recognition Particle Alu Rna Binding
  misc_feature (51)..(170): Homolog of NCBI NO: 15224325 NR Description: putative signal recognition particle protein
  misc_feature (51)..(170): Homolog of NCBI NO: 6175053 NR Description: Signal recognition particle 14 kDa protein
  misc_feature (51)..(180): Homolog of NCBI NO: 6094345 NR Description: SIGNAL RECOGNITION PARTICLE 14 KD PROTEIN (SRP14)
PQHPTRPSPPPQSPTRTPAAEPTKRRRPRLDGQGEDLRSLGDRDTTLLIKMVLMQADPFLSELTNMYERSTEKGSVWVTMKRSSMKCQARLKKMASKGEPVEYRCLVRATDGKRNISTSLSAKEYLKFQASYALVLKAHMHALKKRERKDRKKTVEAEKIPEKEPKKQKKSSSKKSAGSK

SEQ ID NO: 56248 - protein, 130 aa, Glycine max
  peptide (1)..(130): Ceres Seq. ID no. 12610650
  misc_feature (4)..(93): Pfam Name: Signal recognition particle 14kD protein Pfam Description: Signal recognition particle 14kD protein
  misc_feature (1)..(103): Homolog of NCBI NO: 2507409 NR Description: SIGNAL RECOGNITION PARTICLE 14 KD PROTEIN (SRP14)
  misc_feature (2)..(104): Homolog of NCBI NO: 11513833 NR Description: Chain B, Core Of The Alu Domain Of The Mammalian
  misc_feature (1)..(107): Homolog of NCBI NO: 31543653 NR Description: signal recognition particle 14kDa (homologous Alu
  misc_feature (1)..(107): Homolog of NCBI NO: 586035 NR Description: Signal recognition particle 14 kDa protein
  misc_feature (1)..(107): Homolog of NCBI NO: 1082198 NR Description: Alu RNA-binding protein - human
  misc_feature (1)..(103): Homolog of NCBI NO: 6678133 NR Description: signal recognition particle (homologous Alu RNA
  misc_feature (1)..(129): Homolog of NCBI NO: 5107800 NR Description: Signal Recognition Particle Alu Rna Binding
  misc_feature (1)..(120): Homolog of NCBI NO: 15224325 NR Description: putative signal recognition particle protein
  misc_feature (1)..(120): Homolog of NCBI NO: 6175053 NR Description: Signal recognition particle 14 kDa protein
  misc_feature (1)..(130): Homolog of NCBI NO: 6094345 NR Description: SIGNAL RECOGNITION PARTICLE 14 KD PROTEIN (SRP14)
MVLMQADPFLSELTNMYERSTEKGSVWVTMKRSSMKCQARLKKMASKGEPVEYRCLVRATDGKRNISTSLSAKEYLKFQASYALVLKAHMHALKKRERKDRKKTVEAEKIPEKEPKKQKKSSSKKSAGSK

SEQ ID NO: 56249 - protein, 127 aa, Glycine max
  peptide (1)..(127): Ceres Seq. ID no. 12610651
  misc_feature (1)..(90): Pfam Name: Signal recognition particle 14kD protein Pfam Description: Signal recognition particle 14kD protein
  misc_feature (1)..(100): Homolog of NCBI NO: 2507409 NR Description: SIGNAL RECOGNITION PARTICLE 14 KD PROTEIN (SRP14)
  misc_feature (1)..(101): Homolog of NCBI NO: 11513833 NR Description: Chain B, Core Of The Alu Domain Of The Mammalian
  misc_feature (1)..(104): Homolog of NCBI NO: 31543653 NR Description: signal recognition particle 14kDa (homologous Alu
  misc_feature (1)..(104): Homolog of NCBI NO: 586035 NR Description: Signal recognition particle 14 kDa protein
  misc_feature (1)..(104): Homolog of NCBI NO: 1082198 NR Description: Alu RNA-binding protein - human
  misc_feature (1)..(100): Homolog of NCBI NO: 6678133 NR Description: signal recognition particle (homologous Alu RNA
  misc_feature (1)..(126): Homolog of NCBI NO: 5107800 NR Description: Signal Recognition Particle Alu Rna Binding
  misc_feature (1)..(117): Homolog of NCBI NO: 15224325 NR Description: putative signal recognition particle protein
  misc_feature (1)..(117): Homolog of NCBI NO: 6175053 NR Description: Signal recognition particle 14 kDa protein
  misc_feature (1)..(127): Homolog of NCBI NO: 6094345 NR Description: SIGNAL RECOGNITION PARTICLE 14 KD PROTEIN (SRP14)
MQADPFLSELTNMYERSTEKGSVWVTMKRSSMKCQARLKKMASKGEPVEYRCLVRATDGKRNISTSLSAKEYLKFQASYALVLKAHMHALKKRERKDRKKTVEAEKIPEKEPKKQKKSSSKKSAGSK

SEQ ID NO: 56250 - DNA, 975 bp, Glycine max
  misc_feature (1)..(975): Ceres Seq. ID no. 13595166
agaacatcctaatcgaataattttcccttgttcgagttttctcaggaaagctagtagagagagatactggttttgattcatacgatggctgccacagctattctccgatcgatccgccgacgcgacgtcgtctctgcgcctctttccgtctacaaatctcttgctggtaatgctcaaccttcattgggttcgtacactggtcagaactatgcaagtttgtgtagagctttcggatcgagagccggtgtgaatgaaaatgttgggactggttttggaactagcaacataagcaatgccgttagagaggagagagagcattcaaaagctactgtgaatgctatgggagctcatctgagagctcttggtgtgggaacaccaagacgtgtgttgtctacaatcgccgagggtatcaagatgacagaggaggaccagacttctccaaaaccccaaagctttcgccctctatctcctcacctcacggtttaccagcctcagaagaactcaatgttatccattttcaacagaatctcggggatttacttgaccggagtcttttatggcggctatcttctctacctgaagatgggtatgatctgcctcacttacccggctttctaccaagttcattaccatgtacagcagcaacttccggttatcacctcggttactgcattggccgcgctttaccatactatcaagagtattcactcgctcttgacccattgaagcaacatttcccctaagctcttttcgttgtttggttaagccaccagagtctccagtaagagtttccttgagatgcacaagatttaataaaagagagttagaaacgtttgttaaactctcattgtcttttgagaaagcaagtgtctagcttttgttttgggattttaggctttgaaaacttatgtttgttggctttttctttgttctaagaccttattgatggggttggaatgtaataaaatgtttacc

SEQ ID NO: 56251 - protein, 213 aa, Glycine max
  peptide (1)..(213): Ceres Seq. ID no. 15221501
  misc_feature (1)..(213): Homolog of NCBI NO: 21593777 NR Description: unknown [Arabidopsis thaliana]
  misc_feature (1)..(213): Homolog of NCBI NO: 15242460 NR Description: expressed protein [Arabidopsis thaliana]
  misc_feature (1)..(213): Homolog of NCBI NO: 15236709 NR Description: expressed protein [Arabidopsis thaliana]
  misc_feature (1)..(213): Homolog of NCBI NO: 11022654 NR Description: gene_id:MTH16.1~pir||T05407~strong similarity to
MAATAILRSIRRRDVVSAPLSVYKSLAGNAQPSLGSYTGQNYASLCRAFGSRAGVNENVGTGFGTSNISNAVREEREHSKATVNAMGAHLRALGVGTPRRVLSTIAEGIKMTEEDQTSPKPQSFRPLSPHLTVYQPQKNSMLSIFNRISGIYLTGVFYGGYLLYLKMGMICLTYPAFYQVHYHVQQQLPVITSVTALAALYHTIKSIHSLLTH

SEQ ID NO: 56252 - protein, 128 aa, Glycine max
  peptide (1)..(128): Ceres Seq. ID no. 15221502
  misc_feature (1)..(128): Homolog of NCBI NO: 21593777 NR Description: unknown [Arabidopsis thaliana]
  misc_feature (1)..(128): Homolog of NCBI NO: 15242460 NR Description: expressed protein [Arabidopsis thaliana]
  misc_feature (1)..(128): Homolog of NCBI NO: 15236709 NR Description: expressed protein [Arabidopsis thaliana]
  misc_feature (1)..(128): Homolog of NCBI NO: 11022654 NR Description: gene_id:MTH16.1~pir||T05407~strong similarity to
MGAHLRALGVGTPRRVLSTIAEGIKMTEEDQTSPKPQSFRPLSPHLTVYQPQKNSMLSIFNRISGIYLTGVFYGGYLLYLKMGMICLTYPAFYQVHYHVQQQLPVITSVTALAALYHTIKSIHSLLTH

SEQ ID NO: 56253 - DNA, 815 bp, Glycine max
  misc_feature (1)..(815): Ceres Seq. ID no. 13595054
aacacaacttactcatcctcatcaagcagcacagcyccmstmctagtaagtagcmgcacttyatyrtgtttaacartgatctagctaagagacacacacagtgcacgtgaaatggctcggctggtcggtgccgccggcgcgtgcgcgctcctcgtcatcctgctcatggcgtgcgcggcgtccgcagcgcgcagcgagccaggcgccgcgcggcagctgtgggacgacgggaggaaggtggggggacggacggaggtgacggacgtggagggcgacagggaggtgcaggagctggggcgatactccgtcgaagagcacaaccggcgccgggaggagggctgcgagggcggcggcggtgtctgcggccggctggagttcgcccgcgtggtgtcggcgcagcgccaggtggtctccggaatcaagtactacctccgcgtcgcggccgccgaggaaggtggcgcggggagcaacggcgtcaccgacggccgcgtgttcgacgccgtggtggtcgtgaagccctggctccagtcccgcgctctgatcaggttcgcgtcggccgacgccaaatgagcagctgcatgcgcgatccgacgagaaccgctgcgtgtcttctttgcgcgccagagtacgtaatgtaagctcgaataacggagtgtgaggtaccgaggtagggttgagcgccagagtatggagaatgtatgtacgatgcggcggtcgaagttttgtgaggtctcccggataaaaagttttgcaagaagagatgagagtgtcgaaataaatactaactagtatgacaagactgttttttcccctgt

SEQ ID NO: 56254 - protein, 152 aa, Glycine max
  peptide (1)..(152): Ceres Seq. ID no. 15221466
  misc_feature (42)..(150): Homolog of NCBI NO: 21592712 NR Description: cystatin-like protein [Arabidopsis thaliana]
  misc_feature (42)..(150): Homolog of NCBI NO: 15238128 NR Description: expressed protein [Arabidopsis thaliana]
  misc_feature (43)..(146): Homolog of NCBI NO: 7488656 NR Description: cysteine proteinase inhibitor (clone R1) -
  misc_feature (44)..(149): Homolog of NCBI NO: 7438236 NR Description: cysteine proteinase inhibitor - common sunflower
  misc_feature (44)..(149): Homolog of NCBI NO: 1706277 NR Description: CYSTEINE PROTEINASE INHIBITOR B (CYSTATIN B)
  misc_feature (43)..(146): Homolog of NCBI NO: 21593036 NR Description: putative cysteine proteinase inhibitor B
  misc_feature (43)..(146): Homolog of NCBI NO: 15225164 NR Description: cysteine proteinase inhibitor B (cystatin B)
  misc_feature (7)..(147): Homolog of NCBI NO: 7438233 NR Description: cysteine proteinase inhibitor, extracellular -
  misc_feature (40)..(147): Homolog of NCBI NO: 27728729 NR Description: cystatin [Malus x domestica]
  misc_feature (5)..(149): Homolog of NCBI NO: 34906946 NR Description: cysteine proteinase inhibitor Scb-like protein
MARLVGAAGACALLVILLMACAASAARSEPGAARQLWDDGRKVGGRTEVTDVEGDREVQELGRYSVEEHNRRREEGCEGGGGVCGRLEFARVVSAQRQVVSGIKYYLRVAAAEEGGAGSNGVTDGRVFDAVVVVKPWLQSRALIRFASADAK

SEQ ID NO: 56255 - protein, 134 aa, Glycine max
  peptide (1)..(134): Ceres Seq. ID no. 15221467
  misc_feature (24)..(132): Homolog of NCBI NO: 21592712 NR Description: cystatin-like protein [Arabidopsis thaliana]
  misc_feature (24)..(132): Homolog of NCBI NO: 15238128 NR Description: expressed protein [Arabidopsis thaliana]
  misc_feature (25)..(128): Homolog of NCBI NO: 7488656 NR Description: cysteine proteinase inhibitor (clone R1) -
  misc_feature (26)..(131): Homolog of NCBI NO: 7438236 NR Description: cysteine proteinase inhibitor - common sunflower
  misc_feature (26)..(131): Homolog of NCBI NO: 1706277 NR Description: CYSTEINE PROTEINASE INHIBITOR B (CYSTATIN B)
  misc_feature (25)..(128): Homolog of NCBI NO: 21593036 NR Description: putative cysteine proteinase inhibitor B
  misc_feature (25)..(128): Homolog of NCBI NO: 15225164 NR Description: cysteine proteinase inhibitor B (cystatin B)
  misc_feature (1)..(129): Homolog of NCBI NO: 7438233 NR Description: cysteine proteinase inhibitor, extracellular -
  misc_feature (22)..(129): Homolog of NCBI NO: 27728729 NR Description: cystatin [Malus x domestica]
  misc_feature (1)..(131): Homolog of NCBI NO: 34906946 NR Description: cysteine proteinase inhibitor Scb-like protein
MACAASAARSEPGAARQLWDDGRKVGGRTEVTDVEGDREVQELGRYSVEEHNRRREEGCEGGGGVCGRLEFARVVSAQRQVVSGIKYYLRVAAAEEGGAGSNGVTDGRVFDAVVVVKPWLQSRALIRFASADAK

SEQ ID NO: 56256 - DNA, 1358 bp, Glycine max
  misc_feature (1)..(1358): Ceres Seq. ID no. 15177012
accaatcccctccccgacctcgtgggttgcagaacccagccccagccccattcacaccctcccgtcttccttcctcctcccgcaccataccatcaaggtgcttgtctgcttggggccttgagggacataggaagaaagaggggaggacatggatcggtacgaggtggtgagggacatcgggtccggcaacttcggggtggccaagctggtgcgggacgtccggaccaaggagcacttcgccgtcaagttcatcgagcgaggccacaagattgatgaacatgttcaaagggagattatgaaccaccggtcactcaagcatccaaatattattcgattcaaggaggtcgtgctaactcccacacatttggcaatagttatggaatatgcctctggcggcgagctatttcaaaggatttgcaacgcagggagatttagcgaggatgagggaagattcttcttccaacaattgatttctggagtgagctattgtcactctatgcaagtatgtcatagagatttgaaactagaaaacactctcttggatggtagtgtcgcacctcggctcaagatttgtgacttcggttactccaagtcttctgtcttgcactctcaaccgaagtcaactgtcggcacaccggcatacatcgccccagaggtcctctctagaagagaatatgatggaaaggtcgccgatgtttggtcatgcggagtaacgctctatgtgatgcttgtcggggcatatcctttcgaggaccctgatgagccaaggaacttccgcaaaacgatcactaggatactcagcgtacagtactctgttccggactacgttcgagtctcgatggactgcatacatctactgtcccgcattttcgttggaaatcctcagcagcgaataaccatcccggagatcaagaaccatccatggttcctcaagagattgcccgttgagatgaccgatgagtaccaaaggagcatgcagctggcagacatgaacacgccgtcacagagcctggaagaagccatggcgatcatccaggaggcgcagaaacctggcgataacgccctaggggttgccgggcaggttgcctgcctggggagcatggatttggacgacatcgatttcgatatcgacgacattgacgttgagagcagcggggatttcgtgtgcccgttgtgattgctcatgagtggttcaaaagttctcttgatggtttgcctgtggatggatccctgttttgtcatgcttccactagattttgttctgggtcacaaattctctgtagcctacagattggcttgatgtgtaaacagtgtaagataagtttacatgcttatatcgaaatcagtagttttaccct

SEQ ID NO: 56257 - protein, 342 aa, Glycine max
  peptide (1)..(342): Ceres Seq. ID no. 15177013
  misc_feature (4)..(260): Pfam Name: Protein kinase domain Pfam Description: Protein kinase domain
  misc_feature (3)..(341): Homolog of NCBI NO: 7446371 NR Description: probable serine/threonine kinase (EC 2.7.1.-)
  misc_feature (1)..(342): Homolog of NCBI NO: 15218270 NR Description: serine/threonine protein kinase, putative
  misc_feature (1)..(339): Homolog of NCBI NO: 18418337 NR Description: protein kinase, putative [Arabidopsis thaliana]
  misc_feature (1)..(342): Homolog of NCBI NO: 481002 NR Description: protein kinase MCPK9 (EC 2.7.1.-) - common ice
  misc_feature (11)..(342): Homolog of NCBI NO: 11138330 NR Description: putative serine/threonine kinase GDBrPK [Vitis
  misc_feature (1)..(342): Homolog of NCBI NO: 34906840 NR Description: putative protein kinase HvPKABA1(Abcisic
  misc_feature (1)..(342): Homolog of NCBI NO: 29164823 NR Description: abcisic acid-inducible protein kinanase
  misc_feature (11)..(342): Homolog of NCBI NO: 416564 NR Description: Abcisic acid-inducible protein kinase
  misc_feature (1)..(342): Homolog of NCBI NO: 14588571 NR Description: protein kinase HvPKABA1 [Hordeum vulgare subsp.
  misc_feature (1)..(336): Homolog of NCBI NO: 2055374 NR Description: serine-threonine protein kinase [Triticum
MDRYEVVRDIGSGNFGVAKLVRDVRTKEHFAVKFIERGHKIDEHVQREIMNHRSLKHPNIIRFKEVVLTPTHLAIVMEYASGGELFQRICNAGRFSEDEGRFFFQQLISGVSYCHSMQVCHRDLKLENTLLDGSVAPRLKICDFGYSKSSVLHSQPKSTVGTPAYIAPEVLSRREYDGKVADVWSCGVTLYVMLVGAYPFEDPDEPRNFRKTITRILSVQYSVPDYVRVSMDCIHLLSRIFVGNPQQRITIPEIKNHPWFLKRLPVEMTDEYQRSMQLADMNTPSQSLEEAMAIIQEAQKPGDNALGVAGQVACLGSMDLDDIDFDIDDIDVESSGDFVCPL

SEQ ID NO: 56258 - protein, 293 aa, Glycine max
  peptide (1)..(293): Ceres Seq. ID no. 15177014
  misc_feature (1)..(211): Pfam Name: Protein kinase domain Pfam Description: Protein kinase domain
  misc_feature (1)..(292): Homolog of NCBI NO: 7446371 NR Description: probable serine/threonine kinase (EC 2.7.1.-)
  misc_feature (1)..(293): Homolog of NCBI NO: 15218270 NR Description: serine/threonine protein kinase, putative
  misc_feature (1)..(290): Homolog of NCBI NO: 18418337 NR Description: protein kinase, putative [Arabidopsis thaliana]
  misc_feature (1)..(293): Homolog of NCBI NO: 481002 NR Description: protein kinase MCPK9 (EC 2.7.1.-) - common ice
  misc_feature (1)..(293): Homolog of NCBI NO: 11138330 NR Description: putative serine/threonine kinase GDBrPK [Vitis
  misc_feature (1)..(293): Homolog of NCBI NO: 34906840 NR Description: putative protein kinase HvPKABA1(Abcisic
  misc_feature (1)..(293): Homolog of NCBI NO: 29164823 NR Description: abcisic acid-inducible protein kinanase
  misc_feature (1)..(293): Homolog of NCBI NO: 416564 NR Description: Abcisic acid-inducible protein kinase
  misc_feature (1)..(293): Homolog of NCBI NO: 14588571 NR Description: protein kinase HvPKABA1 [Hordeum vulgare subsp.
  misc_feature (1)..(287): Homolog of NCBI NO: 2055374 NR Description: serine-threonine protein kinase [Triticum
MNHRSLKHPNIIRFKEVVLTPTHLAIVMEYASGGELFQRICNAGRFSEDEGRFFFQQLISGVSYCHSMQVCHRDLKLENTLLDGSVAPRLKICDFGYSKSSVLHSQPKSTVGTPAYIAPEVLSRREYDGKVADVWSCGVTLYVMLVGAYPFEDPDEPRNFRKTITRILSVQYSVPDYVRVSMDCIHLLSRIFVGNPQQRITIPEIKNHPWFLKRLPVEMTDEYQRSMQLADMNTPSQSLEEAMAIIQEAQKPGDNALGVAGQVACLGSMDLDDIDFDIDDIDVESSGDFVCPL

SEQ ID NO: 56259 - protein, 266 aa, Glycine max
  peptide (1)..(266): Ceres Seq. ID no. 15177015
  misc_feature (1)..(184): Pfam Name: Protein kinase domain Pfam Description: Protein kinase domain
  misc_feature (1)..(265): Homolog of NCBI NO: 7446371 NR Description: probable serine/threonine kinase (EC 2.7.1.-)
  misc_feature (1)..(266): Homolog of NCBI NO: 15218270 NR Description: serine/threonine protein kinase, putative
  misc_feature (1)..(263): Homolog of NCBI NO: 18418337 NR Description: protein kinase, putative [Arabidopsis thaliana]
  misc_feature (1)..(266): Homolog of NCBI NO: 481002 NR Description: protein kinase MCPK9 (EC 2.7.1.-) - common ice
  misc_feature (1)..(266): Homolog of NCBI NO: 11138330 NR Description: putative serine/threonine kinase GDBrPK [Vitis
  misc_feature (1)..(266): Homolog of NCBI NO: 34906840 NR Description: putative protein kinase HvPKABA1(Abcisic
  misc_feature (1)..(266): Homolog of NCBI NO: 29164823 NR Description: abcisic acid-inducible protein kinanase
  misc_feature (1)..(266): Homolog of NCBI NO: 416564 NR Description: Abcisic acid-inducible protein kinase
  misc_feature (1)..(266): Homolog of NCBI NO: 14588571 NR Description: protein kinase HvPKABA1 [Hordeum vulgare subsp.
  misc_feature (1)..(260): Homolog of NCBI NO: 2055374 NR Description: serine-threonine protein kinase [Triticum
MEYASGGELFQRICNAGRFSEDEGRFFFQQLISGVSYCHSMQVCHRDLKLENTLLDGSVAPRLKICDFGYSKSSVLHSQPKSTVGTPAYIAPEVLSRREYDGKVADVWSCGVTLYVMLVGAYPFEDPDEPRNFRKTITRILSVQYSVPDYVRVSMDCIHLLSRIFVGNPQQRITIPEIKNHPWFLKRLPVEMTDEYQRSMQLADMNTPSQSLEEAMAIIQEAQKPGDNALGVAGQVACLGSMDLDDIDFDIDDIDVESSGDFVCPL

SEQ ID NO: 56260 - DNA, 1232 bp, Glycine max
  misc_feature (1)..(1232): Ceres Seq. ID no. 13595321
gaaaaactccttcgttttcgtcgtctttagtaattttcactaccttcttctttacctcaccttctccatgatcctctccgtcatccgcaaatcatgactctcactcctcctccctcgcagcaaacacctaactcacctcatcgccgagtcctcatcgtcggaaactactgccacgacgttctaatccaaaacggcaccgtcgtggccgaaaccctcggcggcgccgcctccttcatctccaacgtcctagattcctcctccgtctcctgcgacctaatctccaaagtcggccgcgacttcaaatacgacgtcgcccaccctccgatcgtggctccggagaaggagaccacggtcttcaaagcctatttcgatctcgcagccgatcgggtcctgaaacgcgtcgctgcatgcgacccgatcctcccgtcggacatccccgactcgaggttcgacatcgggatggccgtcggcgtcggcggggagattctccccgagacgctcgagaagatggtggagatctgcgacgtggtggctgtggacatacaagctctgattagaggtttcgatcctgtcgacggagccgtgaagcttgttgatttgaaggagagtgggtttcgtcacctcatgggtaagkwkatygggttcttgaaagcyymtaagatcgggttctkgaaagcttcgtcggacgaagctttgttcatggatgttgaagagatgaggcgtttgtgctgtgtggtggtgactagtggtgaaaaagggtgcaggatttatgacaaggatgatgagacggtggttcctccgttcgtggcgaagcaggtggatcctacgggcgctggagatagttttcttggaggtttggtggttggtcttgtggagggtttggatgttcctgatgctgctttgttggggaacctctttggttccgtcactgttgagcacattggtcagcctaagttcgatttgacgatgcttcagagagtaaaggatgaggtacagaggaggaagaagcaatgtaatctctcaagtagccacaacaatgatcatgacgagttccatgcgcgtctaagtccagctcggtttcaggagtctccacttcaaccaaagatattggtcaatggtcacttgtgtgaccggtcatgattggttcctgcaaatacgaatcttttaatcactaacaacgctcttctgaattgtgtaaactttctacgtttatgaattttggaaatttatct

SEQ ID NO: 56261 - protein, 348 aa, Glycine max
  peptide (1)..(348): Ceres Seq. ID no. 15221542
  misc_feature (16)..(293): Pfam Name: pfkB family carbohydrate kinase Pfam Description: pfkB family carbohydrate kinase
  misc_feature (184)..(304): Homolog of NCBI NO: 15668582 NR Description: ribokinase (rbsK) [Methanococcus jannaschii]
  misc_feature (210)..(289): Homolog of NCBI NO: 23116680 NR Description: hypothetical protein [Desulfitobacterium
  misc_feature (215)..(293): Homolog of NCBI NO: 22962450 NR Description: hypothetical protein [Rhodopseudomonas palustris]
  misc_feature (14)..(311): Homolog of NCBI NO: 22972361 NR Description: hypothetical protein [Chloroflexus aurantiacus]
  misc_feature (20)..(294): Homolog of NCBI NO: 31126792 NR Description: unknown protein [Oryza sativa (japonica
  misc_feature (20)..(345): Homolog of NCBI NO: 29788872 NR Description: unknown protein [Oryza sativa (japonica
  misc_feature (1)..(294): Homolog of NCBI NO: 8843793 NR Description: gene_id:MZN1.17~pir||T01971~similar to unknown
  misc_feature (1)..(346): Homolog of NCBI NO: 15237741 NR Description: pfkB type carbohydrate kinase protein family
  misc_feature (181)..(181): Xaa is any aa, unknown or other
  misc_feature (182)..(182): Xaa is any aa, unknown or other
  misc_feature (187)..(187): Xaa is any aa, unknown or other
  misc_feature (188)..(188): Xaa is any aa, unknown or other
  misc_feature (193)..(193): Xaa is any aa, unknown or other
MTLTPPPSQQTPNSPHRRVLIVGNYCHDVLIQNGTVVAETLGGAASFISNVLDSSSVSCDLISKVGRDFKYDVAHPPIVAPEKETTVFKAYFDLAADRVLKRVAACDPILPSDIPDSRFDIGMAVGVGGEILPETLEKMVEICDVVAVDIQALIRGFDPVDGAVKLVDLKESGFRHLMGKXXGFLKXXKIGFXKASSDEALFMDVEEMRRLCCVVVTSGEKGCRIYDKDDETVVPPFVAKQVDPTGAGDSFLGGLVVGLVEGLDVPDAALLGNLFGSVTVEHIGQPKFDLTMLQRVKDEVQRRKKQCNLSSSHNNDHDEFHARLSPARFQESPLQPKILVNGHLCDRS

SEQ ID NO: 56262 - protein, 226 aa, Glycine max
  peptide (1)..(226): Ceres Seq. ID no. 15221543
  misc_feature (1)..(171): Pfam Name: pfkB family carbohydrate kinase Pfam Description: pfkB family carbohydrate kinase
  misc_feature (62)..(182): Homolog of NCBI NO: 15668582 NR Description: ribokinase (rbsK) [Methanococcus jannaschii]
  misc_feature (88)..(167): Homolog of NCBI NO: 23116680 NR Description: hypothetical protein [Desulfitobacterium
  misc_feature (93)..(171): Homolog of NCBI NO: 22962450 NR Description: hypothetical protein [Rhodopseudomonas palustris]
  misc_feature (1)..(189): Homolog of NCBI NO: 22972361 NR Description: hypothetical protein [Chloroflexus aurantiacus]
  misc_feature (1)..(172): Homolog of NCBI NO: 31126792 NR Description: unknown protein [Oryza sativa (japonica
  misc_feature (1)..(223): Homolog of NCBI NO: 29788872 NR Description: unknown protein [Oryza sativa (japonica
  misc_feature (1)..(172): Homolog of NCBI NO: 8843793 NR Description: gene_id:MZN1.17~pir||T01971~similar to unknown
  misc_feature (1)..(224): Homolog of NCBI NO: 15237741 NR Description: pfkB type carbohydrate kinase protein family
  misc_feature (59)..(59): Xaa is any aa, unknown or other
  misc_feature (60)..(60): Xaa is any aa, unknown or other
  misc_feature (65)..(65): Xaa is any aa, unknown or other
  misc_feature (66)..(66): Xaa is any aa, unknown or other
  misc_feature (71)..(71): Xaa is any aa, unknown or other
MAVGVGGEILPETLEKMVEICDVVAVDIQALIRGFDPVDGAVKLVDLKESGFRHLMGKXXGFLKXXKIGFXKASSDEALFMDVEEMRRLCCVVVTSGEKGCRIYDKDDETVVPPFVAKQVDPTGAGDSFLGGLVVGLVEGLDVPDAALLGNLFGSVTVEHIGQPKFDLTMLQRVKDEVQRRKKQCNLSSSHNNDHDEFHARLSPARFQESPLQPKILVNGHLCDRS

SEQ ID NO: 56263 - protein, 210 aa, Glycine max
  peptide (1)..(210): Ceres Seq. ID no. 15221544
  misc_feature (1)..(155): Pfam Name: pfkB family carbohydrate kinase Pfam Description: pfkB family carbohydrate kinase
  misc_feature (46)..(166): Homolog of NCBI NO: 15668582 NR Description: ribokinase (rbsK) [Methanococcus jannaschii]
  misc_feature (72)..(151): Homolog of NCBI NO: 23116680 NR Description: hypothetical protein [Desulfitobacterium
  misc_feature (77)..(155): Homolog of NCBI NO: 22962450 NR Description: hypothetical protein [Rhodopseudomonas palustris]
  misc_feature (1)..(173): Homolog of NCBI NO: 22972361 NR Description: hypothetical protein [Chloroflexus aurantiacus]
  misc_feature (1)..(156): Homolog of NCBI NO: 31126792 NR Description: unknown protein [Oryza sativa (japonica
  misc_feature (1)..(207): Homolog of NCBI NO: 29788872 NR Description: unknown protein [Oryza sativa (japonica
  misc_feature (1)..(156): Homolog of NCBI NO: 8843793 NR Description: gene_id:MZN1.17~pir||T01971~similar to unknown
  misc_feature (1)..(208): Homolog of NCBI NO: 15237741 NR Description: pfkB type carbohydrate kinase protein family
  misc_feature (43)..(43): Xaa is any aa, unknown or other
  misc_feature (44)..(44): Xaa is any aa, unknown or other
  misc_feature (49)..(49): Xaa is any aa, unknown or other
  misc_feature (50)..(50): Xaa is any aa, unknown or other
  misc_feature (55)..(55): Xaa is any aa, unknown or other
MVEICDVVAVDIQALIRGFDPVDGAVKLVDLKESGFRHLMGKXXGFLKXXKIGFXKASSDEALFMDVEEMRRLCCVVVTSGEKGCRIYDKDDETVVPPFVAKQVDPTGAGDSFLGGLVVGLVEGLDVPDAALLGNLFGSVTVEHIGQPKFDLTMLQRVKDEVQRRKKQCNLSSSHNNDHDEFHARLSPARFQESPLQPKILVNGHLCDRS

SEQ ID NO: 56264 - DNA, 1055 bp, Glycine max
  misc_feature (1)..(1055): Ceres Seq. ID no. 14302705
ctgcagcagagccctcgccgccgccgccgcccgcgcggagctagaagcgggagtggagggggcaaaacagtcccaccatggagtacgtcaaccctctcacgggcttccgcgtcgacggccgccgccccaacgagatgcggcagctcaagggcgaggtcggcgtcgtctccagggccgacggctcggcgctcttcgagatgggcaacaccagggtcatcgccgctgtctacgggccccgagagatccaaaacaggagtcagcaacaaaacagtaaagaggctttggtgcgttgtgagtatagaatggcagaatttagcactggggatcgaaggagaaagccaaaaggtgacaggcgatcaacagaaatttctcttgttattcgacaaacaatggaggcaagcatattaacacatttaatgccacactcacagattgacatatttgtccaagttcttcaagctgatggtggaaccaggtctgcatgcatcaatgctgcaactctagcacttgcagatgctgggattccaatgcgagacatagtcacttcttgcagtgctgggtatctgtgttctactcctttgcttgatctgaattatatagaagacagcgctggaggcgcggatgtcactgttggcattcttgcaaagatggacaaagtgactcttctgcagatggacgcgaaactaccaatggatacatttgagactgtgatggaccttgcaactgaagggtgcaaagccatcgcaacctacatccgagaggtgctattggagaacacgaagcagctggagtgtcagcgaggctagttaaacctagcaggtggaggctattgaacgagagcctgtggcacttgaaggcgggtctgttgtgtaacgctgattgatggcttatctgcctagcagagctagcattgagagaaaaaaatgacactgaacctgtcaaagatagctggaccatcattttccctcctaacgtacatgctgtagcgcgcaggagatgacatcttgattatgtaaaactttgatgttgaacttggtatccatgttgtacttttg

SEQ ID NO: 56265 - protein, 242 aa, Glycine max
  peptide (1)..(242): Ceres Seq. ID no. 14302706
  misc_feature (19)..(150): Pfam Name: 3' exoribonuclease family, domain 1 Pfam Description: 3' exoribonuclease family, domain 1
  misc_feature (9)..(232): Homolog of NCBI NO: 40217446 NR Description: ribonuclease PH [uncultured archaeon]
  misc_feature (9)..(232): Homolog of NCBI NO: 18977940 NR Description: ribonuclease ph [Pyrococcus furiosus DSM 3638]
  misc_feature (9)..(232): Homolog of NCBI NO: 14520826 NR Description: ribonuclease PH [Pyrococcus abyssi]
  misc_feature (9)..(232): Homolog of NCBI NO: 20093819 NR Description: Predicted exosome subunit, RNase PH [Methanopyrus
  misc_feature (9)..(237): Homolog of NCBI NO: 31240059 NR Description: ENSANGP00000017010 [Anopheles gambiae]
  misc_feature (9)..(236): Homolog of NCBI NO: 34866849 NR Description: similar to putative exosome complex exonuclease
  misc_feature (9)..(236): Homolog of NCBI NO: 33411774 NR Description: putative exosome complex exonuclease RRP41 [Bos
  misc_feature (9)..(242): Homolog of NCBI NO: 29611663 NR Description: exosome complex exonuclease RRP41 [Mus musculus]
  misc_feature (9)..(236): Homolog of NCBI NO: 9506689 NR Description: exosome complex exonuclease RRP41
  misc_feature (1)..(241): Homolog of NCBI NO: 15233167 NR Description: exonuclease RRP41 [Arabidopsis thaliana]
MEYVNPLTGFRVDGRRPNEMRQLKGEVGVVSRADGSALFEMGNTRVIAAVYGPREIQNRSQQQNSKEALVRCEYRMAEFSTGDRRRKPKGDRRSTEISLVIRQTMEASILTHLMPHSQIDIFVQVLQADGGTRSACINAATLALADAGIPMRDIVTSCSAGYLCSTPLLDLNYIEDSAGGADVTVGILAKMDKVTLLQMDAKLPMDTFETVMDLATEGCKAIATYIREVLLENTKQLECQRG

SEQ ID NO: 56266 - protein, 223 aa, Glycine max
  peptide (1)..(223): Ceres Seq. ID no. 14302707
  misc_feature (1)..(131): Pfam Name: 3' exoribonuclease family, domain 1 Pfam Description: 3' exoribonuclease family, domain 1
  misc_feature (1)..(213): Homolog of NCBI NO: 40217446 NR Description: ribonuclease PH [uncultured archaeon]
  misc_feature (1)..(213): Homolog of NCBI NO: 18977940 NR Description: ribonuclease ph [Pyrococcus furiosus DSM 3638]
  misc_feature (1)..(213): Homolog of NCBI NO: 14520826 NR Description: ribonuclease PH [Pyrococcus abyssi]
  misc_feature (1)..(213): Homolog of NCBI NO: 20093819 NR Description: Predicted exosome subunit, RNase PH [Methanopyrus
  misc_feature (1)..(218): Homolog of NCBI NO: 31240059 NR Description: ENSANGP00000017010 [Anopheles gambiae]
  misc_feature (1)..(217): Homolog of NCBI NO: 34866849 NR Description: similar to putative exosome complex exonuclease
  misc_feature (1)..(217): Homolog of NCBI NO: 33411774 NR Description: putative exosome complex exonuclease RRP41 [Bos
  misc_feature (1)..(223): Homolog of NCBI NO: 29611663 NR Description: exosome complex exonuclease RRP41 [Mus musculus]
  misc_feature (1)..(217): Homolog of NCBI NO: 9506689 NR Description: exosome complex exonuclease RRP41
  misc_feature (1)..(222): Homolog of NCBI NO: 15233167 NR Description: exonuclease RRP41 [Arabidopsis thaliana]
MRQLKGEVGVVSRADGSALFEMGNTRVIAAVYGPREIQNRSQQQNSKEALVRCEYRMAEFSTGDRRRKPKGDRRSTEISLVIRQTMEASILTHLMPHSQIDIFVQVLQADGGTRSACINAATLALADAGIPMRDIVTSCSAGYLCSTPLLDLNYIEDSAGGADVTVGILAKMDKVTLLQMDAKLPMDTFETVMDLATEGCKAIATYIREVLLENTKQLECQRG

SEQ ID NO: 56267 - protein, 202 aa, Glycine max
  peptide (1)..(202): Ceres Seq. ID no. 14302708
  misc_feature (1)..(110): Pfam Name: 3' exoribonuclease family, domain 1 Pfam Description: 3' exoribonuclease family, domain 1
  misc_feature (1)..(192): Homolog of NCBI NO: 40217446 NR Description: ribonuclease PH [uncultured archaeon]
  misc_feature (1)..(192): Homolog of NCBI NO: 18977940 NR Description: ribonuclease ph [Pyrococcus furiosus DSM 3638]
  misc_feature (1)..(192): Homolog of NCBI NO: 14520826 NR Description: ribonuclease PH [Pyrococcus abyssi]
  misc_feature (1)..(192): Homolog of NCBI NO: 20093819 NR Description: Predicted exosome subunit, RNase PH [Methanopyrus
  misc_feature (1)..(197): Homolog of NCBI NO: 31240059 NR Description: ENSANGP00000017010 [Anopheles gambiae]
  misc_feature (1)..(196): Homolog of NCBI NO: 34866849 NR Description: similar to putative exosome complex exonuclease
  misc_feature (1)..(196): Homolog of NCBI NO: 33411774 NR Description: putative exosome complex exonuclease RRP41 [Bos
  misc_feature (1)..(202): Homolog of NCBI NO: 29611663 NR Description: exosome complex exonuclease RRP41 [Mus musculus]
  misc_feature (1)..(196): Homolog of NCBI NO: 9506689 NR Description: exosome complex exonuclease RRP41
  misc_feature (1)..(201): Homolog of NCBI NO: 15233167 NR Description: exonuclease RRP41 [Arabidopsis thaliana]
MGNTRVIAAVYGPREIQNRSQQQNSKEALVRCEYRMAEFSTGDRRRKPKGDRRSTEISLVIRQTMEASILTHLMPHSQIDIFVQVLQADGGTRSACINAATLALADAGIPMRDIVTSCSAGYLCSTPLLDLNYIEDSAGGADVTVGILAKMDKVTLLQMDAKLPMDTFETVMDLATEGCKAIATYIREVLLENTKQLECQRG

SEQ ID NO: 56268 - DNA, 839 bp, Glycine max
  misc_feature (1)..(839): Ceres Seq. ID no. 12610734
agaggaacaaatcgcagttacacactgaaaacgaacacagaatcccccaaaagaagccacctttagggttttcgtctccaaatcaattcgtgattcgctttcgaatcgattcgtcacgaatccaatcctctggtttcctttattttctccagttttcgatttcaatctctttgccgtgagaaacgatgggaagaggcaagttcaaggggaaacctactggccagcgccgattctcaagtgcagctgatattcttgctggaacttctgctgcgcgtcctcggtcattcaagcagaaggaagctgagtacgaagaagatgttgaagaggagtctgaagaggaatctgaagaggaatccgaagatgaatctgacgtgaagaagaaaggacatgaagctcttattgaagttgataaccctaacagagccaaaccaacgactttaaaagctagagaccttgatgctagtaaaaccactgaactctcaaggcgtgaaagggaggagctagagaagcagcgagctcatgagcgatacatgaggttgcaggagcaaggcaaaaccgaacaagcaagaaaggatttggatcgtctggctctgattcgccaacagagagaagaagcggccaagaagcgagaagaggaaaaagcagcgaaagacgccaagaaagtagatgctcgcaaatgagacaagtgttcaccctaaaaaaaataaactacataaaagaagaagaatactcatcgagttttactttgttcttttttcgattggtaaacagatcataaaacattttccgaatacttagtgcccaggggatttctccatcttaatacattggaagttaat

SEQ ID NO: 56269 - protein, 164 aa, Glycine max
  peptide (1)..(164): Ceres Seq. ID no. 12610735
  misc_feature (22)..(164): Pfam Name: Caldesmon Pfam Description: Caldesmon
  misc_feature (53)..(163): Homolog of NCBI NO: 37779032 NR Description: kinase substrate HASPP28 [Pagrus major]
  misc_feature (1)..(156): Homolog of NCBI NO: 28278503 NR Description: Similar to PDGFA associated protein 1 [Danio
  misc_feature (3)..(156): Homolog of NCBI NO: 1518855 NR Description: HASPP28
  misc_feature (1)..(164): Homolog of NCBI NO: 30584165 NR Description: Homo sapiens PDGFA associated protein 1
  misc_feature (1)..(164): Homolog of NCBI NO: 7657441 NR Description: PDGFA associated protein 1; PDGF associated
  misc_feature (1)..(164): Homolog of NCBI NO: 31418215 NR Description: Unknown (protein for MGC:56344) [Danio rerio]
  misc_feature (1)..(164): Homolog of NCBI NO: 1136586 NR Description: PDGF associated protein
  misc_feature (1)..(164): Homolog of NCBI NO: 12018258 NR Description: kinase substrate HASPP28 [Rattus norvegicus]
  misc_feature (1)..(164): Homolog of NCBI NO: 34909600 NR Description: P0435B05.20 [Oryza sativa (japonica
  misc_feature (1)..(164): Homolog of NCBI NO: 18422620 NR Description: expressed protein
MGRGKFKGKPTGQRRFSSAADILAGTSAARPRSFKQKEAEYEEDVEEESEEESEEESEDESDVKKKGHEALIEVDNPNRAKPTTLKARDLDASKTTELSRREREELEKQRAHERYMRLQEQGKTEQARKDLDRLALIRQQREEAAKKREEEKAAKDAKKVDARK

SEQ ID NO: 56270 - DNA, 496 bp, Glycine max
  misc_feature (1)..(496): Ceres Seq. ID no. 13582034
aagtctaagtgcatactcccaccaaatacagtagcagcaatggcgccagcgcagcaagtgcaagttccggtgcaagtctcgccacccccgattctcagcgtcctcgagaccactctcgtagcgccctcgcccagcgctggcgccgccccgccggagtcctccctcccgctcaccttcttcgacgtcctctggctcacgtccccgcccgtcgagcgtgttttcttctaccgcctcgccgctgacgccgacgtccccgaaatcctctccaacctcaagacctcactggccaaagctctcagcacctaccacccgctcgctggccgcctccgcctcacgcctgggacggctgaccgctacgagatctactaccagccgggcgacggcgtcaccttcaccgtcgccaagtaccgcgacgacattgacttcgacgagctcgtggttgacaagccgagggaggtcagcaagatcgcgccgctcgcaccgcctcttcccaagg

SEQ ID NO: 56271 - protein, 165 aa, Glycine max
  peptide (1)..(165): Ceres Seq. ID no. 13582035
  misc_feature (33)..(164): Homolog of NCBI NO: 15218822 NR Description: transferase family [Arabidopsis thaliana]
  misc_feature (30)..(163): Homolog of NCBI NO: 15241632 NR Description: transferase family [Arabidopsis thaliana]
  misc_feature (29)..(164): Homolog of NCBI NO: 15219594 NR Description: transferase family [Arabidopsis thaliana]
  misc_feature (30)..(163): Homolog of NCBI NO: 27372443 NR Description: malonyl CoA:anthocyanin
  misc_feature (32)..(163): Homolog of NCBI NO: 15450469 NR Description: AT5g39050/MXF12_60 [Arabidopsis thaliana]
  misc_feature (32)..(163): Homolog of NCBI NO: 10177550 NR Description: anthocyanin acyltransferase-like protein
  misc_feature (32)..(163): Homolog of NCBI NO: 18421824 NR Description: transferase family [Arabidopsis thaliana]
  misc_feature (32)..(164): Homolog of NCBI NO: 34903412 NR Description: anthocyanin 5-aromatic acyltransferase-like
  misc_feature (32)..(164): Homolog of NCBI NO: 34394044 NR Description: anthocyanin 5-aromatic acyltransferase-like
  misc_feature (32)..(164): Homolog of NCBI NO: 38346544 NR Description: OSJNBa0035M09.5 [Oryza sativa (japonica
KSKCILPPNTVAAMAPAQQVQVPVQVSPPPILSVLETTLVAPSPSAGAAPPESSLPLTFFDVLWLTSPPVERVFFYRLAADADVPEILSNLKTSLAKALSTYHPLAGRLRLTPGTADRYEIYYQPGDGVTFTVAKYRDDIDFDELVVDKPREVSKIAPLAPPLPK

SEQ ID NO: 56272 - protein, 152 aa, Glycine max
  peptide (1)..(152): Ceres Seq. ID no. 13582036
  misc_feature (20)..(151): Homolog of NCBI NO: 15218822 NR Description: transferase family [Arabidopsis thaliana]
  misc_feature (17)..(150): Homolog of NCBI NO: 15241632 NR Description: transferase family [Arabidopsis thaliana]
  misc_feature (16)..(151): Homolog of NCBI NO: 15219594 NR Description: transferase family [Arabidopsis thaliana]
  misc_feature (17)..(150): Homolog of NCBI NO: 27372443 NR Description: malonyl CoA:anthocyanin
  misc_feature (19)..(150): Homolog of NCBI NO: 15450469 NR Description: AT5g39050/MXF12_60 [Arabidopsis thaliana]
  misc_feature (19)..(150): Homolog of NCBI NO: 10177550 NR Description: anthocyanin acyltransferase-like protein
  misc_feature (19)..(150): Homolog of NCBI NO: 18421824 NR Description: transferase family [Arabidopsis thaliana]
  misc_feature (19)..(151): Homolog of NCBI NO: 34903412 NR Description: anthocyanin 5-aromatic acyltransferase-like
  misc_feature (19)..(151): Homolog of NCBI NO: 34394044 NR Description: anthocyanin 5-aromatic acyltransferase-like
  misc_feature (19)..(151): Homolog of NCBI NO: 38346544 NR Description: OSJNBa0035M09.5 [Oryza sativa (japonica
MAPAQQVQVPVQVSPPPILSVLETTLVAPSPSAGAAPPESSLPLTFFDVLWLTSPPVERVFFYRLAADADVPEILSNLKTSLAKALSTYHPLAGRLRLTPGTADRYEIYYQPGDGVTFTVAKYRDDIDFDELVVDKPREVSKIAPLAPPLPK

SEQ ID NO: 56273 - DNA, 1191 bp, Glycine max
  misc_feature (1)..(1191): Ceres Seq. ID no. 13595202
actccgcactgttcctcggactctcgtctcgctagttccccaacttccggcgcaagctgaaccctcggacccgaccgcggcagccgccgatccagccccgccgcgatggaattcgccctcgtcgacggcgagaagttctcgccctcctgctccacgctcgtcatgcccgcgctttcgatcggcaacgtggggcagctcgccgtggacctgctgataccgtcggcgaaggcgaggcgcgtggcgtacctcgatgagccctccgtgctgccctgcatcggcaacgacgccttcggaccgggcgctgtcggcgacctcgcgctcgcgctcgaagaatacgagtcaccgtctcacgggctggctttcattcaacaaagatctccagttattacggggatgatggtttcgtttgccaaaaatgttgctaatttcatcagtagcattgagaaggaccatgttgttattctttcaagtttagattctggcaagagaagagtaattgatgcatccagtgatatgctgtattacctttcaagctgcaatgaggatggttctgatccagaatgtgagaaactagggtggaagaaacttgaggaatataatccatctcaacgactgtggaaatgtcttgctagtctaattgagggtggtgttctttcagaagatatggctgatgatcctgaagagatgaccgcaagtgattactatgcgaccttaccatttgcagctctattctttgcctgcaaggccaaaggtttgaaagttagctgtgtattatgttactgttcagaaggggacaatatgccagaatctttccacttagcagaagcagtatgcaaacttcgaggtcaagaccctgaacaattccatggaaatgggtcaaatggatggactattcccttgtcatggaaatcaatttatggaccacctcctgatatgtctattttctagactgactgacctaggaagttgcaatcatggacagcgctgtatctagaatgaggaaggatattagctttaggttgtgtactagaaatccccaggatggtgagtcgccgaccctcttttgaagcaacaacagttttcaacttccgtttagaactggagggatcgtgaacctggaatttatctgccgcggctattcctcatgtctaagtggaatagatttattcgtttttattaaaaaaattcact

SEQ ID NO: 56274 - protein, 280 aa, Glycine max
  peptide (1)..(280): Ceres Seq. ID no. 13595203
  misc_feature (17)..(163): Homolog of NCBI NO: 27680767 NR Description: similar to Clast3 protein; expressed sequence
  misc_feature (17)..(163): Homolog of NCBI NO: 19527372 NR Description: Clast3 protein [Mus musculus]
  misc_feature (14)..(163): Homolog of NCBI NO: 6841170 NR Description: HSPC260 [Homo sapiens]
  misc_feature (17)..(163): Homolog of NCBI NO: 22726189 NR Description: hepatocellular carcinoma susceptibility protein
  misc_feature (17)..(280): Homolog of NCBI NO: 28829982 NR Description: similar to Arabidopsis thaliana (Mouse-ear
  misc_feature (208)..(275): Homolog of NCBI NO: 37589726 NR Description: Unknown (protein for MGC:73278) [Danio rerio]
  misc_feature (17)..(163): Homolog of NCBI NO: 37589726 NR Description: Unknown (protein for MGC:73278) [Danio rerio]
  misc_feature (101)..(280): Homolog of NCBI NO: 30794081 NR Description: unknown protein [Arabidopsis thaliana]
  misc_feature (1)..(280): Homolog of NCBI NO: 18402055 NR Description: expressed protein [Arabidopsis thaliana]
  misc_feature (1)..(280): Homolog of NCBI NO: 21594933 NR Description: unknown [Arabidopsis thaliana]
MEFALVDGEKFSPSCSTLVMPALSIGNVGQLAVDLLIPSAKARRVAYLDEPSVLPCIGNDAFGPGAVGDLALALEEYESPSHGLAFIQQRSPVITGMMVSFAKNVANFISSIEKDHVVILSSLDSGKRRVIDASSDMLYYLSSCNEDGSDPECEKLGWKKLEEYNPSQRLWKCLASLIEGGVLSEDMADDPEEMTASDYYATLPFAALFFACKAKGLKVSCVLCYCSEGDNMPESFHLAEAVCKLRGQDPEQFHGNGSNGWTIPLSWKSIYGPPPDMSIF

SEQ ID NO: 56275 - protein, 261 aa, Glycine max
  peptide (1)..(261): Ceres Seq. ID no. 13595204
  misc_feature (1)..(144): Homolog of NCBI NO: 27680767 NR Description: similar to Clast3 protein; expressed sequence
  misc_feature (1)..(144): Homolog of NCBI NO: 19527372 NR Description: Clast3 protein [Mus musculus]
  misc_feature (1)..(144): Homolog of NCBI NO: 6841170 NR Description: HSPC260 [Homo sapiens]
  misc_feature (1)..(144): Homolog of NCBI NO: 22726189 NR Description: hepatocellular carcinoma susceptibility protein
  misc_feature (1)..(261): Homolog of NCBI NO: 28829982 NR Description: similar to Arabidopsis thaliana (Mouse-ear
  misc_feature (189)..(256): Homolog of NCBI NO: 37589726 NR Description: Unknown (protein for MGC:73278) [Danio rerio]
  misc_feature (1)..(144): Homolog of NCBI NO: 37589726 NR Description: Unknown (protein for MGC:73278) [Danio rerio]
  misc_feature (82)..(261): Homolog of NCBI NO: 30794081 NR Description: unknown protein [Arabidopsis thaliana]
  misc_feature (1)..(261): Homolog of NCBI NO: 18402055 NR Description: expressed protein [Arabidopsis thaliana]
  misc_feature (1)..(261): Homolog of NCBI NO: 21594933 NR Description: unknown [Arabidopsis thaliana]
MPALSIGNVGQLAVDLLIPSAKARRVAYLDEPSVLPCIGNDAFGPGAVGDLALALEEYESPSHGLAFIQQRSPVITGMMVSFAKNVANFISSIEKDHVVILSSLDSGKRRVIDASSDMLYYLSSCNEDGSDPECEKLGWKKLEEYNPSQRLWKCLASLIEGGVLSEDMADDPEEMTASDYYATLPFAALFFACKAKGLKVSCVLCYCSEGDNMPESFHLAEAVCKLRGQDPEQFHGNGSNGWTIPLSWKSIYGPPPDMSIF

SEQ ID NO: 56276 - protein, 184 aa, Glycine max
  peptide (1)..(184): Ceres Seq. ID no. 13595205
  misc_feature (1)..(67): Homolog of NCBI NO: 27680767 NR Description: similar to Clast3 protein; expressed sequence
  misc_feature (1)..(67): Homolog of NCBI NO: 19527372 NR Description: Clast3 protein [Mus musculus]
  misc_feature (1)..(67): Homolog of NCBI NO: 6841170 NR Description: HSPC260 [Homo sapiens]
  misc_feature (1)..(67): Homolog of NCBI NO: 22726189 NR Description: hepatocellular carcinoma susceptibility protein
  misc_feature (1)..(184): Homolog of NCBI NO: 28829982 NR Description: similar to Arabidopsis thaliana (Mouse-ear
  misc_feature (112)..(179): Homolog of NCBI NO: 37589726 NR Description: Unknown (protein for MGC:73278) [Danio rerio]
  misc_feature (1)..(67): Homolog of NCBI NO: 37589726 NR Description: Unknown (protein for MGC:73278) [Danio rerio]
  misc_feature (5)..(184): Homolog of NCBI NO: 30794081 NR Description: unknown protein [Arabidopsis thaliana]
  misc_feature (1)..(184): Homolog of NCBI NO: 18402055 NR Description: expressed protein [Arabidopsis thaliana]
  misc_feature (1)..(184): Homolog of NCBI NO: 21594933 NR Description: unknown [Arabidopsis thaliana]
MMVSFAKNVANFISSIEKDHVVILSSLDSGKRRVIDASSDMLYYLSSCNEDGSDPECEKLGWKKLEEYNPSQRLWKCLASLIEGGVLSEDMADDPEEMTASDYYATLPFAALFFACKAKGLKVSCVLCYCSEGDNMPESFHLAEAVCKLRGQDPEQFHGNGSNGWTIPLSWKSIYGPPPDMSIF

SEQ ID NO: 56277 - DNA, 1565 bp, Glycine max
  misc_feature (1)..(1565): Ceres Seq. ID no. 15175492
gtagcaccgcgattcgccatagccactgcccagcgagcggcccagtggtagctaagctgagcgagtgagtgtgcactgcgtgtgacacgacgaccggttggcccatcactagcgcgctagctagacgtacgcacgcacgtgtctacgctacctatctctctctccgtcgaccgaccatgccggccttcgccgagccagccattgatccgccgctggcggacagctaccgcgcgctgctgcgcagcgaccagctccgccgcggcggcattgcgccggcgccggcgtcggagagcgtggccgtgcttgagcgcgccctgccgatgatcgacttgaagcgcctgacgagcggcgacgcgggggagaggaaggcgtgcgcggacgccatggcgaccgcggcgtcggagtggggcttcttccaggtgatcaaccacgacgtggggcgggagctcctggaggagatgcggcgcgagcaggcgcggctgttccgcctgccgttcgacaccaaggagaaggccgggctcctcaacggctcgtaccggtggggcaacccgacggctacgtcgctccggcacctctcgtggtcggaggccttccacgttccgctcgccagcatctcccgggaggactgcgactacgggaagctcagctccttgaggggcgtgatgcaggaggtggcggacgcgatgtcgcgtgtggcggacacggtggcggcggtgctggcggaggacctcgggcacgatgcggggggcggcgagccggcgttcccggcggggtgcgacgggacgacgtgcttcctgcggctcaacaggtacccggcgtgcccgttcgcgccggacacgttcgggctggtgccgcacacggacagcgacttcctcaccatcctctgccaggaccaggtcgggggcctgcagctcatgaaggactcccgctgggtcgccgtgaaaccccgctccgacgcgctcatcgtcaacatcggcgatctgtttcaggcgtggagcaacaacaggtacaagagcgtggagcacaaagtggtggccaacgccaaggcggagcgcctctccgtcgcctacttcctgtgcccgtcgtacgactcgccggtcggcacatgcggcgagccgtccccgtacaggccgttcaccttcggggagtaccggaggaaggtgcaggacgatgtcaagagaaccggcaaaaagattgggctccccaactttctcaaacagtctcccgttgacgccatgaatcacggcctctgtttttaacacgtactcaaatctcaccgtagaagcgtcgtgcgcccgcagtatggaatcggagataatttcccttttttttagttctttctatttctattctagttttgtttcgccccttttgggcctaggtgataggtactataccacgagataatgatggaggaatcaatggaatatataacatgatgctatggtgatacgtctgcccatctgctcccgtttgtttgttcctcgttccttcttttcgtcttgtcgtgcgtactacgaggaacaaacgtggacggacgagcacctaagcttcaacgttgtttc

SEQ ID NO: 56278 - protein, 360 aa, Glycine max
  peptide (1)..(360): Ceres Seq. ID no. 15175493
  misc_feature (204)..(302): Pfam Name: 2OG-Fe(II) oxygenase superfamily Pfam Description: 2OG-Fe(II) oxygenase superfamily
  misc_feature (47)..(338): Homolog of NCBI NO: 15229694 NR Description: oxidoreductase, 2OG-Fe(II) oxygenase family
  misc_feature (1)..(326): Homolog of NCBI NO: 21537324 NR Description: leucoanthocyanidin dioxygenase-like protein
  misc_feature (47)..(345): Homolog of NCBI NO: 38347595 NR Description: OSJNBa0042I15.8 [Oryza sativa (japonica
  misc_feature (1)..(326): Homolog of NCBI NO: 15239179 NR Description: oxidoreductase, 2OG-Fe(II) oxygenase family
  misc_feature (47)..(346): Homolog of NCBI NO: 15223684 NR Description: gibberellin 20-oxidase-related [Arabidopsis
  misc_feature (10)..(345): Homolog of NCBI NO: 34915474 NR Description: gibberellin 20-oxidase-like protein
  misc_feature (9)..(113): Homolog of NCBI NO: 15233553 NR Description: gibberellin 20-oxidase family [Arabidopsis
  misc_feature (174)..(346): Homolog of NCBI NO: 15233553 NR Description: gibberellin 20-oxidase family [Arabidopsis
  misc_feature (1)..(349): Homolog of NCBI NO: 29825611 NR Description: gibberellin 2-oxidase 1 [Nicotiana sylvestris]
  misc_feature (1)..(351): Homolog of NCBI NO: 32492254 NR Description: OSJNBa0019D11.23 [Oryza sativa (japonica
MPAFAEPAIDPPLADSYRALLRSDQLRRGGIAPAPASESVAVLERALPMIDLKRLTSGDAGERKACADAMATAASEWGFFQVINHDVGRELLEEMRREQARLFRLPFDTKEKAGLLNGSYRWGNPTATSLRHLSWSEAFHVPLASISREDCDYGKLSSLRGVMQEVADAMSRVADTVAAVLAEDLGHDAGGGEPAFPAGCDGTTCFLRLNRYPACPFAPDTFGLVPHTDSDFLTILCQDQVGGLQLMKDSRWVAVKPRSDALIVNIGDLFQAWSNNRYKSVEHKVVANAKAERLSVAYFLCPSYDSPVGTCGEPSPYRPFTFGEYRRKVQDDVKRTGKKIGLPNFLKQSPVDAMNHGLCF

SEQ ID NO: 56279 - protein, 312 aa, Glycine max
  peptide (1)..(312): Ceres Seq. ID no. 15175494
  misc_feature (156)..(254): Pfam Name: 2OG-Fe(II) oxygenase superfamily Pfam Description: 2OG-Fe(II) oxygenase superfamily
  misc_feature (1)..(290): Homolog of NCBI NO: 15229694 NR Description: oxidoreductase, 2OG-Fe(II) oxygenase family
  misc_feature (1)..(278): Homolog of NCBI NO: 21537324 NR Description: leucoanthocyanidin dioxygenase-like protein
  misc_feature (1)..(297): Homolog of NCBI NO: 38347595 NR Description: OSJNBa0042I15.8 [Oryza sativa (japonica
  misc_feature (1)..(278): Homolog of NCBI NO: 15239179 NR Description: oxidoreductase, 2OG-Fe(II) oxygenase family
  misc_feature (1)..(298): Homolog of NCBI NO: 15223684 NR Description: gibberellin 20-oxidase-related [Arabidopsis
  misc_feature (1)..(297): Homolog of NCBI NO: 34915474 NR Description: gibberellin 20-oxidase-like protein
  misc_feature (1)..(65): Homolog of NCBI NO: 15233553 NR Description: gibberellin 20-oxidase family [Arabidopsis
  misc_feature (126)..(298): Homolog of NCBI NO: 15233553 NR Description: gibberellin 20-oxidase family [Arabidopsis
  misc_feature (1)..(301): Homolog of NCBI NO: 29825611 NR Description: gibberellin 2-oxidase 1 [Nicotiana sylvestris]
  misc_feature (1)..(303): Homolog of NCBI NO: 32492254 NR Description: OSJNBa0019D11.23 [Oryza sativa (japonica
MIDLKRLTSGDAGERKACADAMATAASEWGFFQVINHDVGRELLEEMRREQARLFRLPFDTKEKAGLLNGSYRWGNPTATSLRHLSWSEAFHVPLASISREDCDYGKLSSLRGVMQEVADAMSRVADTVAAVLAEDLGHDAGGGEPAFPAGCDGTTCFLRLNRYPACPFAPDTFGLVPHTDSDFLTILCQDQVGGLQLMKDSRWVAVKPRSDALIVNIGDLFQAWSNNRYKSVEHKVVANAKAERLSVAYFLCPSYDSPVGTCGEPSPYRPFTFGEYRRKVQDDVKRTGKKIGLPNFLKQSPVDAMNHGLCF

SEQ ID NO: 56280 - protein, 291 aa, Glycine max
  peptide (1)..(291): Ceres Seq. ID no. 15175495
  misc_feature (135)..(233): Pfam Name: 2OG-Fe(II) oxygenase superfamily Pfam Description: 2OG-Fe(II) oxygenase superfamily
  misc_feature (1)..(269): Homolog of NCBI NO: 15229694 NR Description: oxidoreductase, 2OG-Fe(II) oxygenase family
  misc_feature (1)..(257): Homolog of NCBI NO: 21537324 NR Description: leucoanthocyanidin dioxygenase-like protein
  misc_feature (1)..(276): Homolog of NCBI NO: 38347595 NR Description: OSJNBa0042I15.8 [Oryza sativa (japonica
  misc_feature (1)..(257): Homolog of NCBI NO: 15239179 NR Description: oxidoreductase, 2OG-Fe(II) oxygenase family
  misc_feature (1)..(277): Homolog of NCBI NO: 15223684 NR Description: gibberellin 20-oxidase-related [Arabidopsis
  misc_feature (1)..(276): Homolog of NCBI NO: 34915474 NR Description: gibberellin 20-oxidase-like protein
  misc_feature (1)..(44): Homolog of NCBI NO: 15233553 NR Description: gibberellin 20-oxidase family [Arabidopsis
  misc_feature (105)..(277): Homolog of NCBI NO: 15233553 NR Description: gibberellin 20-oxidase family [Arabidopsis
  misc_feature (1)..(280): Homolog of NCBI NO: 29825611 NR Description: gibberellin 2-oxidase 1 [Nicotiana sylvestris]
  misc_feature (1)..(282): Homolog of NCBI NO: 32492254 NR Description: OSJNBa0019D11.23 [Oryza sativa (japonica
MATAASEWGFFQVINHDVGRELLEEMRREQARLFRLPFDTKEKAGLLNGSYRWGNPTATSLRHLSWSEAFHVPLASISREDCDYGKLSSLRGVMQEVADAMSRVADTVAAVLAEDLGHDAGGGEPAFPAGCDGTTCFLRLNRYPACPFAPDTFGLVPHTDSDFLTILCQDQVGGLQLMKDSRWVAVKPRSDALIVNIGDLFQAWSNNRYKSVEHKVVANAKAERLSVAYFLCPSYDSPVGTCGEPSPYRPFTFGEYRRKVQDDVKRTGKKIGLPNFLKQSPVDAMNHGLCF

SEQ ID NO: 56281 - DNA, 800 bp, Glycine max
  misc_feature (1)..(800): Ceres Seq. ID no. 12610442
atcatatcattgcactaaatctcattcttcatctgcagctatttggattactgatattggtgcattttttttagaaagtgtgtactctttttggtgacattggaagctaactcatagacagaggcaaagatgttgggaattttcaagcagaagttagttaatgcacccaaggagctgaacagtccagcttctttgaattcatgcactaagcctaagctaagtcatgaagtcctgaaggatttcatgtcctgcaattcctccaatgctttctccatgtgctttgggaatgatgctttgctagcctattccccttcaaacaagccctccattcatcataggttgtttagtggtttggataacatatactgtgtcttcctgggtggcctgcacaaccttagcatgctcaacaagcagtatgggctatcaaaaggaacaaatgaggccaggtttatcattgaagcgtatcgaactcttcgcgacaggggtccatatccagttgatcaagtcctcaaagaacttgaaggcagtttcggatttgtgatatatgacaacaaggatggaacagtttttgttgcatctggttctaatggccatattgggctctactggggaattgcagcggatggttcggttacaatttctgaaaatctggagcttataaaagcaagctgtgctaaatcatttgcaccatttcctactggtatgcaaatttgatttctctctacctttgcaaaatcagattttgtaatttaagtttggcaaaattacaattaataaaggattccattgataatgtcgcc

SEQ ID NO: 56282 - protein, 194 aa, Glycine max
  peptide (1)..(194): Ceres Seq. ID no. 12610443
  misc_feature (1)..(191): Homolog of NCBI NO: 18416995 NR Description: putative protein
MLGIFKQKLVNAPKELNSPASLNSCTKPKLSHEVLKDFMSCNSSNAFSMCFGNDALLAYSPSNKPSIHHRLFSGLDNIYCVFLGGLHNLSMLNKQYGLSKGTNEARFIIEAYRTLRDRGPYPVDQVLKELEGSFGFVIYDNKDGTVFVASGSNGHIGLYWGIAADGSVTISENLELIKASCAKSFAPFPTGMQI

SEQ ID NO: 56283 - protein, 156 aa, Glycine max
  peptide (1)..(156): Ceres Seq. ID no. 12610444
  misc_feature (1)..(153): Homolog of NCBI NO: 18416995 NR Description: putative protein
MSCNSSNAFSMCFGNDALLAYSPSNKPSIHHRLFSGLDNIYCVFLGGLHNLSMLNKQYGLSKGTNEARFIIEAYRTLRDRGPYPVDQVLKELEGSFGFVIYDNKDGTVFVASGSNGHIGLYWGIAADGSVTISENLELIKASCAKSFAPFPTGMQI

SEQ ID NO: 56284 - protein, 146 aa, Glycine max
  peptide (1)..(146): Ceres Seq. ID no. 12610445
  misc_feature (1)..(143): Homolog of NCBI NO: 18416995 NR Description: putative protein
MCFGNDALLAYSPSNKPSIHHRLFSGLDNIYCVFLGGLHNLSMLNKQYGLSKGTNEARFIIEAYRTLRDRGPYPVDQVLKELEGSFGFVIYDNKDGTVFVASGSNGHIGLYWGIAADGSVTISENLELIKASCAKSFAPFPTGMQI

SEQ ID NO: 56285 - DNA, 791 bp, Glycine max
  misc_feature (1)..(791): Ceres Seq. ID no. 13595210
attcaccgtttctctctcttccttatcatcaaacttgctctgatctgatcagcgcttttgaaaatgtcggagggatcagaagaaacgaagacaaagatcgattccaccggagagttatcggacgtcgataacgagaactgcagtagcagtggaagtggcggcggcgagacgaagaagacatgcgttgattgcggaacattcaaaactcctctctggcgtggtggccctgccggacctaagtcactgtgcaatgcttgtgggatcaagagcaggaagaagaggcaagcggctctcgggatcaaaccagagaagaagatcagaaaaagcaacagctgtgacagtgatctaagcctcgaagatgatggccgtaacgtcaataacaagatcaagaaaggtgatgatcacaaaacttgcagtagcaagagtggtactagtactagtagcagctgcagcaaaagagtgagtaagtttttggatctgggattggaagtgccggtgatgaagagatcagcggttgagaagaagaggctgtggaagaaacgcggcgacgaagaaagagccgccgtgcttctcatggcgctctcttgcggctctgtttatgcgtaaacgatggagatcaagcttctttgtttggtgtcgttcgagaataattaaagtgaggggttctgattaattatttaattaacttaagacaatagagataactgtgtaatagctagtgatgtcgtggttttttttggcttgttcccactgatgttatgtgttcttttgctaatcaagtttcaattttt

SEQ ID NO: 56286 - protein, 180 aa, Glycine max
  peptide (1)..(180): Ceres Seq. ID no. 13595211
  misc_feature (63)..(176): Homolog of NCBI NO: 26453042 NR Description: unknown protein [Arabidopsis thaliana]
  misc_feature (147)..(180): Homolog of NCBI NO: 34906096 NR Description: P0020E09.8 [Oryza sativa (japonica
  misc_feature (14)..(79): Homolog of NCBI NO: 34906096 NR Description: P0020E09.8 [Oryza sativa (japonica
  misc_feature (135)..(180): Homolog of NCBI NO: 34897256 NR Description: putative zinc finger protein
  misc_feature (31)..(79): Homolog of NCBI NO: 34897256 NR Description: putative zinc finger protein
  misc_feature (59)..(112): Homolog of NCBI NO: 22328703 NR Description: GATA zinc finger protein -related [Arabidopsis
  misc_feature (5)..(112): Homolog of NCBI NO: 26453042 NR Description: unknown protein [Arabidopsis thaliana]
  misc_feature (5)..(50): Homolog of NCBI NO: 22328703 NR Description: GATA zinc finger protein -related [Arabidopsis
  misc_feature (63)..(176): Homolog of NCBI NO: 22328703 NR Description: GATA zinc finger protein -related [Arabidopsis
  misc_feature (1)..(180): Homolog of NCBI NO: 15228899 NR Description: GATA zinc finger protein [Arabidopsis thaliana]
MSEGSEETKTKIDSTGELSDVDNENCSSSGSGGGETKKTCVDCGTFKTPLWRGGPAGPKSLCNACGIKSRKKRQAALGIKPEKKIRKSNSCDSDLSLEDDGRNVNNKIKKGDDHKTCSSKSGTSTSSSCSKRVSKFLDLGLEVPVMKRSAVEKKRLWKKRGDEERAAVLLMALSCGSVYA

SEQ ID NO: 56287 - DNA, 1186 bp, Glycine max
  misc_feature (1)..(1186): Ceres Seq. ID no. 13582624
acactcatctcgtaaacaagcagcttgctagagcgggacaagcttggccatccttaaccttatttcgacatggcgaggtcgcccatggcgatgctcccgttcctggtgctcggggtagcagcactagtcctgtctgccgcgggaatggtggccgcgcagaagtgcggctgccgggcgaacgagtgctgcagccagtacggctactgcggcactaccgacgcctactgtggacaagggtgtcagtctggcccgtgctcggggagcggcggcggcggcgggaccggcgcctccgtggagagcgtcgtcaccgaggcgttcttcaacgggatcaagtcccgggccggcaacgggtgcgccggcaaaagcttttacacgcgccggtcgttcctggccggcgcccgggcgaaccccaacttcgggaaaggccgcacgggcgacgacggtaagagggagatagccgccttcttcgcccacgtcacacacgagaccggacacatgtgctacatcgaggagatcggcggggcgagccagaactactgcgacaggaagtacacgcagtggccgtgcgcctcggggaaggggtactacgggcgcgggccgcttcagctgacgtggaactacaactacggggcggcggggaagagcgtggggttcgacgggctgaacaacccggagaaggtggcgcaggacccggaggtggcgttcaaggcggcgctgtggttctggatgaacaacgtgaagcaggtcctgccgcgggggttcggcgcgacgaccagggcgatcaacagcggcgagtgcaacggcgggaacgcggccgccatgaacgcccgggcgggctactacagggcctactgcaagcagttcggcgtcgacccggggagcagcctcacttgctaggtgcttcgggcgggcctgatcgagatctgcatgcatagaacacgcatggcttatgtagaataaacgttcggcgtgcgcatacgcgtctaaagccgtccaaacaagaaataaagggcgaggatgtggtctagtacgtaccaagatccttgcagcagtactgttcacgagctctactctttttcctcatcaacaaacaaaaagagttatgttcttgtttattactcatgtttagatacatttgtatctagaaaaatctaatacgaataattcaggacggagttaatatttt

SEQ ID NO: 56288 - protein, 275 aa, Glycine max
  peptide (1)..(275): Ceres Seq. ID no. 13582625
  misc_feature (78)..(275): Pfam Name: Chitinase class I Pfam Description: Chitinase class I
  misc_feature (11)..(275): Homolog of NCBI NO: 2570160 NR Description: chitinase [Chenopodium amaranticolor]
  misc_feature (12)..(275): Homolog of NCBI NO: 15213848 NR Description: chitinase-B [Saccharum officinarum]
  misc_feature (12)..(275): Homolog of NCBI NO: 482985 NR Description: chitinase (EC 3.2.1.14) precursor - maize
  misc_feature (10)..(275): Homolog of NCBI NO: 116333 NR Description: ENDOCHITINASE B PRECURSOR (SEED CHITINASE B)
  misc_feature (12)..(275): Homolog of NCBI NO: 15213852 NR Description: chitinase-B [Sorghum halepense]
  misc_feature (6)..(275): Homolog of NCBI NO: 116329 NR Description: ENDOCHITINASE A PRECURSOR (SEED CHITINASE A)
  misc_feature (6)..(275): Homolog of NCBI NO: 283037 NR Description: chitinase (EC 3.2.1.14) A - maize
  misc_feature (6)..(275): Homolog of NCBI NO: 38345417 NR Description: OSJNBb0091E11.8 [Oryza sativa (japonica
  misc_feature (1)..(275): Homolog of NCBI NO: 30793457 NR Description: chitinase [Oryza sativa (japonica cultivar-group)]
  misc_feature (1)..(275): Homolog of NCBI NO: 4741848 NR Description: chitinase IV precursor [Triticum aestivum]
MARSPMAMLPFLVLGVAALVLSAAGMVAAQKCGCRANECCSQYGYCGTTDAYCGQGCQSGPCSGSGGGGGTGASVESVVTEAFFNGIKSRAGNGCAGKSFYTRRSFLAGARANPNFGKGRTGDDGKREIAAFFAHVTHETGHMCYIEEIGGASQNYCDRKYTQWPCASGKGYYGRGPLQLTWNYNYGAAGKSVGFDGLNNPEKVAQDPEVAFKAALWFWMNNVKQVLPRGFGATTRAINSGECNGGNAAAMNARAGYYRAYCKQFGVDPGSSLTC

SEQ ID NO: 56289 - protein, 270 aa, Glycine max
  peptide (1)..(270): Ceres Seq. ID no. 13582626
  misc_feature (73)..(270): Pfam Name: Chitinase class I Pfam Description: Chitinase class I
  misc_feature (6)..(270): Homolog of NCBI NO: 2570160 NR Description: chitinase [Chenopodium amaranticolor]
  misc_feature (7)..(270): Homolog of NCBI NO: 15213848 NR Description: chitinase-B [Saccharum officinarum]
  misc_feature (7)..(270): Homolog of NCBI NO: 482985 NR Description: chitinase (EC 3.2.1.14) precursor - maize
  misc_feature (5)..(270): Homolog of NCBI NO: 116333 NR Description: ENDOCHITINASE B PRECURSOR (SEED CHITINASE B)
  misc_feature (7)..(270): Homolog of NCBI NO: 15213852 NR Description: chitinase-B [Sorghum halepense]
  misc_feature (1)..(270): Homolog of NCBI NO: 116329 NR Description: ENDOCHITINASE A PRECURSOR (SEED CHITINASE A)
  misc_feature (1)..(270): Homolog of NCBI NO: 283037 NR Description: chitinase (EC 3.2.1.14) A - maize
  misc_feature (1)..(270): Homolog of NCBI NO: 38345417 NR Description: OSJNBb0091E11.8 [Oryza sativa (japonica
  misc_feature (1)..(270): Homolog of NCBI NO: 30793457 NR Description: chitinase [Oryza sativa (japonica cultivar-group)]
  misc_feature (1)..(270): Homolog of NCBI NO: 4741848 NR Description: chitinase IV precursor [Triticum aestivum]
MAMLPFLVLGVAALVLSAAGMVAAQKCGCRANECCSQYGYCGTTDAYCGQGCQSGPCSGSGGGGGTGASVESVVTEAFFNGIKSRAGNGCAGKSFYTRRSFLAGARANPNFGKGRTGDDGKREIAAFFAHVTHETGHMCYIEEIGGASQNYCDRKYTQWPCASGKGYYGRGPLQLTWNYNYGAAGKSVGFDGLNNPEKVAQDPEVAFKAALWFWMNNVKQVLPRGFGATTRAINSGECNGGNAAAMNARAGYYRAYCKQFGVDPGSSLTC

SEQ ID NO: 56290 - protein, 268 aa, Glycine max
  peptide (1)..(268): Ceres Seq. ID no. 13582627
  misc_feature (71)..(268): Pfam Name: Chitinase class I Pfam Description: Chitinase class I
  misc_feature (4)..(268): Homolog of NCBI NO: 2570160 NR Description: chitinase [Chenopodium amaranticolor]
  misc_feature (5)..(268): Homolog of NCBI NO: 15213848 NR Description: chitinase-B [Saccharum officinarum]
  misc_feature (5)..(268): Homolog of NCBI NO: 482985 NR Description: chitinase (EC 3.2.1.14) precursor - maize
  misc_feature (3)..(268): Homolog of NCBI NO: 116333 NR Description: ENDOCHITINASE B PRECURSOR (SEED CHITINASE B)
  misc_feature (5)..(268): Homolog of NCBI NO: 15213852 NR Description: chitinase-B [Sorghum halepense]
  misc_feature (1)..(268): Homolog of NCBI NO: 116329 NR Description: ENDOCHITINASE A PRECURSOR (SEED CHITINASE A)
  misc_feature (1)..(268): Homolog of NCBI NO: 283037 NR Description: chitinase (EC 3.2.1.14) A - maize
  misc_feature (1)..(268): Homolog of NCBI NO: 38345417 NR Description: OSJNBb0091E11.8 [Oryza sativa (japonica
  misc_feature (1)..(268): Homolog of NCBI NO: 30793457 NR Description: chitinase [Oryza sativa (japonica cultivar-group)]
  misc_feature (1)..(268): Homolog of NCBI NO: 4741848 NR Description: chitinase IV precursor [Triticum aestivum]
MLPFLVLGVAALVLSAAGMVAAQKCGCRANECCSQYGYCGTTDAYCGQGCQSGPCSGSGGGGGTGASVESVVTEAFFNGIKSRAGNGCAGKSFYTRRSFLAGARANPNFGKGRTGDDGKREIAAFFAHVTHETGHMCYIEEIGGASQNYCDRKYTQWPCASGKGYYGRGPLQLTWNYNYGAAGKSVGFDGLNNPEKVAQDPEVAFKAALWFWMNNVKQVLPRGFGATTRAINSGECNGGNAAAMNARAGYYRAYCKQFGVDPGSSLTC

SEQ ID NO: 56291 - DNA, 588 bp, Glycine max
  misc_feature (1)..(588): Ceres Seq. ID no. 12610503
gaacagctggtcgaagcgagcgcctggtctatcaatggcggaggagaccgagaccgagaagcagctcttctctccgtcggatgtctcgctccacgcatccacgaaggactgctgggtcgtcatccatggcaaggtgtacgatgtgaccaaattcctcgaggaccaccccggcggagaggatgtcctcctccatgcatctgcctctggggatgccacggaggcttttgaagatgtgggccacagcacatcagccatcagcatgatgagcagctacctgattggaagcatcgaggactttgtgcctcccagtgcaacgaaggacgccacagttggtggcagtgatgtgcttccagattccagaacaatgaagaggaacaaaggctctcctgctccaaacacatttctggacttcgtgctccctttatgcatgcttgtcctggcctttgtagcttggtactacctaaccttcgtggccgagagctagtaaattcggagaagattcatatcattgcacatttttacgtcactagtgttgctgcagcgatacatttaaggagcgtaaacttggtcatagaatcatttgctctc

SEQ ID NO: 56292 - protein, 160 aa, Glycine max
  peptide (1)..(160): Ceres Seq. ID no. 12610504
  misc_feature (22)..(97): Pfam Name: Cytochrome b5-like Heme/Steroid binding domain Pfam Description: Cytochrome b5-like Heme/Steroid binding domain
  misc_feature (18)..(153): Homolog of NCBI NO: 729252 NR Description: Cytochrome B5
  misc_feature (19)..(153): Homolog of NCBI NO: 37536104 NR Description: putative cytochrome [Oryza sativa (japonica
  misc_feature (21)..(106): Homolog of NCBI NO: 12229735 NR Description: Cytochrome b5
  misc_feature (18)..(153): Homolog of NCBI NO: 25044825 NR Description: cytochrome b5 [Ananas comosus]
  misc_feature (18)..(153): Homolog of NCBI NO: 15238776 NR Description: cytochrome b5 (dbj|BAA74839.1)
  misc_feature (19)..(147): Homolog of NCBI NO: 15225731 NR Description: putative cytochrome b5; protein id: At2g32720.1
  misc_feature (21)..(160): Homolog of NCBI NO: 15239718 NR Description: cytochrome b5 (dbj|BAA74840.1)
  misc_feature (19)..(153): Homolog of NCBI NO: 1345882 NR Description: CYTOCHROME B5
  misc_feature (19)..(153): Homolog of NCBI NO: 1076621 NR Description: cytochrome b5 - common tobacco
  misc_feature (12)..(143): Homolog of NCBI NO: 40644254 NR Description: cytochrome b5 [Oryza sativa (japonica
NSWSKRAPGLSMAEETETEKQLFSPSDVSLHASTKDCWVVIHGKVYDVTKFLEDHPGGEDVLLHASASGDATEAFEDVGHSTSAISMMSSYLIGSIEDFVPPSATKDATVGGSDVLPDSRTMKRNKGSPAPNTFLDFVLPLCMLVLAFVAWYYLTFVAES

SEQ ID NO: 56293 - protein, 149 aa, Glycine max
  peptide (1)..(149): Ceres Seq. ID no. 12610505
  misc_feature (11)..(86): Pfam Name: Cytochrome b5-like Heme/Steroid binding domain Pfam Description: Cytochrome b5-like Heme/Steroid binding domain
  misc_feature (7)..(142): Homolog of NCBI NO: 729252 NR Description: Cytochrome B5
  misc_feature (8)..(142): Homolog of NCBI NO: 37536104 NR Description: putative cytochrome [Oryza sativa (japonica
  misc_feature (10)..(95): Homolog of NCBI NO: 12229735 NR Description: Cytochrome b5
  misc_feature (7)..(142): Homolog of NCBI NO: 25044825 NR Description: cytochrome b5 [Ananas comosus]
  misc_feature (7)..(142): Homolog of NCBI NO: 15238776 NR Description: cytochrome b5 (dbj|BAA74839.1)
  misc_feature (8)..(136): Homolog of NCBI NO: 15225731 NR Description: putative cytochrome b5; protein id: At2g32720.1
  misc_feature (10)..(149): Homolog of NCBI NO: 15239718 NR Description: cytochrome b5 (dbj|BAA74840.1)
  misc_feature (8)..(142): Homolog of NCBI NO: 1345882 NR Description: CYTOCHROME B5
  misc_feature (8)..(142): Homolog of NCBI NO: 1076621 NR Description: cytochrome b5 - common tobacco
  misc_feature (1)..(132): Homolog of NCBI NO: 40644254 NR Description: cytochrome b5 [Oryza sativa (japonica
MAEETETEKQLFSPSDVSLHASTKDCWVVIHGKVYDVTKFLEDHPGGEDVLLHASASGDATEAFEDVGHSTSAISMMSSYLIGSIEDFVPPSATKDATVGGSDVLPDSRTMKRNKGSPAPNTFLDFVLPLCMLVLAFVAWYYLTFVAES

SEQ ID NO: 56294 - DNA, 551 bp, Glycine max
  misc_feature (1)..(551): Ceres Seq. ID no. 12610506
acacccaaagcacaccagcctcctcactcctcacagtcgcagcatcctctcagtcctcaccttcctcccctcgccaccacccccccaaggaaaggaggatgtcttgctgcggcggcaactgcggatgcggcgccggctgcaagtgcggcaacggctgcggcgggtgcaagatgttccccgacgttgaggccaccgccggcgccgccgccatggtcatgcccaccgcctcccacaaggggagctccggcgggttcgagacggccggcggggagaccggcggctgcgactgcaccacctgcaagtgcggcacggcctgcggctgctcctgctgcagctgcaactgagccggcgcccaggaggccggccggcgaggcgagcacgaggatgaggaggacaactggacaagcaaccaccaccaccaccaccaccatcactagccgctgcatgcgcccgcccgcgcgcgcgctgaataaaataaaaccgtcgtgtgttccttaactctgtacctgtacgcccgtgttttccaccagcagtgtccttgctcatcctcc

SEQ ID NO: 56295 - protein, 165 aa, Glycine max
  peptide (1)..(165): Ceres Seq. ID no. 12610507
  misc_feature (36)..(109): Pfam Name: Herpesvirus UL87 family Pfam Description: Herpesvirus UL87 family
  misc_feature (17)..(159): Homolog of NCBI NO: 23000746 NR Description: hypothetical protein [Magnetococcus sp. MC-1]
  misc_feature (1)..(160): Homolog of NCBI NO: 7489917 NR Description: DNA topoisomerase (EC 5.99.1.2) - slime mold
  misc_feature (3)..(165): Homolog of NCBI NO: 28493118 NR Description: unknown [Tropheryma whipplei str. Twist]
  misc_feature (4)..(128): Homolog of NCBI NO: 22962211 NR Description: hypothetical protein [Rhodopseudomonas palustris]
  misc_feature (22)..(126): Homolog of NCBI NO: 40994853 NR Description: tropinin I protein [Lethocerus indicus]
  misc_feature (3)..(165): Homolog of NCBI NO: 31414574 NR Description: large tegument protein [Cercopithecine
  misc_feature (25)..(165): Homolog of NCBI NO: 805006 NR Description: pprB [Pseudomonas putida]
  misc_feature (1)..(118): Homolog of NCBI NO: 40994853 NR Description: tropinin I protein [Lethocerus indicus]
  misc_feature (16)..(149): Homolog of NCBI NO: 32455965 NR Description: proline-rich extensin-like protein [Micrococcus
  misc_feature (28)..(136): Homolog of NCBI NO: 7489436 NR Description: pZE40 protein - barley (fragment)
TPKAHQPPHSSQSQHPLSPHLPPLATTPPRKGGCLAAAATADAAPAASAATAAAGARCSPTLRPPPAPPPWSCPPPPTRGAPAGSRRPAGRPAAATAPPASAARPAAAPAAAATEPAPRRPAGEASTRMRRTTGQATTTTTTTITSRCMRPPARALNKIKPSCVP

SEQ ID NO: 56296 - protein, 113 aa, Glycine max
  peptide (1)..(113): Ceres Seq. ID no. 12610508
  misc_feature (33)..(101): Pfam Name: Metallothionein Pfam Description: Metallothionein
  misc_feature (33)..(112): Homolog of NCBI NO: 8919689 NR Description: putative type II metallothionein [Posidonia
  misc_feature (25)..(112): Homolog of NCBI NO: 32400768 NR Description: metallothionein [Triticum aestivum]
  misc_feature (33)..(112): Homolog of NCBI NO: 23954357 NR Description: metallothioneine type2 [Hordeum vulgare subsp.
  misc_feature (33)..(112): Homolog of NCBI NO: 5777410 NR Description: metallothionein [Eichhornia crassipes]
  misc_feature (33)..(112): Homolog of NCBI NO: 3900980 NR Description: unnamed protein product [Eichhornia crassipes]
  misc_feature (33)..(113): Homolog of NCBI NO: 7441818 NR Description: metallothionein-like protein - rice
  misc_feature (33)..(113): Homolog of NCBI NO: 7441819 NR Description: metallothionein-like protein - rice
  misc_feature (33)..(112): Homolog of NCBI NO: 23954355 NR Description: metallothioneine type2 [Hordeum vulgare subsp.
  misc_feature (33)..(113): Homolog of NCBI NO: 2497904 NR Description: Metallothionein-like protein type 2
  misc_feature (33)..(113): Homolog of NCBI NO: 100596 NR Description: metallothionein-like protein - barley
TQSTPASSLLTVAASSQSSPSSPRHHPPKERRMSCCGGNCGCGAGCKCGNGCGGCKMFPDVEATAGAAAMVMPTASHKGSSGGFETAGGETGGCDCTTCKCGTACGCSCCSCN

SEQ ID NO: 56297 - DNA, 645 bp, Glycine max
  misc_feature (1)..(645): Ceres Seq. ID no. 12583682
cacaagcaaagcataaacattactgatagttctcatccacaacacaatgatttccaatcccatgttaatgttactagttgtggtactgctggtggttggttttgcaaagtcagatttaagtaaggacagagaagaatgtgcagacaaactaattgacctagctagctgtgttccttacgttggtggtgaagccaaaacccccaccatagattgctgcactggtctcaaagcggttcttgaccggagcaagaaatgcctctgcatcctcatcaaagatcgcgacgaccccaatcttggcatcaagatcaatgctactctcgctattcagctaccctctgcttgccactcacctgctaatattactcagtgtgtagatcttttgcatttagcacctaactctcctgatgctaaggtgtttgagggattccaaaaatctgccaaaacaaacagctccaccccagtttcagtttccagtggtgctgagaagggatcaagctcaagtgctcaggaaaagagtggtgctgtctccacaattacaaaggcgcaccacctgttttactctatcttaccattaccattattatttcttgtttgaaccaccatcaagcttgcttgcttcatctatttctagctattattgtgtgc

SEQ ID NO: 56298 - protein, 182 aa, Glycine max
  peptide (1)..(182): Ceres Seq. ID no. 12583683
  misc_feature (31)..(108): Pfam Name: Protease inhibitor/seed storage/LTP family Pfam Description: Protease inhibitor/seed storage/LTP family
  misc_feature (29)..(177): Homolog of NCBI NO: 21553541 NR Description: lipid transfer protein, putative [Arabidopsis
  misc_feature (1)..(181): Homolog of NCBI NO: 15219578 NR Description: hypothetical protein; protein id: At1g73890.1
  misc_feature (5)..(171): Homolog of NCBI NO: 25553596 NR Description: OJ1656_E11.27 [Oryza sativa (japonica
  misc_feature (6)..(161): Homolog of NCBI NO: 21555220 NR Description: unknown [Arabidopsis thaliana]
  misc_feature (4)..(161): Homolog of NCBI NO: 15231070 NR Description: putative protein
  misc_feature (8)..(159): Homolog of NCBI NO: 34394084 NR Description: lipid transfer protein-like
  misc_feature (10)..(168): Homolog of NCBI NO: 15224862 NR Description: unknown protein; protein id: At2g44290.1
  misc_feature (15)..(158): Homolog of NCBI NO: 21537387 NR Description: unknown [Arabidopsis thaliana]
  misc_feature (6)..(158): Homolog of NCBI NO: 18405294 NR Description: expressed protein
  misc_feature (10)..(151): Homolog of NCBI NO: 15224863 NR Description: unknown protein; protein id: At2g44300.1
MISNPMLMLLVVVLLVVGFAKSDLSKDREECADKLIDLASCVPYVGGEAKTPTIDCCTGLKAVLDRSKKCLCILIKDRDDPNLGIKINATLAIQLPSACHSPANITQCVDLLHLAPNSPDAKVFEGFQKSAKTNSSTPVSVSSGAEKGSSSSAQEKSGAVSTITKAHHLFYSILPLPLLFLV

SEQ ID NO: 56299 - protein, 177 aa, Glycine max
  peptide (1)..(177): Ceres Seq. ID no. 12583684
  misc_feature (26)..(103): Pfam Name: Protease inhibitor/seed storage/LTP family Pfam Description: Protease inhibitor/seed storage/LTP family
  misc_feature (24)..(172): Homolog of NCBI NO: 21553541 NR Description: lipid transfer protein, putative [Arabidopsis
  misc_feature (1)..(176): Homolog of NCBI NO: 15219578 NR Description: hypothetical protein; protein id: At1g73890.1
  misc_feature (1)..(166): Homolog of NCBI NO: 25553596 NR Description: OJ1656_E11.27 [Oryza sativa (japonica
  misc_feature (1)..(156): Homolog of NCBI NO: 21555220 NR Description: unknown [Arabidopsis thaliana]
  misc_feature (1)..(156): Homolog of NCBI NO: 15231070 NR Description: putative protein
  misc_feature (3)..(154): Homolog of NCBI NO: 34394084 NR Description: lipid transfer protein-like
  misc_feature (5)..(163): Homolog of NCBI NO: 15224862 NR Description: unknown protein; protein id: At2g44290.1
  misc_feature (10)..(153): Homolog of NCBI NO: 21537387 NR Description: unknown [Arabidopsis thaliana]
  misc_feature (1)..(153): Homolog of NCBI NO: 18405294 NR Description: expressed protein
  misc_feature (5)..(146): Homolog of NCBI NO: 15224863 NR Description: unknown protein; protein id: At2g44300.1
MLMLLVVVLLVVGFAKSDLSKDREECADKLIDLASCVPYVGGEAKTPTIDCCTGLKAVLDRSKKCLCILIKDRDDPNLGIKINATLAIQLPSACHSPANITQCVDLLHLAPNSPDAKVFEGFQKSAKTNSSTPVSVSSGAEKGSSSSAQEKSGAVSTITKAHHLFYSILPLPLLFLV

SEQ ID NO: 56300 - protein, 175 aa, Glycine max
  peptide (1)..(175): Ceres Seq. ID no. 12583685
  misc_feature (24)..(101): Pfam Name: Protease inhibitor/seed storage/LTP family Pfam Description: Protease inhibitor/seed storage/LTP family
  misc_feature (22)..(170): Homolog of NCBI NO: 21553541 NR Description: lipid transfer protein, putative [Arabidopsis
  misc_feature (1)..(174): Homolog of NCBI NO: 15219578 NR Description: hypothetical protein; protein id: At1g73890.1
  misc_feature (1)..(164): Homolog of NCBI NO: 25553596 NR Description: OJ1656_E11.27 [Oryza sativa (japonica
  misc_feature (1)..(154): Homolog of NCBI NO: 21555220 NR Description: unknown [Arabidopsis thaliana]
  misc_feature (1)..(154): Homolog of NCBI NO: 15231070 NR Description: putative protein
  misc_feature (1)..(152): Homolog of NCBI NO: 34394084 NR Description: lipid transfer protein-like
  misc_feature (3)..(161): Homolog of NCBI NO: 15224862 NR Description: unknown protein; protein id: At2g44290.1
  misc_feature (8)..(151): Homolog of NCBI NO: 21537387 NR Description: unknown [Arabidopsis thaliana]
  misc_feature (1)..(151): Homolog of NCBI NO: 18405294 NR Description: expressed protein
  misc_feature (3)..(144): Homolog of NCBI NO: 15224863 NR Description: unknown protein; protein id: At2g44300.1
MLLVVVLLVVGFAKSDLSKDREECADKLIDLASCVPYVGGEAKTPTIDCCTGLKAVLDRSKKCLCILIKDRDDPNLGIKINATLAIQLPSACHSPANITQCVDLLHLAPNSPDAKVFEGFQKSAKTNSSTPVSVSSGAEKGSSSSAQEKSGAVSTITKAHHLFYSILPLPLLFLV

SEQ ID NO: 56301 - DNA, 894 bp, Glycine max
  misc_feature (1)..(894): Ceres Seq. ID no. 13639712
atcaattttcagtgcgttaaagatattgaaacagagacgattcttgtttgtcaattatctctgtgtttctgtgattcttctgttccattcgattcaaccctgaagccaaagaacaacaaggataagccttttaactagttttgtgcgttggatcatctgtttaagctcggcttaatcttaccttcaacacttcacaaggctgctcttgcgttagactgtgtttgaagaagaaccaaagatgtcatcggatgagaagaaccttatagagatcttggaggaaggccacaaagtcgatatagtcaagtacatcgattacgtcagtgcccctcaagccggcgccatagccacattctctggcactacgagagacatgttcgaaggcaaagcagtcttggagctaaggtacgaagcgtacgtaccaatggccacgcgaaccctcacctccatctgcacatccgctagatcaaactgggacatccacaagatcgctgtcgctcaccgtctagggccagttcccgttggagaaaccagcgtgttcattgcggtttcatctgttcaccgtggggatggtttagacgcttgtaagttcttgatcgatgagctaaaggcaacggttccgatttggaagaaggaggtgtacactaatggagagatctggaaggagaatagtgagtttctggagaagagagacggtctagtgaagaaagaacataaaagaagttgctgtggaagtaaagttagagtacaagaagatgaagaagagcataaagataacagttcttgattacttatagcaaagagcaatgtttttttttttttttctactctcgataagcaaattgtcttaaaacacacattgttgaatctaaagacttcaaattccaattcagttgc

SEQ ID NO: 56302 - protein, 181 aa, Glycine max
  peptide (1)..(181): Ceres Seq. ID no. 13639713
  misc_feature (10)..(126): Pfam Name: MoaE protein Pfam Description: MoaE protein
  misc_feature (5)..(175): Homolog of NCBI NO: 32420325 NR Description: hypothetical protein [Neurospora crassa]
  misc_feature (6)..(131): Homolog of NCBI NO: 7305279 NR Description: molybdenum cofactor synthesis 2 [Mus musculus]
  misc_feature (1)..(145): Homolog of NCBI NO: 28830195 NR Description: hypothetical protein [Dictyostelium discoideum]
  misc_feature (18)..(172): Homolog of NCBI NO: 21356259 NR Description: CG10238-PA [Drosophila melanogaster]
  misc_feature (6)..(145): Homolog of NCBI NO: 27687539 NR Description: similar to Molybdenum cofactor synthesis protein large subunit (Molybdopterin synthase large subunit) (MPT
  misc_feature (6)..(145): Homolog of NCBI NO: 19353410 NR Description: Mocs2 protein [Mus musculus]
  misc_feature (6)..(145): Homolog of NCBI NO: 12832907 NR Description: unnamed protein product [Mus musculus]
  misc_feature (1)..(145): Homolog of NCBI NO: 4758732 NR Description: molybdenum cofactor synthesis 2 large subunit
  misc_feature (28)..(144): Homolog of NCBI NO: 29243132 NR Description: putative molybdopterin synthase large subunit
  misc_feature (1)..(178): Homolog of NCBI NO: 15224353 NR Description: molybdopterin synthase large subunit -related
MSSDEKNLIEILEEGHKVDIVKYIDYVSAPQAGAIATFSGTTRDMFEGKAVLELRYEAYVPMATRTLTSICTSARSNWDIHKIAVAHRLGPVPVGETSVFIAVSSVHRGDGLDACKFLIDELKATVPIWKKEVYTNGEIWKENSEFLEKRDGLVKKEHKRSCCGSKVRVQEDEEEHKDNSS

SEQ ID NO: 56303 - protein, 137 aa, Glycine max
  peptide (1)..(137): Ceres Seq. ID no. 13639714
  misc_feature (1)..(82): Pfam Name: MoaE protein Pfam Description: MoaE protein
  misc_feature (1)..(131): Homolog of NCBI NO: 32420325 NR Description: hypothetical protein [Neurospora crassa]
  misc_feature (1)..(87): Homolog of NCBI NO: 7305279 NR Description: molybdenum cofactor synthesis 2 [Mus musculus]
  misc_feature (1)..(101): Homolog of NCBI NO: 28830195 NR Description: hypothetical protein [Dictyostelium discoideum]
  misc_feature (1)..(128): Homolog of NCBI NO: 21356259 NR Description: CG10238-PA [Drosophila melanogaster]
  misc_feature (1)..(101): Homolog of NCBI NO: 27687539 NR Description: similar to Molybdenum cofactor synthesis protein large subunit (Molybdopterin synthase large subunit) (MPT
  misc_feature (1)..(101): Homolog of NCBI NO: 19353410 NR Description: Mocs2 protein [Mus musculus]
  misc_feature (1)..(101): Homolog of NCBI NO: 12832907 NR Description: unnamed protein product [Mus musculus]
  misc_feature (1)..(101): Homolog of NCBI NO: 4758732 NR Description: molybdenum cofactor synthesis 2 large subunit
  misc_feature (1)..(100): Homolog of NCBI NO: 29243132 NR Description: putative molybdopterin synthase large subunit
  misc_feature (1)..(134): Homolog of NCBI NO: 15224353 NR Description: molybdopterin synthase large subunit -related
MFEGKAVLELRYEAYVPMATRTLTSICTSARSNWDIHKIAVAHRLGPVPVGETSVFIAVSSVHRGDGLDACKFLIDELKATVPIWKKEVYTNGEIWKENSEFLEKRDGLVKKEHKRSCCGSKVRVQEDEEEHKDNSS

SEQ ID NO: 56304 - protein, 120 aa, Glycine max
  peptide (1)..(120): Ceres Seq. ID no. 13639715
  misc_feature (1)..(65): Pfam Name: MoaE protein Pfam Description: MoaE protein
  misc_feature (1)..(114): Homolog of NCBI NO: 32420325 NR Description: hypothetical protein [Neurospora crassa]
  misc_feature (1)..(70): Homolog of NCBI NO: 7305279 NR Description: molybdenum cofactor synthesis 2 [Mus musculus]
  misc_feature (1)..(84): Homolog of NCBI NO: 28830195 NR Description: hypothetical protein [Dictyostelium discoideum]
  misc_feature (1)..(111): Homolog of NCBI NO: 21356259 NR Description: CG10238-PA [Drosophila melanogaster]
  misc_feature (1)..(84): Homolog of NCBI NO: 27687539 NR Description: similar to Molybdenum cofactor synthesis protein large subunit (Molybdopterin synthase large subunit) (MPT
  misc_feature (1)..(84): Homolog of NCBI NO: 19353410 NR Description: Mocs2 protein [Mus musculus]
  misc_feature (1)..(84): Homolog of NCBI NO: 12832907 NR Description: unnamed protein product [Mus musculus]
  misc_feature (1)..(84): Homolog of NCBI NO: 4758732 NR Description: molybdenum cofactor synthesis 2 large subunit
  misc_feature (1)..(83): Homolog of NCBI NO: 29243132 NR Description: putative molybdopterin synthase large subunit
  misc_feature (1)..(117): Homolog of NCBI NO: 15224353 NR Description: molybdopterin synthase large subunit -related
MATRTLTSICTSARSNWDIHKIAVAHRLGPVPVGETSVFIAVSSVHRGDGLDACKFLIDELKATVPIWKKEVYTNGEIWKENSEFLEKRDGLVKKEHKRSCCGSKVRVQEDEEEHKDNSS

SEQ ID NO: 56305 - DNA, 737 bp, Glycine max
  misc_feature (1)..(737): Ceres Seq. ID no. 15178344
acattagctccatagttcaatagagagagtaaagagcagacataggaagagataaaatggccatggcaacaaaatcagtttcttacttcaccctcattttcatcctcgttttggtttttttttttgaagcgccggaaatagaagcgcaggatagcgagtgccttaaagaatacggcgggaatgtgggtttcggcttctgtgcgcctcagacatttccgacgatttgttatataagatgccgtgaggacaaggacgcgaaaggtggaagatgcattacgggagatgccggtgcttttgattttaaatgcttatgtgactactgcagtgacaaacctaatgaccagattctacatggtgtcatctgagtcctacatgtgtgatggtttgtgtaataataagtgttctaagtgataatgtaatagtaaggaatatgtgaaataaaaagctgaaagtatctgaggttcacatggtttgattttagatatgggctttgtggtagagaggcgaagagagtaattattaactttcatacacagaccacccgttctgatatttcttatcagaatgatttatttgggttacaacttgcaactaagctaaataatcgctacacgatttagctgcagttcaaagtttcagtcttgtgttaaaattgcgtgtgtctgtttgtgtgtgtgtcatcgtcgacatgttcatgtgtggtattaaaacgagttcacttcttcagtttgcaaact

SEQ ID NO: 56306 - protein, 102 aa, Glycine max
  peptide (1)..(102): Ceres Seq. ID no. 15178345
  misc_feature (6)..(91): Homolog of NCBI NO: 18406274 NR Description: trypsin inhibitor -related [Arabidopsis thaliana]
  misc_feature (6)..(91): Homolog of NCBI NO: 3287863 NR Description: Putative trypsin inhibitor At2g43550 precursor
  misc_feature (32)..(93): Homolog of NCBI NO: 547742 NR Description: TRYPSIN INHIBITOR (RTI)
  misc_feature (32)..(96): Homolog of NCBI NO: 260921 NR Description: mustard trypsin inhibitor 2, MTI-2=serine
  misc_feature (26)..(93): Homolog of NCBI NO: 28373448 NR Description: Chain A, Minimized Nmr Structure Of Att, An
  misc_feature (3)..(93): Homolog of NCBI NO: 15224295 NR Description: trypsin inhibitor -related [Arabidopsis thaliana]
  misc_feature (3)..(98): Homolog of NCBI NO: 15220249 NR Description: trypsin inhibitor 2 -related [Arabidopsis
  misc_feature (3)..(98): Homolog of NCBI NO: 18406270 NR Description: expressed protein [Arabidopsis thaliana]
  misc_feature (3)..(93): Homolog of NCBI NO: 15224297 NR Description: trypsin inhibitor -related [Arabidopsis thaliana]
  misc_feature (1)..(102): Homolog of NCBI NO: 1708577 NR Description: TRYPSIN INHIBITOR 2 PRECURSOR (MTI-2)
MAMATKSVSYFTLIFILVLVFFFEAPEIEAQDSECLKEYGGNVGFGFCAPQTFPTICYIRCREDKDAKGGRCITGDAGAFDFKCLCDYCSDKPNDQILHGVI

SEQ ID NO: 56307 - protein, 100 aa, Glycine max
  peptide (1)..(100): Ceres Seq. ID no. 15178346
  misc_feature (4)..(89): Homolog of NCBI NO: 18406274 NR Description: trypsin inhibitor -related [Arabidopsis thaliana]
  misc_feature (4)..(89): Homolog of NCBI NO: 3287863 NR Description: Putative trypsin inhibitor At2g43550 precursor
  misc_feature (30)..(91): Homolog of NCBI NO: 547742 NR Description: TRYPSIN INHIBITOR (RTI)
  misc_feature (30)..(94): Homolog of NCBI NO: 260921 NR Description: mustard trypsin inhibitor 2, MTI-2=serine
  misc_feature (24)..(91): Homolog of NCBI NO: 28373448 NR Description: Chain A, Minimized Nmr Structure Of Att, An
  misc_feature (1)..(91): Homolog of NCBI NO: 15224295 NR Description: trypsin inhibitor -related [Arabidopsis thaliana]
  misc_feature (1)..(96): Homolog of NCBI NO: 15220249 NR Description: trypsin inhibitor 2 -related [Arabidopsis
  misc_feature (1)..(96): Homolog of NCBI NO: 18406270 NR Description: expressed protein [Arabidopsis thaliana]
  misc_feature (1)..(91): Homolog of NCBI NO: 15224297 NR Description: trypsin inhibitor -related [Arabidopsis thaliana]
  misc_feature (1)..(100): Homolog of NCBI NO: 1708577 NR Description: TRYPSIN INHIBITOR 2 PRECURSOR (MTI-2)
MATKSVSYFTLIFILVLVFFFEAPEIEAQDSECLKEYGGNVGFGFCAPQTFPTICYIRCREDKDAKGGRCITGDAGAFDFKCLCDYCSDKPNDQILHGVI

SEQ ID NO: 56308 - DNA, 1347 bp, Glycine max
  misc_feature (1)..(1347): Ceres Seq. ID no. 13639090
agaacatcctaatcgaaaaaaatcagatctcgatcccaactttccccgaccttcgctgccctagttctcgattccctctttccccgatcttccccgccctagtttccgatccctagtttcctcgatctcgattctcggagttttcgcgcacctcgtcgaacatggcagcgatcatggcggcgcgcgggcaggggcaggtgcaagatttcgacttcttcgtggtggtggacttcgaggcgacgtgcgtgaaagacgcgcggatctttccgcaggaaatcattgagttccccgccgtgctcgtcgacggcgccaccggccgcatcgagtccgcgtttcgcaggtacgttcgtccaaaacatcaccctgtgctgacccaattttgcagggaactcaccggcatccggcaggaggacgtcgacggcggcgtggatctcggcgaggcgctctggatgcacgactcttggctgaaggcggcgacggcggggggagggagcttggccgtcgtgatctggggagattgggattgccgcaccatgctcgagtccgagtgccgcttcaaggggatagagaagccctcctacttcgatcgctggatcaacctgagggtccccttccaggctgcgctcggcggcggagggcgggtcaccctccaggaggcggtcagggcagcgggactggactgggagggccgcctgcactgcggactggacgacgcgcgcaacacggcgcggcttcttgttgagctgatgcggcgcggggtcaagatgaccatcaccggttcgctggcgccgccgccgccgatccagcagaaggagcagcccccgcagcttctcacaagctcttgcggtggctcatctgtgctggcgccgctgccgatgatccagcagaagcagcagtcgccgcagcttcgcacaagaccttgcggtggctcatcggcactggcgccgccgctgatccagcagaagcagcagccgccgcagccacacatgataagcccctgcggcggctcctctgcgacgtgcttctgctactgcagggtaccgaccagaggaggcgtggtgtccgtgccagggccgatgcagggcaagtgcttcttcgggtgtggcaactggacgccggccatgggacccgtgtgcccctacttcgtatggaccaactgaatgaaccacccatggcagggcaccagaatcagtgtagctcagctgttagtgtaaatcgtgctagccatcagaatcagagcttagctcggctgattctagccagtctaggtgtgaattggtctctggaatcgaatgtatttggtgtctgaattagtattatcaatagaaattctttttagttatgtcc

SEQ ID NO: 56309 - protein, 332 aa, Glycine max
  peptide (1)..(332): Ceres Seq. ID no. 15220453
  misc_feature (14)..(207): Homolog of NCBI NO: 17541516 NR Description: Exonuclease family member [Caenorhabditis
  misc_feature (13)..(210): Homolog of NCBI NO: 24657520 NR Description: CG6393-PB [Drosophila melanogaster]
  misc_feature (3)..(199): Homolog of NCBI NO: 33859765 NR Description: prion protein interacting protein 1 [Mus
  misc_feature (3)..(199): Homolog of NCBI NO: 28174986 NR Description: Prnpip1 protein [Mus musculus]
  misc_feature (1)..(210): Homolog of NCBI NO: 28573607 NR Description: CG6393-PA [Drosophila melanogaster]
  misc_feature (3)..(199): Homolog of NCBI NO: 37547043 NR Description: similar to prion protein interacting 1 like (30.8
  misc_feature (3)..(199): Homolog of NCBI NO: 2852640 NR Description: unknown [Homo sapiens]
  misc_feature (14)..(233): Homolog of NCBI NO: 26325030 NR Description: unnamed protein product [Mus musculus]
  misc_feature (14)..(208): Homolog of NCBI NO: 13386250 NR Description: RIKEN cDNA 4933424N09 [Mus musculus]
  misc_feature (14)..(212): Homolog of NCBI NO: 18087835 NR Description: hypothetical protein MGC16943 [Homo sapiens]
MAAIMAARGQGQVQDFDFFVVVDFEATCVKDARIFPQEIIEFPAVLVDGATGRIESAFRRYVRPKHHPVLTQFCRELTGIRQEDVDGGVDLGEALWMHDSWLKAATAGGGSLAVVIWGDWDCRTMLESECRFKGIEKPSYFDRWINLRVPFQAALGGGGRVTLQEAVRAAGLDWEGRLHCGLDDARNTARLLVELMRRGVKMTITGSLAPPPPIQQKEQPPQLLTSSCGGSSVLAPLPMIQQKQQSPQLRTRPCGGSSALAPPLIQQKQQPPQPHMISPCGGSSATCFCYCRVPTRGGVVSVPGPMQGKCFFGCGNWTPAMGPVCPYFVWTN

SEQ ID NO: 56310 - protein, 328 aa, Glycine max
  peptide (1)..(328): Ceres Seq. ID no. 15220454
  misc_feature (10)..(203): Homolog of NCBI NO: 17541516 NR Description: Exonuclease family member [Caenorhabditis
  misc_feature (9)..(206): Homolog of NCBI NO: 24657520 NR Description: CG6393-PB [Drosophila melanogaster]
  misc_feature (1)..(195): Homolog of NCBI NO: 33859765 NR Description: prion protein interacting protein 1 [Mus
  misc_feature (1)..(195): Homolog of NCBI NO: 28174986 NR Description: Prnpip1 protein [Mus musculus]
  misc_feature (1)..(206): Homolog of NCBI NO: 28573607 NR Description: CG6393-PA [Drosophila melanogaster]
  misc_feature (1)..(195): Homolog of NCBI NO: 37547043 NR Description: similar to prion protein interacting 1 like (30.8
  misc_feature (1)..(195): Homolog of NCBI NO: 2852640 NR Description: unknown [Homo sapiens]
  misc_feature (10)..(229): Homolog of NCBI NO: 26325030 NR Description: unnamed protein product [Mus musculus]
  misc_feature (10)..(204): Homolog of NCBI NO: 13386250 NR Description: RIKEN cDNA 4933424N09 [Mus musculus]
  misc_feature (10)..(208): Homolog of NCBI NO: 18087835 NR Description: hypothetical protein MGC16943 [Homo sapiens]
MAARGQGQVQDFDFFVVVDFEATCVKDARIFPQEIIEFPAVLVDGATGRIESAFRRYVRPKHHPVLTQFCRELTGIRQEDVDGGVDLGEALWMHDSWLKAATAGGGSLAVVIWGDWDCRTMLESECRFKGIEKPSYFDRWINLRVPFQAALGGGGRVTLQEAVRAAGLDWEGRLHCGLDDARNTARLLVELMRRGVKMTITGSLAPPPPIQQKEQPPQLLTSSCGGSSVLAPLPMIQQKQQSPQLRTRPCGGSSALAPPLIQQKQQPPQPHMISPCGGSSATCFCYCRVPTRGGVVSVPGPMQGKCFFGCGNWTPAMGPVCPYFVWTN

SEQ ID NO: 56311 - protein, 236 aa, Glycine max
  peptide (1)..(236): Ceres Seq. ID no. 15220455
  misc_feature (1)..(111): Homolog of NCBI NO: 17541516 NR Description: Exonuclease family member [Caenorhabditis
  misc_feature (1)..(114): Homolog of NCBI NO: 24657520 NR Description: CG6393-PB [Drosophila melanogaster]
  misc_feature (1)..(103): Homolog of NCBI NO: 33859765 NR Description: prion protein interacting protein 1 [Mus
  misc_feature (1)..(103): Homolog of NCBI NO: 28174986 NR Description: Prnpip1 protein [Mus musculus]
  misc_feature (1)..(114): Homolog of NCBI NO: 28573607 NR Description: CG6393-PA [Drosophila melanogaster]
  misc_feature (1)..(103): Homolog of NCBI NO: 37547043 NR Description: similar to prion protein interacting 1 like (30.8
  misc_feature (1)..(103): Homolog of NCBI NO: 2852640 NR Description: unknown [Homo sapiens]
  misc_feature (1)..(137): Homolog of NCBI NO: 26325030 NR Description: unnamed protein product [Mus musculus]
  misc_feature (1)..(112): Homolog of NCBI NO: 13386250 NR Description: RIKEN cDNA 4933424N09 [Mus musculus]
  misc_feature (1)..(116): Homolog of NCBI NO: 18087835 NR Description: hypothetical protein MGC16943 [Homo sapiens]
MHDSWLKAATAGGGSLAVVIWGDWDCRTMLESECRFKGIEKPSYFDRWINLRVPFQAALGGGGRVTLQEAVRAAGLDWEGRLHCGLDDARNTARLLVELMRRGVKMTITGSLAPPPPIQQKEQPPQLLTSSCGGSSVLAPLPMIQQKQQSPQLRTRPCGGSSALAPPLIQQKQQPPQPHMISPCGGSSATCFCYCRVPTRGGVVSVPGPMQGKCFFGCGNWTPAMGPVCPYFVWTN

SEQ ID NO: 56312 - DNA, 588 bp, Glycine max
  misc_feature (1)..(588): Ceres Seq. ID no. 13595222
atgagatgatgagtttgtcattttgttgaatcttatttgatccatcgatctctctcgattccgatcgcgaaaacacgatttgtttattcagcgacgaagacgatgatgaagatgcaaatcggtgtgctggcgtttctggtggctctctctgcgattgaatccggaatcgcttctcccaacaccgtccctgctttcctctggtctccgcatctccaggctggtaatggtgggatggatgaggctgtgaattatcaggtcatgtctgcaaaggatctagttgactctgtcttcacccaaggaggatggtcaaacattctgtgctctgagaagaaggttgagcaccctgttgttgatgttgcacttgtgttcatcggcagagagttactgtcttctgatgtttcttccaaaaggaactcggaaccttcccttgttaacacattgaatggtctctttacagcttccaacttctcattggcattcccatacatttctgcgccagaggaagaaaggatggagagtttattgctttcagggcttaaacaagcttgccctctgtttaaacacaataaagttggaacgggagggggg

SEQ ID NO: 56313 - protein, 162 aa, Glycine max
  peptide (1)..(162): Ceres Seq. ID no. 13595223
  misc_feature (117)..(158): Homolog of NCBI NO: 21618303 NR Description: unknown [Arabidopsis thaliana]
  misc_feature (53)..(116): Homolog of NCBI NO: 25405838 NR Description: hypothetical protein T5A14.4 [imported] -
  misc_feature (1)..(158): Homolog of NCBI NO: 30682651 NR Description: expressed protein [Arabidopsis thaliana]
  misc_feature (1)..(158): Homolog of NCBI NO: 24417230 NR Description: unknown [Arabidopsis thaliana]
MMKMQIGVLAFLVALSAIESGIASPNTVPAFLWSPHLQAGNGGMDEAVNYQVMSAKDLVDSVFTQGGWSNILCSEKKVEHPVVDVALVFIGRELLSSDVSSKRNSEPSLVNTLNGLFTASNFSLAFPYISAPEEERMESLLLSGLKQACPLFKHNKVGTGGG

SEQ ID NO: 56314 - protein, 161 aa, Glycine max
  peptide (1)..(161): Ceres Seq. ID no. 13595224
  misc_feature (116)..(157): Homolog of NCBI NO: 21618303 NR Description: unknown [Arabidopsis thaliana]
  misc_feature (52)..(115): Homolog of NCBI NO: 25405838 NR Description: hypothetical protein T5A14.4 [imported] -
  misc_feature (1)..(157): Homolog of NCBI NO: 30682651 NR Description: expressed protein [Arabidopsis thaliana]
  misc_feature (1)..(157): Homolog of NCBI NO: 24417230 NR Description: unknown [Arabidopsis thaliana]
MKMQIGVLAFLVALSAIESGIASPNTVPAFLWSPHLQAGNGGMDEAVNYQVMSAKDLVDSVFTQGGWSNILCSEKKVEHPVVDVALVFIGRELLSSDVSSKRNSEPSLVNTLNGLFTASNFSLAFPYISAPEEERMESLLLSGLKQACPLFKHNKVGTGGG

SEQ ID NO: 56315 - protein, 159 aa, Glycine max
  peptide (1)..(159): Ceres Seq. ID no. 13595225
  misc_feature (114)..(155): Homolog of NCBI NO: 21618303 NR Description: unknown [Arabidopsis thaliana]
  misc_feature (50)..(113): Homolog of NCBI NO: 25405838 NR Description: hypothetical protein T5A14.4 [imported] -
  misc_feature (1)..(155): Homolog of NCBI NO: 30682651 NR Description: expressed protein [Arabidopsis thaliana]
  misc_feature (1)..(155): Homolog of NCBI NO: 24417230 NR Description: unknown [Arabidopsis thaliana]
MQIGVLAFLVALSAIESGIASPNTVPAFLWSPHLQAGNGGMDEAVNYQVMSAKDLVDSVFTQGGWSNILCSEKKVEHPVVDVALVFIGRELLSSDVSSKRNSEPSLVNTLNGLFTASNFSLAFPYISAPEEERMESLLLSGLKQACPLFKHNKVGTGGG

SEQ ID NO: 56316 - DNA, 1210 bp, Glycine max
  misc_feature (1)..(1210): Ceres Seq. ID no. 13595240
acatcgccacaaagcctgcgcctccatccacctccctcccacacgctccccaccccccgcgccgccgctcgtcggagccccgcctcgccgtgtcaagcccgctaccaatcgagccctgaatggctgccggcaggggcattaaccagcttctgaggaaaactcttcagagccagtcttctggctcatctctgctttcttcatttcggggaaagcatgaagagtcctctgctggactgagagcattggctcttcttggagttggtgcttctggtcttttaagttttggtacgatagcatctgcagatgaagctgagcacggtttggcggctgcagagtacccctggccgcatgctggcatccttagctcatatgatcatgcatcaatccgccgtggacatcaagtttaccagcaagtgtgtgcatcttgtcactccatgtcattgatttcataccgtgatttggttggggtggcctatactgaggaggaaactaaggcaatggctgctgaaattgaagtggttgatggtcctaatgatgagggtgaaatgttcacacgtcctggcaagctgagtgatcgcttcccgcagccttatccaaatgaacaagcagcccgatttgcaaatggtggggcatatcccccagatctcagccttatcacgaaggcaaggcacgatggccagaactacgtgtttgctcttcttactggttaccatgacccacctgctggtgttcagattcgtgagggtctgcattacaatccctacttccctggtggtgccatagccatgcctaagatgcttatggatggagctattgagtatgaagatggtactcctgcaactgaagctcagatgggcaaggatgttgtgtcattcttgtcgtgggctgctgagcctgaaatggaagagaggaaactgatgggtgtcaaatggatcttcctactgtcacttgctcttctccaagccgcatactaccgtcgcatgaggtggtccgtcctcaagtcccgcaagctggtcctggacgtcgtcaactgatgaccattgtttcttctttttattgcaacgttgaggctttaagcagaagcgatcgaaataatgacttccgttgtatatttttgctactggggttgtctcccatcataccttgggtacaatctcttttgttttcttcctctgctgcaaaagcatttctccaaggagcagttattttc

SEQ ID NO: 56317 - protein, 304 aa, Glycine max
  peptide (1)..(304): Ceres Seq. ID no. 13595241
  misc_feature (70)..(294): Pfam Name: Cytochrome C1 family Pfam Description: Cytochrome C1 family
  misc_feature (45)..(304): Homolog of NCBI NO: 82264 NR Description: ubiquinol-cytochrome-c reductase (EC 1.10.2.2)
  misc_feature (5)..(304): Homolog of NCBI NO: 117765 NR Description: Cytochrome c1, heme protein, mitochondrial
  misc_feature (5)..(304): Homolog of NCBI NO: 7547401 NR Description: cytochrome c1 precursor [Solanum tuberosum]
  misc_feature (5)..(304): Homolog of NCBI NO: 82263 NR Description: ubiquinol-cytochrome-c reductase (EC 1.10.2.2)
  misc_feature (1)..(304): Homolog of NCBI NO: 15215624 NR Description: AT5g40810/MHK7_4 [Arabidopsis thaliana]
  misc_feature (1)..(304): Homolog of NCBI NO: 15237497 NR Description: cytochrome c1 precursor [Arabidopsis thaliana]
  misc_feature (1)..(304): Homolog of NCBI NO: 15809956 NR Description: AT3g27240/K17E12_6 [Arabidopsis thaliana]
  misc_feature (1)..(304): Homolog of NCBI NO: 15232125 NR Description: cytochrome c -related [Arabidopsis thaliana]
  misc_feature (1)..(304): Homolog of NCBI NO: 21593678 NR Description: cytochrome c, putative [Arabidopsis thaliana]
  misc_feature (1)..(304): Homolog of NCBI NO: 34907202 NR Description: putative cytochrome c1 precursor
MAAGRGINQLLRKTLQSQSSGSSLLSSFRGKHEESSAGLRALALLGVGASGLLSFGTIASADEAEHGLAAAEYPWPHAGILSSYDHASIRRGHQVYQQVCASCHSMSLISYRDLVGVAYTEEETKAMAAEIEVVDGPNDEGEMFTRPGKLSDRFPQPYPNEQAARFANGGAYPPDLSLITKARHDGQNYVFALLTGYHDPPAGVQIREGLHYNPYFPGGAIAMPKMLMDGAIEYEDGTPATEAQMGKDVVSFLSWAAEPEMEERKLMGVKWIFLLSLALLQAAYYRRMRWSVLKSRKLVLDVVN

SEQ ID NO: 56318 - protein, 199 aa, Glycine max
  peptide (1)..(199): Ceres Seq. ID no. 13595242
  misc_feature (1)..(189): Pfam Name: Cytochrome C1 family Pfam Description: Cytochrome C1 family
  misc_feature (1)..(199): Homolog of NCBI NO: 82264 NR Description: ubiquinol-cytochrome-c reductase (EC 1.10.2.2)
  misc_feature (1)..(199): Homolog of NCBI NO: 117765 NR Description: Cytochrome c1, heme protein, mitochondrial
  misc_feature (1)..(199): Homolog of NCBI NO: 7547401 NR Description: cytochrome c1 precursor [Solanum tuberosum]
  misc_feature (1)..(199): Homolog of NCBI NO: 82263 NR Description: ubiquinol-cytochrome-c reductase (EC 1.10.2.2)
  misc_feature (1)..(199): Homolog of NCBI NO: 15215624 NR Description: AT5g40810/MHK7_4 [Arabidopsis thaliana]
  misc_feature (1)..(199): Homolog of NCBI NO: 15237497 NR Description: cytochrome c1 precursor [Arabidopsis thaliana]
  misc_feature (1)..(199): Homolog of NCBI NO: 15809956 NR Description: AT3g27240/K17E12_6 [Arabidopsis thaliana]
  misc_feature (1)..(199): Homolog of NCBI NO: 15232125 NR Description: cytochrome c -related [Arabidopsis thaliana]
  misc_feature (1)..(199): Homolog of NCBI NO: 21593678 NR Description: cytochrome c, putative [Arabidopsis thaliana]
  misc_feature (1)..(199): Homolog of NCBI NO: 34907202 NR Description: putative cytochrome c1 precursor
MSLISYRDLVGVAYTEEETKAMAAEIEVVDGPNDEGEMFTRPGKLSDRFPQPYPNEQAARFANGGAYPPDLSLITKARHDGQNYVFALLTGYHDPPAGVQIREGLHYNPYFPGGAIAMPKMLMDGAIEYEDGTPATEAQMGKDVVSFLSWAAEPEMEERKLMGVKWIFLLSLALLQAAYYRRMRWSVLKSRKLVLDVVN

SEQ ID NO: 56319 - protein, 178 aa, Glycine max
  peptide (1)..(178): Ceres Seq. ID no. 13595243
  misc_feature (1)..(168): Pfam Name: Cytochrome C1 family Pfam Description: Cytochrome C1 family
  misc_feature (1)..(178): Homolog of NCBI NO: 82264 NR Description: ubiquinol-cytochrome-c reductase (EC 1.10.2.2)
  misc_feature (1)..(178): Homolog of NCBI NO: 117765 NR Description: Cytochrome c1, heme protein, mitochondrial
  misc_feature (1)..(178): Homolog of NCBI NO: 7547401 NR Description: cytochrome c1 precursor [Solanum tuberosum]
  misc_feature (1)..(178): Homolog of NCBI NO: 82263 NR Description: ubiquinol-cytochrome-c reductase (EC 1.10.2.2)
  misc_feature (1)..(178): Homolog of NCBI NO: 15215624 NR Description: AT5g40810/MHK7_4 [Arabidopsis thaliana]
  misc_feature (1)..(178): Homolog of NCBI NO: 15237497 NR Description: cytochrome c1 precursor [Arabidopsis thaliana]
  misc_feature (1)..(178): Homolog of NCBI NO: 15809956 NR Description: AT3g27240/K17E12_6 [Arabidopsis thaliana]
  misc_feature (1)..(178): Homolog of NCBI NO: 15232125 NR Description: cytochrome c -related [Arabidopsis thaliana]
  misc_feature (1)..(178): Homolog of NCBI NO: 21593678 NR Description: cytochrome c, putative [Arabidopsis thaliana]
  misc_feature (1)..(178): Homolog of NCBI NO: 34907202 NR Description: putative cytochrome c1 precursor
MAAEIEVVDGPNDEGEMFTRPGKLSDRFPQPYPNEQAARFANGGAYPPDLSLITKARHDGQNYVFALLTGYHDPPAGVQIREGLHYNPYFPGGAIAMPKMLMDGAIEYEDGTPATEAQMGKDVVSFLSWAAEPEMEERKLMGVKWIFLLSLALLQAAYYRRMRWSVLKSRKLVLDVVN

SEQ ID NO: 56320 - DNA, 1256 bp, Glycine max
  misc_feature (1)..(1256): Ceres Seq. ID no. 12781936
acggcagagttttcccctttcccccctccccactcgccaaaaatcctcgatccaaatccccactccggcgacgcgacgcggccatgcgcagctgccgataggcgacgactgcagcgaccacgcgtgagcggccatggacgagggctacgccagcctccccaccagccacctcctcggctccgtccccgctgtggctgtggctcccgatgagaggaagcccggtgctcccgccgaagttggaaatgccgctgccacctcgcgcctgcagcagtttccgcctgctcctgctgcgaacggaggagggtaccagcctccagggagccctctaggtggagatgtagaaacacagacaaactggaaaggatacttcaatgttgcctcttatactccatatttcaatgttgatactgatgtcgttgttgacagacttatcagttcagtttatccaatggagggatttttcaggaagatagatgttaatcctgacatgtatgggcccttatggatcaccactacactgatatttatgctggctgcattcggaaactttgccacttatctaatgcaaaggaaaagtgatctgaatatatggaactttgatgttagctatttcagtttggcggcatcagtcatgtacggttatgctatcgtggtacctgctgcattctttttcctgtttcagtactttggatcacgcccaagccttatccggttttggtgtatgtggggctattctctgtttatcttcgtaccagcatctatactgctacttattcccgtggaatttcttcgctgggtcatcatagctggtgccggtggtgcatcatcttggttcatctttttaaacttgaaggaatgcaccgaaggagctgatatgatggctttgatcgcaagtgcatcagtgctgcagtttgctctggcactgttcatcaaagttttcttttttgcctgagatctattctgtgttgcttcaggtgagctggatgttttctttgtgtccccgtcgttctgttctgccattcatctttctgaggaccaggcagtggactagtttcaccctacatacatattgaccctagatttgatagaccttgggagtgtctgttttcaagatttttgactctgtgtagttaagggaatttcactgtgtgcgttccagtgcgaagttactaagtttgccatctaaatttgcacctggtgaactttctgccaccgtgctgtacaacaacggtggttagcaagaatgtgaagctctc

SEQ ID NO: 56321 - protein, 272 aa, Glycine max
  peptide (1)..(272): Ceres Seq. ID no. 12781937
  misc_feature (88)..(244): Pfam Name: Yip1 domain Pfam Description: Yip1 domain
  misc_feature (33)..(271): Homolog of NCBI NO: 13128976 NR Description: hypothetical protein MGC3262 [Homo sapiens]
  misc_feature (60)..(271): Homolog of NCBI NO: 17536971 NR Description: Putative membrane protein, with at least 4
  misc_feature (54)..(272): Homolog of NCBI NO: 40740298 NR Description: hypothetical protein AN4017.2 [Aspergillus
  misc_feature (41)..(271): Homolog of NCBI NO: 18859855 NR Description: CG4645-PA [Drosophila melanogaster]
  misc_feature (4)..(271): Homolog of NCBI NO: 34912560 NR Description: P0410E03.18 [Oryza sativa (japonica
  misc_feature (5)..(271): Homolog of NCBI NO: 30679454 NR Description: expressed protein [Arabidopsis thaliana]
  misc_feature (5)..(271): Homolog of NCBI NO: 6729038 NR Description: unknown protein [Arabidopsis thaliana]
  misc_feature (5)..(271): Homolog of NCBI NO: 38564308 NR Description: At5g27490 [Arabidopsis thaliana]
  misc_feature (5)..(271): Homolog of NCBI NO: 30690667 NR Description: expressed protein [Arabidopsis thaliana]
  misc_feature (1)..(271): Homolog of NCBI NO: 30688039 NR Description: expressed protein [Arabidopsis thaliana]
MDEGYASLPTSHLLGSVPAVAVAPDERKPGAPAEVGNAAATSRLQQFPPAPAANGGGYQPPGSPLGGDVETQTNWKGYFNVASYTPYFNVDTDVVVDRLISSVYPMEGFFRKIDVNPDMYGPLWITTTLIFMLAAFGNFATYLMQRKSDLNIWNFDVSYFSLAASVMYGYAIVVPAAFFFLFQYFGSRPSLIRFWCMWGYSLFIFVPASILLLIPVEFLRWVIIAGAGGASSWFIFLNLKECTEGADMMALIASASVLQFALALFIKVFFFA

SEQ ID NO: 56322 - protein, 167 aa, Glycine max
  peptide (1)..(167): Ceres Seq. ID no. 12781938
  misc_feature (1)..(139): Pfam Name: Yip1 domain Pfam Description: Yip1 domain
  misc_feature (1)..(166): Homolog of NCBI NO: 13128976 NR Description: hypothetical protein MGC3262 [Homo sapiens]
  misc_feature (1)..(166): Homolog of NCBI NO: 17536971 NR Description: Putative membrane protein, with at least 4
  misc_feature (1)..(167): Homolog of NCBI NO: 40740298 NR Description: hypothetical protein AN4017.2 [Aspergillus
  misc_feature (1)..(166): Homolog of NCBI NO: 18859855 NR Description: CG4645-PA [Drosophila melanogaster]
  misc_feature (1)..(166): Homolog of NCBI NO: 34912560 NR Description: P0410E03.18 [Oryza sativa (japonica
  misc_feature (1)..(166): Homolog of NCBI NO: 30679454 NR Description: expressed protein [Arabidopsis thaliana]
  misc_feature (1)..(166): Homolog of NCBI NO: 6729038 NR Description: unknown protein [Arabidopsis thaliana]
  misc_feature (1)..(166): Homolog of NCBI NO: 38564308 NR Description: At5g27490 [Arabidopsis thaliana]
  misc_feature (1)..(166): Homolog of NCBI NO: 30690667 NR Description: expressed protein [Arabidopsis thaliana]
  misc_feature (1)..(166): Homolog of NCBI NO: 30688039 NR Description: expressed protein [Arabidopsis thaliana]
MEGFFRKIDVNPDMYGPLWITTTLIFMLAAFGNFATYLMQRKSDLNIWNFDVSYFSLAASVMYGYAIVVPAAFFFLFQYFGSRPSLIRFWCMWGYSLFIFVPASILLLIPVEFLRWVIIAGAGGASSWFIFLNLKECTEGADMMALIASASVLQFALALFIKVFFFA

SEQ ID NO: 56323 - protein, 154 aa, Glycine max
  peptide (1)..(154): Ceres Seq. ID no. 12781939
  misc_feature (1)..(126): Pfam Name: Yip1 domain Pfam Description: Yip1 domain
  misc_feature (1)..(153): Homolog of NCBI NO: 13128976 NR Description: hypothetical protein MGC3262 [Homo sapiens]
  misc_feature (1)..(153): Homolog of NCBI NO: 17536971 NR Description: Putative membrane protein, with at least 4
  misc_feature (1)..(154): Homolog of NCBI NO: 40740298 NR Description: hypothetical protein AN4017.2 [Aspergillus
  misc_feature (1)..(153): Homolog of NCBI NO: 18859855 NR Description: CG4645-PA [Drosophila melanogaster]
  misc_feature (1)..(153): Homolog of NCBI NO: 34912560 NR Description: P0410E03.18 [Oryza sativa (japonica
  misc_feature (1)..(153): Homolog of NCBI NO: 30679454 NR Description: expressed protein [Arabidopsis thaliana]
  misc_feature (1)..(153): Homolog of NCBI NO: 6729038 NR Description: unknown protein [Arabidopsis thaliana]
  misc_feature (1)..(153): Homolog of NCBI NO: 38564308 NR Description: At5g27490 [Arabidopsis thaliana]
  misc_feature (1)..(153): Homolog of NCBI NO: 30690667 NR Description: expressed protein [Arabidopsis thaliana]
  misc_feature (1)..(153): Homolog of NCBI NO: 30688039 NR Description: expressed protein [Arabidopsis thaliana]
MYGPLWITTTLIFMLAAFGNFATYLMQRKSDLNIWNFDVSYFSLAASVMYGYAIVVPAAFFFLFQYFGSRPSLIRFWCMWGYSLFIFVPASILLLIPVEFLRWVIIAGAGGASSWFIFLNLKECTEGADMMALIASASVLQFALALFIKVFFFA

SEQ ID NO: 56324 - DNA, 999 bp, Glycine max
  misc_feature (1)..(999): Ceres Seq. ID no. 12781940
catccatccaccattcatccatcagccacttcacaccagcaagtggcagtagtgcgatccacacaagtttaggcatggcgactccgagagcactcgccctctgcgtcctgctggcgatggccgtcgccaacaccgaggcggcgtcagtcgtcgtcggcctggccaagtgcgccgactgcaccaggaagaacatgcagaccgaggaagccttcaaggctgtgcaggtggcgatcaagtgcaagaacagcgccggcgagtacgagagcaaggcggtgggcggcctcgacggcaccggcgccttcagcgtgcccctggctgccaacctccacggcgccgactgcgtcgctcagctccacagcgccgtctccaacgcgccctgccccggccaggagccgtccaagatcgtgccggtgtccgagggcaccacgtacggcgtcgtcgctggcgagaacgccgccacgccgtctgccgcatcgccggagtgtgcgtccatgaccctatgcgggccgatcaagaagcacatcatcgagcacttccaccacaagaagcctgtgccgccgaagccggagcccaagccccagccccacccggactacggccccgtgcccaagcccgagcccaagccgcagccccacccggactaccacccagtccctcccacccccacctacggcggaggcggcggtggtggataccacggacaccactgagtccagtctaccattgtactcctgcccagcgggttggttgtcagtgagtgatcgacgttgctatttatgatcggtttgcatgggtgggtgcattgtttggtcttctgccattcgctgccccattttagtatctgcactgcagtctgagagttcataataacagctctacgcgtgtgtatcaggcaagtgtgtgggtgtggttggtgtgtttgcttctgtaatttcggtgagttctcttgtagtacaaaggtttttatgaatcaagtaatttaaatcaagtcgattttgt

SEQ ID NO: 56325 - protein, 235 aa, Glycine max
  peptide (1)..(235): Ceres Seq. ID no. 12781941
  misc_feature (173)..(224): Homolog of NCBI NO: 6689616 NR Description: proline-rich protein [Zea mays]
  misc_feature (171)..(219): Homolog of NCBI NO: 37531094 NR Description: putative proline-rich protein
  misc_feature (171)..(219): Homolog of NCBI NO: 37531092 NR Description: putative proline-rich protein
  misc_feature (31)..(221): Homolog of NCBI NO: 7489265 NR Description: proline-rich protein GPP1 - potato
  misc_feature (32)..(228): Homolog of NCBI NO: 37531064 NR Description: putative proline-rich protein
  misc_feature (28)..(221): Homolog of NCBI NO: 18676394 NR Description: proline-rich protein [Oryza sativa]
  misc_feature (28)..(221): Homolog of NCBI NO: 37531092 NR Description: putative proline-rich protein
  misc_feature (28)..(221): Homolog of NCBI NO: 37531094 NR Description: putative proline-rich protein
  misc_feature (28)..(221): Homolog of NCBI NO: 37531088 NR Description: putative proline-rich protein
  misc_feature (28)..(224): Homolog of NCBI NO: 6689616 NR Description: proline-rich protein [Zea mays]
SIHHSSISHFTPASGSSAIHTSLGMATPRALALCVLLAMAVANTEAASVVVGLAKCADCTRKNMQTEEAFKAVQVAIKCKNSAGEYESKAVGGLDGTGAFSVPLAANLHGADCVAQLHSAVSNAPCPGQEPSKIVPVSEGTTYGVVAGENAATPSAASPECASMTLCGPIKKHIIEHFHHKKPVPPKPEPKPQPHPDYGPVPKPEPKPQPHPDYHPVPPTPTYGGGGGGGYHGHH

SEQ ID NO: 56326 - protein, 211 aa, Glycine max
  peptide (1)..(211): Ceres Seq. ID no. 12781942
  misc_feature (149)..(200): Homolog of NCBI NO: 6689616 NR Description: proline-rich protein [Zea mays]
  misc_feature (147)..(195): Homolog of NCBI NO: 37531094 NR Description: putative proline-rich protein
  misc_feature (147)..(195): Homolog of NCBI NO: 37531092 NR Description: putative proline-rich protein
  misc_feature (7)..(197): Homolog of NCBI NO: 7489265 NR Description: proline-rich protein GPP1 - potato
  misc_feature (8)..(204): Homolog of NCBI NO: 37531064 NR Description: putative proline-rich protein
  misc_feature (4)..(197): Homolog of NCBI NO: 18676394 NR Description: proline-rich protein [Oryza sativa]
  misc_feature (4)..(197): Homolog of NCBI NO: 37531092 NR Description: putative proline-rich protein
  misc_feature (4)..(197): Homolog of NCBI NO: 37531094 NR Description: putative proline-rich protein
  misc_feature (4)..(197): Homolog of NCBI NO: 37531088 NR Description: putative proline-rich protein
  misc_feature (4)..(200): Homolog of NCBI NO: 6689616 NR Description: proline-rich protein [Zea mays]
MATPRALALCVLLAMAVANTEAASVVVGLAKCADCTRKNMQTEEAFKAVQVAIKCKNSAGEYESKAVGGLDGTGAFSVPLAANLHGADCVAQLHSAVSNAPCPGQEPSKIVPVSEGTTYGVVAGENAATPSAASPECASMTLCGPIKKHIIEHFHHKKPVPPKPEPKPQPHPDYGPVPKPEPKPQPHPDYHPVPPTPTYGGGGGGGYHGHH

SEQ ID NO: 56327 - protein, 197 aa, Glycine max
  peptide (1)..(197): Ceres Seq. ID no. 12781943
  misc_feature (135)..(186): Homolog of NCBI NO: 6689616 NR Description: proline-rich protein [Zea mays]
  misc_feature (133)..(181): Homolog of NCBI NO: 37531094 NR Description: putative proline-rich protein
  misc_feature (133)..(181): Homolog of NCBI NO: 37531092 NR Description: putative proline-rich protein
  misc_feature (1)..(183): Homolog of NCBI NO: 7489265 NR Description: proline-rich protein GPP1 - potato
  misc_feature (1)..(190): Homolog of NCBI NO: 37531064 NR Description: putative proline-rich protein
  misc_feature (1)..(183): Homolog of NCBI NO: 18676394 NR Description: proline-rich protein [Oryza sativa]
  misc_feature (1)..(183): Homolog of NCBI NO: 37531092 NR Description: putative proline-rich protein
  misc_feature (1)..(183): Homolog of NCBI NO: 37531094 NR Description: putative proline-rich protein
  misc_feature (1)..(183): Homolog of NCBI NO: 37531088 NR Description: putative proline-rich protein
  misc_feature (1)..(186): Homolog of NCBI NO: 6689616 NR Description: proline-rich protein [Zea mays]
MAVANTEAASVVVGLAKCADCTRKNMQTEEAFKAVQVAIKCKNSAGEYESKAVGGLDGTGAFSVPLAANLHGADCVAQLHSAVSNAPCPGQEPSKIVPVSEGTTYGVVAGENAATPSAASPECASMTLCGPIKKHIIEHFHHKKPVPPKPEPKPQPHPDYGPVPKPEPKPQPHPDYHPVPPTPTYGGGGGGGYHGHH

SEQ ID NO: 56328 - DNA, 724 bp, Glycine max
  misc_feature (1)..(724): Ceres Seq. ID no. 13594970
gcttttgttgttcggttagcaccagcgaaacgcagagcgagaggccgaggaagcgatagctctagcgataaggcactgacggatcaatggctgccacggcgtactccgtggccctcctcggtggggcgcgcctccccgccgccaccggcaacctcgccccccgctcctccgcactcctcccgcggcgcaacctccacccgctccgcctccaagatgcgcccaggccgtccctgctccgcgtgaaggccgcctccgacgacacgtcggctagcggcgacgagatcatcgaggacctgaaagggaagtgggaggcgattgaggacaagcccaccttcctcctctacagcggcggcgccgtcgtggctctctggctcaccaccgtcgtcgtcggcgccatcaactccgtgccgttgctccccaagctcctggagctggttgggctcggctacaccgggtggttcgtgtaccgctacctcctcttcaaggaaagcaggaaagagttggccaccgacatcgagagcttgaagaagaagatcgccggaacagaataaactcaagttctctggaacgttttttatggctcttttgtctgtccatgtaatggaagaacacctacttgcttagagtaccatccactgcatttgtgtgttacatacatatctgtatgaacaaagaaatatgctttggttggtgtgcggtgacaatagtgaaattgtatcagttc

SEQ ID NO: 56329 - protein, 154 aa, Glycine max
  peptide (1)..(154): Ceres Seq. ID no. 13594971
  misc_feature (16)..(150): Homolog of NCBI NO: 37536446 NR Description: hypothetical protein [Oryza sativa (japonica
  misc_feature (35)..(151): Homolog of NCBI NO: 18403896 NR Description: expressed protein [Arabidopsis thaliana]
  misc_feature (65)..(153): Homolog of NCBI NO: 21555057 NR Description: unknown [Arabidopsis thaliana]
  misc_feature (65)..(153): Homolog of NCBI NO: 18407178 NR Description: expressed protein [Arabidopsis thaliana]
  misc_feature (55)..(153): Homolog of NCBI NO: 34393236 NR Description: unknown protein [Oryza sativa (japonica
  misc_feature (56)..(154): Homolog of NCBI NO: 18420175 NR Description: expressed protein [Arabidopsis thaliana]
  misc_feature (56)..(154): Homolog of NCBI NO: 7485852 NR Description: hypothetical protein F20D10.220 - Arabidopsis
  misc_feature (1)..(154): Homolog of NCBI NO: 38175474 NR Description: unknown protein [Oryza sativa (japonica
  misc_feature (1)..(154): Homolog of NCBI NO: 687677 NR Description: unknown
  misc_feature (1)..(154): Homolog of NCBI NO: 18411555 NR Description: expressed protein [Arabidopsis thaliana]
MAATAYSVALLGGARLPAATGNLAPRSSALLPRRNLHPLRLQDAPRPSLLRVKAASDDTSASGDEIIEDLKGKWEAIEDKPTFLLYSGGAVVALWLTTVVVGAINSVPLLPKLLELVGLGYTGWFVYRYLLFKESRKELATDIESLKKKIAGTE

SEQ ID NO: 56330 - protein, 80 aa, Glycine max
  peptide (1)..(80): Ceres Seq. ID no. 13594972
  misc_feature (7)..(80): Homolog of NCBI NO: 11359723 NR Description: proteophosphoglycan, membrane-associated
  misc_feature (7)..(80): Homolog of NCBI NO: 11359723 NR Description: proteophosphoglycan, membrane-associated
  misc_feature (7)..(80): Homolog of NCBI NO: 5420387 NR Description: proteophosphoglycan [Leishmania major]
  misc_feature (7)..(80): Homolog of NCBI NO: 11359723 NR Description: proteophosphoglycan, membrane-associated
AFVVRLAPAKRRARGRGSDSSSDKALTDQWLPRRTPWPSSVGRASPPPPATSPPAPPHSSRGATSTRSASKMRPGRPCSA

SEQ ID NO: 56331 - DNA, 786 bp, Glycine max
  misc_feature (1)..(786): Ceres Seq. ID no. 13595226
ggccaaggccgtttgcaccttatttcgccttacacctcaccatcgacttacatacttctgttggccggagccacacgagctagcaccaccgacaaacaataccttgctgttctgagctcgccgtcccgatggcaagcaccaacatggcgtcggccacctccagattcatgctggcggcgggcatccccagcggctccaacggcggcgtgggcagccgcgtcagcttcgtcccgtccaaccggctcggctggaagctcgtggcccgcgccgaggaggagccgactgccgccgcaccggcggaaccagcaccggccgcggaggagaaaccggaagccgccgtggccaccaaagagcccgccaaagccaagccgccgccaaggggacccaagaggggaaccaaggtgaagattctgaggagggagtcctactggtacaacgggaccggatccgtcgtcacggttgatcaggatcccaacacccgttacccggtggtggtgcgtttcgccaaggtgaactacgccggcgtgtcgaccaacaactacgccctggacgagatcaaggaggttgctgcttaagcgaacgaggctagctgccatgtgctccatccaatgtttgtatcagtagctcgtcgagtgacgatgtgaatgttagcctctcacaaaccttatgtgtaatacctctgcgattatatgtatttgcctgcttcctcatggacctaataatctccttctgttgcttaaaatgattgtattcttgctcacttttgtacaaaagatcggttgttcg

SEQ ID NO: 56332 - protein, 148 aa, Glycine max
  peptide (1)..(148): Ceres Seq. ID no. 15221513
  misc_feature (86)..(147): Pfam Name: Photosystem I reaction centre subunit IV / PsaE Pfam Description: Photosystem I reaction centre subunit IV / PsaE
  misc_feature (1)..(146): Homolog of NCBI NO: 26986114 NR Description: putative photosystem I reaction centre subunit IV
  misc_feature (1)..(146): Homolog of NCBI NO: 2499967 NR Description: Photosystem I reaction center subunit IV B,
  misc_feature (31)..(148): Homolog of NCBI NO: 22091414 NR Description: putative photosystem I subunit PSI-E [Arabidopsis
  misc_feature (1)..(146): Homolog of NCBI NO: 2499966 NR Description: Photosystem I reaction center subunit IV A,
  misc_feature (6)..(146): Homolog of NCBI NO: 21555308 NR Description: Photosystem I reaction center subunit IV B,
  misc_feature (6)..(146): Homolog of NCBI NO: 15225331 NR Description: photosystem I reaction center subunit IV -related
  misc_feature (6)..(148): Homolog of NCBI NO: 30688100 NR Description: photosystem I subunit PSI-E - like protein
  misc_feature (6)..(148): Homolog of NCBI NO: 24030202 NR Description: putative photosystem I subunit PSI-E protein
  misc_feature (1)..(146): Homolog of NCBI NO: 34394725 NR Description: putative Photosystem I reaction center subunit IV
  misc_feature (1)..(148): Homolog of NCBI NO: 131176 NR Description: Photosystem I reaction center subunit IV,
MASTNMASATSRFMLAAGIPSGSNGGVGSRVSFVPSNRLGWKLVARAEEEPTAAAPAEPAPAAEEKPEAAVATKEPAKAKPPPRGPKRGTKVKILRRESYWYNGTGSVVTVDQDPNTRYPVVVRFAKVNYAGVSTNNYALDEIKEVAA

SEQ ID NO: 56333 - protein, 143 aa, Glycine max
  peptide (1)..(143): Ceres Seq. ID no. 15221514
  misc_feature (81)..(142): Pfam Name: Photosystem I reaction centre subunit IV / PsaE Pfam Description: Photosystem I reaction centre subunit IV / PsaE
  misc_feature (1)..(141): Homolog of NCBI NO: 26986114 NR Description: putative photosystem I reaction centre subunit IV
  misc_feature (1)..(141): Homolog of NCBI NO: 2499967 NR Description: Photosystem I reaction center subunit IV B,
  misc_feature (26)..(143): Homolog of NCBI NO: 22091414 NR Description: putative photosystem I subunit PSI-E [Arabidopsis
  misc_feature (1)..(141): Homolog of NCBI NO: 2499966 NR Description: Photosystem I reaction center subunit IV A,
  misc_feature (1)..(141): Homolog of NCBI NO: 21555308 NR Description: Photosystem I reaction center subunit IV B,
  misc_feature (1)..(141): Homolog of NCBI NO: 15225331 NR Description: photosystem I reaction center subunit IV -related
  misc_feature (1)..(143): Homolog of NCBI NO: 30688100 NR Description: photosystem I subunit PSI-E - like protein
  misc_feature (1)..(143): Homolog of NCBI NO: 24030202 NR Description: putative photosystem I subunit PSI-E protein
  misc_feature (1)..(141): Homolog of NCBI NO: 34394725 NR Description: putative Photosystem I reaction center subunit IV
  misc_feature (1)..(143): Homolog of NCBI NO: 131176 NR Description: Photosystem I reaction center subunit IV,
MASATSRFMLAAGIPSGSNGGVGSRVSFVPSNRLGWKLVARAEEEPTAAAPAEPAPAAEEKPEAAVATKEPAKAKPPPRGPKRGTKVKILRRESYWYNGTGSVVTVDQDPNTRYPVVVRFAKVNYAGVSTNNYALDEIKEVAA

SEQ ID NO: 56334 - protein, 135 aa, Glycine max
  peptide (1)..(135): Ceres Seq. ID no. 15221515
  misc_feature (73)..(134): Pfam Name: Photosystem I reaction centre subunit IV / PsaE Pfam Description: Photosystem I reaction centre subunit IV / PsaE
  misc_feature (1)..(133): Homolog of NCBI NO: 26986114 NR Description: putative photosystem I reaction centre subunit IV
  misc_feature (1)..(133): Homolog of NCBI NO: 2499967 NR Description: Photosystem I reaction center subunit IV B,
  misc_feature (18)..(135): Homolog of NCBI NO: 22091414 NR Description: putative photosystem I subunit PSI-E [Arabidopsis
  misc_feature (1)..(133): Homolog of NCBI NO: 2499966 NR Description: Photosystem I reaction center subunit IV A,
  misc_feature (1)..(133): Homolog of NCBI NO: 21555308 NR Description: Photosystem I reaction center subunit IV B,
  misc_feature (1)..(133): Homolog of NCBI NO: 15225331 NR Description: photosystem I reaction center subunit IV -related
  misc_feature (1)..(135): Homolog of NCBI NO: 30688100 NR Description: photosystem I subunit PSI-E - like protein
  misc_feature (1)..(135): Homolog of NCBI NO: 24030202 NR Description: putative photosystem I subunit PSI-E protein
  misc_feature (1)..(133): Homolog of NCBI NO: 34394725 NR Description: putative Photosystem I reaction center subunit IV
  misc_feature (1)..(135): Homolog of NCBI NO: 131176 NR Description: Photosystem I reaction center subunit IV,
MLAAGIPSGSNGGVGSRVSFVPSNRLGWKLVARAEEEPTAAAPAEPAPAAEEKPEAAVATKEPAKAKPPPRGPKRGTKVKILRRESYWYNGTGSVVTVDQDPNTRYPVVVRFAKVNYAGVSTNNYALDEIKEVAA

SEQ ID NO: 56335 - DNA, 704 bp, Glycine max
  misc_feature (1)..(704): Ceres Seq. ID no. 12610189
aataaacacaagagatcgaccgacaccgagacagatcgtgttggtttcattttgcgaggtagatagagaaagggatgcagggcgggaagagctcgagcgcggtgggcgcggccaaggaggcggtggcgaacgtgggcacgtcggcgtgggcgagcaaggagaagaccatggccgtggtgcaggagacggtgaacaaggccaaggcgcacgacccggcggccaaggccgaggcggaggccaggaagcaggagcggatccacgaggcggaggccgccaagcgggacgccatgcgccacaacgccgccgccaaggagcacgccaccgccgcgtcctaccaccccaccaccggcgccggagtggacgcccgcgacgtcgaggtggagggcgcggccgccccgcgcgcggggagcagcgacgacggctacctgccggtgtcgggggcggggcactgggtcggcgagggcggcggtcaccagctgcccgcgcgcggcacgcccggcggccactctgcgtgatgacgaattgacgagactccatccgatgtgatttgcgtgtgaactggctggtttggcaaatagctggtataccttgtgtgcttgttcgagtgtgacccctcctgtagttttgagctctcaagagctgtgcttatttacgttgtgatctgtgaaatgagttttatataatggagatgagggtgtgatttc

SEQ ID NO: 56336 - protein, 174 aa, Glycine max
  peptide (1)..(174): Ceres Seq. ID no. 12610190
  misc_feature (38)..(141): Pfam Name: Protein of unknown function, DUF584 Pfam Description: Protein of unknown function, DUF584
  misc_feature (34)..(154): Homolog of NCBI NO: 421936 NR Description: glycine-rich protein - common tobacco
  misc_feature (34)..(144): Homolog of NCBI NO: 18025496 NR Description: EBNA-1 [cercopithicine herpesvirus 15]
  misc_feature (17)..(156): Homolog of NCBI NO: 15224564 NR Description: unknown protein; protein id: At2g05580.1
  misc_feature (32)..(164): Homolog of NCBI NO: 15224564 NR Description: unknown protein; protein id: At2g05580.1
  misc_feature (34)..(161): Homolog of NCBI NO: 9625624 NR Description: nuclear antigen EBNA1 [Human herpesvirus 4]
  misc_feature (20)..(156): Homolog of NCBI NO: 21757162 NR Description: unnamed protein product [Homo sapiens]
  misc_feature (25)..(131): Homolog of NCBI NO: 15221662 NR Description: hypothetical protein; protein id: At1g31290.1
  misc_feature (34)..(162): Homolog of NCBI NO: 9453859 NR Description: EBNA-1 [Cynomolgus Epstein-Barr Virus Si-IIA]
  misc_feature (34)..(169): Homolog of NCBI NO: 775215 NR Description: EBNA1 [Herpesvirus papio]
  misc_feature (34)..(162): Homolog of NCBI NO: 9453857 NR Description: EBNA-1 [Cynomolgus Epstein-Barr Virus TsB-B6]
INTRDRPTPRQIVLVSFCEVDRERDAGREELERGGRGQGGGGERGHVGVGEQGEDHGRGAGDGEQGQGARPGGQGRGGGQEAGADPRGGGRQAGRHAPQRRRQGARHRRVLPPHHRRRSGRPRRRGGGRGRPARGEQRRRLPAGVGGGALGRRGRRSPAARARHARRPLCVMTN

SEQ ID NO: 56337 - protein, 146 aa, Glycine max
  peptide (1)..(146): Ceres Seq. ID no. 12610191
  misc_feature (12)..(80): Pfam Name: Late embryogenesis abundant (LEA) group 1 Pfam Description: Late embryogenesis abundant (LEA) group 1
  misc_feature (1)..(143): Homolog of NCBI NO: 10334835 NR Description: seed maturation protein [Glycine tomentella]
  misc_feature (1)..(143): Homolog of NCBI NO: 15667233 NR Description: seed maturation protein LEA 4 [Glycine canescens]
  misc_feature (1)..(143): Homolog of NCBI NO: 10334838 NR Description: seed maturation protein [Glycine tabacina]
  misc_feature (1)..(143): Homolog of NCBI NO: 10334846 NR Description: seed maturation protein [Glycine tomentella]
  misc_feature (1)..(143): Homolog of NCBI NO: 11612193 NR Description: seed maturation protein LEA 4 [Glycine tomentella]
  misc_feature (1)..(143): Homolog of NCBI NO: 11612189 NR Description: seed maturation protein LEA 4 [Glycine tomentella]
  misc_feature (1)..(143): Homolog of NCBI NO: 11612179 NR Description: seed maturation protein LEA 4 [Glycine tabacina]
  misc_feature (1)..(143): Homolog of NCBI NO: 1079652 NR Description: late embryogenesis abundant protein [Glycine soja]
  misc_feature (1)..(143): Homolog of NCBI NO: 417494 NR Description: 18 KD SEED MATURATION PROTEIN
  misc_feature (1)..(116): Homolog of NCBI NO: 38637202 NR Description: putative seed maturation protein
MQGGKSSSAVGAAKEAVANVGTSAWASKEKTMAVVQETVNKAKAHDPAAKAEAEARKQERIHEAEAAKRDAMRHNAAAKEHATAASYHPTTGAGVDARDVEVEGAAAPRAGSSDDGYLPVSGAGHWVGEGGGHQLPARGTPGGHSA

SEQ ID NO: 56338 - protein, 115 aa, Glycine max
  peptide (1)..(115): Ceres Seq. ID no. 12610192
  misc_feature (1)..(112): Homolog of NCBI NO: 10334835 NR Description: seed maturation protein [Glycine tomentella]
  misc_feature (1)..(112): Homolog of NCBI NO: 15667233 NR Description: seed maturation protein LEA 4 [Glycine canescens]
  misc_feature (1)..(112): Homolog of NCBI NO: 10334838 NR Description: seed maturation protein [Glycine tabacina]
  misc_feature (1)..(112): Homolog of NCBI NO: 10334846 NR Description: seed maturation protein [Glycine tomentella]
  misc_feature (1)..(112): Homolog of NCBI NO: 11612193 NR Description: seed maturation protein LEA 4 [Glycine tomentella]
  misc_feature (1)..(112): Homolog of NCBI NO: 11612189 NR Description: seed maturation protein LEA 4 [Glycine tomentella]
  misc_feature (1)..(112): Homolog of NCBI NO: 11612179 NR Description: seed maturation protein LEA 4 [Glycine tabacina]
  misc_feature (1)..(112): Homolog of NCBI NO: 1079652 NR Description: late embryogenesis abundant protein [Glycine soja]
  misc_feature (1)..(112): Homolog of NCBI NO: 417494 NR Description: 18 KD SEED MATURATION PROTEIN
  misc_feature (1)..(85): Homolog of NCBI NO: 38637202 NR Description: putative seed maturation protein
MAVVQETVNKAKAHDPAAKAEAEARKQERIHEAEAAKRDAMRHNAAAKEHATAASYHPTTGAGVDARDVEVEGAAAPRAGSSDDGYLPVSGAGHWVGEGGGHQLPARGTPGGHSA

SEQ ID NO: 56339 - DNA, 815 bp, Glycine max
  misc_feature (1)..(815): Ceres Seq. ID no. 12781963
accaacggcggagatgggtggtggtgccgcgaggagggttctcgaggcgtggaagctcggagtggtcaagtacggcgacgccctcaggctccaggagaggctcgtcgccgaccggagagccggccgggtcccggacctcgtgctctcgctgcagcatccgcctacctacaccctcggcaagcggcgcaccgaccacaacctgctcgtgccggagtcaagcctcgcgggcctcggcgccgagctctaccgcacggagcggggcggcgacgtcaccttccacggcccgcgccaggccgtgctctaccccatcctctcgctccgggacattgggctaggcgcgcggaggtatgtcgaggggctcgagtccgccatgatcgaggttgcctctctgtacggcgtcaaggcgcggccggggggcgcctgcgagaccggcgtgtgggtcggggacaggaagattggggccatcggggtcaggatctcgtcagggtttacctgccatggcctggccttcaacatcgaccctgatttgggctacttcaagcacatcgtgccctgcggcattgctgacaaggaggtcacatcgctgcggcgggaggccgcggtggaactccctcctgacgaggtgatccatggtcagctcttgcagagcttggcgacaaccttccgtttcagtgatgttaaagtcaaggatgattccgagtgtgcagacatgattagctcagctgcaactgagcaacactgatatgtattttgctctttgtacttttgtatactgggattttgcctcgacacctagttataaacttttgggtttc

SEQ ID NO: 56340 - protein, 246 aa, Glycine max
  peptide (1)..(246): Ceres Seq. ID no. 12781964
  misc_feature (19)..(221): Homolog of NCBI NO: 22298375 NR Description: lipoate-protein ligase [Thermosynechococcus
  misc_feature (11)..(221): Homolog of NCBI NO: 21355483 NR Description: CG9804-PA [Drosophila melanogaster]
  misc_feature (19)..(221): Homolog of NCBI NO: 39586445 NR Description: Hypothetical protein CBG21764 [Caenorhabditis
  misc_feature (11)..(237): Homolog of NCBI NO: 32565879 NR Description: LiPoate Ligase (27.4 kD) (lpl-1) [Caenorhabditis
  misc_feature (20)..(195): Homolog of NCBI NO: 37523983 NR Description: lipoate-protein ligase B [Gloeobacter violaceus]
  misc_feature (14)..(221): Homolog of NCBI NO: 6685619 NR Description: Lipoate-protein ligase B (Lipoate biosynthesis
  misc_feature (11)..(208): Homolog of NCBI NO: 29346499 NR Description: lipoate-protein ligase B [Bacteroides
  misc_feature (12)..(221): Homolog of NCBI NO: 22971103 NR Description: hypothetical protein [Chloroflexus aurantiacus]
  misc_feature (12)..(231): Homolog of NCBI NO: 15219770 NR Description: lipoyltransferase
  misc_feature (12)..(231): Homolog of NCBI NO: 3122357 NR Description: Probable lipoate-protein ligase (Lipoate
PTAEMGGGAARRVLEAWKLGVVKYGDALRLQERLVADRRAGRVPDLVLSLQHPPTYTLGKRRTDHNLLVPESSLAGLGAELYRTERGGDVTFHGPRQAVLYPILSLRDIGLGARRYVEGLESAMIEVASLYGVKARPGGACETGVWVGDRKIGAIGVRISSGFTCHGLAFNIDPDLGYFKHIVPCGIADKEVTSLRREAAVELPPDEVIHGQLLQSLATTFRFSDVKVKDDSECADMISSAATEQH

SEQ ID NO: 56341 - protein, 242 aa, Glycine max
  peptide (1)..(242): Ceres Seq. ID no. 12781965
  misc_feature (15)..(217): Homolog of NCBI NO: 22298375 NR Description: lipoate-protein ligase [Thermosynechococcus
  misc_feature (7)..(217): Homolog of NCBI NO: 21355483 NR Description: CG9804-PA [Drosophila melanogaster]
  misc_feature (15)..(217): Homolog of NCBI NO: 39586445 NR Description: Hypothetical protein CBG21764 [Caenorhabditis
  misc_feature (7)..(233): Homolog of NCBI NO: 32565879 NR Description: LiPoate Ligase (27.4 kD) (lpl-1) [Caenorhabditis
  misc_feature (16)..(191): Homolog of NCBI NO: 37523983 NR Description: lipoate-protein ligase B [Gloeobacter violaceus]
  misc_feature (10)..(217): Homolog of NCBI NO: 6685619 NR Description: Lipoate-protein ligase B (Lipoate biosynthesis
  misc_feature (7)..(204): Homolog of NCBI NO: 29346499 NR Description: lipoate-protein ligase B [Bacteroides
  misc_feature (8)..(217): Homolog of NCBI NO: 22971103 NR Description: hypothetical protein [Chloroflexus aurantiacus]
  misc_feature (8)..(227): Homolog of NCBI NO: 15219770 NR Description: lipoyltransferase
  misc_feature (8)..(227): Homolog of NCBI NO: 3122357 NR Description: Probable lipoate-protein ligase (Lipoate
MGGGAARRVLEAWKLGVVKYGDALRLQERLVADRRAGRVPDLVLSLQHPPTYTLGKRRTDHNLLVPESSLAGLGAELYRTERGGDVTFHGPRQAVLYPILSLRDIGLGARRYVEGLESAMIEVASLYGVKARPGGACETGVWVGDRKIGAIGVRISSGFTCHGLAFNIDPDLGYFKHIVPCGIADKEVTSLRREAAVELPPDEVIHGQLLQSLATTFRFSDVKVKDDSECADMISSAATEQH

SEQ ID NO: 56342 - protein, 174 aa, Glycine max
  peptide (1)..(174): Ceres Seq. ID no. 12781966
TNGGDGWWCREEGSRGVEARSGQVRRRPQAPGEARRRPESRPGPGPRALAAASAYLHPRQAAHRPQPARAGVKPRGPRRRALPHGAGRRRHLPRPAPGRALPHPLAPGHWARRAEVCRGARVRHDRGCLSVRRQGAAGGRLRDRRVGRGQEDWGHRGQDLVRVYLPWPGLQHRP

SEQ ID NO: 56343 - DNA, 1043 bp, Glycine max
  misc_feature (1)..(1043): Ceres Seq. ID no. 14304176
attgtctcataaaaaaacaatcttctctttaaaacgatggagtgtagaccgttggatctgacgataatatccgcagaggacctcaaagacatccagctgatcggcaagcaagacctatacgccgtcgtttccctcaacaacgacgcaaggaccaagcagaagacaaaggtggacaaagactgcgggacgaaacctaagtggaagcatcagatgaagctcaccgtcgacgacacagcagcgcgtgagaaccatctcacacttgtcatccagatcgtcgctgatcgtcccatcgccggtgataaaccagtcggagaggttagcgttccgttgaaggagcttttggatcagaacaacaaggagggtgacgtggaggaggagaaaacggttacgtatgctgtgaagctgcctaacggtaagaccaaaggatctctcaagttctcgttcaagtttggtgagaagtacactttcgggtcttcgagtgatcctcacgcgcctggctcatcgagtgttgaccacaagtctacggatcagcccgtcgcagcttacccgcccggacaaggcgccccggctgcatacccggctcctccaggacatgatgataaacatggcggtgtttacggttacccacaggccggtggatatccgccacctggtggtcccggtggttatcctccagctgggcctggtgggtatccgcctcccggtgcatacccgcaacaaggtggatatccacctcaacaaggaggctacccgggttatccaccacagggtccaggctatgggtatccgccacagggtccaggttatgggtatccgccacagggtccgtatggttacccgcaacagcaagcttatggtggtcaaccgcagaaaccgaagaagcatggaggagctggaatgggtctagggcttggacttggagctgggctattgggtgggttgcttgttggtgaagcaattgatgacatggcagatatgggtgatatgggtgatttctgattgtgcttatctttatggtattagctttcaatttcttgttgttc

SEQ ID NO: 56344 - protein, 320 aa, Glycine max
  peptide (1)..(320): Ceres Seq. ID no. 14304177
  misc_feature (6)..(95): Pfam Name: C2 domain Pfam Description: C2 domain
  misc_feature (1)..(319): Homolog of NCBI NO: 18390977 NR Description: C2 domain-containing protein [Arabidopsis
  misc_feature (1)..(319): Homolog of NCBI NO: 11358845 NR Description: shock protein SRC2 homolog [imported] -
MECRPLDLTIISAEDLKDIQLIGKQDLYAVVSLNNDARTKQKTKVDKDCGTKPKWKHQMKLTVDDTAARENHLTLVIQIVADRPIAGDKPVGEVSVPLKELLDQNNKEGDVEEEKTVTYAVKLPNGKTKGSLKFSFKFGEKYTFGSSSDPHAPGSSSVDHKSTDQPVAAYPPGQGAPAAYPAPPGHDDKHGGVYGYPQAGGYPPPGGPGGYPPAGPGGYPPPGAYPQQGGYPPQQGGYPGYPPQGPGYGYPPQGPGYGYPPQGPYGYPQQQAYGGQPQKPKKHGGAGMGLGLGLGAGLLGGLLVGEAIDDMADMGDMGDF

SEQ ID NO: 56345 - protein, 262 aa, Glycine max
  peptide (1)..(262): Ceres Seq. ID no. 14304178
  misc_feature (81)..(219): Pfam Name: High molecular weight glutenin subunit Pfam Description: High molecular weight glutenin subunit
  misc_feature (1)..(261): Homolog of NCBI NO: 18390977 NR Description: C2 domain-containing protein [Arabidopsis
  misc_feature (1)..(261): Homolog of NCBI NO: 11358845 NR Description: shock protein SRC2 homolog [imported] -
MKLTVDDTAARENHLTLVIQIVADRPIAGDKPVGEVSVPLKELLDQNNKEGDVEEEKTVTYAVKLPNGKTKGSLKFSFKFGEKYTFGSSSDPHAPGSSSVDHKSTDQPVAAYPPGQGAPAAYPAPPGHDDKHGGVYGYPQAGGYPPPGGPGGYPPAGPGGYPPPGAYPQQGGYPPQQGGYPGYPPQGPGYGYPPQGPGYGYPPQGPYGYPQQQAYGGQPQKPKKHGGAGMGLGLGLGAGLLGGLLVGEAIDDMADMGDMGDF

SEQ ID NO: 56346 - DNA, 1150 bp, Glycine max
  misc_feature (1)..(1150): Ceres Seq. ID no. 14304202
acccaccaccgcgcctcagctcacgcatctctctcggctccggcaagcaagcaccagcgctctcctctcccctcgcttcctcgctgcaatgtcgaccgacgtggccgccgatgtcccggcccctgaggtggaggtggccgccgaccccgtcgtggagaccacggccgaggccgccgccggcgacgcgaagccggccaaggagaccaaggccaaggcggccaaggccaagaagccctccgccccgaggaagccccgcgccacccccgcccacccgacctacgccgagatggtgtcggaggccatcaccgccctgaaggagcggacggggtcgagccagtacgccatcgccaagttcgtcgaggacaagcacaaggcgcacctcccggccaacttccgcaagattctgtcggtgcagctcaagaagctggtcgcctccggcaagctgaccaaggtcaaggcctcgtacaagctgtcggccgccgcggccaagcccaagccggcggcgaagaagaagcccgcggcgaagaagaaggcgccagccaagaagaccgccaccaagaccaaggccaaggcgcccgccaagaaggccgccgcgaagcccaaggccaaggcgcccgccaagcccaaggccgccgcgaagcccaaggccgccgcgaagcccaaggccaaggccgccgcgaagcccaaggctgccgccaagcccaagggccgccccgccaaggctgccaagacctcggccaaggacgcgccagggaagaaggcccctgccgccgcggcgcccaagaaggccgccgccaggaagccgcccaccaagagatccacgccggtgaagaaggccgcgcccgccaagaaggctgcgccggcgaagaaggccccggccgccaagaaggccaagaagtagatccttggagggagatcctagggcttggcgatagttttccagtagcagtttttcctgttctgtgctgttagtcgagatgtccgggctgtgtcgggggtgctaggctgtaaatttgaaatctgggttggggtgcactggtgatcctgtgcacccctttgtgtgtgttgtgagaaacggtggcgacgatcgcgttgtagcaagcttatgtatttgtgtaactgaattgggtaattgaatcttcattttagc

SEQ ID NO: 56347 - protein, 299 aa, Glycine max
  peptide (1)..(299): Ceres Seq. ID no. 14304203
  misc_feature (89)..(159): Pfam Name: linker histone H1 and H5 family Pfam Description: linker histone H1 and H5 family
  misc_feature (30)..(273): Homolog of NCBI NO: 5230783 NR Description: histone H1 WH1A.2 [Triticum aestivum]
  misc_feature (30)..(297): Homolog of NCBI NO: 34897182 NR Description: histone-like protein [Oryza sativa (japonica
  misc_feature (30)..(273): Homolog of NCBI NO: 11558848 NR Description: histone H1 [Triticum aestivum]
  misc_feature (46)..(299): Homolog of NCBI NO: 5230781 NR Description: histone H1 WH1A.1 [Triticum aestivum]
  misc_feature (42)..(299): Homolog of NCBI NO: 5230783 NR Description: histone H1 WH1A.2 [Triticum aestivum]
  misc_feature (34)..(299): Homolog of NCBI NO: 14916992 NR Description: HISTONE H1
  misc_feature (46)..(299): Homolog of NCBI NO: 11558848 NR Description: histone H1 [Triticum aestivum]
  misc_feature (30)..(299): Homolog of NCBI NO: 7439660 NR Description: histone H1 (clone TH32) - wheat
  misc_feature (30)..(291): Homolog of NCBI NO: 7439656 NR Description: histone H1 (clone TH315) - wheat
  misc_feature (30)..(299): Homolog of NCBI NO: 5230785 NR Description: histone H1 WH1B.1 [Triticum aestivum]
PTTAPQLTHLSRLRQASTSALLSPRFLAAMSTDVAADVPAPEVEVAADPVVETTAEAAAGDAKPAKETKAKAAKAKKPSAPRKPRATPAHPTYAEMVSEAITALKERTGSSQYAIAKFVEDKHKAHLPANFRKILSVQLKKLVASGKLTKVKASYKLSAAAAKPKPAAKKKPAAKKKAPAKKTATKTKAKAPAKKAAAKPKAKAPAKPKAAAKPKAAAKPKAKAAAKPKAAAKPKGRPAKAAKTSAKDAPGKKAPAAAAPKKAAARKPPTKRSTPVKKAAPAKKAAPAKKAPAAKKAKK

SEQ ID NO: 56348 - protein, 270 aa, Glycine max
  peptide (1)..(270): Ceres Seq. ID no. 14304204
  misc_feature (60)..(130): Pfam Name: linker histone H1 and H5 family Pfam Description: linker histone H1 and H5 family
  misc_feature (1)..(244): Homolog of NCBI NO: 5230783 NR Description: histone H1 WH1A.2 [Triticum aestivum]
  misc_feature (1)..(268): Homolog of NCBI NO: 34897182 NR Description: histone-like protein [Oryza sativa (japonica
  misc_feature (1)..(244): Homolog of NCBI NO: 11558848 NR Description: histone H1 [Triticum aestivum]
  misc_feature (17)..(270): Homolog of NCBI NO: 5230781 NR Description: histone H1 WH1A.1 [Triticum aestivum]
  misc_feature (13)..(270): Homolog of NCBI NO: 5230783 NR Description: histone H1 WH1A.2 [Triticum aestivum]
  misc_feature (5)..(270): Homolog of NCBI NO: 14916992 NR Description: HISTONE H1
  misc_feature (17)..(270): Homolog of NCBI NO: 11558848 NR Description: histone H1 [Triticum aestivum]
  misc_feature (1)..(270): Homolog of NCBI NO: 7439660 NR Description: histone H1 (clone TH32) - wheat
  misc_feature (1)..(262): Homolog of NCBI NO: 7439656 NR Description: histone H1 (clone TH315) - wheat
  misc_feature (1)..(270): Homolog of NCBI NO: 5230785 NR Description: histone H1 WH1B.1 [Triticum aestivum]
MSTDVAADVPAPEVEVAADPVVETTAEAAAGDAKPAKETKAKAAKAKKPSAPRKPRATPAHPTYAEMVSEAITALKERTGSSQYAIAKFVEDKHKAHLPANFRKILSVQLKKLVASGKLTKVKASYKLSAAAAKPKPAAKKKPAAKKKAPAKKTATKTKAKAPAKKAAAKPKAKAPAKPKAAAKPKAAAKPKAKAAAKPKAAAKPKGRPAKAAKTSAKDAPGKKAPAAAAPKKAAARKPPTKRSTPVKKAAPAKKAAPAKKAPAAKKAKK

SEQ ID NO: 56349 - protein, 204 aa, Glycine max
  peptide (1)..(204): Ceres Seq. ID no. 14304205
  misc_feature (1)..(64): Pfam Name: linker histone H1 and H5 family Pfam Description: linker histone H1 and H5 family
  misc_feature (1)..(178): Homolog of NCBI NO: 5230783 NR Description: histone H1 WH1A.2 [Triticum aestivum]
  misc_feature (1)..(202): Homolog of NCBI NO: 34897182 NR Description: histone-like protein [Oryza sativa (japonica
  misc_feature (1)..(178): Homolog of NCBI NO: 11558848 NR Description: histone H1 [Triticum aestivum]
  misc_feature (1)..(204): Homolog of NCBI NO: 5230781 NR Description: histone H1 WH1A.1 [Triticum aestivum]
  misc_feature (1)..(204): Homolog of NCBI NO: 5230783 NR Description: histone H1 WH1A.2 [Triticum aestivum]
  misc_feature (1)..(204): Homolog of NCBI NO: 14916992 NR Description: HISTONE H1
  misc_feature (1)..(204): Homolog of NCBI NO: 11558848 NR Description: histone H1 [Triticum aestivum]
  misc_feature (1)..(204): Homolog of NCBI NO: 7439660 NR Description: histone H1 (clone TH32) - wheat
  misc_feature (1)..(196): Homolog of NCBI NO: 7439656 NR Description: histone H1 (clone TH315) - wheat
  misc_feature (1)..(204): Homolog of NCBI NO: 5230785 NR Description: histone H1 WH1B.1 [Triticum aestivum]
MVSEAITALKERTGSSQYAIAKFVEDKHKAHLPANFRKILSVQLKKLVASGKLTKVKASYKLSAAAAKPKPAAKKKPAAKKKAPAKKTATKTKAKAPAKKAAAKPKAKAPAKPKAAAKPKAAAKPKAKAAAKPKAAAKPKGRPAKAAKTSAKDAPGKKAPAAAAPKKAAARKPPTKRSTPVKKAAPAKKAAPAKKAPAAKKAKK

SEQ ID NO: 56350 - DNA, 1103 bp, Glycine max
  misc_feature (1)..(1103): Ceres Seq. ID no. 14304224
aaactgtaagcattaattttcgaaatgggaaaaaacgaaaaataacttttccaaattcatgacaaccgaatcacacaaaaactattttatatgctgtttttctgtttgaaggatcacacaaactagtaaccagaaaaatggcagaaacaaagttgagctccttcaaagacaaaagatggtcactccatggcatgacagctctagtgacaggaggcacacgaggcatagggtacgcaatagctgaagagttagcagaatttggggcagctgtgcatatttgtgcacgtaaacaacaagatattgataaatgtttagaagaatggaataagaaaggacttcccataacagggtcggcatgtgatgtactatctcgtgaccaacgtgaaaatttaatgaaaaatgttgcttcaatctttaacgggaagctcaacattctgataaacaatgctggaacaactacacctaagaatctcatagattatactgcagaagatgtaacgacaataatggaaactaattttgggtctagttaccacttatgtcaactagcacatccacttctaaaagcatctggatatgggagcatagtgtttatatcctccattgcaggtctgaaagctttgccttacagttctgtgtatgcatcctctaaaggagctatgaatcaattcactaagaacatagcattggaatgggcaaaggataatattcgcgcaaatgctgtggcaccggggactgttaagactgtacttctggattctatcatgaaagctgctgctgaagctgataaagccgttgagtatatagtgtctcaaacaccagttggtagacttggagatcccgaggacatatcaccactggttgttttcctttgccttccagctgcttcatacatcactggccagattattactgcggatgggggttacataatttaaagtgtaatgccaaaaataattataaaataaaataaatgcccaaaacataaatctcaagatcaactaggtttttaagaaggtccgaaactaatgattatctgtagttgttttaagtacaatatttcaagtgttataatgtttccaatgtgtgaagttctttttatc

SEQ ID NO: 56351 - protein, 266 aa, Glycine max
  peptide (1)..(266): Ceres Seq. ID no. 14304225
  misc_feature (2)..(266): Homolog of NCBI NO: 28393476 NR Description: putative tropinone reductase [Arabidopsis
  misc_feature (2)..(266): Homolog of NCBI NO: 15227060 NR Description: short-chain dehydrogenase/reductase family
  misc_feature (13)..(264): Homolog of NCBI NO: 1651197 NR Description: tropinone reductase-I [Hyoscyamus niger]
  misc_feature (12)..(264): Homolog of NCBI NO: 7619804 NR Description: putative tropinone reductase [Solanum tuberosum]
  misc_feature (1)..(264): Homolog of NCBI NO: 1717752 NR Description: Tropinone reductase-I (TR-I) (Tropine
  misc_feature (12)..(264): Homolog of NCBI NO: 13311189 NR Description: tropinone reductase I [Solanum tuberosum]
  misc_feature (11)..(266): Homolog of NCBI NO: 21536785 NR Description: short chain alcohol dehydrogenase-like
  misc_feature (11)..(266): Homolog of NCBI NO: 15239327 NR Description: short-chain dehydrogenase/reductase family
  misc_feature (8)..(266): Homolog of NCBI NO: 18138053 NR Description: tropinone reductase I [Calystegia sepium]
  misc_feature (11)..(266): Homolog of NCBI NO: 1717755 NR Description: TROPINONE REDUCTASE HOMOLOG (P29X)
MAETKLSSFKDKRWSLHGMTALVTGGTRGIGYAIAEELAEFGAAVHICARKQQDIDKCLEEWNKKGLPITGSACDVLSRDQRENLMKNVASIFNGKLNILINNAGTTTPKNLIDYTAEDVTTIMETNFGSSYHLCQLAHPLLKASGYGSIVFISSIAGLKALPYSSVYASSKGAMNQFTKNIALEWAKDNIRANAVAPGTVKTVLLDSIMKAAAEADKAVEYIVSQTPVGRLGDPEDISPLVVFLCLPAASYITGQIITADGGYII

SEQ ID NO: 56352 - protein, 248 aa, Glycine max
  peptide (1)..(248): Ceres Seq. ID no. 14304226
  misc_feature (1)..(248): Homolog of NCBI NO: 28393476 NR Description: putative tropinone reductase [Arabidopsis
  misc_feature (1)..(248): Homolog of NCBI NO: 15227060 NR Description: short-chain dehydrogenase/reductase family
  misc_feature (1)..(246): Homolog of NCBI NO: 1651197 NR Description: tropinone reductase-I [Hyoscyamus niger]
  misc_feature (1)..(246): Homolog of NCBI NO: 7619804 NR Description: putative tropinone reductase [Solanum tuberosum]
  misc_feature (1)..(246): Homolog of NCBI NO: 1717752 NR Description: Tropinone reductase-I (TR-I) (Tropine
  misc_feature (1)..(246): Homolog of NCBI NO: 13311189 NR Description: tropinone reductase I [Solanum tuberosum]
  misc_feature (1)..(248): Homolog of NCBI NO: 21536785 NR Description: short chain alcohol dehydrogenase-like
  misc_feature (1)..(248): Homolog of NCBI NO: 15239327 NR Description: short-chain dehydrogenase/reductase family
  misc_feature (1)..(248): Homolog of NCBI NO: 18138053 NR Description: tropinone reductase I [Calystegia sepium]
  misc_feature (1)..(248): Homolog of NCBI NO: 1717755 NR Description: TROPINONE REDUCTASE HOMOLOG (P29X)
MTALVTGGTRGIGYAIAEELAEFGAAVHICARKQQDIDKCLEEWNKKGLPITGSACDVLSRDQRENLMKNVASIFNGKLNILINNAGTTTPKNLIDYTAEDVTTIMETNFGSSYHLCQLAHPLLKASGYGSIVFISSIAGLKALPYSSVYASSKGAMNQFTKNIALEWAKDNIRANAVAPGTVKTVLLDSIMKAAAEADKAVEYIVSQTPVGRLGDPEDISPLVVFLCLPAASYITGQIITADGGYII

SEQ ID NO: 56353 - protein, 181 aa, Glycine max
  peptide (1)..(181): Ceres Seq. ID no. 14304227
  misc_feature (1)..(181): Homolog of NCBI NO: 28393476 NR Description: putative tropinone reductase [Arabidopsis
  misc_feature (1)..(181): Homolog of NCBI NO: 15227060 NR Description: short-chain dehydrogenase/reductase family
  misc_feature (1)..(179): Homolog of NCBI NO: 1651197 NR Description: tropinone reductase-I [Hyoscyamus niger]
  misc_feature (1)..(179): Homolog of NCBI NO: 7619804 NR Description: putative tropinone reductase [Solanum tuberosum]
  misc_feature (1)..(179): Homolog of NCBI NO: 1717752 NR Description: Tropinone reductase-I (TR-I) (Tropine
  misc_feature (1)..(179): Homolog of NCBI NO: 13311189 NR Description: tropinone reductase I [Solanum tuberosum]
  misc_feature (1)..(181): Homolog of NCBI NO: 21536785 NR Description: short chain alcohol dehydrogenase-like
  misc_feature (1)..(181): Homolog of NCBI NO: 15239327 NR Description: short-chain dehydrogenase/reductase family
  misc_feature (1)..(181): Homolog of NCBI NO: 18138053 NR Description: tropinone reductase I [Calystegia sepium]
  misc_feature (1)..(181): Homolog of NCBI NO: 1717755 NR Description: TROPINONE REDUCTASE HOMOLOG (P29X)
MKNVASIFNGKLNILINNAGTTTPKNLIDYTAEDVTTIMETNFGSSYHLCQLAHPLLKASGYGSIVFISSIAGLKALPYSSVYASSKGAMNQFTKNIALEWAKDNIRANAVAPGTVKTVLLDSIMKAAAEADKAVEYIVSQTPVGRLGDPEDISPLVVFLCLPAASYITGQIITADGGYII

SEQ ID NO: 56354 - DNA, 949 bp, Glycine max
  misc_feature (1)..(949): Ceres Seq. ID no. 15168856
gtcttgttttgcccgtgacgcacactgttcttgctttccccagatttcaatttccctttagcacctcaaatttcttcccttttcctttctgggtctccatctactgttttttttttgggtcaaatacgaagatgggtgttcatccttagccattgagaatctaatctaagatttggagagaaagatgaaggatttcccagggacaccgggcactgtccttggtttggctctaaggatatcacagttcgtttttgctgctggatcaattgcttccatggctaccactcccagtttctttaactttacagctttttgttacttgatagcttcaatgggtttacaagtcatttggagttttgtgcttgctttattggatgcatatgccttggtgaaaaaaaaggtcctccacaacgccgtactggttagcctctttgtagttggagattgggtaacagcaacactatctctagccgcagcgtcttcctcggctggcatcacggttttgtacttcaatgatctgggacactgccattttggagaggaatgccaaaagtacctgatttcagtagcattagcgttcttgagctggttcccgatttcaatatcatccctaattatgctctggctattagctgcagggtagcagtctctacattccgcccgagttctctcatctatcacatgttcatcttattggaaaagttcttagaaagtgtcaataggaaaggaagtagagtagaggtttacacatttaaatcgattccttcatttctaccagaaatgggacagtagcagattgtaaaaagtaaaaatatatacatgattttgccttgcaaagaaattaggctaccgaactgttatcctgatttcctgatcctgtgactagaaggtcaaaactttatgtttacagggaattgggttgctaatgcatgtttgcttgtttacaatt

SEQ ID NO: 56355 - protein, 152 aa, Glycine max
  peptide (1)..(152): Ceres Seq. ID no. 15168857
  misc_feature (6)..(135): Pfam Name: Domain of unknown function (DUF588) Pfam Description: Domain of unknown function (DUF588)
  misc_feature (1)..(149): Homolog of NCBI NO: 22330130 NR Description: hypothetical protein [Arabidopsis thaliana]
  misc_feature (8)..(138): Homolog of NCBI NO: 26006486 NR Description: Unknown protein [Oryza sativa (japonica
  misc_feature (38)..(151): Homolog of NCBI NO: 11357817 NR Description: hypothetical protein F5K20.150 - Arabidopsis
  misc_feature (1)..(88): Homolog of NCBI NO: 7939530 NR Description: gb|AAD20689.1~gene_id:K14B15.11~similar to
  misc_feature (1)..(150): Homolog of NCBI NO: 30687069 NR Description: expressed protein [Arabidopsis thaliana]
  misc_feature (1)..(150): Homolog of NCBI NO: 25408537 NR Description: hypothetical protein At2g37200 [imported] -
  misc_feature (1)..(151): Homolog of NCBI NO: 18401722 NR Description: expressed protein [Arabidopsis thaliana]
  misc_feature (1)..(149): Homolog of NCBI NO: 15241672 NR Description: hypothetical protein [Arabidopsis thaliana]
  misc_feature (1)..(151): Homolog of NCBI NO: 18409932 NR Description: expressed protein [Arabidopsis thaliana]
  misc_feature (1)..(151): Homolog of NCBI NO: 30686969 NR Description: expressed protein [Arabidopsis thaliana]
MKDFPGTPGTVLGLALRISQFVFAAGSIASMATTPSFFNFTAFCYLIASMGLQVIWSFVLALLDAYALVKKKVLHNAVLVSLFVVGDWVTATLSLAAASSSAGITVLYFNDLGHCHFGEECQKYLISVALAFLSWFPISISSLIMLWLLAAG

SEQ ID NO: 56356 - protein, 122 aa, Glycine max
  peptide (1)..(122): Ceres Seq. ID no. 15168858
  misc_feature (1)..(105): Pfam Name: Domain of unknown function (DUF588) Pfam Description: Domain of unknown function (DUF588)
  misc_feature (1)..(119): Homolog of NCBI NO: 22330130 NR Description: hypothetical protein [Arabidopsis thaliana]
  misc_feature (1)..(108): Homolog of NCBI NO: 26006486 NR Description: Unknown protein [Oryza sativa (japonica
  misc_feature (8)..(121): Homolog of NCBI NO: 11357817 NR Description: hypothetical protein F5K20.150 - Arabidopsis
  misc_feature (1)..(58): Homolog of NCBI NO: 7939530 NR Description: gb|AAD20689.1~gene_id:K14B15.11~similar to
  misc_feature (1)..(120): Homolog of NCBI NO: 30687069 NR Description: expressed protein [Arabidopsis thaliana]
  misc_feature (1)..(120): Homolog of NCBI NO: 25408537 NR Description: hypothetical protein At2g37200 [imported] -
  misc_feature (1)..(121): Homolog of NCBI NO: 18401722 NR Description: expressed protein [Arabidopsis thaliana]
  misc_feature (1)..(119): Homolog of NCBI NO: 15241672 NR Description: hypothetical protein [Arabidopsis thaliana]
  misc_feature (1)..(121): Homolog of NCBI NO: 18409932 NR Description: expressed protein [Arabidopsis thaliana]
  misc_feature (1)..(121): Homolog of NCBI NO: 30686969 NR Description: expressed protein [Arabidopsis thaliana]
MATTPSFFNFTAFCYLIASMGLQVIWSFVLALLDAYALVKKKVLHNAVLVSLFVVGDWVTATLSLAAASSSAGITVLYFNDLGHCHFGEECQKYLISVALAFLSWFPISISSLIMLWLLAAG

SEQ ID NO: 56357 - protein, 103 aa, Glycine max
  peptide (1)..(103): Ceres Seq. ID no. 15168859
  misc_feature (1)..(86): Pfam Name: Domain of unknown function (DUF588) Pfam Description: Domain of unknown function (DUF588)
  misc_feature (1)..(100): Homolog of NCBI NO: 22330130 NR Description: hypothetical protein [Arabidopsis thaliana]
  misc_feature (1)..(89): Homolog of NCBI NO: 26006486 NR Description: Unknown protein [Oryza sativa (japonica
  misc_feature (1)..(102): Homolog of NCBI NO: 11357817 NR Description: hypothetical protein F5K20.150 - Arabidopsis
  misc_feature (1)..(39): Homolog of NCBI NO: 7939530 NR Description: gb|AAD20689.1~gene_id:K14B15.11~similar to
  misc_feature (1)..(101): Homolog of NCBI NO: 30687069 NR Description: expressed protein [Arabidopsis thaliana]
  misc_feature (1)..(101): Homolog of NCBI NO: 25408537 NR Description: hypothetical protein At2g37200 [imported] -
  misc_feature (1)..(102): Homolog of NCBI NO: 18401722 NR Description: expressed protein [Arabidopsis thaliana]
  misc_feature (1)..(100): Homolog of NCBI NO: 15241672 NR Description: hypothetical protein [Arabidopsis thaliana]
  misc_feature (1)..(102): Homolog of NCBI NO: 18409932 NR Description: expressed protein [Arabidopsis thaliana]
  misc_feature (1)..(102): Homolog of NCBI NO: 30686969 NR Description: expressed protein [Arabidopsis thaliana]
MGLQVIWSFVLALLDAYALVKKKVLHNAVLVSLFVVGDWVTATLSLAAASSSAGITVLYFNDLGHCHFGEECQKYLISVALAFLSWFPISISSLIMLWLLAAG

SEQ ID NO: 56358 - DNA, 813 bp, Glycine max
  misc_feature (1)..(813): Ceres Seq. ID no. 14304228
cctaaaaaatgtcccgattgctgtcgaaaaccctaattccccacgggagattcttcctccgtcgcttcaacgacgcggcttcgaagaaaacggcggcgccgagcctcgtctgtttcaaccgccgtccctattcatcgaaacctcatctgatcgagatcgacctggactcttcctcgtcagcgacttccaaggccgaagccgaagccgcggttctcaagaagctgaacgagttcgtacggaggatcgtcgttcagaactcgactcccgattggctccctttctccccaggatcctccttctgggtccctccgcaccaaaacaccgccgccaagatcgctaatttggtcgaccaggtgacgcatcctttgacggaggaggaggttctctccctgtcttctccttctggctggccttgctcctctttcttcactcctcctccagatgatgattcttcatctaaacaaagggtggaaggtagcacggagttgaacgttccggggaatgagatgctggaagtcaagctagcgcagtttcccgatccaatctacttgttggaacacggagatgatgatgagtgattttacatttccagctcacgtggaaggccagtcctgatgcatggtttgcgttgacaggctttggagaaaaaaagacagatgattctcgagactgatgaggttgtgtttgtatatacagttgcaagccgtggaattatatcgatgttttggctgtcttaacgctgtttgtgaactataaattatacagcttgatattaattaattaaaaccgtagcagacggtgcaacttcagatt

SEQ ID NO: 56359 - protein, 189 aa, Glycine max
  peptide (1)..(189): Ceres Seq. ID no. 14304229
  misc_feature (1)..(140): Homolog of NCBI NO: 38346553 NR Description: OSJNBa0035M09.14 [Oryza sativa (japonica
  misc_feature (68)..(140): Homolog of NCBI NO: 25364101 NR Description: hypothetical protein F9K20.6 [imported] -
  misc_feature (68)..(140): Homolog of NCBI NO: 21592720 NR Description: unknown [Arabidopsis thaliana]
  misc_feature (68)..(140): Homolog of NCBI NO: 18412160 NR Description: expressed protein [Arabidopsis thaliana]
  misc_feature (1)..(140): Homolog of NCBI NO: 30685027 NR Description: expressed protein [Arabidopsis thaliana]
  misc_feature (1)..(140): Homolog of NCBI NO: 18394407 NR Description: expressed protein [Arabidopsis thaliana]
  misc_feature (115)..(159): Homolog of NCBI NO: 38175698 NR Description: unknown protein [Oryza sativa (japonica
  misc_feature (1)..(116): Homolog of NCBI NO: 38175698 NR Description: unknown protein [Oryza sativa (japonica
  misc_feature (28)..(189): Homolog of NCBI NO: 14423398 NR Description: Unknown protein [Arabidopsis thaliana]
  misc_feature (1)..(189): Homolog of NCBI NO: 18398961 NR Description: expressed protein [Arabidopsis thaliana]
MSRLLSKTLIPHGRFFLRRFNDAASKKTAAPSLVCFNRRPYSSKPHLIEIDLDSSSSATSKAEAEAAVLKKLNEFVRRIVVQNSTPDWLPFSPGSSFWVPPHQNTAAKIANLVDQVTHPLTEEEVLSLSSPSGWPCSSFFTPPPDDDSSSKQRVEGSTELNVPGNEMLEVKLAQFPDPIYLLEHGDDDE

SEQ ID NO: 56360 - protein, 112 aa, Glycine max
  peptide (1)..(112): Ceres Seq. ID no. 14304230
LKNVPIAVENPNSPREILPPSLQRRGFEENGGAEPRLFQPPSLFIETSSDRDRPGLFLVSDFQGRSRSRGSQEAERVRTEDRRSELDSRLAPFLPRILLLGPSAPKHRRQDR

SEQ ID NO: 56361 - DNA, 1013 bp, Glycine max
  misc_feature (1)..(1013): Ceres Seq. ID no. 14306812
aatcccaatccaaatctcatcgccaagcaatcatcactctagccctttgccctccccacccgcagcagcatggcgagcccgcagtgctgcgcgaacccaccggcgctcaaccccgccgccggcgagggcaaggtcgtggacagcttcggcgggatcaaggcgtacgtcgccggcgcccaggactccaaggccgccgtcgtcctcatctccgacgtctacggttttgaagcgccgaatctgaggaagatagccgataaagttgcttcgtctggatattttgttgtcgtgccagatttcttacatggggatccatttgtacctgaaaacgctgaccgaccaatagcagtgtggataaaggagcataccccgggaaaagcatttgaagaggcaaaacctgttattgctgctctaaaggaacaaggagcgtctagtgttggggctgcaggttattgctggggtgcaaaggtagttgcagagctagggaaagctaatgagatccaggcagctgttatgtcgcacccttcatttgttactgttgatgatataaaagaggtgaaatgccccatctctatacttggagctgaaaccgacgtaatgtccccaccagaattggtcaaggagttcgagcaggttctatcctctaactcacggattgctcactttgtcaagatcttccctggggtttctcatggatggaccgtgagatacaaaagcgaagacgcagctgctgtgaagagcgcctaggaagccctggcggacatggttgactggtttaacaagaacctcaagtaaacctaatgaattagcggccatccttttgtaataagccagtgtcactcttcaggagtcatcacgcgagcacccacggtttatgttatggtcttagctatatagcctatagcgcatgcatctttgtctgccgcaggtctgctggtatgtgtgtgattgctcgtatcggggtctgcttgtgctgaacattgaactactgcactcaaataaaatgtggtatttac

SEQ ID NO: 56362 - protein, 224 aa, Glycine max
  peptide (1)..(224): Ceres Seq. ID no. 14306813
  misc_feature (29)..(224): Pfam Name: Dienelactone hydrolase family Pfam Description: Dienelactone hydrolase family
  misc_feature (29)..(224): Homolog of NCBI NO: 20270371 NR Description: hypothetical protein BC001573 [Homo sapiens]
  misc_feature (1)..(224): Homolog of NCBI NO: 6319267 NR Description: Hypothetical ORF; Yal049cp [Saccharomyces
  misc_feature (70)..(224): Homolog of NCBI NO: 40253308 NR Description: Endo-1,3;1,4-beta-D-glucanase precursor-like
  misc_feature (1)..(195): Homolog of NCBI NO: 8928122 NR Description: Endo-1,3;1,4-beta-D-glucanase precursor
  misc_feature (44)..(224): Homolog of NCBI NO: 9294513 NR Description: contains similarity to
  misc_feature (1)..(224): Homolog of NCBI NO: 40253306 NR Description: putative Endo-1,3;1,4-beta-D-glucanase precursor
  misc_feature (1)..(224): Homolog of NCBI NO: 40253303 NR Description: putative Endo-1,3;1,4-beta-D-glucanase precursor
  misc_feature (1)..(224): Homolog of NCBI NO: 24899687 NR Description: Unknown protein [Arabidopsis thaliana]
  misc_feature (1)..(224): Homolog of NCBI NO: 18403812 NR Description: expressed protein [Arabidopsis thaliana]
  misc_feature (1)..(224): Homolog of NCBI NO: 18403820 NR Description: expressed protein [Arabidopsis thaliana]
MASPQCCANPPALNPAAGEGKVVDSFGGIKAYVAGAQDSKAAVVLISDVYGFEAPNLRKIADKVASSGYFVVVPDFLHGDPFVPENADRPIAVWIKEHTPGKAFEEAKPVIAALKEQGASSVGAAGYCWGAKVVAELGKANEIQAAVMSHPSFVTVDDIKEVKCPISILGAETDVMSPPELVKEFEQVLSSNSRIAHFVKIFPGVSHGWTVRYKSEDAAAVKSA

SEQ ID NO: 56363 - DNA, 1396 bp, Glycine max
  misc_feature (1)..(1396): Ceres Seq. ID no. 15176057
gctttcttaccttccattctttcattctctctcttgcattacagcgacactgttcaaatctcttttctttctaaaaattaaaagcaaagaatttacgtaagagactgagattgagtgagtgaatggagtttagtaacctcactctggagatcttctccaaactggagcaaaaatggctctcacattgtaaagccaccaacaaaactcgcattctcagcattgacggcggaggaaccaccgccattgtcgccggcgaagctctcatctacctcgaggatcagatccgtgttcacacctccgatcctcacgctcaggtagccgatttcttcgacatcgtcgccggcaccggcattggcgccatccttgccgccatgatcaccgccggcgacgcctttggtaggccgctctacaccgccagggaagccgtccgtctcgtctcggaaagaaactctgaactctacaagctcaaatccggcggaatcttccgccggcgccggagattctcctccaggagcatggacaacgcgttgaagcaagtgttccagagaaaggaggaggacggacggttgttgaccttgaaggacacgtgtaaaccgctccttattccttgcttcgacctcaagagttccgcgccgttcgtgttttcgcgcgccgacgcgtccgagtctccgagcttcgacttcgagctctggaaggtgtgccgtgccacgtcagcgacgccgagccacttcaagccgttcgacttcgcttccgtcgacggcaagacctcgtgctccgccgtcgacggcggcctagtcatgaacaaccctactgcagcggccgtcacgcacgtcctccataacaagcgcgatttcccgtcggtgaacggcgtggaggatctgctcgtcctttccttggggaacggatcgtcgaacgcaaaagcgtgcgagactcgcacgtgctcaacgccgtcggtggttgacattgtgctcgacggtgtttccgagaccattgaccagatgttagggaacgccttctgctggaaccgtacggactacgtcagaatccaggctttcggtttggaaagtgaagcaatgaagaaggaagaggttctcaaagagaggggactcgagtcgttaccgtttggcgggaagcggttactgacagagactaacggaaacagaatagatagcttcgtgcaacgtcttgttgctaccggaaaaccaagcccgccgtcaagtccctgcaaggattccgccgtcaaccctctcgctaacggtcgctagtttttttattttacttaatattttagcttcttttttttttttttagattttaacggtgtaaagtgtaactagtgtttttacctagttatgccagctgtcgtagttaatagcatttaataatttaccactgc

SEQ ID NO: 56364 - protein, 380 aa, Glycine max
  peptide (1)..(380): Ceres Seq. ID no. 15176058
  misc_feature (31)..(234): Pfam Name: Patatin-like phospholipase Pfam Description: Patatin-like phospholipase
  misc_feature (30)..(309): Homolog of NCBI NO: 7486230 NR Description: hypothetical protein F27B13.40 - Arabidopsis
  misc_feature (30)..(312): Homolog of NCBI NO: 30688454 NR Description: patatin-related [Arabidopsis thaliana]
  misc_feature (321)..(356): Homolog of NCBI NO: 34897124 NR Description: putative lipid acyl hydrolase [Oryza sativa]
  misc_feature (27)..(312): Homolog of NCBI NO: 34897124 NR Description: putative lipid acyl hydrolase [Oryza sativa]
  misc_feature (321)..(356): Homolog of NCBI NO: 15233136 NR Description: patatin-related [Arabidopsis thaliana]
  misc_feature (27)..(312): Homolog of NCBI NO: 15233136 NR Description: patatin-related [Arabidopsis thaliana]
  misc_feature (321)..(356): Homolog of NCBI NO: 15225054 NR Description: patatin family [Arabidopsis thaliana]
  misc_feature (27)..(312): Homolog of NCBI NO: 15225054 NR Description: patatin family [Arabidopsis thaliana]
  misc_feature (1)..(380): Homolog of NCBI NO: 18412659 NR Description: patatin-related [Arabidopsis thaliana]
  misc_feature (1)..(380): Homolog of NCBI NO: 11357489 NR Description: hypothetical protein F16M2.50 - Arabidopsis
MEFSNLTLEIFSKLEQKWLSHCKATNKTRILSIDGGGTTAIVAGEALIYLEDQIRVHTSDPHAQVADFFDIVAGTGIGAILAAMITAGDAFGRPLYTAREAVRLVSERNSELYKLKSGGIFRRRRRFSSRSMDNALKQVFQRKEEDGRLLTLKDTCKPLLIPCFDLKSSAPFVFSRADASESPSFDFELWKVCRATSATPSHFKPFDFASVDGKTSCSAVDGGLVMNNPTAAAVTHVLHNKRDFPSVNGVEDLLVLSLGNGSSNAKACETRTCSTPSVVDIVLDGVSETIDQMLGNAFCWNRTDYVRIQAFGLESEAMKKEEVLKERGLESLPFGGKRLLTETNGNRIDSFVQRLVATGKPSPPSSPCKDSAVNPLANGR

SEQ ID NO: 56365 - protein, 297 aa, Glycine max
  peptide (1)..(297): Ceres Seq. ID no. 15176059
  misc_feature (1)..(151): Pfam Name: Patatin-like phospholipase Pfam Description: Patatin-like phospholipase
  misc_feature (1)..(226): Homolog of NCBI NO: 7486230 NR Description: hypothetical protein F27B13.40 - Arabidopsis
  misc_feature (1)..(229): Homolog of NCBI NO: 30688454 NR Description: patatin-related [Arabidopsis thaliana]
  misc_feature (238)..(273): Homolog of NCBI NO: 34897124 NR Description: putative lipid acyl hydrolase [Oryza sativa]
  misc_feature (1)..(229): Homolog of NCBI NO: 34897124 NR Description: putative lipid acyl hydrolase [Oryza sativa]
  misc_feature (238)..(273): Homolog of NCBI NO: 15233136 NR Description: patatin-related [Arabidopsis thaliana]
  misc_feature (1)..(229): Homolog of NCBI NO: 15233136 NR Description: patatin-related [Arabidopsis thaliana]
  misc_feature (238)..(273): Homolog of NCBI NO: 15225054 NR Description: patatin family [Arabidopsis thaliana]
  misc_feature (1)..(229): Homolog of NCBI NO: 15225054 NR Description: patatin family [Arabidopsis thaliana]
  misc_feature (1)..(297): Homolog of NCBI NO: 18412659 NR Description: patatin-related [Arabidopsis thaliana]
  misc_feature (1)..(297): Homolog of NCBI NO: 11357489 NR Description: hypothetical protein F16M2.50 - Arabidopsis
MITAGDAFGRPLYTAREAVRLVSERNSELYKLKSGGIFRRRRRFSSRSMDNALKQVFQRKEEDGRLLTLKDTCKPLLIPCFDLKSSAPFVFSRADASESPSFDFELWKVCRATSATPSHFKPFDFASVDGKTSCSAVDGGLVMNNPTAAAVTHVLHNKRDFPSVNGVEDLLVLSLGNGSSNAKACETRTCSTPSVVDIVLDGVSETIDQMLGNAFCWNRTDYVRIQAFGLESEAMKKEEVLKERGLESLPFGGKRLLTETNGNRIDSFVQRLVATGKPSPPSSPCKDSAVNPLANGR

SEQ ID NO: 56366 - protein, 249 aa, Glycine max
  peptide (1)..(249): Ceres Seq. ID no. 15176060
  misc_feature (1)..(103): Pfam Name: Patatin-like phospholipase Pfam Description: Patatin-like phospholipase
  misc_feature (1)..(178): Homolog of NCBI NO: 7486230 NR Description: hypothetical protein F27B13.40 - Arabidopsis
  misc_feature (1)..(181): Homolog of NCBI NO: 30688454 NR Description: patatin-related [Arabidopsis thaliana]
  misc_feature (190)..(225): Homolog of NCBI NO: 34897124 NR Description: putative lipid acyl hydrolase [Oryza sativa]
  misc_feature (1)..(181): Homolog of NCBI NO: 34897124 NR Description: putative lipid acyl hydrolase [Oryza sativa]
  misc_feature (190)..(225): Homolog of NCBI NO: 15233136 NR Description: patatin-related [Arabidopsis thaliana]
  misc_feature (1)..(181): Homolog of NCBI NO: 15233136 NR Description: patatin-related [Arabidopsis thaliana]
  misc_feature (190)..(225): Homolog of NCBI NO: 15225054 NR Description: patatin family [Arabidopsis thaliana]
  misc_feature (1)..(181): Homolog of NCBI NO: 15225054 NR Description: patatin family [Arabidopsis thaliana]
  misc_feature (1)..(249): Homolog of NCBI NO: 18412659 NR Description: patatin-related [Arabidopsis thaliana]
  misc_feature (1)..(249): Homolog of NCBI NO: 11357489 NR Description: hypothetical protein F16M2.50 - Arabidopsis
MDNALKQVFQRKEEDGRLLTLKDTCKPLLIPCFDLKSSAPFVFSRADASESPSFDFELWKVCRATSATPSHFKPFDFASVDGKTSCSAVDGGLVMNNPTAAAVTHVLHNKRDFPSVNGVEDLLVLSLGNGSSNAKACETRTCSTPSVVDIVLDGVSETIDQMLGNAFCWNRTDYVRIQAFGLESEAMKKEEVLKERGLESLPFGGKRLLTETNGNRIDSFVQRLVATGKPSPPSSPCKDSAVNPLANGR

SEQ ID NO: 56367 - DNA, 774 bp, Glycine max
  misc_feature (1)..(774): Ceres Seq. ID no. 14304167
acataatgcgttctaaatttaattccagtagacccatgcacaccagaacacttccttctgcggcgggttgcttcctcctcttacgagcctttccattcactccatcgattcggtgggtgcgggtgctgcgaaaccgagctagaccctgatcggtgtcggcacaccgccggagaacaagatgatcgtctgcgtcgccgtcgtcggtcaccagaacaatccgctgtacattcagagcttcacggaggccgacgatgctcttaagctccaccacatcgtccattgctcgctcgatgtggtcgacgagcgagtgaacaatcctaaaaagtctggaccgatgcttaatgagacgtttttgggactgctttatcctattgaaaactacaaagtatatggatatctgactaatacgaaggtgaaatttatcttggtgaccacggatctggatgttaaagatgcggatgtaaggaattttttcaggaggttccattctgcatatgtagatgccgtttcaaacccattccatgtaccaggcaaaaagataacctccagaacttttgcagaaagagtgagcacaattgtcaagtcatttggcttgagttctgctgggtgaacatctataactggtgcctagtatgatgatgcttggttgatatttggcacaacttttcttttgttattctaagctcctgccttgtagttttagcagtggtaaatgcttaggaacattttgaacagaatcctattttcaatatatcatattcaaattgaaccatc

SEQ ID NO: 56368 - protein, 143 aa, Glycine max
  peptide (1)..(143): Ceres Seq. ID no. 14304168
  misc_feature (1)..(136): Homolog of NCBI NO: 31247934 NR Description: ENSANGP00000010040 [Anopheles gambiae]
  misc_feature (1)..(134): Homolog of NCBI NO: 7706429 NR Description: unknown [Homo sapiens]
  misc_feature (3)..(134): Homolog of NCBI NO: 34851319 NR Description: similar to hypothetical protein, 2-6 [Rattus
  misc_feature (1)..(134): Homolog of NCBI NO: 10946914 NR Description: hypothetical protein, 2-6 [Mus musculus]
  misc_feature (1)..(134): Homolog of NCBI NO: 27659496 NR Description: similar to hypothetical protein, 2-6
  misc_feature (1)..(134): Homolog of NCBI NO: 6841572 NR Description: HSPC176 [Homo sapiens]
  misc_feature (1)..(116): Homolog of NCBI NO: 25338945 NR Description: hypothetical protein At2g20930 [imported] -
  misc_feature (1)..(139): Homolog of NCBI NO: 32526668 NR Description: hypothetical protein [Oryza sativa (japonica
  misc_feature (1)..(140): Homolog of NCBI NO: 21555278 NR Description: unknown [Arabidopsis thaliana]
  misc_feature (1)..(140): Homolog of NCBI NO: 18399520 NR Description: expressed protein [Arabidopsis thaliana]
MIVCVAVVGHQNNPLYIQSFTEADDALKLHHIVHCSLDVVDERVNNPKKSGPMLNETFLGLLYPIENYKVYGYLTNTKVKFILVTTDLDVKDADVRNFFRRFHSAYVDAVSNPFHVPGKKITSRTFAERVSTIVKSFGLSSAG

SEQ ID NO: 56369 - protein, 91 aa, Glycine max
  peptide (1)..(91): Ceres Seq. ID no. 14304169
  misc_feature (1)..(84): Homolog of NCBI NO: 31247934 NR Description: ENSANGP00000010040 [Anopheles gambiae]
  misc_feature (1)..(82): Homolog of NCBI NO: 7706429 NR Description: unknown [Homo sapiens]
  misc_feature (1)..(82): Homolog of NCBI NO: 34851319 NR Description: similar to hypothetical protein, 2-6 [Rattus
  misc_feature (1)..(82): Homolog of NCBI NO: 10946914 NR Description: hypothetical protein, 2-6 [Mus musculus]
  misc_feature (1)..(82): Homolog of NCBI NO: 27659496 NR Description: similar to hypothetical protein, 2-6
  misc_feature (1)..(82): Homolog of NCBI NO: 6841572 NR Description: HSPC176 [Homo sapiens]
  misc_feature (1)..(64): Homolog of NCBI NO: 25338945 NR Description: hypothetical protein At2g20930 [imported] -
  misc_feature (1)..(87): Homolog of NCBI NO: 32526668 NR Description: hypothetical protein [Oryza sativa (japonica
  misc_feature (1)..(88): Homolog of NCBI NO: 21555278 NR Description: unknown [Arabidopsis thaliana]
  misc_feature (1)..(88): Homolog of NCBI NO: 18399520 NR Description: expressed protein [Arabidopsis thaliana]
MLNETFLGLLYPIENYKVYGYLTNTKVKFILVTTDLDVKDADVRNFFRRFHSAYVDAVSNPFHVPGKKITSRTFAERVSTIVKSFGLSSAG

SEQ ID NO: 56370 - DNA, 818 bp, Glycine max
  misc_feature (1)..(818): Ceres Seq. ID no. 14306814
ctagattagagttgatctcggctggtgatttcactagtccgcgcaggtgccaagcccggattgggcccgctgctcccctctcgtctcccgtcgtcggaccaccggcgacccctcttccaagccgccatcgtcctcacctccggcacttcctcttctccaccactcgacccagctcagcagcagggcggcggacgggaggatgatggggagcaacaaccccggcggcgctgggggagggggagggatggccccgggcacgggggccggcggcagcgacgggcggcacgacgacgaggccgtgctcaccgagttcctctcctccctcatggactacaatcccacgatcccggacgagctcgtggagcactacctcggccgaagcggcttccactgccccgacctacgcctaacaaggctggttgctgtagctgctcaaaagttcatttcagacattgcaagtgactctcttcagcactgcaaagccagggttgcagcacctgtcaaagataacaagagcaaacaaccaaaggatagacgtcttgtattgacaatggatgatctttcaaaagccttgcgtgagcatggtgttaatctgaaacatccagagtattttgcggacagcccatcagcagggatggccccctcaacaagagaggagtagaatcgattgcttcttcaacaagagagggctagaatcaattgtttcttataagcgtacccagtgaacggtcgtgtccttcccaactttatgtaacaaaaccttataagcatgtatcgaatgtcagttcttgatgtattatggacccgtagttgccttc

SEQ ID NO: 56371 - protein, 153 aa, Glycine max
  peptide (1)..(153): Ceres Seq. ID no. 14306815
  misc_feature (47)..(96): Pfam Name: Transcription initiation factor TFIID 23-30kDa subunit Pfam Description: Transcription initiation factor TFIID 23-30kDa
  misc_feature (7)..(138): Homolog of NCBI NO: 20863106 NR Description: similar to Transcription initiation factor TFIID
  misc_feature (1)..(137): Homolog of NCBI NO: 17137648 NR Description: TBP-associated factor 10b CG3069-PA [Drosophila
  misc_feature (1)..(138): Homolog of NCBI NO: 5454106 NR Description: TBP-related factor 10
  misc_feature (3)..(138): Homolog of NCBI NO: 34859827 NR Description: similar to Ilk protein [Rattus norvegicus]
  misc_feature (3)..(138): Homolog of NCBI NO: 21619259 NR Description: Ilk protein [Mus musculus]
  misc_feature (3)..(138): Homolog of NCBI NO: 26338586 NR Description: unnamed protein product [Mus musculus]
  misc_feature (3)..(138): Homolog of NCBI NO: 9910576 NR Description: TAF10 RNA polymerase II, TATA box binding protein
  misc_feature (1)..(138): Homolog of NCBI NO: 2136293 NR Description: transcription factor IID 30k chain - human
  misc_feature (21)..(153): Homolog of NCBI NO: 26450720 NR Description: putative transcription factor II [Arabidopsis
  misc_feature (21)..(153): Homolog of NCBI NO: 15236059 NR Description: Transcription factor II homolog [Arabidopsis
MMGSNNPGGAGGGGGMAPGTGAGGSDGRHDDEAVLTEFLSSLMDYNPTIPDELVEHYLGRSGFHCPDLRLTRLVAVAAQKFISDIASDSLQHCKARVAAPVKDNKSKQPKDRRLVLTMDDLSKALREHGVNLKHPEYFADSPSAGMAPSTREE

SEQ ID NO: 56372 - protein, 152 aa, Glycine max
  peptide (1)..(152): Ceres Seq. ID no. 14306816
  misc_feature (46)..(95): Pfam Name: Transcription initiation factor TFIID 23-30kDa subunit Pfam Description: Transcription initiation factor TFIID 23-30kDa
  misc_feature (6)..(137): Homolog of NCBI NO: 20863106 NR Description: similar to Transcription initiation factor TFIID
  misc_feature (1)..(136): Homolog of NCBI NO: 17137648 NR Description: TBP-associated factor 10b CG3069-PA [Drosophila
  misc_feature (1)..(137): Homolog of NCBI NO: 5454106 NR Description: TBP-related factor 10
  misc_feature (2)..(137): Homolog of NCBI NO: 21619259 NR Description: Ilk protein [Mus musculus]
  misc_feature (2)..(137): Homolog of NCBI NO: 34859827 NR Description: similar to Ilk protein [Rattus norvegicus]
  misc_feature (2)..(137): Homolog of NCBI NO: 26338586 NR Description: unnamed protein product [Mus musculus]
  misc_feature (2)..(137): Homolog of NCBI NO: 9910576 NR Description: TAF10 RNA polymerase II, TATA box binding protein
  misc_feature (1)..(137): Homolog of NCBI NO: 2136293 NR Description: transcription factor IID 30k chain - human
  misc_feature (20)..(152): Homolog of NCBI NO: 26450720 NR Description: putative transcription factor II [Arabidopsis
  misc_feature (20)..(152): Homolog of NCBI NO: 15236059 NR Description: Transcription factor II homolog [Arabidopsis
MGSNNPGGAGGGGGMAPGTGAGGSDGRHDDEAVLTEFLSSLMDYNPTIPDELVEHYLGRSGFHCPDLRLTRLVAVAAQKFISDIASDSLQHCKARVAAPVKDNKSKQPKDRRLVLTMDDLSKALREHGVNLKHPEYFADSPSAGMAPSTREE

SEQ ID NO: 56373 - protein, 138 aa, Glycine max
  peptide (1)..(138): Ceres Seq. ID no. 14306817
  misc_feature (32)..(81): Pfam Name: Transcription initiation factor TFIID 23-30kDa subunit Pfam Description: Transcription initiation factor TFIID 23-30kDa
  misc_feature (1)..(123): Homolog of NCBI NO: 20863106 NR Description: similar to Transcription initiation factor TFIID
  misc_feature (1)..(122): Homolog of NCBI NO: 17137648 NR Description: TBP-associated factor 10b CG3069-PA [Drosophila
  misc_feature (1)..(123): Homolog of NCBI NO: 5454106 NR Description: TBP-related factor 10
  misc_feature (1)..(123): Homolog of NCBI NO: 21619259 NR Description: Ilk protein [Mus musculus]
  misc_feature (1)..(123): Homolog of NCBI NO: 26338586 NR Description: unnamed protein product [Mus musculus]
  misc_feature (1)..(123): Homolog of NCBI NO: 34859827 NR Description: similar to Ilk protein [Rattus norvegicus]
  misc_feature (1)..(123): Homolog of NCBI NO: 9910576 NR Description: TAF10 RNA polymerase II, TATA box binding protein
  misc_feature (1)..(123): Homolog of NCBI NO: 2136293 NR Description: transcription factor IID 30k chain - human
  misc_feature (6)..(138): Homolog of NCBI NO: 26450720 NR Description: putative transcription factor II [Arabidopsis
  misc_feature (6)..(138): Homolog of NCBI NO: 15236059 NR Description: Transcription factor II homolog [Arabidopsis
MAPGTGAGGSDGRHDDEAVLTEFLSSLMDYNPTIPDELVEHYLGRSGFHCPDLRLTRLVAVAAQKFISDIASDSLQHCKARVAAPVKDNKSKQPKDRRLVLTMDDLSKALREHGVNLKHPEYFADSPSAGMAPSTREE

SEQ ID NO: 56374 - DNA, 1493 bp, Glycine max
  misc_feature (1)..(1493): Ceres Seq. ID no. 13582609
atttctttgggattcttgcccttgttttggtgatgccatgggagttagctgtttttgtttcctttctctctgatagaaaaagaactaagaatgggcaaatctttattgatttacttaaaaaaatatcaatatcctttaaaatatacaggcaccagagaattttttattttttatttttaatgttaaaaggtcaatgaatatgattatgagatggaagggagtaccttctttggcttcttcctaagtcctaaccttgacgaggccaattccattcattttgatgtgtctctgttttcaacaaacgttcacaacaacacatttcgccgtttcaaatcactacttaacaccggggcacatagagagagagagacatcatggtctcttctaatggactagctacgagtcagccacttttttcttttggattgatttctgatgtccaatatgctgacattcctgatggccgttcattccttggtgttccacggtattatagacacagtcttctcatattgcagagagcagttaaagaatggaacactcatcagaagcacaagtttgtgattaattttggagattttgttgatgggttttgtcccaaagatcaatctcttgatactgtaaagaaagttgttgatgaatttgagatgttcacaggaggacctgtgtatcatatgattggcaatcactgcctatacaatcttcctcgcagcaagttaccttcattactgaagatccatactcttgatggccgtgcatactatgatttctcgccagtgcctgaatatagatttgttgttctggatgcctatgacatcagtgccattggttggcctcaagatcatccaaaaacactggaggccttgaaaatcctaagggagaagaatccaaatgaagataagaacagtccaacaaatttggagggtcctgaacgaaggtttgtaatgtttaatggagctgttggaaaggaacaggtcgaatggttagatggtgttctcttggagtcaacaaacttgaaacagaaggtggttgtctgctgccatctgcctctacatcctggtgcggcaactgaagagacactgttgtggaattacgatgaagtaatgaatttgatacacagatacaattgcgttaaggtctgtcttgcagggcatgatcataaaggcggatactctattgattctcatgggatacaccatagagtttttgaagctgctttggaatgccctcctggtacggatgcatttggatacattgatgtctatgatgacaggatatcacttgttggaactgacagaatgaaaagtacagagatggattttactcccccaagttaatttgtatgacaggatgtcttcacgtttgtaaaaatacctattattttttcactaatgtttgaaatagtacctatcatcttgttctagtcctacctacagggaagtttgtatttaaagttggaataacttaaattgagttggtactgttcatgaatc

SEQ ID NO: 56375 - protein, 320 aa, Glycine max
  peptide (1)..(320): Ceres Seq. ID no. 13582610
  misc_feature (14)..(264): Pfam Name: Calcineurin-like phosphoesterase Pfam Description: Calcineurin-like phosphoesterase
  misc_feature (20)..(103): Homolog of NCBI NO: 34902950 NR Description: P0462H08.18 [Oryza sativa (japonica
  misc_feature (135)..(208): Homolog of NCBI NO: 34902950 NR Description: P0462H08.18 [Oryza sativa (japonica
  misc_feature (9)..(168): Homolog of NCBI NO: 9437345 NR Description: x 006 protein [Homo sapiens]
  misc_feature (1)..(179): Homolog of NCBI NO: 13384932 NR Description: RIKEN cDNA 2310004I24 [Mus musculus]
  misc_feature (9)..(179): Homolog of NCBI NO: 21361843 NR Description: x 006 protein [Homo sapiens]
  misc_feature (123)..(319): Homolog of NCBI NO: 33416711 NR Description: Unknown (protein for MGC:69104) [Xenopus laevis]
  misc_feature (11)..(316): Homolog of NCBI NO: 34870877 NR Description: similar to RIKEN cDNA 2310004I24 gene [Rattus
  misc_feature (1)..(316): Homolog of NCBI NO: 13278450 NR Description: RIKEN cDNA 2310004I24 gene [Mus musculus]
  misc_feature (1)..(318): Homolog of NCBI NO: 34898102 NR Description: hypothetical protein~similar to Arabidopsis
  misc_feature (6)..(315): Homolog of NCBI NO: 15233946 NR Description: calcineurin-like phosphoesterase family
MVSSNGLATSQPLFSFGLISDVQYADIPDGRSFLGVPRYYRHSLLILQRAVKEWNTHQKHKFVINFGDFVDGFCPKDQSLDTVKKVVDEFEMFTGGPVYHMIGNHCLYNLPRSKLPSLLKIHTLDGRAYYDFSPVPEYRFVVLDAYDISAIGWPQDHPKTLEALKILREKNPNEDKNSPTNLEGPERRFVMFNGAVGKEQVEWLDGVLLESTNLKQKVVVCCHLPLHPGAATEETLLWNYDEVMNLIHRYNCVKVCLAGHDHKGGYSIDSHGIHHRVFEAALECPPGTDAFGYIDVYDDRISLVGTDRMKSTEMDFTPPS

SEQ ID NO: 56376 - protein, 229 aa, Glycine max
  peptide (1)..(229): Ceres Seq. ID no. 13582611
  misc_feature (1)..(173): Pfam Name: Calcineurin-like phosphoesterase Pfam Description: Calcineurin-like phosphoesterase
  misc_feature (1)..(12): Homolog of NCBI NO: 34902950 NR Description: P0462H08.18 [Oryza sativa (japonica
  misc_feature (44)..(117): Homolog of NCBI NO: 34902950 NR Description: P0462H08.18 [Oryza sativa (japonica
  misc_feature (1)..(77): Homolog of NCBI NO: 9437345 NR Description: x 006 protein [Homo sapiens]
  misc_feature (1)..(88): Homolog of NCBI NO: 13384932 NR Description: RIKEN cDNA 2310004I24 [Mus musculus]
  misc_feature (1)..(88): Homolog of NCBI NO: 21361843 NR Description: x 006 protein [Homo sapiens]
  misc_feature (32)..(228): Homolog of NCBI NO: 33416711 NR Description: Unknown (protein for MGC:69104) [Xenopus laevis]
  misc_feature (1)..(225): Homolog of NCBI NO: 34870877 NR Description: similar to RIKEN cDNA 2310004I24 gene [Rattus
  misc_feature (1)..(225): Homolog of NCBI NO: 13278450 NR Description: RIKEN cDNA 2310004I24 gene [Mus musculus]
  misc_feature (1)..(227): Homolog of NCBI NO: 34898102 NR Description: hypothetical protein~similar to Arabidopsis
  misc_feature (1)..(224): Homolog of NCBI NO: 15233946 NR Description: calcineurin-like phosphoesterase family
MFTGGPVYHMIGNHCLYNLPRSKLPSLLKIHTLDGRAYYDFSPVPEYRFVVLDAYDISAIGWPQDHPKTLEALKILREKNPNEDKNSPTNLEGPERRFVMFNGAVGKEQVEWLDGVLLESTNLKQKVVVCCHLPLHPGAATEETLLWNYDEVMNLIHRYNCVKVCLAGHDHKGGYSIDSHGIHHRVFEAALECPPGTDAFGYIDVYDDRISLVGTDRMKSTEMDFTPPS

SEQ ID NO: 56377 - protein, 220 aa, Glycine max
  peptide (1)..(220): Ceres Seq. ID no. 13582612
  misc_feature (1)..(164): Pfam Name: Calcineurin-like phosphoesterase Pfam Description: Calcineurin-like phosphoesterase
  misc_feature (3)..(216): Homolog of NCBI NO: 17934785 NR Description: conserved hypothetical protein
  misc_feature (35)..(108): Homolog of NCBI NO: 34902950 NR Description: P0462H08.18 [Oryza sativa (japonica
  misc_feature (1)..(68): Homolog of NCBI NO: 9437345 NR Description: x 006 protein [Homo sapiens]
  misc_feature (1)..(79): Homolog of NCBI NO: 13384932 NR Description: RIKEN cDNA 2310004I24 [Mus musculus]
  misc_feature (1)..(79): Homolog of NCBI NO: 21361843 NR Description: x 006 protein [Homo sapiens]
  misc_feature (23)..(219): Homolog of NCBI NO: 33416711 NR Description: Unknown (protein for MGC:69104) [Xenopus laevis]
  misc_feature (1)..(216): Homolog of NCBI NO: 34870877 NR Description: similar to RIKEN cDNA 2310004I24 gene [Rattus
  misc_feature (1)..(216): Homolog of NCBI NO: 13278450 NR Description: RIKEN cDNA 2310004I24 gene [Mus musculus]
  misc_feature (1)..(218): Homolog of NCBI NO: 34898102 NR Description: hypothetical protein~similar to Arabidopsis
  misc_feature (1)..(215): Homolog of NCBI NO: 15233946 NR Description: calcineurin-like phosphoesterase family
MIGNHCLYNLPRSKLPSLLKIHTLDGRAYYDFSPVPEYRFVVLDAYDISAIGWPQDHPKTLEALKILREKNPNEDKNSPTNLEGPERRFVMFNGAVGKEQVEWLDGVLLESTNLKQKVVVCCHLPLHPGAATEETLLWNYDEVMNLIHRYNCVKVCLAGHDHKGGYSIDSHGIHHRVFEAALECPPGTDAFGYIDVYDDRISLVGTDRMKSTEMDFTPPS

SEQ ID NO: 56378 - DNA, 1093 bp, Glycine max
  misc_feature (1)..(1093): Ceres Seq. ID no. 14304124
acgattacgaagcgtgcccaactccatctgcttccttttcctcttccccccgtccccgacgacccccggccgaaaccctagcgaggcgcgatgttcgggtaccggaaggcgccggacctcgacctcgaggcgggcggctcggcggcgctctacccggggatgacggaggacgtggagctgcgctgggccttcatccgcaagatctacgtcatcctctcggtccagctcgccatgaccgccgccgtcgcggggttcgtcgtcaaggtccccgccgtctccgagttcttcgtctcctccaacgctggcctgggcctctacatcttcctcctcgtcctgcccctcatcgtgctctgccccctgcgctactaccaccagaagcaccccgtcaacctcatcctgctcggcgtcttcaccgtctccatcagcttcgccgtcggcatgacgtgcgccttcaccagcggaaaaatcatcttggaagctgcaattctgacagcagtggtggtgatcagcttgactgcctacactttctgggctgcaaagataggccatgatttcaacttcctgggcccgttcctgtttggagctcttatggtgctgctggtgttctcacttatccagatctttttcccactgggcaagatctccaccatgatatatggggccgtggcgtcgatcatcttctgtggctacatcatcttcgacacggacaacatcatcaagcgccacacgtatgacgagtacatctgggctgccgtgtccctctacctcgacatcatcaacctgttcctgaatctgatgcaaattctgcgggcagctgatagctgagcgcaccttgcccaacatcgcatgatttaagtccactagcttgtgcatatcagaaaattcatgaatgcccgcagatacctgtaggcatgtacaatcgttatcagtaaattctgccgtcctagactccatcacatgtcttgtttcctagcttcctggagtatgcaatgtgtgattgaaccaagctgcacgatgaaaatatactcactggtgctttgtgattgcaaggcacgtgaatttaattccctgctacgaaatgttccattttaat

SEQ ID NO: 56379 - protein, 244 aa, Glycine max
  peptide (1)..(244): Ceres Seq. ID no. 14304125
  misc_feature (29)..(243): Pfam Name: Uncharacterised protein family UPF0005 Pfam Description: Uncharacterised protein family UPF0005
  misc_feature (85)..(124): Homolog of NCBI NO: 7485070 NR Description: hypothetical protein - Arabidopsis thaliana
  misc_feature (124)..(195): Homolog of NCBI NO: 7485070 NR Description: hypothetical protein - Arabidopsis thaliana
  misc_feature (9)..(87): Homolog of NCBI NO: 7485070 NR Description: hypothetical protein - Arabidopsis thaliana
  misc_feature (24)..(244): Homolog of NCBI NO: 34393840 NR Description: putative z-protein [Oryza sativa (japonica
  misc_feature (9)..(244): Homolog of NCBI NO: 18414455 NR Description: expressed protein [Arabidopsis thaliana]
  misc_feature (4)..(241): Homolog of NCBI NO: 15235466 NR Description: hypothetical protein [Arabidopsis thaliana]
  misc_feature (20)..(244): Homolog of NCBI NO: 14626300 NR Description: putative receptor-associated protein
  misc_feature (4)..(243): Homolog of NCBI NO: 15218701 NR Description: hypothetical protein [Arabidopsis thaliana]
  misc_feature (11)..(244): Homolog of NCBI NO: 15229411 NR Description: hypothetical protein [Arabidopsis thaliana]
  misc_feature (1)..(243): Homolog of NCBI NO: 34393841 NR Description: putative z-protein [Oryza sativa (japonica
MFGYRKAPDLDLEAGGSAALYPGMTEDVELRWAFIRKIYVILSVQLAMTAAVAGFVVKVPAVSEFFVSSNAGLGLYIFLLVLPLIVLCPLRYYHQKHPVNLILLGVFTVSISFAVGMTCAFTSGKIILEAAILTAVVVISLTAYTFWAAKIGHDFNFLGPFLFGALMVLLVFSLIQIFFPLGKISTMIYGAVASIIFCGYIIFDTDNIIKRHTYDEYIWAAVSLYLDIINLFLNLMQILRAADS

SEQ ID NO: 56380 - protein, 221 aa, Glycine max
  peptide (1)..(221): Ceres Seq. ID no. 14304126
  misc_feature (6)..(220): Pfam Name: Uncharacterised protein family UPF0005 Pfam Description: Uncharacterised protein family UPF0005
  misc_feature (62)..(101): Homolog of NCBI NO: 7485070 NR Description: hypothetical protein - Arabidopsis thaliana
  misc_feature (101)..(172): Homolog of NCBI NO: 7485070 NR Description: hypothetical protein - Arabidopsis thaliana
  misc_feature (1)..(64): Homolog of NCBI NO: 7485070 NR Description: hypothetical protein - Arabidopsis thaliana
  misc_feature (1)..(221): Homolog of NCBI NO: 34393840 NR Description: putative z-protein [Oryza sativa (japonica
  misc_feature (1)..(221): Homolog of NCBI NO: 18414455 NR Description: expressed protein [Arabidopsis thaliana]
  misc_feature (1)..(218): Homolog of NCBI NO: 15235466 NR Description: hypothetical protein [Arabidopsis thaliana]
  misc_feature (1)..(221): Homolog of NCBI NO: 14626300 NR Description: putative receptor-associated protein
  misc_feature (1)..(220): Homolog of NCBI NO: 15218701 NR Description: hypothetical protein [Arabidopsis thaliana]
  misc_feature (1)..(221): Homolog of NCBI NO: 15229411 NR Description: hypothetical protein [Arabidopsis thaliana]
  misc_feature (1)..(220): Homolog of NCBI NO: 34393841 NR Description: putative z-protein [Oryza sativa (japonica
MTEDVELRWAFIRKIYVILSVQLAMTAAVAGFVVKVPAVSEFFVSSNAGLGLYIFLLVLPLIVLCPLRYYHQKHPVNLILLGVFTVSISFAVGMTCAFTSGKIILEAAILTAVVVISLTAYTFWAAKIGHDFNFLGPFLFGALMVLLVFSLIQIFFPLGKISTMIYGAVASIIFCGYIIFDTDNIIKRHTYDEYIWAAVSLYLDIINLFLNLMQILRAADS

SEQ ID NO: 56381 - protein, 197 aa, Glycine max
  peptide (1)..(197): Ceres Seq. ID no. 14304127
  misc_feature (1)..(196): Pfam Name: Uncharacterised protein family UPF0005 Pfam Description: Uncharacterised protein family UPF0005
  misc_feature (38)..(77): Homolog of NCBI NO: 7485070 NR Description: hypothetical protein - Arabidopsis thaliana
  misc_feature (77)..(148): Homolog of NCBI NO: 7485070 NR Description: hypothetical protein - Arabidopsis thaliana
  misc_feature (1)..(40): Homolog of NCBI NO: 7485070 NR Description: hypothetical protein - Arabidopsis thaliana
  misc_feature (1)..(197): Homolog of NCBI NO: 34393840 NR Description: putative z-protein [Oryza sativa (japonica
  misc_feature (1)..(197): Homolog of NCBI NO: 18414455 NR Description: expressed protein [Arabidopsis thaliana]
  misc_feature (1)..(194): Homolog of NCBI NO: 15235466 NR Description: hypothetical protein [Arabidopsis thaliana]
  misc_feature (1)..(197): Homolog of NCBI NO: 14626300 NR Description: putative receptor-associated protein
  misc_feature (1)..(196): Homolog of NCBI NO: 15218701 NR Description: hypothetical protein [Arabidopsis thaliana]
  misc_feature (1)..(197): Homolog of NCBI NO: 15229411 NR Description: hypothetical protein [Arabidopsis thaliana]
  misc_feature (1)..(196): Homolog of NCBI NO: 34393841 NR Description: putative z-protein [Oryza sativa (japonica
MTAAVAGFVVKVPAVSEFFVSSNAGLGLYIFLLVLPLIVLCPLRYYHQKHPVNLILLGVFTVSISFAVGMTCAFTSGKIILEAAILTAVVVISLTAYTFWAAKIGHDFNFLGPFLFGALMVLLVFSLIQIFFPLGKISTMIYGAVASIIFCGYIIFDTDNIIKRHTYDEYIWAAVSLYLDIINLFLNLMQILRAADS

SEQ ID NO: 56382 - DNA, 1476 bp, Glycine max
  misc_feature (1)..(1476): Ceres Seq. ID no. 13582342
acatcttggccaactgggtcgcttccaataccttcagattttggtaggatttcgtgcttttgcataattcgttgagtttctgaagctatggaggcttataagagatgggtgaggcagaacaaagagtttgtgcactccatggagtctttggccaatggattgacatagcttcttcctgaacggttttctgaatcagagattggaccagaagcagtaacaactattctgggaatcatcacagctctcaatgaacatataattgatacagctcctaagcaaaatattacaggctctgtcgagccttattcatttccttatccattatgcttatctgcattaaaggatttggaaacattagttgaagttgtggcacaacaatactatggtgatgataagaaatggaatttccttgccattactgaagcaaccaaggtactggttcggttatctttgtttcggaagagtggatataagatgctgctacaaggaggggaaacacctaatgatgaggagtattcagatagttttacttcacaacatcatatgggcttaaagcccgatgtgcatcataggcctggttatatgaaaaacaatcttggtgcaaaaccaatgaatcaggaaggaagagcattatctgctttggttagatttggagaaaaagcaaaggggtcagatccagtgtggttacgcagggttgaacaccaacaagcaactatggagcctacaacttcaagggtggatagaccaacacttctcaccatattgtctgaaaggggtctttgtggggctctgttttttattggagaagttctacttattagtagaccacttatttatgttttatttattcgaaaatatggtattcggtcatggaccccttggttcctttcgctggctattgattgcataggaaacagtattctttcactcattacatcgtcagtggctggtgggaaggaccgaatgtttcatctgtctgccctagaaaaggatgaggttaaacggcgaaagctgctatttgttctttacctaatgagagatccatttttcagcaagtatactaggcaaagacttgaaagcacggagaaagttttggagcctattcctgtcataggatttctcacagcaaaacttgttgaacttataattggagctcaaacacgatacacttacatgtcaggatcgtgaataaaatccagaacaaatgcctaattgccctccaagattttggaaagatagatattcttactcttcttccacactacctgctgttccaaacttttcaaatgatgaagaggtatcaaaccagctactattatgatttaaaaataacaaaccattgcaagcttgaacttttcttttgcttgacaattccaaacatagaagatgttaagctgcaacccatgtgtgagacaaattgtttgcaaggatagctacactatcaacaactcagtataaattggaatatttattggg

SEQ ID NO: 56383 - protein, 237 aa, Glycine max
  peptide (1)..(237): Ceres Seq. ID no. 13582343
  misc_feature (28)..(217): Homolog of NCBI NO: 17136080 NR Description: peroxisomal biogenesis factor 16 isoform 2
  misc_feature (28)..(217): Homolog of NCBI NO: 12653395 NR Description: Similar to peroxisomal biogenesis factor 16 [Homo
  misc_feature (109)..(236): Homolog of NCBI NO: 34856558 NR Description: similar to peroxisome biogenesis factor 16
  misc_feature (28)..(236): Homolog of NCBI NO: 4758898 NR Description: peroxisomal biogenesis factor 16 isoform 1
  misc_feature (109)..(236): Homolog of NCBI NO: 21553069 NR Description: peroxisome biogenesis factor 16; peroxin-16 [Mus
  misc_feature (109)..(237): Homolog of NCBI NO: 28829898 NR Description: similar to Mus musculus (Mouse). Adult male cord cDNA, RIKEN full-length enriched library, clone:A330108A07,
  misc_feature (111)..(234): Homolog of NCBI NO: 21355481 NR Description: CG3947-PA [Drosophila melanogaster]
  misc_feature (1)..(237): Homolog of NCBI NO: 7485633 NR Description: hypothetical protein At2g45690 [imported] -
  misc_feature (1)..(237): Homolog of NCBI NO: 18406863 NR Description: shrunken seed protein (SSE1) [Arabidopsis
  misc_feature (1)..(237): Homolog of NCBI NO: 4837733 NR Description: shrunken seed protein [Arabidopsis thaliana]
MLLQGGETPNDEEYSDSFTSQHHMGLKPDVHHRPGYMKNNLGAKPMNQEGRALSALVRFGEKAKGSDPVWLRRVEHQQATMEPTTSRVDRPTLLTILSERGLCGALFFIGEVLLISRPLIYVLFIRKYGIRSWTPWFLSLAIDCIGNSILSLITSSVAGGKDRMFHLSALEKDEVKRRKLLFVLYLMRDPFFSKYTRQRLESTEKVLEPIPVIGFLTAKLVELIIGAQTRYTYMSGS

SEQ ID NO: 56384 - protein, 214 aa, Glycine max
  peptide (1)..(214): Ceres Seq. ID no. 13582344
  misc_feature (5)..(194): Homolog of NCBI NO: 17136080 NR Description: peroxisomal biogenesis factor 16 isoform 2
  misc_feature (5)..(194): Homolog of NCBI NO: 12653395 NR Description: Similar to peroxisomal biogenesis factor 16 [Homo
  misc_feature (86)..(213): Homolog of NCBI NO: 34856558 NR Description: similar to peroxisome biogenesis factor 16
  misc_feature (5)..(213): Homolog of NCBI NO: 4758898 NR Description: peroxisomal biogenesis factor 16 isoform 1
  misc_feature (86)..(213): Homolog of NCBI NO: 21553069 NR Description: peroxisome biogenesis factor 16; peroxin-16 [Mus
  misc_feature (86)..(214): Homolog of NCBI NO: 28829898 NR Description: similar to Mus musculus (Mouse). Adult male cord cDNA, RIKEN full-length enriched library, clone:A330108A07,
  misc_feature (88)..(211): Homolog of NCBI NO: 21355481 NR Description: CG3947-PA [Drosophila melanogaster]
  misc_feature (1)..(214): Homolog of NCBI NO: 7485633 NR Description: hypothetical protein At2g45690 [imported] -
  misc_feature (1)..(214): Homolog of NCBI NO: 18406863 NR Description: shrunken seed protein (SSE1) [Arabidopsis
  misc_feature (1)..(214): Homolog of NCBI NO: 4837733 NR Description: shrunken seed protein [Arabidopsis thaliana]
MGLKPDVHHRPGYMKNNLGAKPMNQEGRALSALVRFGEKAKGSDPVWLRRVEHQQATMEPTTSRVDRPTLLTILSERGLCGALFFIGEVLLISRPLIYVLFIRKYGIRSWTPWFLSLAIDCIGNSILSLITSSVAGGKDRMFHLSALEKDEVKRRKLLFVLYLMRDPFFSKYTRQRLESTEKVLEPIPVIGFLTAKLVELIIGAQTRYTYMSGS

SEQ ID NO: 56385 - protein, 201 aa, Glycine max
  peptide (1)..(201): Ceres Seq. ID no. 13582345
  misc_feature (1)..(181): Homolog of NCBI NO: 17136080 NR Description: peroxisomal biogenesis factor 16 isoform 2
  misc_feature (1)..(181): Homolog of NCBI NO: 12653395 NR Description: Similar to peroxisomal biogenesis factor 16 [Homo
  misc_feature (73)..(200): Homolog of NCBI NO: 34856558 NR Description: similar to peroxisome biogenesis factor 16
  misc_feature (1)..(200): Homolog of NCBI NO: 4758898 NR Description: peroxisomal biogenesis factor 16 isoform 1
  misc_feature (73)..(200): Homolog of NCBI NO: 21553069 NR Description: peroxisome biogenesis factor 16; peroxin-16 [Mus
  misc_feature (73)..(201): Homolog of NCBI NO: 28829898 NR Description: similar to Mus musculus (Mouse). Adult male cord cDNA, RIKEN full-length enriched library, clone:A330108A07,
  misc_feature (75)..(198): Homolog of NCBI NO: 21355481 NR Description: CG3947-PA [Drosophila melanogaster]
  misc_feature (1)..(201): Homolog of NCBI NO: 7485633 NR Description: hypothetical protein At2g45690 [imported] -
  misc_feature (1)..(201): Homolog of NCBI NO: 18406863 NR Description: shrunken seed protein (SSE1) [Arabidopsis
  misc_feature (1)..(201): Homolog of NCBI NO: 4837733 NR Description: shrunken seed protein [Arabidopsis thaliana]
MKNNLGAKPMNQEGRALSALVRFGEKAKGSDPVWLRRVEHQQATMEPTTSRVDRPTLLTILSERGLCGALFFIGEVLLISRPLIYVLFIRKYGIRSWTPWFLSLAIDCIGNSILSLITSSVAGGKDRMFHLSALEKDEVKRRKLLFVLYLMRDPFFSKYTRQRLESTEKVLEPIPVIGFLTAKLVELIIGAQTRYTYMSGS

SEQ ID NO: 56386 - DNA, 1747 bp, Glycine max
  misc_feature (1)..(1747): Ceres Seq. ID no. 12583190
cactattattgaaatatagaagcctctttccttcttcttctttttcttcttccttcatagcaaaagccatggccacgagacccgagagtgaaaaagaccctccacaaccaccttcacgtggctttctggccacagtacaagaaatcacaagaatctatagttcactgccacctagaccttctattgaagaagtagaagctgccacgtccactgtggacaccctcaacaacgaggagcaaatcaaactcaacgaaatctcaatgcaacaacaacctcctcacgatgatgtccctcaagacctcttctctgtcctgcaacaactcaaaaagactatggttctgttccacactcatcaacagaggagagatgcgctttatcttcttgagcttgaaaatatgtttcaaaccttcggtgatctcattcagagggcttctgaattagtttctggagatacccagaagcaaaaacttcccactatacccgaggaacacgcggtgatcactgaggaaagtgaaactctggtgaaggaagaggaaggaagacacaagaatgttttccatgtggtaaagccttccttgtctgcaggggatggaagcactgagaaattaagtctaatgaaagtggctactgttatagaaagttgtgctggtagtggagctacaatccttgagcttagagggaaattggtggatcagatggagtggttgcctgtgtcaattgggaaattatctgatgtcactgaaatggacctatctgaaaacagactcatggctcttccaacaaccattgtgggtcttaaggccttaacaaagcttgatcttcactcaaaccaacttataaaccttcctcactcatttggtgaattgataaaccttgttgatctcgacctccacgccaacaaattgaaatcacttcctgctacttttggaaacttgacaaacctcactgatcttgatttgagctcaaatgggttcacagatttaccagagacaattgggaatttgagcagcttgaagcgattgaatgttgaaacgaacgagcttgaggaactgccttacacaattggcaattgctcatcactatccgtgctaaagttggatttgaatcagctcaaggcccttcctgaggcaattgggaagcttgaatgcttggagattctcactttgcactataatagagttaagaggttgccttccacaatggataatctatgcaatttgaaggaacttgatgttagctttaatgaacttgagtttgtaccggagagcctgtgttttgcaactaatttgaagaaattgaacttgggaaagaacttcgcggacctaagagccttgccagcatcaattggaaatcttgaaatgcttgaggagttggacataagtgatgatcaaataaaagctctaccagagtctttcaggttcttgtcaaagttgagagtttttagggctgatgagaccccccttgatttgccaccaagagaattggtcaagttgggttctcaggaagttgtgcagtatatggctgattttgtcaccaagagggatgcaaaacttgtgccatcaaagaagaaaaagaaggggttttggttctggttttgctccatattttgcccccaactgaaatgatacttggacaaaatctctgttaacttatgtttcttgtggttgtatgtcgtttatccgttgcatatgtttggaaaaccttgtttttcctaataaaatgatctgtaatcttggatttgccttgt

SEQ ID NO: 56387 - protein, 540 aa, Glycine max
  peptide (1)..(540): Ceres Seq. ID no. 12583191
  misc_feature (405)..(427): Pfam Name: Leucine Rich Repeat Pfam Description: Leucine Rich Repeat
  misc_feature (270)..(524): Homolog of NCBI NO: 22330985 NR Description: hypothetical protein
  misc_feature (235)..(503): Homolog of NCBI NO: 24216020 NR Description: Leucine-rich repeat containing protein
  misc_feature (45)..(477): Homolog of NCBI NO: 15237011 NR Description: putative protein
  misc_feature (45)..(504): Homolog of NCBI NO: 37537048 NR Description: putative leucine-rich repeat protein
  misc_feature (45)..(504): Homolog of NCBI NO: 15227838 NR Description: unknown protein; protein id: At2g17440.1
  misc_feature (45)..(501): Homolog of NCBI NO: 20148766 NR Description: PSR9 [Brassica nigra]
  misc_feature (183)..(536): Homolog of NCBI NO: 15227838 NR Description: unknown protein; protein id: At2g17440.1
  misc_feature (154)..(538): Homolog of NCBI NO: 20148766 NR Description: PSR9 [Brassica nigra]
  misc_feature (187)..(532): Homolog of NCBI NO: 15237011 NR Description: putative protein
  misc_feature (188)..(535): Homolog of NCBI NO: 37537048 NR Description: putative leucine-rich repeat protein
LLLKYRSLFPSSSFSSSFIAKAMATRPESEKDPPQPPSRGFLATVQEITRIYSSLPPRPSIEEVEAATSTVDTLNNEEQIKLNEISMQQQPPHDDVPQDLFSVLQQLKKTMVLFHTHQQRRDALYLLELENMFQTFGDLIQRASELVSGDTQKQKLPTIPEEHAVITEESETLVKEEEGRHKNVFHVVKPSLSAGDGSTEKLSLMKVATVIESCAGSGATILELRGKLVDQMEWLPVSIGKLSDVTEMDLSENRLMALPTTIVGLKALTKLDLHSNQLINLPHSFGELINLVDLDLHANKLKSLPATFGNLTNLTDLDLSSNGFTDLPETIGNLSSLKRLNVETNELEELPYTIGNCSSLSVLKLDLNQLKALPEAIGKLECLEILTLHYNRVKRLPSTMDNLCNLKELDVSFNELEFVPESLCFATNLKKLNLGKNFADLRALPASIGNLEMLEELDISDDQIKALPESFRFLSKLRVFRADETPLDLPPRELVKLGSQEVVQYMADFVTKRDAKLVPSKKKKKGFWFWFCSIFCPQLK

SEQ ID NO: 56388 - protein, 518 aa, Glycine max
  peptide (1)..(518): Ceres Seq. ID no. 12583192
  misc_feature (383)..(405): Pfam Name: Leucine Rich Repeat Pfam Description: Leucine Rich Repeat
  misc_feature (248)..(502): Homolog of NCBI NO: 22330985 NR Description: hypothetical protein
  misc_feature (213)..(481): Homolog of NCBI NO: 24216020 NR Description: Leucine-rich repeat containing protein
  misc_feature (23)..(455): Homolog of NCBI NO: 15237011 NR Description: putative protein
  misc_feature (23)..(482): Homolog of NCBI NO: 37537048 NR Description: putative leucine-rich repeat protein
  misc_feature (23)..(482): Homolog of NCBI NO: 15227838 NR Description: unknown protein; protein id: At2g17440.1
  misc_feature (23)..(479): Homolog of NCBI NO: 20148766 NR Description: PSR9 [Brassica nigra]
  misc_feature (161)..(514): Homolog of NCBI NO: 15227838 NR Description: unknown protein; protein id: At2g17440.1
  misc_feature (132)..(516): Homolog of NCBI NO: 20148766 NR Description: PSR9 [Brassica nigra]
  misc_feature (165)..(510): Homolog of NCBI NO: 15237011 NR Description: putative protein
  misc_feature (166)..(513): Homolog of NCBI NO: 37537048 NR Description: putative leucine-rich repeat protein
MATRPESEKDPPQPPSRGFLATVQEITRIYSSLPPRPSIEEVEAATSTVDTLNNEEQIKLNEISMQQQPPHDDVPQDLFSVLQQLKKTMVLFHTHQQRRDALYLLELENMFQTFGDLIQRASELVSGDTQKQKLPTIPEEHAVITEESETLVKEEEGRHKNVFHVVKPSLSAGDGSTEKLSLMKVATVIESCAGSGATILELRGKLVDQMEWLPVSIGKLSDVTEMDLSENRLMALPTTIVGLKALTKLDLHSNQLINLPHSFGELINLVDLDLHANKLKSLPATFGNLTNLTDLDLSSNGFTDLPETIGNLSSLKRLNVETNELEELPYTIGNCSSLSVLKLDLNQLKALPEAIGKLECLEILTLHYNRVKRLPSTMDNLCNLKELDVSFNELEFVPESLCFATNLKKLNLGKNFADLRALPASIGNLEMLEELDISDDQIKALPESFRFLSKLRVFRADETPLDLPPRELVKLGSQEVVQYMADFVTKRDAKLVPSKKKKKGFWFWFCSIFCPQLK

SEQ ID NO: 56389 - protein, 454 aa, Glycine max
  peptide (1)..(454): Ceres Seq. ID no. 12583193
  misc_feature (319)..(341): Pfam Name: Leucine Rich Repeat Pfam Description: Leucine Rich Repeat
  misc_feature (184)..(438): Homolog of NCBI NO: 22330985 NR Description: hypothetical protein
  misc_feature (149)..(417): Homolog of NCBI NO: 24216020 NR Description: Leucine-rich repeat containing protein
  misc_feature (1)..(391): Homolog of NCBI NO: 15237011 NR Description: putative protein
  misc_feature (1)..(418): Homolog of NCBI NO: 37537048 NR Description: putative leucine-rich repeat protein
  misc_feature (1)..(418): Homolog of NCBI NO: 15227838 NR Description: unknown protein; protein id: At2g17440.1
  misc_feature (1)..(415): Homolog of NCBI NO: 20148766 NR Description: PSR9 [Brassica nigra]
  misc_feature (97)..(450): Homolog of NCBI NO: 15227838 NR Description: unknown protein; protein id: At2g17440.1
  misc_feature (68)..(452): Homolog of NCBI NO: 20148766 NR Description: PSR9 [Brassica nigra]
  misc_feature (101)..(446): Homolog of NCBI NO: 15237011 NR Description: putative protein
  misc_feature (102)..(449): Homolog of NCBI NO: 37537048 NR Description: putative leucine-rich repeat protein
MQQQPPHDDVPQDLFSVLQQLKKTMVLFHTHQQRRDALYLLELENMFQTFGDLIQRASELVSGDTQKQKLPTIPEEHAVITEESETLVKEEEGRHKNVFHVVKPSLSAGDGSTEKLSLMKVATVIESCAGSGATILELRGKLVDQMEWLPVSIGKLSDVTEMDLSENRLMALPTTIVGLKALTKLDLHSNQLINLPHSFGELINLVDLDLHANKLKSLPATFGNLTNLTDLDLSSNGFTDLPETIGNLSSLKRLNVETNELEELPYTIGNCSSLSVLKLDLNQLKALPEAIGKLECLEILTLHYNRVKRLPSTMDNLCNLKELDVSFNELEFVPESLCFATNLKKLNLGKNFADLRALPASIGNLEMLEELDISDDQIKALPESFRFLSKLRVFRADETPLDLPPRELVKLGSQEVVQYMADFVTKRDAKLVPSKKKKKGFWFWFCSIFCPQLK

SEQ ID NO: 56390 - DNA, 1238 bp, Glycine max
  misc_feature (1)..(1238): Ceres Seq. ID no. 13582153
ctacaacaccagatgttctagataaaaacgtagaaaacaatttacaggagttctggcaggctacctatacaaaatcatcttcagtgactgaggtcccaaatgctgttgcaaatacaaaattggatattgctgatcttgtaaaacaacagagaaattcaccaaagtcaatgtccattccccgcagagcaccagaagttcctcttttggatatgacaaataatagcactatgttgaattgcatttctcgagacaccacagagcaccaatcccgtggcttatctgtccaactgccaccacttcaacaaacagactttgcatataagaatgacatgtctaagccagccaattcacatgaagcgaaaatctctcaagcactgcctgacaaacagatgtggtcatctcagattcgagttataaggctaagtgatggcttacctgtccaacagccaccagagcaacaaacagactttgcatataacaatggaacatctaagccagtcgaatcacaggaagggaagatctctcaagcactgcccaacaaacagatacggccatctcagcttgaggttatagagctatgtgatgacttatctgtccaacagcctccagagcaacaaacaaacttcacatataagaatggcatgtctaagccagccgaatcacaggaagtgaagatctctcaagcactgcccaacaaacagatactgcaatcacagctcgatgttatagagctaagtgatggcttacctgttcagcagctgccagagcaacaaataaattttgcatataagaatgacatgtctaagccagctgaattgcatgaagtgaagatctctcaagcacagtccaacaaacaaatacagccatctcagattcaagttatagagctaagtgatgacgatgatgaagaaaatgaaaaaccaagtactgcaaaactggttccttctgtgcaatcggataccttgatgtggcattacagagatcccatgggaaatgtacaaggaccattttccttaatttctctgaaacgttggagtgatgctggctactttccccgacatttcaaggtctggaagtcaggtaataggcaggatgaagatgtattactggtgaacatactagcccaatttttccccctttagtcaaattgcttattgatgcacattgtaaaatccaggtcaataattgtgttgtgattaccaggtaactgcaattgtaactagaaactcatgctctct

SEQ ID NO: 56391 - protein, 379 aa, Glycine max
  peptide (1)..(379): Ceres Seq. ID no. 13582154
  misc_feature (322)..(374): Pfam Name: GYF domain Pfam Description: GYF domain
  misc_feature (223)..(376): Homolog of NCBI NO: 30680213 NR Description: expressed protein [Arabidopsis thaliana]
  misc_feature (223)..(376): Homolog of NCBI NO: 25411830 NR Description: hypothetical protein At2g18090 [imported] -
  misc_feature (268)..(377): Homolog of NCBI NO: 25411712 NR Description: hypothetical protein At2g16470 [imported] -
  misc_feature (268)..(377): Homolog of NCBI NO: 30679672 NR Description: expressed protein [Arabidopsis thaliana]
  misc_feature (214)..(377): Homolog of NCBI NO: 11290564 NR Description: hypothetical protein F24M12.160 - Arabidopsis
  misc_feature (214)..(377): Homolog of NCBI NO: 30693413 NR Description: expressed protein [Arabidopsis thaliana]
  misc_feature (170)..(375): Homolog of NCBI NO: 9759086 NR Description: emb|CAB62634.1~gene_id:K19M13.11~similar to
  misc_feature (282)..(375): Homolog of NCBI NO: 18420685 NR Description: expressed protein [Arabidopsis thaliana]
  misc_feature (203)..(373): Homolog of NCBI NO: 30682386 NR Description: expressed protein [Arabidopsis thaliana]
  misc_feature (203)..(373): Homolog of NCBI NO: 10178285 NR Description: putative protein [Arabidopsis thaliana]
TTPDVLDKNVENNLQEFWQATYTKSSSVTEVPNAVANTKLDIADLVKQQRNSPKSMSIPRRAPEVPLLDMTNNSTMLNCISRDTTEHQSRGLSVQLPPLQQTDFAYKNDMSKPANSHEAKISQALPDKQMWSSQIRVIRLSDGLPVQQPPEQQTDFAYNNGTSKPVESQEGKISQALPNKQIRPSQLEVIELCDDLSVQQPPEQQTNFTYKNGMSKPAESQEVKISQALPNKQILQSQLDVIELSDGLPVQQLPEQQINFAYKNDMSKPAELHEVKISQAQSNKQIQPSQIQVIELSDDDDEENEKPSTAKLVPSVQSDTLMWHYRDPMGNVQGPFSLISLKRWSDAGYFPRHFKVWKSGNRQDEDVLLVNILAQFFPL

SEQ ID NO: 56392 - protein, 324 aa, Glycine max
  peptide (1)..(324): Ceres Seq. ID no. 13582155
  misc_feature (267)..(319): Pfam Name: GYF domain Pfam Description: GYF domain
  misc_feature (168)..(321): Homolog of NCBI NO: 30680213 NR Description: expressed protein [Arabidopsis thaliana]
  misc_feature (168)..(321): Homolog of NCBI NO: 25411830 NR Description: hypothetical protein At2g18090 [imported] -
  misc_feature (213)..(322): Homolog of NCBI NO: 25411712 NR Description: hypothetical protein At2g16470 [imported] -
  misc_feature (213)..(322): Homolog of NCBI NO: 30679672 NR Description: expressed protein [Arabidopsis thaliana]
  misc_feature (159)..(322): Homolog of NCBI NO: 11290564 NR Description: hypothetical protein F24M12.160 - Arabidopsis
  misc_feature (159)..(322): Homolog of NCBI NO: 30693413 NR Description: expressed protein [Arabidopsis thaliana]
  misc_feature (115)..(320): Homolog of NCBI NO: 9759086 NR Description: emb|CAB62634.1~gene_id:K19M13.11~similar to
  misc_feature (227)..(320): Homolog of NCBI NO: 18420685 NR Description: expressed protein [Arabidopsis thaliana]
  misc_feature (148)..(318): Homolog of NCBI NO: 30682386 NR Description: expressed protein [Arabidopsis thaliana]
  misc_feature (148)..(318): Homolog of NCBI NO: 10178285 NR Description: putative protein [Arabidopsis thaliana]
MSIPRRAPEVPLLDMTNNSTMLNCISRDTTEHQSRGLSVQLPPLQQTDFAYKNDMSKPANSHEAKISQALPDKQMWSSQIRVIRLSDGLPVQQPPEQQTDFAYNNGTSKPVESQEGKISQALPNKQIRPSQLEVIELCDDLSVQQPPEQQTNFTYKNGMSKPAESQEVKISQALPNKQILQSQLDVIELSDGLPVQQLPEQQINFAYKNDMSKPAELHEVKISQAQSNKQIQPSQIQVIELSDDDDEENEKPSTAKLVPSVQSDTLMWHYRDPMGNVQGPFSLISLKRWSDAGYFPRHFKVWKSGNRQDEDVLLVNILAQFFPL

SEQ ID NO: 56393 - protein, 310 aa, Glycine max
  peptide (1)..(310): Ceres Seq. ID no. 13582156
  misc_feature (253)..(305): Pfam Name: GYF domain Pfam Description: GYF domain
  misc_feature (154)..(307): Homolog of NCBI NO: 30680213 NR Description: expressed protein [Arabidopsis thaliana]
  misc_feature (154)..(307): Homolog of NCBI NO: 25411830 NR Description: hypothetical protein At2g18090 [imported] -
  misc_feature (199)..(308): Homolog of NCBI NO: 25411712 NR Description: hypothetical protein At2g16470 [imported] -
  misc_feature (199)..(308): Homolog of NCBI NO: 30679672 NR Description: expressed protein [Arabidopsis thaliana]
  misc_feature (145)..(308): Homolog of NCBI NO: 11290564 NR Description: hypothetical protein F24M12.160 - Arabidopsis
  misc_feature (145)..(308): Homolog of NCBI NO: 30693413 NR Description: expressed protein [Arabidopsis thaliana]
  misc_feature (101)..(306): Homolog of NCBI NO: 9759086 NR Description: emb|CAB62634.1~gene_id:K19M13.11~similar to
  misc_feature (213)..(306): Homolog of NCBI NO: 18420685 NR Description: expressed protein [Arabidopsis thaliana]
  misc_feature (134)..(304): Homolog of NCBI NO: 30682386 NR Description: expressed protein [Arabidopsis thaliana]
  misc_feature (134)..(304): Homolog of NCBI NO: 10178285 NR Description: putative protein [Arabidopsis thaliana]
MTNNSTMLNCISRDTTEHQSRGLSVQLPPLQQTDFAYKNDMSKPANSHEAKISQALPDKQMWSSQIRVIRLSDGLPVQQPPEQQTDFAYNNGTSKPVESQEGKISQALPNKQIRPSQLEVIELCDDLSVQQPPEQQTNFTYKNGMSKPAESQEVKISQALPNKQILQSQLDVIELSDGLPVQQLPEQQINFAYKNDMSKPAELHEVKISQAQSNKQIQPSQIQVIELSDDDDEENEKPSTAKLVPSVQSDTLMWHYRDPMGNVQGPFSLISLKRWSDAGYFPRHFKVWKSGNRQDEDVLLVNILAQFFPL

SEQ ID NO: 56394 - DNA, 766 bp, Glycine max
  misc_feature (1)..(766): Ceres Seq. ID no. 14304110
atgatgctgctagtgctgagtgtgtgtatctgaggaaagaaagagaccattcttatttgtctggtttggttcttgagtaatttttttttcttcttttcttgagtaacttgattcatgtgtcaaagattctgatcattggtattattagctagacatagtgtagtgttgttgagtggggtttgtagacaatgaggagaggtagagggaaagggaagaagcagagtgcatctgctcgggaagatcatggaagcggtgaagaggatgaaaagattccagcttacaggagaagaggaaggccacagaagcctatgaaagatgattttgaagaggaggaagatgaagaagaagagttggtagagaagatggaggaagaagaagaagaggatgattcagtaacaagtaaaaaagaagaaaacgagaggaagaggaagatgattaatggaagcaatacggatgcaaatgaaaaagagaatgggttaggatcaaaatcaagtagagatggttccagttccaccaagtccacatctactggtttcagacagaatgggagcaggaggaaaagcaagcctagacgagctgctgaagctgttgtggaatgtaatggagtttgagaaaactttatgatcaagaactttccaagacacatgatgaaacattaatttgaggtttcttcttcgtttaggttatcttacaagtttctttgtaagttgagaactttggctatcttttggtgtatcaatctgcattgttttttttttcatctctc

SEQ ID NO: 56395 - protein, 140 aa, Glycine max
  peptide (1)..(140): Ceres Seq. ID no. 14304111
  misc_feature (21)..(95): Pfam Name: Chromadorea ALT protein Pfam Description: Chromadorea ALT protein
  misc_feature (8)..(127): Homolog of NCBI NO: 18410791 NR Description: expressed protein [Arabidopsis thaliana]
  misc_feature (5)..(80): Homolog of NCBI NO: 26330836 NR Description: unnamed protein product [Mus musculus]
  misc_feature (8)..(127): Homolog of NCBI NO: 21553446 NR Description: unknown [Arabidopsis thaliana]
  misc_feature (1)..(137): Homolog of NCBI NO: 33088054 NR Description: unknown [Setaria italica]
  misc_feature (1)..(140): Homolog of NCBI NO: 15230905 NR Description: expressed protein [Arabidopsis thaliana]
  misc_feature (1)..(140): Homolog of NCBI NO: 18405905 NR Description: expressed protein [Arabidopsis thaliana]
  misc_feature (1)..(140): Homolog of NCBI NO: 21537173 NR Description: unknown [Arabidopsis thaliana]
MRRGRGKGKKQSASAREDHGSGEEDEKIPAYRRRGRPQKPMKDDFEEEEDEEEELVEKMEEEEEEDDSVTSKKEENERKRKMINGSNTDANEKENGLGSKSSRDGSSSTKSTSTGFRQNGSRRKSKPRRAAEAVVECNGV

SEQ ID NO: 56396 - protein, 100 aa, Glycine max
  peptide (1)..(100): Ceres Seq. ID no. 14304112
  misc_feature (1)..(55): Pfam Name: Chromadorea ALT protein Pfam Description: Chromadorea ALT protein
  misc_feature (1)..(87): Homolog of NCBI NO: 18410791 NR Description: expressed protein [Arabidopsis thaliana]
  misc_feature (1)..(40): Homolog of NCBI NO: 26330836 NR Description: unnamed protein product [Mus musculus]
  misc_feature (1)..(87): Homolog of NCBI NO: 21553446 NR Description: unknown [Arabidopsis thaliana]
  misc_feature (1)..(97): Homolog of NCBI NO: 33088054 NR Description: unknown [Setaria italica]
  misc_feature (1)..(100): Homolog of NCBI NO: 15230905 NR Description: expressed protein [Arabidopsis thaliana]
  misc_feature (1)..(100): Homolog of NCBI NO: 18405905 NR Description: expressed protein [Arabidopsis thaliana]
  misc_feature (1)..(100): Homolog of NCBI NO: 21537173 NR Description: unknown [Arabidopsis thaliana]
MKDDFEEEEDEEEELVEKMEEEEEEDDSVTSKKEENERKRKMINGSNTDANEKENGLGSKSSRDGSSSTKSTSTGFRQNGSRRKSKPRRAAEAVVECNGV

SEQ ID NO: 56397 - protein, 82 aa, Glycine max
  peptide (1)..(82): Ceres Seq. ID no. 14304113
  misc_feature (1)..(63): Pfam Name: Bone sialoprotein II (BSP-II) Pfam Description: Bone sialoprotein II (BSP-II)
  misc_feature (1)..(69): Homolog of NCBI NO: 18410791 NR Description: expressed protein [Arabidopsis thaliana]
  misc_feature (1)..(22): Homolog of NCBI NO: 26330836 NR Description: unnamed protein product [Mus musculus]
  misc_feature (1)..(69): Homolog of NCBI NO: 21553446 NR Description: unknown [Arabidopsis thaliana]
  misc_feature (1)..(79): Homolog of NCBI NO: 33088054 NR Description: unknown [Setaria italica]
  misc_feature (1)..(82): Homolog of NCBI NO: 15230905 NR Description: expressed protein [Arabidopsis thaliana]
  misc_feature (1)..(82): Homolog of NCBI NO: 18405905 NR Description: expressed protein [Arabidopsis thaliana]
  misc_feature (1)..(82): Homolog of NCBI NO: 21537173 NR Description: unknown [Arabidopsis thaliana]
MEEEEEEDDSVTSKKEENERKRKMINGSNTDANEKENGLGSKSSRDGSSSTKSTSTGFRQNGSRRKSKPRRAAEAVVECNGV

SEQ ID NO: 56398 - DNA, 1353 bp, Glycine max
  misc_feature (1)..(1353): Ceres Seq. ID no. 13595341
atttaaagacctttcctttaccaaactttgtctctttctacttcagccatctcttcttctgcctcatcctgcgccagtggaattttgagcctttccctcgaaatcaatgcatgtaaagactcaagctttgatgccgcatattggtttttcatttgcacattcatgtgggtcattgtgtgcttctcttagtttcagcatagtggcaaaatggtctgtgtttgtttgatttgagggtagtagctttgtgttctttttcatattgaggcatgaattttcttgtggggtagattttgatcttcaaaccttaagtgatagcaccccatttggcaaaagtgaggatttcagtgaattgtagtgaagtgggcattttttgttttttgaaaaaggcaaaaggatgattcagttgttgttcttggtgatttttgttgagggggttctggcatttcttttgttggtgaagataggacctttgagagatcttgtgataaagagcctggatcagttgaagatggggaagggtccagctacagtgaaaaccattgctggtaccatgtctgtgattcttctttcaagtctcatgagcattatcaagatccagaacaaaggtgctaaactcggtactatgtcgcccatggatcaagttctatggagatctcacttgctcgaggcttcactcatgggttttacattattccttggattcctaattgatcgtacccaccattatcttcaaaaacttattaatttaaggagtaatgcgggagcttcaaaagaagaattggaaaaccttaaaaaagaaactgtccaacttaaagaaaaggatgagaaagcatccaaggagattaaacagctaaaggaagaactttcatgtctgtccaaaagtttggaaaagattaaatcggaatctgaagagaaggataagaaagtcgagaccgccgaagcacatgttgcttccctccaaaagcaagctgcagatctactacttgaatatgatagactcttagaagaaaaccaaaaccttcaggctcaaacactgggacataagagttgaggaatgactgagatgcattgataaacaaagttttggggtgagacttcattaggaccatccctagttttgttgcaaaatctttattttggaaaaaaaagagtacttttttggtccttttcgatattgcaacattgaccaaaagaactctctgcttaagtttataagttttacagttcattttcagtttgttcaaaattttgttattggatcgtcgctttacaattgccccatctagtttttgtttttgccccttccttttattgtttggatgaatatattttagttgaaggattattggcggg

SEQ ID NO: 56399 - protein, 218 aa, Glycine max
  peptide (1)..(218): Ceres Seq. ID no. 15221545
  misc_feature (4)..(200): Pfam Name: B-cell receptor-associated protein 31-like Pfam Description: B-cell receptor-associated protein 31-like
  misc_feature (94)..(217): Homolog of NCBI NO: 38174409 NR Description: Unknown (protein for MGC:75863) [Silurana
  misc_feature (1)..(121): Homolog of NCBI NO: 18402620 NR Description: expressed protein [Arabidopsis thaliana]
  misc_feature (1)..(162): Homolog of NCBI NO: 30682503 NR Description: expressed protein [Arabidopsis thaliana]
  misc_feature (1)..(212): Homolog of NCBI NO: 22655198 NR Description: unknown protein [Arabidopsis thaliana]
  misc_feature (1)..(218): Homolog of NCBI NO: 21553655 NR Description: unknown [Arabidopsis thaliana]
  misc_feature (1)..(218): Homolog of NCBI NO: 18422225 NR Description: expressed protein [Arabidopsis thaliana]
  misc_feature (1)..(218): Homolog of NCBI NO: 9759015 NR Description: gene_id:K16E1.4~unknown protein [Arabidopsis
  misc_feature (1)..(212): Homolog of NCBI NO: 34897474 NR Description: unknown protein [Oryza sativa (japonica
  misc_feature (1)..(215): Homolog of NCBI NO: 15239667 NR Description: hypothetical protein [Arabidopsis thaliana]
  misc_feature (1)..(214): Homolog of NCBI NO: 15231412 NR Description: expressed protein [Arabidopsis thaliana]
MIQLLFLVIFVEGVLAFLLLVKIGPLRDLVIKSLDQLKMGKGPATVKTIAGTMSVILLSSLMSIIKIQNKGAKLGTMSPMDQVLWRSHLLEASLMGFTLFLGFLIDRTHHYLQKLINLRSNAGASKEELENLKKETVQLKEKDEKASKEIKQLKEELSCLSKSLEKIKSESEEKDKKVETAEAHVASLQKQAADLLLEYDRLLEENQNLQAQTLGHKS

SEQ ID NO: 56400 - protein, 180 aa, Glycine max
  peptide (1)..(180): Ceres Seq. ID no. 15221546
  misc_feature (1)..(162): Pfam Name: B-cell receptor-associated protein 31-like Pfam Description: B-cell receptor-associated protein 31-like
  misc_feature (56)..(179): Homolog of NCBI NO: 38174409 NR Description: Unknown (protein for MGC:75863) [Silurana
  misc_feature (1)..(83): Homolog of NCBI NO: 18402620 NR Description: expressed protein [Arabidopsis thaliana]
  misc_feature (1)..(124): Homolog of NCBI NO: 30682503 NR Description: expressed protein [Arabidopsis thaliana]
  misc_feature (1)..(174): Homolog of NCBI NO: 22655198 NR Description: unknown protein [Arabidopsis thaliana]
  misc_feature (1)..(180): Homolog of NCBI NO: 21553655 NR Description: unknown [Arabidopsis thaliana]
  misc_feature (1)..(180): Homolog of NCBI NO: 18422225 NR Description: expressed protein [Arabidopsis thaliana]
  misc_feature (1)..(180): Homolog of NCBI NO: 9759015 NR Description: gene_id:K16E1.4~unknown protein [Arabidopsis
  misc_feature (1)..(174): Homolog of NCBI NO: 34897474 NR Description: unknown protein [Oryza sativa (japonica
  misc_feature (1)..(177): Homolog of NCBI NO: 15239667 NR Description: hypothetical protein [Arabidopsis thaliana]
  misc_feature (1)..(176): Homolog of NCBI NO: 15231412 NR Description: expressed protein [Arabidopsis thaliana]
MGKGPATVKTIAGTMSVILLSSLMSIIKIQNKGAKLGTMSPMDQVLWRSHLLEASLMGFTLFLGFLIDRTHHYLQKLINLRSNAGASKEELENLKKETVQLKEKDEKASKEIKQLKEELSCLSKSLEKIKSESEEKDKKVETAEAHVASLQKQAADLLLEYDRLLEENQNLQAQTLGHKS

SEQ ID NO: 56401 - protein, 166 aa, Glycine max
  peptide (1)..(166): Ceres Seq. ID no. 15221547
  misc_feature (1)..(148): Pfam Name: B-cell receptor-associated protein 31-like Pfam Description: B-cell receptor-associated protein 31-like
  misc_feature (42)..(165): Homolog of NCBI NO: 38174409 NR Description: Unknown (protein for MGC:75863) [Silurana
  misc_feature (1)..(69): Homolog of NCBI NO: 18402620 NR Description: expressed protein [Arabidopsis thaliana]
  misc_feature (1)..(110): Homolog of NCBI NO: 30682503 NR Description: expressed protein [Arabidopsis thaliana]
  misc_feature (1)..(160): Homolog of NCBI NO: 22655198 NR Description: unknown protein [Arabidopsis thaliana]
  misc_feature (1)..(166): Homolog of NCBI NO: 21553655 NR Description: unknown [Arabidopsis thaliana]
  misc_feature (1)..(166): Homolog of NCBI NO: 18422225 NR Description: expressed protein [Arabidopsis thaliana]
  misc_feature (1)..(166): Homolog of NCBI NO: 9759015 NR Description: gene_id:K16E1.4~unknown protein [Arabidopsis
  misc_feature (1)..(160): Homolog of NCBI NO: 34897474 NR Description: unknown protein [Oryza sativa (japonica
  misc_feature (1)..(163): Homolog of NCBI NO: 15239667 NR Description: hypothetical protein [Arabidopsis thaliana]
  misc_feature (1)..(162): Homolog of NCBI NO: 15231412 NR Description: expressed protein [Arabidopsis thaliana]
MSVILLSSLMSIIKIQNKGAKLGTMSPMDQVLWRSHLLEASLMGFTLFLGFLIDRTHHYLQKLINLRSNAGASKEELENLKKETVQLKEKDEKASKEIKQLKEELSCLSKSLEKIKSESEEKDKKVETAEAHVASLQKQAADLLLEYDRLLEENQNLQAQTLGHKS

SEQ ID NO: 56402 - DNA, 1197 bp, Glycine max
  misc_feature (1)..(1197): Ceres Seq. ID no. 13595857
gactgggcgcagtgcacgctattccgagcatatgaacgacgtcggtttgagcctagcgcagcatttcaatttcgaaggaaattctaacctggttccgttggtgctgagtttcaggcttgcagcagccatagaagtgtaggagttggagagagagtgatcaattcgatgccttcacttcgcatcctaaacaaaatctgttattcgataaaccagaattgcaaatgccagtaccgaacaatctcctccacggcacagttgcagggttcatggatggaaaaggtcaaaaacgtcatcaccggccaaaacagcacgccccagtcccagggagacgcctccgaatcattcagtctgctccgttttgcggatgaaatgaagaatgcaaagagaataggcgcgtttaaggagttcatggttgggcgaagcagcgaagccactttttcctccgccttcgacaaatacgaagccataattcgatttctcggtgctttggaccccactggagagaatctccagacaactcagaaacaagaagcggcaaaacattgtaattgcacgattgctgatgtggagaatgcacttgccaagtttacttgggccaaggaagcacagaagaagttagagaagctaaaagaagaaggaaaaccaatgccaaaaagctttgctgaagtccaaaagctagttggttcaactccattggatcttgctaggtctaatttggcccaagctggacaaattagcaggaatgcactttgtccatgtggttcaaagaagagatacaaaaggtgctgcggaaaggattgaaggaattcagagattaaatgttaaactgccaggaagcctgatctgttatggtggtttcatacctacacatggctaaattgatctgcagttgtaccttattttattcagttcagatcaagttggccaatgcgctagactgcaaacatgcccctaagctgattttaggatgatatattttgcccaacagttgcgtgattttctttagctttctaatttttgaggtgatcataggcagaaccaaacagaatatttttgttttgttcaagagtagttagttagttctcttctttcccttgctcctgcctaattaggcaagggaataagaaataattgtagtctcgttctaaaagtcaaaatgcttaaactcattttttactgatttatgtcatcatcatc

SEQ ID NO: 56403 - protein, 211 aa, Glycine max
  peptide (1)..(211): Ceres Seq. ID no. 13595858
  misc_feature (36)..(168): Homolog of NCBI NO: 15229851 NR Description: hypothetical protein [Arabidopsis thaliana]
MPSLRILNKICYSINQNCKCQYRTISSTAQLQGSWMEKVKNVITGQNSTPQSQGDASESFSLLRFADEMKNAKRIGAFKEFMVGRSSEATFSSAFDKYEAIIRFLGALDPTGENLQTTQKQEAAKHCNCTIADVENALAKFTWAKEAQKKLEKLKEEGKPMPKSFAEVQKLVGSTPLDLARSNLAQAGQISRNALCPCGSKKRYKRCCGKD

SEQ ID NO: 56404 - protein, 176 aa, Glycine max
  peptide (1)..(176): Ceres Seq. ID no. 13595859
  misc_feature (1)..(133): Homolog of NCBI NO: 15229851 NR Description: hypothetical protein [Arabidopsis thaliana]
MEKVKNVITGQNSTPQSQGDASESFSLLRFADEMKNAKRIGAFKEFMVGRSSEATFSSAFDKYEAIIRFLGALDPTGENLQTTQKQEAAKHCNCTIADVENALAKFTWAKEAQKKLEKLKEEGKPMPKSFAEVQKLVGSTPLDLARSNLAQAGQISRNALCPCGSKKRYKRCCGKD

SEQ ID NO: 56405 - protein, 143 aa, Glycine max
  peptide (1)..(143): Ceres Seq. ID no. 13595860
  misc_feature (1)..(100): Homolog of NCBI NO: 15229851 NR Description: hypothetical protein [Arabidopsis thaliana]
MKNAKRIGAFKEFMVGRSSEATFSSAFDKYEAIIRFLGALDPTGENLQTTQKQEAAKHCNCTIADVENALAKFTWAKEAQKKLEKLKEEGKPMPKSFAEVQKLVGSTPLDLARSNLAQAGQISRNALCPCGSKKRYKRCCGKD

SEQ ID NO: 56406 - DNA, 651 bp, Glycine max
  misc_feature (1)..(651): Ceres Seq. ID no. 13595362
cccactttattgtgcttaawcttgctctctctatcccatatactcttaccagctaggtagctaagctgccccttgcaaccaacaatggcgccttcaccgagctggagtgcagctgtgttggccgtgctgctggtggtcgtcctgctattggggatgggatgcccggcggccgctgcgacgccatgtacggactgcacagcgcagtgcaactcaacatgcagcgccgccggggcaaggccgtgcggcgcccactgcagcccggcgccgggatgcccgagctgcctcgccgcgtaccacgccaagtgcttgccgtattgcgtgagcgcgtgcaaagcccaatcacctgctgggtacgactgccaaagcgcgtgcaacaagacacagctgtgcagcagctcgtgcagcgccgtctgcggcgagtcgccgacgtgcaaggcctgccaggacaactactaccgtgggtgcatatccagatgcacctcctactgcaactcccactgcgtctaggtctagcaacgactttcgacactctacggagtacgttttcacgtaaaaaaggattcagcgcctcaccaaggaaaaacgtgtcactgtaattttcttcatccaataatcataggagtgctcatatatgtatctgcctccttttcc

SEQ ID NO: 56407 - protein, 145 aa, Glycine max
  peptide (1)..(145): Ceres Seq. ID no. 15221554
MPGGRCDAMYGLHSAVQLNMQRRRGKAVRRPLQPGAGMPELPRRVPRQVLAVLRERVQSPITCWVRLPKRVQQDTAVQQLVQRRLRRVADVQGLPGQLLPWVHIQMHLLLQLPLRLGLATTFDTLRSTFSRKKGFSASPRKNVSL

SEQ ID NO: 56408 - protein, 140 aa, Glycine max
  peptide (1)..(140): Ceres Seq. ID no. 15221555
  misc_feature (28)..(139): Pfam Name: Keratin, high sulfur B2 protein Pfam Description: Keratin, high sulfur B2 protein
  misc_feature (2)..(84): Homolog of NCBI NO: 19033552 NR Description: hypothetical protein [Oryza sativa (japonica
  misc_feature (9)..(84): Homolog of NCBI NO: 19033562 NR Description: hypothetical protein [Oryza sativa (japonica
  misc_feature (26)..(139): Homolog of NCBI NO: 7657283 NR Description: keratin associated protein 5-1;
  misc_feature (23)..(139): Homolog of NCBI NO: 125681 NR Description: Keratin, ultra high-sulfur matrix protein A (UHS
  misc_feature (26)..(135): Homolog of NCBI NO: 7657285 NR Description: keratin associated protein 5-4;
  misc_feature (27)..(139): Homolog of NCBI NO: 7657283 NR Description: keratin associated protein 5-1;
  misc_feature (23)..(139): Homolog of NCBI NO: 40254819 NR Description: keratin, cuticle, ultrahigh sulphur 1
  misc_feature (18)..(84): Homolog of NCBI NO: 19033555 NR Description: hypothetical protein [Oryza sativa (japonica
  misc_feature (26)..(119): Homolog of NCBI NO: 21356647 NR Description: PFTAIRE-interacting factor 2 [Drosophila
  misc_feature (8)..(89): Homolog of NCBI NO: 19033560 NR Description: hypothetical protein [Oryza sativa (japonica
MAPSPSWSAAVLAVLLVVVLLLGMGCPAAAATPCTDCTAQCNSTCSAAGARPCGAHCSPAPGCPSCLAAYHAKCLPYCVSACKAQSPAGYDCQSACNKTQLCSSSCSAVCGESPTCKACQDNYYRGCISRCTSYCNSHCV

SEQ ID NO: 56409 - protein, 137 aa, Glycine max
  peptide (1)..(137): Ceres Seq. ID no. 15221556
MYGLHSAVQLNMQRRRGKAVRRPLQPGAGMPELPRRVPRQVLAVLRERVQSPITCWVRLPKRVQQDTAVQQLVQRRLRRVADVQGLPGQLLPWVHIQMHLLLQLPLRLGLATTFDTLRSTFSRKKGFSASPRKNVSL

SEQ ID NO: 56410 - DNA, 1256 bp, Glycine max
  misc_feature (1)..(1256): Ceres Seq. ID no. 12583421
aaaaaaaatcatgagccgcgtcaaatcacatcactgccaattcgaaatttccaatttcacagaacttttgttgcattgatctccgattttgttttccaacgcttcttcgtattctcaccaatctcaaatggcttctatctcccttcttctcgccctgttcgtgttcttcctaattgccacttctcttaccgaaagtaggaaggaattaaggaacaagcaggaaactgcattacagatgttagagcgctcaattcatttttccaacagaattaatccatcacgtgttgtccaaatctcttggcaaccaagggtttttctatacaaagggtttttgtcggacaaggagtgtgactaccttgtttctttggcatatgctgtgaaagaaaaatcctcagggaatggtggcctttcagagggggttgaaacttccttggatatggaagatgatattcttgcaaggattgaagaaagactttcagtttgggctttccttcctaaagagtacagcaagcctttgcaggtcatgcattatgggcctgagcagaatggtcggaacttagattattttacaaacaaaacccaattagaattaagtggacctttaatggcaacaattattttatatctctcaaatgatgttactcaagggggtcaaattctttttcctgaatcattgcctgggagtagcagctggtcaagttgtagtaatagcagcaatattctccaaccagtaaaagggaatgcaattctgtttttctctcttcacccaagtgcttctcctgacaagagtagcttccatgctagatgccctgtccttgagggtgatatgtggtctgcaattaaatacttctatgcaaaaccaattagtagaggtaaagtctcagccacattagatggtggtgaatgcactgatgaagatgacagttgtcccgcttgggcagccgtgggagaatgtcaacgaaaccctgtgttcatgattggatctcctgattattatggtacatgtaggaaaagttgtaatgcatgctgatcacaagttgattttacttttacactttttgtttatataattattctccctagagaaatacatgtggaattatcaattgctttttttaaaaatttcctcaagttcttttgagctgcacatcaaaaggtgctggaaatagtgtataggaaattagaacttgacacgatttagatttcaatttgatgtaatttttttgaatattcttttagtgatgtattgagtgttg

SEQ ID NO: 56411 - protein, 300 aa, Glycine max
  peptide (1)..(300): Ceres Seq. ID no. 12583422
  misc_feature (130)..(242): Pfam Name: 2OG-Fe(II) oxygenase superfamily Pfam Description: 2OG-Fe(II) oxygenase superfamily
  misc_feature (45)..(300): Homolog of NCBI NO: 18397528 NR Description: expressed protein
  misc_feature (57)..(300): Homolog of NCBI NO: 28393447 NR Description: putative prolyl 4-hydroxylase [Arabidopsis
  misc_feature (49)..(300): Homolog of NCBI NO: 29150365 NR Description: putative oxidoreductase [Oryza sativa (japonica
  misc_feature (7)..(300): Homolog of NCBI NO: 18086437 NR Description: AT3g28480/MFJ20_16 [Arabidopsis thaliana]
  misc_feature (7)..(300): Homolog of NCBI NO: 18405808 NR Description: prolyl 4-hydroxylase, putative
  misc_feature (44)..(300): Homolog of NCBI NO: 30689216 NR Description: oxidoreductase, 2OG-Fe(II) oxygenase family
  misc_feature (21)..(300): Homolog of NCBI NO: 9294583 NR Description: prolyl 4-hydroxylase alpha subunit-like protein
  misc_feature (49)..(104): Homolog of NCBI NO: 37534316 NR Description: unknown protein [Oryza sativa (japonica
  misc_feature (106)..(300): Homolog of NCBI NO: 37534316 NR Description: unknown protein [Oryza sativa (japonica
  misc_feature (23)..(300): Homolog of NCBI NO: 30686940 NR Description: ShTK domain-containing protein [Arabidopsis
MASISLLLALFVFFLIATSLTESRKELRNKQETALQMLERSIHFSNRINPSRVVQISWQPRVFLYKGFLSDKECDYLVSLAYAVKEKSSGNGGLSEGVETSLDMEDDILARIEERLSVWAFLPKEYSKPLQVMHYGPEQNGRNLDYFTNKTQLELSGPLMATIILYLSNDVTQGGQILFPESLPGSSSWSSCSNSSNILQPVKGNAILFFSLHPSASPDKSSFHARCPVLEGDMWSAIKYFYAKPISRGKVSATLDGGECTDEDDSCPAWAAVGECQRNPVFMIGSPDYYGTCRKSCNAC

SEQ ID NO: 56412 - protein, 264 aa, Glycine max
  peptide (1)..(264): Ceres Seq. ID no. 12583423
  misc_feature (94)..(206): Pfam Name: 2OG-Fe(II) oxygenase superfamily Pfam Description: 2OG-Fe(II) oxygenase superfamily
  misc_feature (9)..(264): Homolog of NCBI NO: 18397528 NR Description: expressed protein
  misc_feature (21)..(264): Homolog of NCBI NO: 28393447 NR Description: putative prolyl 4-hydroxylase [Arabidopsis
  misc_feature (13)..(264): Homolog of NCBI NO: 29150365 NR Description: putative oxidoreductase [Oryza sativa (japonica
  misc_feature (1)..(264): Homolog of NCBI NO: 18086437 NR Description: AT3g28480/MFJ20_16 [Arabidopsis thaliana]
  misc_feature (1)..(264): Homolog of NCBI NO: 18405808 NR Description: prolyl 4-hydroxylase, putative
  misc_feature (8)..(264): Homolog of NCBI NO: 30689216 NR Description: oxidoreductase, 2OG-Fe(II) oxygenase family
  misc_feature (1)..(264): Homolog of NCBI NO: 9294583 NR Description: prolyl 4-hydroxylase alpha subunit-like protein
  misc_feature (13)..(68): Homolog of NCBI NO: 37534316 NR Description: unknown protein [Oryza sativa (japonica
  misc_feature (70)..(264): Homolog of NCBI NO: 37534316 NR Description: unknown protein [Oryza sativa (japonica
  misc_feature (1)..(264): Homolog of NCBI NO: 30686940 NR Description: ShTK domain-containing protein [Arabidopsis
MLERSIHFSNRINPSRVVQISWQPRVFLYKGFLSDKECDYLVSLAYAVKEKSSGNGGLSEGVETSLDMEDDILARIEERLSVWAFLPKEYSKPLQVMHYGPEQNGRNLDYFTNKTQLELSGPLMATIILYLSNDVTQGGQILFPESLPGSSSWSSCSNSSNILQPVKGNAILFFSLHPSASPDKSSFHARCPVLEGDMWSAIKYFYAKPISRGKVSATLDGGECTDEDDSCPAWAAVGECQRNPVFMIGSPDYYGTCRKSCNAC

SEQ ID NO: 56413 - protein, 197 aa, Glycine max
  peptide (1)..(197): Ceres Seq. ID no. 12583424
  misc_feature (27)..(139): Pfam Name: 2OG-Fe(II) oxygenase superfamily Pfam Description: 2OG-Fe(II) oxygenase superfamily
  misc_feature (1)..(197): Homolog of NCBI NO: 21618073 NR Description: prolyl 4-hydroxylase alpha subunit-like protein
  misc_feature (1)..(197): Homolog of NCBI NO: 18397528 NR Description: expressed protein
  misc_feature (1)..(197): Homolog of NCBI NO: 28393447 NR Description: putative prolyl 4-hydroxylase [Arabidopsis
  misc_feature (1)..(197): Homolog of NCBI NO: 29150365 NR Description: putative oxidoreductase [Oryza sativa (japonica
  misc_feature (1)..(197): Homolog of NCBI NO: 18086437 NR Description: AT3g28480/MFJ20_16 [Arabidopsis thaliana]
  misc_feature (1)..(197): Homolog of NCBI NO: 18405808 NR Description: prolyl 4-hydroxylase, putative
  misc_feature (1)..(197): Homolog of NCBI NO: 30689216 NR Description: oxidoreductase, 2OG-Fe(II) oxygenase family
  misc_feature (1)..(197): Homolog of NCBI NO: 9294583 NR Description: prolyl 4-hydroxylase alpha subunit-like protein
  misc_feature (3)..(197): Homolog of NCBI NO: 37534316 NR Description: unknown protein [Oryza sativa (japonica
  misc_feature (1)..(197): Homolog of NCBI NO: 30686940 NR Description: ShTK domain-containing protein [Arabidopsis
MEDDILARIEERLSVWAFLPKEYSKPLQVMHYGPEQNGRNLDYFTNKTQLELSGPLMATIILYLSNDVTQGGQILFPESLPGSSSWSSCSNSSNILQPVKGNAILFFSLHPSASPDKSSFHARCPVLEGDMWSAIKYFYAKPISRGKVSATLDGGECTDEDDSCPAWAAVGECQRNPVFMIGSPDYYGTCRKSCNAC

SEQ ID NO: 56414 - DNA, 1266 bp, Glycine max
  misc_feature (1)..(1266): Ceres Seq. ID no. 15179641
atcgcaatctcgagtagccgtcccaatcctcgatctgttctcagaccctcctccgtccgtcgcagctccagatttccttccccatggctccgatcaagatcggtatcaacggtttcggccggatcggcaggcttgtggccagggttgcgctccagagccccgatgtcgagctcgtcgccgtcaacgaccccttcatcaccaccgactacatgacctacatgttcaagtatgacactgtccacggacagtggaagcaccatgaagttaaggtgaaggactccaagacccttctcttcggtgagaaggaggttgctgtgtttggctgcaggaaccctgaggagatcccatgggctgctgctggtgctgagtacgttgttgagtccaccggtgttttcaccgacaaggacaaggctgcagctcacattaagggtggtgccaagaaggtcatcatttctgctcccagcaaggatgctcccatgtttgtctgtggtgtcaatgagaaggaatacaagtctgacatcgacattgtctccaacgctagctgcaccactaactgccttgctcctcttgctaaggttatcaatgacaggtttggcattgttgagggtttgatgaccacagttcatgccatgactgcaacccagaagactgttgatggtccttccagcaaggactggagaggtggaagggctgccagcttcaacatcattccaagcagcactggtgccgcaaaggctgttggcaaggtgctcccagagcttaacggaaagttgactggaatggccttccgtgttcccactgttgatgtttctgttgttgatctgactgttagacttgcgaagccagcaacctatgatcagattaaggctgctatcaaggaggagtctgagggaaacctcaagggcattttgggttacgttgatgaggaccttgtttccactgactttcagggtgacaacaggtccagcatcttcgatgccaaggccgggattgctctgaacgacaactttgtcaagcttgtctcctggtacgacaacgagtggggatacagcacccgcgtggtcgacctcatccgtcacatgcacagcaccaagtaaatgagaggcatgaagatacaggggagagtggtttgccccagaggagtgttcaaagcctcttcttctgagaataaatttttgtatggaattatgtcagctaaaaaccttttattggatgtatcctgatggttggtcacattttggtggtattatgtacttgcttgaactg

SEQ ID NO: 56415 - protein, 337 aa, Glycine max
  peptide (1)..(337): Ceres Seq. ID no. 15179642
  misc_feature (155)..(316): Pfam Name: Glyceraldehyde 3-phosphate dehydrogenase, Pfam Description: Glyceraldehyde 3-phosphate dehydrogenase,
  misc_feature (1)..(337): Homolog of NCBI NO: 4539543 NR Description: glyceraldehyde-3-phosphate dehydrogenase
  misc_feature (2)..(337): Homolog of NCBI NO: 1345501 NR Description: glycolytic glyceraldehyde 3-phosphate
  misc_feature (1)..(337): Homolog of NCBI NO: 120666 NR Description: Glyceraldehyde 3-phosphate dehydrogenase,
  misc_feature (1)..(336): Homolog of NCBI NO: 462137 NR Description: GLYCERALDEHYDE 3-PHOSPHATE DEHYDROGENASE,
  misc_feature (33)..(337): Homolog of NCBI NO: 120668 NR Description: Glyceraldehyde 3-phosphate dehydrogenase,
  misc_feature (1)..(336): Homolog of NCBI NO: 7431535 NR Description: glyceraldehyde-3-phosphate dehydrogenase
  misc_feature (1)..(337): Homolog of NCBI NO: 6166167 NR Description: Glyceraldehyde 3-phosphate dehydrogenase,
  misc_feature (1)..(47): Homolog of NCBI NO: 29150193 NR Description: putative glyceraldehydes 3-phosphate
  misc_feature (43)..(337): Homolog of NCBI NO: 29150193 NR Description: putative glyceraldehydes 3-phosphate
  misc_feature (1)..(337): Homolog of NCBI NO: 38346061 NR Description: OJ000223_09.15 [Oryza sativa (japonica
MAPIKIGINGFGRIGRLVARVALQSPDVELVAVNDPFITTDYMTYMFKYDTVHGQWKHHEVKVKDSKTLLFGEKEVAVFGCRNPEEIPWAAAGAEYVVESTGVFTDKDKAAAHIKGGAKKVIISAPSKDAPMFVCGVNEKEYKSDIDIVSNASCTTNCLAPLAKVINDRFGIVEGLMTTVHAMTATQKTVDGPSSKDWRGGRAASFNIIPSSTGAAKAVGKVLPELNGKLTGMAFRVPTVDVSVVDLTVRLAKPATYDQIKAAIKEESEGNLKGILGYVDEDLVSTDFQGDNRSSIFDAKAGIALNDNFVKLVSWYDNEWGYSTRVVDLIRHMHSTK

SEQ ID NO: 56416 - protein, 295 aa, Glycine max
  peptide (1)..(295): Ceres Seq. ID no. 15179643
  misc_feature (113)..(274): Pfam Name: Glyceraldehyde 3-phosphate dehydrogenase, Pfam Description: Glyceraldehyde 3-phosphate dehydrogenase,
  misc_feature (1)..(294): Homolog of NCBI NO: 462141 NR Description: Glyceraldehyde 3-phosphate dehydrogenase (GAPDH)
  misc_feature (1)..(295): Homolog of NCBI NO: 4539543 NR Description: glyceraldehyde-3-phosphate dehydrogenase
  misc_feature (1)..(295): Homolog of NCBI NO: 1345501 NR Description: glycolytic glyceraldehyde 3-phosphate
  misc_feature (1)..(295): Homolog of NCBI NO: 120666 NR Description: Glyceraldehyde 3-phosphate dehydrogenase,
  misc_feature (1)..(294): Homolog of NCBI NO: 462137 NR Description: GLYCERALDEHYDE 3-PHOSPHATE DEHYDROGENASE,
  misc_feature (1)..(295): Homolog of NCBI NO: 120668 NR Description: Glyceraldehyde 3-phosphate dehydrogenase,
  misc_feature (1)..(294): Homolog of NCBI NO: 7431535 NR Description: glyceraldehyde-3-phosphate dehydrogenase
  misc_feature (1)..(295): Homolog of NCBI NO: 6166167 NR Description: Glyceraldehyde 3-phosphate dehydrogenase,
  misc_feature (1)..(295): Homolog of NCBI NO: 29150193 NR Description: putative glyceraldehydes 3-phosphate
  misc_feature (1)..(295): Homolog of NCBI NO: 38346061 NR Description: OJ000223_09.15 [Oryza sativa (japonica
MTYMFKYDTVHGQWKHHEVKVKDSKTLLFGEKEVAVFGCRNPEEIPWAAAGAEYVVESTGVFTDKDKAAAHIKGGAKKVIISAPSKDAPMFVCGVNEKEYKSDIDIVSNASCTTNCLAPLAKVINDRFGIVEGLMTTVHAMTATQKTVDGPSSKDWRGGRAASFNIIPSSTGAAKAVGKVLPELNGKLTGMAFRVPTVDVSVVDLTVRLAKPATYDQIKAAIKEESEGNLKGILGYVDEDLVSTDFQGDNRSSIFDAKAGIALNDNFVKLVSWYDNEWGYSTRVVDLIRHMHSTK

SEQ ID NO: 56417 - protein, 292 aa, Glycine max
  peptide (1)..(292): Ceres Seq. ID no. 15179644
  misc_feature (110)..(271): Pfam Name: Glyceraldehyde 3-phosphate dehydrogenase, Pfam Description: Glyceraldehyde 3-phosphate dehydrogenase,
  misc_feature (1)..(291): Homolog of NCBI NO: 462141 NR Description: Glyceraldehyde 3-phosphate dehydrogenase (GAPDH)
  misc_feature (1)..(292): Homolog of NCBI NO: 4539543 NR Description: glyceraldehyde-3-phosphate dehydrogenase
  misc_feature (1)..(292): Homolog of NCBI NO: 1345501 NR Description: glycolytic glyceraldehyde 3-phosphate
  misc_feature (1)..(292): Homolog of NCBI NO: 120666 NR Description: Glyceraldehyde 3-phosphate dehydrogenase,
  misc_feature (1)..(291): Homolog of NCBI NO: 462137 NR Description: GLYCERALDEHYDE 3-PHOSPHATE DEHYDROGENASE,
  misc_feature (1)..(292): Homolog of NCBI NO: 120668 NR Description: Glyceraldehyde 3-phosphate dehydrogenase,
  misc_feature (1)..(291): Homolog of NCBI NO: 7431535 NR Description: glyceraldehyde-3-phosphate dehydrogenase
  misc_feature (1)..(292): Homolog of NCBI NO: 6166167 NR Description: Glyceraldehyde 3-phosphate dehydrogenase,
  misc_feature (1)..(292): Homolog of NCBI NO: 29150193 NR Description: putative glyceraldehydes 3-phosphate
  misc_feature (1)..(292): Homolog of NCBI NO: 38346061 NR Description: OJ000223_09.15 [Oryza sativa (japonica
MFKYDTVHGQWKHHEVKVKDSKTLLFGEKEVAVFGCRNPEEIPWAAAGAEYVVESTGVFTDKDKAAAHIKGGAKKVIISAPSKDAPMFVCGVNEKEYKSDIDIVSNASCTTNCLAPLAKVINDRFGIVEGLMTTVHAMTATQKTVDGPSSKDWRGGRAASFNIIPSSTGAAKAVGKVLPELNGKLTGMAFRVPTVDVSVVDLTVRLAKPATYDQIKAAIKEESEGNLKGILGYVDEDLVSTDFQGDNRSSIFDAKAGIALNDNFVKLVSWYDNEWGYSTRVVDLIRHMHSTK

SEQ ID NO: 56418 - DNA, 1187 bp, Glycine max
  misc_feature (1)..(1187): Ceres Seq. ID no. 12612330
gttcactagcttcggagtttctttcgaataattttttaaaaaaaaacaatggcgacggttcagttcttcaaccaattcccctgcaaaacacgagtccaaagctcagcaaactcaaaacccctctccaagccaccgtcgctggtgccgacgagcgcgttcactcgccgtccgttgttctcccccggcgaattcgccgtttctcgtgcggatttcagagtcagagtcatcgatgcagaagacgagtttgattcggagaggagtgagggaggatcggctctattgatggcggaggaagcaatcgaatccgtggaagagacggaggttctcaagagatcgctggtggattcgttgtacggcacagaccgagggttgagcgcatcgagcgagacgagagccgagatcggagatctaatcacacagctcgagtccaagaaccctacaccagctcccaccgatgctctcttccttctcaacggcaaatggatcctcgcgtacacatcgttcgttggtttgttcccgttgctttcacgagggatcgtgccgttagttaaagtcgacgagatctcacagactattgattcggaaaacttcacggtcgagaactctgttctgttcgctggtccgttagctacaacctcaatcagcaccaacgccaaattcgaaatccgtagccctaaacgcgtccagattaagttcgaggaaggtgtgatcggcactcctcagctaacggattcgatcgagatcccggagtatgttgagtttcttggtcagaagattgatcttactccgatcagagggttgcttacatctgtacaagacacggctacgtctgtggctagaaccatatcgagccagccaccgttgaaattctccttgccaggggacaatgcccagtcgtggctgctcaccacttatctggacaaggacattaggatctctagaggagatggtggaagcgtctttgtgcttatcaaagaaggaagccctctcttgaactcttgaactctttaatgccaagtacaaactaagtgtttaatattgttgttgtagtgttaatcgtttgtattaactcggatggtatggagttaagaaataatgttgtagctgctaaaaaaaaaaaaaaaaaagcttcgggtggacccggtcaacttcaagctcctaagccactgcctgctggtgagcccatc

SEQ ID NO: 56419 - protein, 317 aa, Glycine max
  peptide (1)..(317): Ceres Seq. ID no. 12612331
  misc_feature (91)..(308): Pfam Name: PAP_fibrillin Pfam Description: PAP_fibrillin
  misc_feature (81)..(316): Homolog of NCBI NO: 4139097 NR Description: fibrillin [Brassica napus]
  misc_feature (1)..(315): Homolog of NCBI NO: 3928760 NR Description: homolog to plastid-lipid-associated protein
  misc_feature (3)..(316): Homolog of NCBI NO: 14248548 NR Description: plastid-lipid associated protein PAP1 [Brassica
  misc_feature (3)..(316): Homolog of NCBI NO: 14248554 NR Description: plastid-lipid associated protein PAP1 [Brassica
  misc_feature (1)..(316): Homolog of NCBI NO: 15233357 NR Description: putative fibrillin
  misc_feature (1)..(316): Homolog of NCBI NO: 18377868 NR Description: AT4g22240/T10I14_70 [Arabidopsis thaliana]
  misc_feature (1)..(316): Homolog of NCBI NO: 21618237 NR Description: fibrillin precursor-like protein [Arabidopsis
  misc_feature (1)..(316): Homolog of NCBI NO: 15235575 NR Description: fibrillin precursor-like protein
  misc_feature (1)..(316): Homolog of NCBI NO: 14248550 NR Description: plastid-lipid associated protein PAP2 [Brassica
  misc_feature (1)..(316): Homolog of NCBI NO: 14248556 NR Description: plastid-lipid associated protein PAP2 [Brassica
MATVQFFNQFPCKTRVQSSANSKPLSKPPSLVPTSAFTRRPLFSPGEFAVSRADFRVRVIDAEDEFDSERSEGGSALLMAEEAIESVEETEVLKRSLVDSLYGTDRGLSASSETRAEIGDLITQLESKNPTPAPTDALFLLNGKWILAYTSFVGLFPLLSRGIVPLVKVDEISQTIDSENFTVENSVLFAGPLATTSISTNAKFEIRSPKRVQIKFEEGVIGTPQLTDSIEIPEYVEFLGQKIDLTPIRGLLTSVQDTATSVARTISSQPPLKFSLPGDNAQSWLLTTYLDKDIRISRGDGGSVFVLIKEGSPLLNS

SEQ ID NO: 56420 - protein, 239 aa, Glycine max
  peptide (1)..(239): Ceres Seq. ID no. 12612332
  misc_feature (13)..(230): Pfam Name: PAP_fibrillin Pfam Description: PAP_fibrillin
  misc_feature (3)..(238): Homolog of NCBI NO: 4139097 NR Description: fibrillin [Brassica napus]
  misc_feature (1)..(237): Homolog of NCBI NO: 3928760 NR Description: homolog to plastid-lipid-associated protein
  misc_feature (1)..(238): Homolog of NCBI NO: 14248548 NR Description: plastid-lipid associated protein PAP1 [Brassica
  misc_feature (1)..(238): Homolog of NCBI NO: 14248554 NR Description: plastid-lipid associated protein PAP1 [Brassica
  misc_feature (1)..(238): Homolog of NCBI NO: 15233357 NR Description: putative fibrillin
  misc_feature (1)..(238): Homolog of NCBI NO: 18377868 NR Description: AT4g22240/T10I14_70 [Arabidopsis thaliana]
  misc_feature (1)..(238): Homolog of NCBI NO: 21618237 NR Description: fibrillin precursor-like protein [Arabidopsis
  misc_feature (1)..(238): Homolog of NCBI NO: 15235575 NR Description: fibrillin precursor-like protein
  misc_feature (1)..(238): Homolog of NCBI NO: 14248550 NR Description: plastid-lipid associated protein PAP2 [Brassica
  misc_feature (1)..(238): Homolog of NCBI NO: 14248556 NR Description: plastid-lipid associated protein PAP2 [Brassica
MAEEAIESVEETEVLKRSLVDSLYGTDRGLSASSETRAEIGDLITQLESKNPTPAPTDALFLLNGKWILAYTSFVGLFPLLSRGIVPLVKVDEISQTIDSENFTVENSVLFAGPLATTSISTNAKFEIRSPKRVQIKFEEGVIGTPQLTDSIEIPEYVEFLGQKIDLTPIRGLLTSVQDTATSVARTISSQPPLKFSLPGDNAQSWLLTTYLDKDIRISRGDGGSVFVLIKEGSPLLNS

SEQ ID NO: 56421 - DNA, 773 bp, Glycine max
  misc_feature (1)..(773): Ceres Seq. ID no. 12612333
atcaaactcatacatagaaaataaataagaagaatttagaaaccctaaccatcatgtctccaaaatcaaaggctaaagctatgttcatcatcttcaaaatattaatgttaaatcttttgccaccaatatatgcatgtgggccatgcactacgccacgttaccccaaagggccgccccatcacggaggaggccggccgaaagtgtcgcctccgctgccgccaatcataatcaaccctccggtggtaccgccaccggtggtgatataccctccaccaatctcaccgccatacccgccgccgcacggtggtggtggttctcctccacaaaggacatgcccagttgatgccctaaaattggggctttgcttggatgtgcttggaggattggtgcatgtgggaatagggaacccagttgagaacgtgtgctgtccagttatacaagggttgcttgatcttgaagctgcaatttgtctttgcaccgttattagggctaagcttcttaacctcagcatcttccttcctattgcacttcaagtcttggtcacttgcgggaagactcctcctcctggttttgtttgtccaccgctgtattaaaccactgcatgcactacttcatactaccccaatactcaagcctatatagttctagttagttactacttactactagattaatatgtctttatcttttctattagggtttatgtaatgactcttatttcgttttatgtgtatgagtttacgctttaattaattatatacttctcaggattt

SEQ ID NO: 56422 - protein, 179 aa, Glycine max
  peptide (1)..(179): Ceres Seq. ID no. 12612334
  misc_feature (94)..(175): Pfam Name: Protease inhibitor/seed storage/LTP family Pfam Description: Protease inhibitor/seed storage/LTP family
  misc_feature (23)..(179): Homolog of NCBI NO: 34898430 NR Description: Similar to Zea mays PRP gene.(X60432)
  misc_feature (16)..(175): Homolog of NCBI NO: 1531756 NR Description: proline-rich-like protein [Asparagus officinalis]
  misc_feature (21)..(178): Homolog of NCBI NO: 15221483 NR Description: putative proline-rich cell wall protein
MSPKSKAKAMFIIFKILMLNLLPPIYACGPCTTPRYPKGPPHHGGGRPKVSPPLPPIIINPPVVPPPVVIYPPPISPPYPPPHGGGGSPPQRTCPVDALKLGLCLDVLGGLVHVGIGNPVENVCCPVIQGLLDLEAAICLCTVIRAKLLNLSIFLPIALQVLVTCGKTPPPGFVCPPLY

SEQ ID NO: 56423 - protein, 170 aa, Glycine max
  peptide (1)..(170): Ceres Seq. ID no. 12612335
  misc_feature (85)..(166): Pfam Name: Protease inhibitor/seed storage/LTP family Pfam Description: Protease inhibitor/seed storage/LTP family
  misc_feature (14)..(170): Homolog of NCBI NO: 34898430 NR Description: Similar to Zea mays PRP gene.(X60432)
  misc_feature (7)..(166): Homolog of NCBI NO: 1531756 NR Description: proline-rich-like protein [Asparagus officinalis]
  misc_feature (12)..(169): Homolog of NCBI NO: 15221483 NR Description: putative proline-rich cell wall protein
MFIIFKILMLNLLPPIYACGPCTTPRYPKGPPHHGGGRPKVSPPLPPIIINPPVVPPPVVIYPPPISPPYPPPHGGGGSPPQRTCPVDALKLGLCLDVLGGLVHVGIGNPVENVCCPVIQGLLDLEAAICLCTVIRAKLLNLSIFLPIALQVLVTCGKTPPPGFVCPPLY

SEQ ID NO: 56424 - protein, 162 aa, Glycine max
  peptide (1)..(162): Ceres Seq. ID no. 12612336
  misc_feature (77)..(158): Pfam Name: Protease inhibitor/seed storage/LTP family Pfam Description: Protease inhibitor/seed storage/LTP family
  misc_feature (6)..(162): Homolog of NCBI NO: 34898430 NR Description: Similar to Zea mays PRP gene.(X60432)
  misc_feature (1)..(158): Homolog of NCBI NO: 1531756 NR Description: proline-rich-like protein [Asparagus officinalis]
  misc_feature (4)..(161): Homolog of NCBI NO: 15221483 NR Description: putative proline-rich cell wall protein
MLNLLPPIYACGPCTTPRYPKGPPHHGGGRPKVSPPLPPIIINPPVVPPPVVIYPPPISPPYPPPHGGGGSPPQRTCPVDALKLGLCLDVLGGLVHVGIGNPVENVCCPVIQGLLDLEAAICLCTVIRAKLLNLSIFLPIALQVLVTCGKTPPPGFVCPPLY

SEQ ID NO: 56425 - DNA, 823 bp, Glycine max
  misc_feature (1)..(823): Ceres Seq. ID no. 14301432
tcactcccttccttcgtcctttgcactcccactcctacgcttcccaacctcgccattccgtcgagcacatcccgggcgacgcaggcggccatggaggacggcggcgcgagagcggcggcggtgcagaagctgatggcggccaaggccaagtccggcaagagcttctccgacatcggggccgagacggggctcaccaacgtgtacgtcgcgcagctgctgcgccgccaggcgcagctcaagcccgacacggcggccgcgctgcgggcggccatcccggcgctcaccgaagagctcgtggaactcatgatgcagccgcccttccgctcgtacaaccctgaaatggtccacgagcccgccatatacagactgaatgaagctatcatgcattttggagagagcatcaaggcaatcatcaatgaggactttggtgatggaatcatgtcagctatagacttctactgtaccgtcgacaaagttaaaggggctgatggaaaagaccgtgtggtgctcacatttgatgggaagtatctgcctcacactgaacagaaagccgcgaatatgatgtcgaagttgccctgcaaggcaccttgagataatgagatggctggtactgggagaaggggggtatgtagcttcactaatgtctgcttatacttcggacaaaaaaattgagcgtcccttttctagtctgaatgatcgaccaaataaagagtggtcatatagtatgtaatgtctgcttgtactttggacctggaacagcattcgacatgcttttcctcgtctgaatgatcgactaaataaagtggcaatatagtttgtaaat

SEQ ID NO: 56426 - protein, 196 aa, Glycine max
  peptide (1)..(196): Ceres Seq. ID no. 14301433
  misc_feature (109)..(182): Pfam Name: Cyanate lyase C-terminal domain Pfam Description: Cyanate lyase C-terminal domain
  misc_feature (58)..(174): Homolog of NCBI NO: 40742192 NR Description: hypothetical protein AN7331.2 [Aspergillus
  misc_feature (37)..(178): Homolog of NCBI NO: 37524138 NR Description: cyanate lyase (cyanate hydrolase) (cyanase)
  misc_feature (37)..(179): Homolog of NCBI NO: 28869134 NR Description: cyanate lyase [Pseudomonas syringae pv. tomato
  misc_feature (36)..(178): Homolog of NCBI NO: 15597248 NR Description: cyanate lyase [Pseudomonas aeruginosa PA01]
  misc_feature (34)..(194): Homolog of NCBI NO: 37535282 NR Description: putative cyanase [Oryza sativa (japonica
  misc_feature (14)..(121): Homolog of NCBI NO: 37535282 NR Description: putative cyanase [Oryza sativa (japonica
  misc_feature (33)..(194): Homolog of NCBI NO: 21554171 NR Description: cyanate lyase (CYN) [Arabidopsis thaliana]
  misc_feature (33)..(194): Homolog of NCBI NO: 15229458 NR Description: cyanate lyase (CYN) [Arabidopsis thaliana]
  misc_feature (31)..(194): Homolog of NCBI NO: 20137963 NR Description: Cyanate hydratase (Cyanase) (Cyanate lyase)
SLPSFVLCTPTPTLPNLAIPSSTSRATQAAMEDGGARAAAVQKLMAAKAKSGKSFSDIGAETGLTNVYVAQLLRRQAQLKPDTAAALRAAIPALTEELVELMMQPPFRSYNPEMVHEPAIYRLNEAIMHFGESIKAIINEDFGDGIMSAIDFYCTVDKVKGADGKDRVVLTFDGKYLPHTEQKAANMMSKLPCKAP

SEQ ID NO: 56427 - protein, 166 aa, Glycine max
  peptide (1)..(166): Ceres Seq. ID no. 14301434
  misc_feature (79)..(152): Pfam Name: Cyanate lyase C-terminal domain Pfam Description: Cyanate lyase C-terminal domain
  misc_feature (28)..(144): Homolog of NCBI NO: 40742192 NR Description: hypothetical protein AN7331.2 [Aspergillus
  misc_feature (7)..(148): Homolog of NCBI NO: 37524138 NR Description: cyanate lyase (cyanate hydrolase) (cyanase)
  misc_feature (7)..(149): Homolog of NCBI NO: 28869134 NR Description: cyanate lyase [Pseudomonas syringae pv. tomato
  misc_feature (6)..(148): Homolog of NCBI NO: 15597248 NR Description: cyanate lyase [Pseudomonas aeruginosa PA01]
  misc_feature (4)..(164): Homolog of NCBI NO: 37535282 NR Description: putative cyanase [Oryza sativa (japonica
  misc_feature (1)..(91): Homolog of NCBI NO: 37535282 NR Description: putative cyanase [Oryza sativa (japonica
  misc_feature (3)..(164): Homolog of NCBI NO: 21554171 NR Description: cyanate lyase (CYN) [Arabidopsis thaliana]
  misc_feature (3)..(164): Homolog of NCBI NO: 15229458 NR Description: cyanate lyase (CYN) [Arabidopsis thaliana]
  misc_feature (1)..(164): Homolog of NCBI NO: 20137963 NR Description: Cyanate hydratase (Cyanase) (Cyanate lyase)
MEDGGARAAAVQKLMAAKAKSGKSFSDIGAETGLTNVYVAQLLRRQAQLKPDTAAALRAAIPALTEELVELMMQPPFRSYNPEMVHEPAIYRLNEAIMHFGESIKAIINEDFGDGIMSAIDFYCTVDKVKGADGKDRVVLTFDGKYLPHTEQKAANMMSKLPCKAP

SEQ ID NO: 56428 - protein, 152 aa, Glycine max
  peptide (1)..(152): Ceres Seq. ID no. 14301435
  misc_feature (65)..(138): Pfam Name: Cyanate lyase C-terminal domain Pfam Description: Cyanate lyase C-terminal domain
  misc_feature (14)..(130): Homolog of NCBI NO: 40742192 NR Description: hypothetical protein AN7331.2 [Aspergillus
  misc_feature (1)..(134): Homolog of NCBI NO: 37524138 NR Description: cyanate lyase (cyanate hydrolase) (cyanase)
  misc_feature (1)..(135): Homolog of NCBI NO: 28869134 NR Description: cyanate lyase [Pseudomonas syringae pv. tomato
  misc_feature (1)..(134): Homolog of NCBI NO: 15597248 NR Description: cyanate lyase [Pseudomonas aeruginosa PA01]
  misc_feature (1)..(150): Homolog of NCBI NO: 37535282 NR Description: putative cyanase [Oryza sativa (japonica
  misc_feature (1)..(77): Homolog of NCBI NO: 37535282 NR Description: putative cyanase [Oryza sativa (japonica
  misc_feature (1)..(150): Homolog of NCBI NO: 21554171 NR Description: cyanate lyase (CYN) [Arabidopsis thaliana]
  misc_feature (1)..(150): Homolog of NCBI NO: 15229458 NR Description: cyanate lyase (CYN) [Arabidopsis thaliana]
  misc_feature (1)..(150): Homolog of NCBI NO: 20137963 NR Description: Cyanate hydratase (Cyanase) (Cyanate lyase)
MAAKAKSGKSFSDIGAETGLTNVYVAQLLRRQAQLKPDTAAALRAAIPALTEELVELMMQPPFRSYNPEMVHEPAIYRLNEAIMHFGESIKAIINEDFGDGIMSAIDFYCTVDKVKGADGKDRVVLTFDGKYLPHTEQKAANMMSKLPCKAP

SEQ ID NO: 56429 - DNA, 1002 bp, Glycine max
  misc_feature (1)..(1002): Ceres Seq. ID no. 13639221
agacattgtctcaatcccacacgcttcttactcctctcataacttttctgctccccgttgagaaagatttgaatccaaaggaaaaataacgctaatggctccaagagacagccgagccaccgcgctcattgggcccggcccaagcctatcaccggcccacaaagagatccgctacagaggcgtcaggaaacgcccctggggccgctacgccgccgagatccgcgatcccggcaagaaaacccgcgtctggctcggcactttcgacaccgccgaggaagccgcgcgcgcctacgacaccgccgcgcgtgagtttcgtggcgccaaggccaagaccaatttcccgacaccctcggaactcatccttaacaacaacaacataaacgctcgtagtcccagccagaccagcaccctcgactcatcctctcccccgccaccgccaccgctagaccttaccctcacccctctctcctccgctgtcttcccggtggcgcgtcctgttctattcttcgacgcattcgcgcgtgcggacaccatggtcgccgtctcgcgccgcgagacctgcggcttcgaacgccccgccgccgatttccgccgcggcgactccgactctgattataaccgccgcatactcctggatcttgacctgaacgtacctcctctcccggaggttgcctgattcatgcagggagttctgtttttttcgcaattattgtttttttggttttttaagcatctgggaggtactactacgcatcttttttgacgaaagtgccctcgagggagcagcaaagtgagtagtggatgacatgatgctcggatttgttgaccattttgtgatgatgaagatatataaccggcacgttatgtaaatacacgttataaccgaaagcaaacgtgcttttgcttggttgcttttttttttgcaactgaggactcttattcagagtatctcatggttgtttctgcaatttctcaaaatatataaatattccaatttccatc

SEQ ID NO: 56430 - protein, 193 aa, Glycine max
  peptide (1)..(193): Ceres Seq. ID no. 13639222
  misc_feature (24)..(88): Pfam Name: AP2 domain Pfam Description: AP2 domain
  misc_feature (1)..(192): Homolog of NCBI NO: 15241432 NR Description: ethylene responsive element binding factor 9
  misc_feature (23)..(122): Homolog of NCBI NO: 8809573 NR Description: ethylene-responsive element binding factor
  misc_feature (23)..(122): Homolog of NCBI NO: 7489114 NR Description: DNA binding protein EREBP-3 - common tobacco
  misc_feature (1)..(110): Homolog of NCBI NO: 4099921 NR Description: EREBP-3 homolog [Stylosanthes hamata]
  misc_feature (17)..(121): Homolog of NCBI NO: 30526297 NR Description: ethylene response factor 2 [Lycopersicon
  misc_feature (1)..(121): Homolog of NCBI NO: 28274832 NR Description: ethylene response factor 3 [Lycopersicon
  misc_feature (1)..(110): Homolog of NCBI NO: 4099914 NR Description: ethylene-responsive element binding protein
  misc_feature (23)..(139): Homolog of NCBI NO: 15232526 NR Description: ethylene responsive element binding factor 4
  misc_feature (23)..(139): Homolog of NCBI NO: 2281635 NR Description: AP2 domain containing protein RAP2.5 [Arabidopsis
  misc_feature (14)..(191): Homolog of NCBI NO: 20340233 NR Description: ethylene responsive element binding factor 4-like
MAPRDSRATALIGPGPSLSPAHKEIRYRGVRKRPWGRYAAEIRDPGKKTRVWLGTFDTAEEAARAYDTAAREFRGAKAKTNFPTPSELILNNNNINARSPSQTSTLDSSSPPPPPPLDLTLTPLSSAVFPVARPVLFFDAFARADTMVAVSRRETCGFERPAADFRRGDSDSDYNRRILLDLDLNVPPLPEVA

SEQ ID NO: 56431 - DNA, 962 bp, Glycine max
  misc_feature (1)..(962): Ceres Seq. ID no. 13594828
tactagcttacttaggacctggcagcctctcaattttctctataaataccagtgcctccgtgtcttctcaattttcaccagccatagtcatacagcgacaataaggagagcaaattagaagcacagatcaaggggaagagaactccgcggctgatcagcaatggcgaccaagatctacatagtgtactactcgacctggggacacgtcgcgacgctggcggaggagatgaagaagggcgccgactccgtccccggcgtcgaggtcaccgtctggcgggtgccagagacgctgccagaggaggtgctcgggaagatgcacgcggcgccggggcgcgaggaccacccggtcatcacggcgagccagctggccgaggccgacggcatcctgttcggcttcccgacgcggttcggcatgatggcggcgcagatgaaggccttcttcgactccaccggcggcctctggcaggcacagagcctctcgggcaagcccgcgggcgtcttcttcgcgacgggcacccagggcggcgggcaggagaccacggctctcacggccgtgacgcagctgacgcaccacggcatgctgttcgtgccggtcgggtacacgcacggcgccggcatgttcgccatggacgaggtcaagggtggcagcccgtacggtgccggcaccttcgctggagccgatggcagcagggtgcccagcgatgccgagctcgccctcgcggcgcaccagggcaagtactttgccggcatcgccaagaagctcaaagccgtctgaactccgatcaccagccgtgtcccatgactcatatcaactactcaatcattacaagatgatttgacacatcattttcagtggagcagatttacataattctagacaattaaactgtactgcatttaatttcttgtttggacaaataatacaatttcttgttttgagtggagcattcggtcttggtttt

SEQ ID NO: 56432 - protein, 204 aa, Glycine max
  peptide (1)..(204): Ceres Seq. ID no. 13594829
  misc_feature (4)..(201): Homolog of NCBI NO: 15234512 NR Description: quinone reductase family [Arabidopsis thaliana]
  misc_feature (1)..(202): Homolog of NCBI NO: 7445353 NR Description: hypothetical protein M4I22.80 - Arabidopsis
  misc_feature (1)..(203): Homolog of NCBI NO: 2564066 NR Description: LEDI-3 protein [Lithospermum erythrorhizon]
  misc_feature (1)..(202): Homolog of NCBI NO: 15239652 NR Description: quinone reductase, putative [Arabidopsis
  misc_feature (1)..(202): Homolog of NCBI NO: 30687535 NR Description: quinone reductase family [Arabidopsis thaliana]
  misc_feature (1)..(202): Homolog of NCBI NO: 5031275 NR Description: unknown [Prunus armeniaca]
  misc_feature (3)..(202): Homolog of NCBI NO: 21068664 NR Description: putative quinone oxidoreductase [Cicer arietinum]
  misc_feature (1)..(202): Homolog of NCBI NO: 38636776 NR Description: putative quinone-oxidoreductase QR2
  misc_feature (1)..(202): Homolog of NCBI NO: 34910128 NR Description: putative 1,4-benzoquinone reductase
  misc_feature (1)..(202): Homolog of NCBI NO: 12484052 NR Description: quinone-oxidoreductase QR2 [Triphysaria
MATKIYIVYYSTWGHVATLAEEMKKGADSVPGVEVTVWRVPETLPEEVLGKMHAAPGREDHPVITASQLAEADGILFGFPTRFGMMAAQMKAFFDSTGGLWQAQSLSGKPAGVFFATGTQGGGQETTALTAVTQLTHHGMLFVPVGYTHGAGMFAMDEVKGGSPYGAGTFAGADGSRVPSDAELALAAHQGKYFAGIAKKLKAV

SEQ ID NO: 56433 - protein, 182 aa, Glycine max
  peptide (1)..(182): Ceres Seq. ID no. 13594830
  misc_feature (1)..(179): Homolog of NCBI NO: 15234512 NR Description: quinone reductase family [Arabidopsis thaliana]
  misc_feature (1)..(180): Homolog of NCBI NO: 7445353 NR Description: hypothetical protein M4I22.80 - Arabidopsis
  misc_feature (1)..(181): Homolog of NCBI NO: 2564066 NR Description: LEDI-3 protein [Lithospermum erythrorhizon]
  misc_feature (1)..(180): Homolog of NCBI NO: 15239652 NR Description: quinone reductase, putative [Arabidopsis
  misc_feature (1)..(180): Homolog of NCBI NO: 30687535 NR Description: quinone reductase family [Arabidopsis thaliana]
  misc_feature (1)..(180): Homolog of NCBI NO: 5031275 NR Description: unknown [Prunus armeniaca]
  misc_feature (1)..(180): Homolog of NCBI NO: 21068664 NR Description: putative quinone oxidoreductase [Cicer arietinum]
  misc_feature (1)..(180): Homolog of NCBI NO: 38636776 NR Description: putative quinone-oxidoreductase QR2
  misc_feature (1)..(180): Homolog of NCBI NO: 34910128 NR Description: putative 1,4-benzoquinone reductase
  misc_feature (1)..(180): Homolog of NCBI NO: 12484052 NR Description: quinone-oxidoreductase QR2 [Triphysaria
MKKGADSVPGVEVTVWRVPETLPEEVLGKMHAAPGREDHPVITASQLAEADGILFGFPTRFGMMAAQMKAFFDSTGGLWQAQSLSGKPAGVFFATGTQGGGQETTALTAVTQLTHHGMLFVPVGYTHGAGMFAMDEVKGGSPYGAGTFAGADGSRVPSDAELALAAHQGKYFAGIAKKLKAV

SEQ ID NO: 56434 - protein, 153 aa, Glycine max
  peptide (1)..(153): Ceres Seq. ID no. 13594831
  misc_feature (1)..(150): Homolog of NCBI NO: 15234512 NR Description: quinone reductase family [Arabidopsis thaliana]
  misc_feature (1)..(151): Homolog of NCBI NO: 7445353 NR Description: hypothetical protein M4I22.80 - Arabidopsis
  misc_feature (1)..(152): Homolog of NCBI NO: 2564066 NR Description: LEDI-3 protein [Lithospermum erythrorhizon]
  misc_feature (1)..(151): Homolog of NCBI NO: 15239652 NR Description: quinone reductase, putative [Arabidopsis
  misc_feature (1)..(151): Homolog of NCBI NO: 30687535 NR Description: quinone reductase family [Arabidopsis thaliana]
  misc_feature (1)..(151): Homolog of NCBI NO: 5031275 NR Description: unknown [Prunus armeniaca]
  misc_feature (1)..(151): Homolog of NCBI NO: 21068664 NR Description: putative quinone oxidoreductase [Cicer arietinum]
  misc_feature (1)..(151): Homolog of NCBI NO: 38636776 NR Description: putative quinone-oxidoreductase QR2
  misc_feature (1)..(151): Homolog of NCBI NO: 34910128 NR Description: putative 1,4-benzoquinone reductase
  misc_feature (1)..(151): Homolog of NCBI NO: 12484052 NR Description: quinone-oxidoreductase QR2 [Triphysaria
MHAAPGREDHPVITASQLAEADGILFGFPTRFGMMAAQMKAFFDSTGGLWQAQSLSGKPAGVFFATGTQGGGQETTALTAVTQLTHHGMLFVPVGYTHGAGMFAMDEVKGGSPYGAGTFAGADGSRVPSDAELALAAHQGKYFAGIAKKLKAV

SEQ ID NO: 56435 - DNA, 1296 bp, Glycine max
  misc_feature (1)..(1296): Ceres Seq. ID no. 12583314
aatgactggcattcaagttagcttagctatgatgaatgaagaggagtatagatggtcaacgtttttggtaagcaactagtaattaagcaagcaagaatcacaaattggaaccatgtttctcaaatgttttggcttcggcgctcagagacagtatccaacggtgatagaagagttgtgccatcgattttctctcgcagatctaaggaaatcaaccaacaatttcgatcaaaacacagtaattgatcgtggaggatgtggcagagtatataaaggttgtctccagcacaatgaacatgcttctgatacagtcgctgtaaagcgattgggaatgggaaatgaagagttgttcaggaatgaaatagagttactctgtcagcttcgtcaccctaatttggtctctcttataggattctgcaacgaccaaaaagagaagattattgtgtacgagtacttgtccaatggatctcttgatcaacttctacaaagtggggtactgtcatggaagaaaagactagagatatgcataggagcagcgcgtggactacactaccttcacgctggagccaaacgcaccatcattcaccgtgacatcaaacccagcaacattcttttggatgataacatggagccaaaactcgcaggtttcagccttagcgtactgggaccgcgttttaagtcaaaacccaaaccaattaaagtagattctgttttgggtacttatggctacctggctgcggagcatctcaaggacctcaccgtcacagataaaactgatgtttactcatttggtatggttctacttgatgttgtgtgtggagggaaatatttcatgaagtcaattaaaacggaatttctggaaaaacctcttgaggagaaaattgatggaattatcgaaggaagtatcgcaccagagtgttggcaagtcttcatagatatcatccgaaagtgcgtgaaatatgaagcacatgagcgaccaacaatgggtgaagtagaggtagaacttgagcatgctctgtcgttgcaggaacaagcagatatcacaaacaacattaaccaacaatgggtgaaattggaagcagatgagcgaccaacaatgggtgaagtaaaggtagaacttgagcatgctctgtccttacaagcactagcagatagagtaaacaccaactgtcgttataccttaatgtccaaaaccgttattaatccctggctcaaagagtcacaagattctgaataaagtattgaaatccataggtgatttgattaggtaagctgaaattaaggttagtgttttgagtc

SEQ ID NO: 56436 - protein, 373 aa, Glycine max
  peptide (1)..(373): Ceres Seq. ID no. 12583315
  misc_feature (21)..(308): Homolog of NCBI NO: 14334760 NR Description: putative receptor-protein kinase [Arabidopsis
  misc_feature (20)..(312): Homolog of NCBI NO: 15241606 NR Description: protein kinase - like protein; protein id:
  misc_feature (21)..(308): Homolog of NCBI NO: 17887381 NR Description: receptor protein kinase-like protein [Capsicum
  misc_feature (21)..(308): Homolog of NCBI NO: 15230520 NR Description: receptor-protein kinase-like protein
  misc_feature (20)..(312): Homolog of NCBI NO: 15241605 NR Description: protein kinase - like protein
  misc_feature (21)..(312): Homolog of NCBI NO: 15229329 NR Description: putative protein kinase; protein id: At3g04690.1
  misc_feature (20)..(312): Homolog of NCBI NO: 20147233 NR Description: AT5g38990/K15E6_170 [Arabidopsis thaliana]
  misc_feature (21)..(313): Homolog of NCBI NO: 34909896 NR Description: putative receptor-protein kinase
  misc_feature (21)..(308): Homolog of NCBI NO: 15241880 NR Description: receptor-like protein kinase precursor - like
  misc_feature (1)..(368): Homolog of NCBI NO: 9796478 NR Description: serine threonine kinase homolog COK-4 [Phaseolus
MFLKCFGFGAQRQYPTVIEELCHRFSLADLRKSTNNFDQNTVIDRGGCGRVYKGCLQHNEHASDTVAVKRLGMGNEELFRNEIELLCQLRHPNLVSLIGFCNDQKEKIIVYEYLSNGSLDQLLQSGVLSWKKRLEICIGAARGLHYLHAGAKRTIIHRDIKPSNILLDDNMEPKLAGFSLSVLGPRFKSKPKPIKVDSVLGTYGYLAAEHLKDLTVTDKTDVYSFGMVLLDVVCGGKYFMKSIKTEFLEKPLEEKIDGIIEGSIAPECWQVFIDIIRKCVKYEAHERPTMGEVEVELEHALSLQEQADITNNINQQWVKLEADERPTMGEVKVELEHALSLQALADRVNTNCRYTLMSKTVINPWLKESQDSE

SEQ ID NO: 56437 - protein, 301 aa, Glycine max
  peptide (1)..(301): Ceres Seq. ID no. 12583316
  misc_feature (1)..(236): Homolog of NCBI NO: 14334760 NR Description: putative receptor-protein kinase [Arabidopsis
  misc_feature (1)..(240): Homolog of NCBI NO: 15241606 NR Description: protein kinase - like protein; protein id:
  misc_feature (1)..(236): Homolog of NCBI NO: 17887381 NR Description: receptor protein kinase-like protein [Capsicum
  misc_feature (1)..(236): Homolog of NCBI NO: 15230520 NR Description: receptor-protein kinase-like protein
  misc_feature (1)..(240): Homolog of NCBI NO: 15241605 NR Description: protein kinase - like protein
  misc_feature (1)..(240): Homolog of NCBI NO: 15229329 NR Description: putative protein kinase; protein id: At3g04690.1
  misc_feature (1)..(240): Homolog of NCBI NO: 20147233 NR Description: AT5g38990/K15E6_170 [Arabidopsis thaliana]
  misc_feature (1)..(241): Homolog of NCBI NO: 34909896 NR Description: putative receptor-protein kinase
  misc_feature (1)..(236): Homolog of NCBI NO: 15241880 NR Description: receptor-like protein kinase precursor - like
  misc_feature (1)..(296): Homolog of NCBI NO: 9796478 NR Description: serine threonine kinase homolog COK-4 [Phaseolus
MGNEELFRNEIELLCQLRHPNLVSLIGFCNDQKEKIIVYEYLSNGSLDQLLQSGVLSWKKRLEICIGAARGLHYLHAGAKRTIIHRDIKPSNILLDDNMEPKLAGFSLSVLGPRFKSKPKPIKVDSVLGTYGYLAAEHLKDLTVTDKTDVYSFGMVLLDVVCGGKYFMKSIKTEFLEKPLEEKIDGIIEGSIAPECWQVFIDIIRKCVKYEAHERPTMGEVEVELEHALSLQEQADITNNINQQWVKLEADERPTMGEVKVELEHALSLQALADRVNTNCRYTLMSKTVINPWLKESQDSE

SEQ ID NO: 56438 - protein, 203 aa, Glycine max
  peptide (1)..(203): Ceres Seq. ID no. 12583317
  misc_feature (1)..(138): Homolog of NCBI NO: 14334760 NR Description: putative receptor-protein kinase [Arabidopsis
  misc_feature (1)..(142): Homolog of NCBI NO: 15241606 NR Description: protein kinase - like protein; protein id:
  misc_feature (1)..(138): Homolog of NCBI NO: 17887381 NR Description: receptor protein kinase-like protein [Capsicum
  misc_feature (1)..(138): Homolog of NCBI NO: 15230520 NR Description: receptor-protein kinase-like protein
  misc_feature (1)..(142): Homolog of NCBI NO: 15241605 NR Description: protein kinase - like protein
  misc_feature (1)..(142): Homolog of NCBI NO: 15229329 NR Description: putative protein kinase; protein id: At3g04690.1
  misc_feature (1)..(142): Homolog of NCBI NO: 20147233 NR Description: AT5g38990/K15E6_170 [Arabidopsis thaliana]
  misc_feature (1)..(143): Homolog of NCBI NO: 34909896 NR Description: putative receptor-protein kinase
  misc_feature (1)..(138): Homolog of NCBI NO: 15241880 NR Description: receptor-like protein kinase precursor - like
  misc_feature (1)..(198): Homolog of NCBI NO: 9796478 NR Description: serine threonine kinase homolog COK-4 [Phaseolus
MEPKLAGFSLSVLGPRFKSKPKPIKVDSVLGTYGYLAAEHLKDLTVTDKTDVYSFGMVLLDVVCGGKYFMKSIKTEFLEKPLEEKIDGIIEGSIAPECWQVFIDIIRKCVKYEAHERPTMGEVEVELEHALSLQEQADITNNINQQWVKLEADERPTMGEVKVELEHALSLQALADRVNTNCRYTLMSKTVINPWLKESQDSE

SEQ ID NO: 56439 - DNA, 1849 bp, Glycine max
  misc_feature (1)..(1849): Ceres Seq. ID no. 15178736
agaaggttgtggggttagggctttagagtgtcttttcttctttttcttcttcttcttcttcgttgaatcgcgattgttctgttgtgcgactgaaagaagagagatcgaaaatggcgttggctttcgacgagttcggaaggcctttcataatcctgaaggaacaggagcagaagagcagacttcgaggtttggacgctcagaaagccaacatctccgccggcaaagccgtcgctcgcatcctccgaacctccctcggccccaaaggcatggacaagatgctccagagccccgacggcgacgtcactatcacgaacgacggtgccacgatccttgaccagatggacgtggacaaccaaatcgcgaagctgatggtggagctctcgcggagtcaggactacgaaatcggcgacggaaccaccggcgtcgtcgtcatggccggcgcgcttctcgagaaggccgagcgcctcctcgagcggggaattcaccccatcaggatcgccaagggttacgaaatggcgtccaggatcgccgtcgagcatctcgagcgcgtcgccaacaagttcgagttcgacgagtccaatttggagcccctcattcaaacttgcatgaccaccctctcctccaaaattgtgaatcggtgtaagcgtagcttggctgagattgctgttaaggctgttcttgctgttgctgatctggcgaggaaggatgttaatttggatctaattaaagtggaagggaaagttgggggtaaattggaggataccgagttgatctatgggattgttgtggacaaggatatgagtcatcctcaaatgcctaagcaaattgaggatgctaaaattgctatcctcacatgcccctttgagcctcccaagccaaagactaagcataaggttgacattgatacagtggagaagttccagacgttgaggttgcaggaacagaagtattttgatgacatggttcagaaatgcaaggatgtgggtgcaacccttgtcatttgccaatggggttttgacgatgaagcaaatcatctcttaatgcacaggaacttgccagctgttagatgggttggtggtgtagagttggaattgatagctatagcaactggtggaagaattgttcctaggtttcaggagttatctccagaaaagttgggaaaggctggtatggttcgagaaaagtcctttggtacaacaaaagaccgaatgctgtacattgaacattgtgcaaactcaagggctgtaactatattcattcgtggaggtaacaaaatgatcattgaggagacaaagcgcagccttcatgatgccttgtgcgtggctaggaatcttatccggaacaactctattgtctatggtggtggttcagctgagatttcttgctctatagctgtggaggcagctgctgatagataccctggagtagaacagtatgcaattagagcatttggggatgctttggaggccatcccaatggcccttgctgaaaatagtggcctgcaaccaattgaaacattatctgctgttaagtctcagcaaataaaggataataaccctcactttggcattgattgtaatgatgttggcactaatgacatgcgtgagcaaaatgtctttgaaactttgatcggaaagcagcaacagctcctactcgctactcaagttgtcaagatgatactgaaaattgatgatgtcatctccccatctgagtactgatatttttaaactcagtcatggtctacgtcaagatgctgaattggtgatactattttgtttcgatcggtttggttgtagtaagagtccgtacgttcacttgaaatgcaagattttggcccggtttgtatcgg

SEQ ID NO: 56440 - protein, 535 aa, Glycine max
  peptide (1)..(535): Ceres Seq. ID no. 15178737
  misc_feature (40)..(534): Pfam Name: TCP-1/cpn60 chaperonin family Pfam Description: TCP-1/cpn60 chaperonin family
  misc_feature (3)..(534): Homolog of NCBI NO: 6683670 NR Description: CCT (chaperonin containing T-complex polypeptide
  misc_feature (3)..(534): Homolog of NCBI NO: 24307939 NR Description: chaperonin containing TCP1, subunit 5 (epsilon)
  misc_feature (3)..(534): Homolog of NCBI NO: 12804225 NR Description: Unknown (protein for IMAGE:3543711) [Homo sapiens]
  misc_feature (3)..(534): Homolog of NCBI NO: 603955 NR Description: KIAA0098 protein [Homo sapiens]
  misc_feature (115)..(535): Homolog of NCBI NO: 4206124 NR Description: T-complex protein 1 epsilon subunit
  misc_feature (3)..(534): Homolog of NCBI NO: 27924333 NR Description: Similar to chaperonin containing TCP1, subunit 5
  misc_feature (1)..(535): Homolog of NCBI NO: 730919 NR Description: T-COMPLEX PROTEIN 1, EPSILON SUBUNIT
  misc_feature (1)..(535): Homolog of NCBI NO: 1729864 NR Description: T-COMPLEX PROTEIN 1, EPSILON SUBUNIT
  misc_feature (1)..(535): Homolog of NCBI NO: 15221770 NR Description: T-complex protein 1, epsilon subunit/chaperonin
  misc_feature (1)..(535): Homolog of NCBI NO: 1587206 NR Description: T complex protein
MALAFDEFGRPFIILKEQEQKSRLRGLDAQKANISAGKAVARILRTSLGPKGMDKMLQSPDGDVTITNDGATILDQMDVDNQIAKLMVELSRSQDYEIGDGTTGVVVMAGALLEKAERLLERGIHPIRIAKGYEMASRIAVEHLERVANKFEFDESNLEPLIQTCMTTLSSKIVNRCKRSLAEIAVKAVLAVADLARKDVNLDLIKVEGKVGGKLEDTELIYGIVVDKDMSHPQMPKQIEDAKIAILTCPFEPPKPKTKHKVDIDTVEKFQTLRLQEQKYFDDMVQKCKDVGATLVICQWGFDDEANHLLMHRNLPAVRWVGGVELELIAIATGGRIVPRFQELSPEKLGKAGMVREKSFGTTKDRMLYIEHCANSRAVTIFIRGGNKMIIEETKRSLHDALCVARNLIRNNSIVYGGGSAEISCSIAVEAAADRYPGVEQYAIRAFGDALEAIPMALAENSGLQPIETLSAVKSQQIKDNNPHFGIDCNDVGTNDMREQNVFETLIGKQQQLLLATQVVKMILKIDDVISPSEY

SEQ ID NO: 56441 - protein, 483 aa, Glycine max
  peptide (1)..(483): Ceres Seq. ID no. 15178738
  misc_feature (1)..(482): Pfam Name: TCP-1/cpn60 chaperonin family Pfam Description: TCP-1/cpn60 chaperonin family
  misc_feature (1)..(482): Homolog of NCBI NO: 6683670 NR Description: CCT (chaperonin containing T-complex polypeptide
  misc_feature (1)..(482): Homolog of NCBI NO: 12804225 NR Description: Unknown (protein for IMAGE:3543711) [Homo sapiens]
  misc_feature (1)..(482): Homolog of NCBI NO: 24307939 NR Description: chaperonin containing TCP1, subunit 5 (epsilon)
  misc_feature (1)..(482): Homolog of NCBI NO: 603955 NR Description: KIAA0098 protein [Homo sapiens]
  misc_feature (63)..(483): Homolog of NCBI NO: 4206124 NR Description: T-complex protein 1 epsilon subunit
  misc_feature (1)..(482): Homolog of NCBI NO: 27924333 NR Description: Similar to chaperonin containing TCP1, subunit 5
  misc_feature (1)..(483): Homolog of NCBI NO: 730919 NR Description: T-COMPLEX PROTEIN 1, EPSILON SUBUNIT
  misc_feature (1)..(483): Homolog of NCBI NO: 1729864 NR Description: T-COMPLEX PROTEIN 1, EPSILON SUBUNIT
  misc_feature (1)..(483): Homolog of NCBI NO: 15221770 NR Description: T-complex protein 1, epsilon subunit/chaperonin
  misc_feature (1)..(483): Homolog of NCBI NO: 1587206 NR Description: T complex protein
MDKMLQSPDGDVTITNDGATILDQMDVDNQIAKLMVELSRSQDYEIGDGTTGVVVMAGALLEKAERLLERGIHPIRIAKGYEMASRIAVEHLERVANKFEFDESNLEPLIQTCMTTLSSKIVNRCKRSLAEIAVKAVLAVADLARKDVNLDLIKVEGKVGGKLEDTELIYGIVVDKDMSHPQMPKQIEDAKIAILTCPFEPPKPKTKHKVDIDTVEKFQTLRLQEQKYFDDMVQKCKDVGATLVICQWGFDDEANHLLMHRNLPAVRWVGGVELELIAIATGGRIVPRFQELSPEKLGKAGMVREKSFGTTKDRMLYIEHCANSRAVTIFIRGGNKMIIEETKRSLHDALCVARNLIRNNSIVYGGGSAEISCSIAVEAAADRYPGVEQYAIRAFGDALEAIPMALAENSGLQPIETLSAVKSQQIKDNNPHFGIDCNDVGTNDMREQNVFETLIGKQQQLLLATQVVKMILKIDDVISPSEY

SEQ ID NO: 56442 - protein, 480 aa, Glycine max
  peptide (1)..(480): Ceres Seq. ID no. 15178739
  misc_feature (1)..(479): Pfam Name: TCP-1/cpn60 chaperonin family Pfam Description: TCP-1/cpn60 chaperonin family
  misc_feature (1)..(479): Homolog of NCBI NO: 6683670 NR Description: CCT (chaperonin containing T-complex polypeptide
  misc_feature (1)..(479): Homolog of NCBI NO: 12804225 NR Description: Unknown (protein for IMAGE:3543711) [Homo sapiens]
  misc_feature (1)..(479): Homolog of NCBI NO: 24307939 NR Description: chaperonin containing TCP1, subunit 5 (epsilon)
  misc_feature (1)..(479): Homolog of NCBI NO: 603955 NR Description: KIAA0098 protein [Homo sapiens]
  misc_feature (60)..(480): Homolog of NCBI NO: 4206124 NR Description: T-complex protein 1 epsilon subunit
  misc_feature (1)..(479): Homolog of NCBI NO: 27924333 NR Description: Similar to chaperonin containing TCP1, subunit 5
  misc_feature (1)..(480): Homolog of NCBI NO: 730919 NR Description: T-COMPLEX PROTEIN 1, EPSILON SUBUNIT
  misc_feature (1)..(480): Homolog of NCBI NO: 1729864 NR Description: T-COMPLEX PROTEIN 1, EPSILON SUBUNIT
  misc_feature (1)..(480): Homolog of NCBI NO: 15221770 NR Description: T-complex protein 1, epsilon subunit/chaperonin
  misc_feature (1)..(480): Homolog of NCBI NO: 1587206 NR Description: T complex protein
MLQSPDGDVTITNDGATILDQMDVDNQIAKLMVELSRSQDYEIGDGTTGVVVMAGALLEKAERLLERGIHPIRIAKGYEMASRIAVEHLERVANKFEFDESNLEPLIQTCMTTLSSKIVNRCKRSLAEIAVKAVLAVADLARKDVNLDLIKVEGKVGGKLEDTELIYGIVVDKDMSHPQMPKQIEDAKIAILTCPFEPPKPKTKHKVDIDTVEKFQTLRLQEQKYFDDMVQKCKDVGATLVICQWGFDDEANHLLMHRNLPAVRWVGGVELELIAIATGGRIVPRFQELSPEKLGKAGMVREKSFGTTKDRMLYIEHCANSRAVTIFIRGGNKMIIEETKRSLHDALCVARNLIRNNSIVYGGGSAEISCSIAVEAAADRYPGVEQYAIRAFGDALEAIPMALAENSGLQPIETLSAVKSQQIKDNNPHFGIDCNDVGTNDMREQNVFETLIGKQQQLLLATQVVKMILKIDDVISPSEY

SEQ ID NO: 56443 - DNA, 1233 bp, Glycine max
  misc_feature (1)..(1233): Ceres Seq. ID no. 13502622
acctagaacatcctaatcgaaaaaagcaagcaagcaacttgtattgttgctacaaggcatataaattttcatcattgcaagttgcaaccattttgaccaaaaaccaataataagctttcgaccaaaagaagaaagaagaacccatttatcatcgttggaaaaaatcccagatctcaaaaaatggaattttcgcagagtcacagggtagagatgataagcatggcagttgctcttgttgccattgttggtggcaccgcttactattactacgtcaccaagaagccaaaagggtgcttggatcctgagaacttcaaagaatttaaacttgttaaacgcactcaactcagccataatgttgccacgttccgatttgatcttcctactcctaagtcagtgttgggacttcctattggacaacatatcagctgcagagggaaggatagtcttggtgaagaagttgtgaaaccatatactcctacaacattggatactgatgttggatactttgaattggttgtgaagatgtatccacaaggacggatgtctcatcactttagggagatacgtgaaggtgattacatggctgtgaagggaccaaagggacgttttaagtaccagcccaaccaagtaagagctttgggtatgattgctggtggcactggcatcaccccaatgtttcaagttacaagagctatattagaaaaccaacaggacaaaaccaacataaatttgatatatgccaatgtcacatttgatgacattcttttgaaggaagagctggatgcctttgccattaagttccctaatcaattcaaagtttactatgttctaaatcagccaccagaaatatggggacggtggtgttggattcgtcactaaggaaatgatccaaacagatttccctgcaccagcatcagatattaagatattaaggtgtggaccacctcccatgaacaaggctatggctgctaatcttgaagctcttggatacagtccccaaatgcagtttcagttttatagtcttgaataaagctcatctatattaaattttttaaaatacacacagcattcgagtccgatatcaatgtttggacatttgttggtattctctttctagatttgacagaataagcgcgcctgtgttacactctaggttagacattttacattgtagtgatgttcaggtttatggaaagttttgatggcgtatgctgtaacattgcaggctgtttc

SEQ ID NO: 56444 - protein, 232 aa, Glycine max
  peptide (1)..(232): Ceres Seq. ID no. 15223184
  misc_feature (46)..(145): Pfam Name: Oxidoreductase FAD-binding domain Pfam Description: Oxidoreductase FAD-binding domain
  misc_feature (42)..(224): Homolog of NCBI NO: 19075352 NR Description: putative nadh-cytochrome b5 reductase
  misc_feature (36)..(224): Homolog of NCBI NO: 27924030 NR Description: reductase [Fusarium sporotrichioides]
  misc_feature (36)..(224): Homolog of NCBI NO: 28202143 NR Description: reductase [Gibberella zeae]
  misc_feature (36)..(224): Homolog of NCBI NO: 29126014 NR Description: putative NADH cytb-reductase [Gibberella zeae]
  misc_feature (39)..(224): Homolog of NCBI NO: 6070342 NR Description: NADH-cytochrome b5 reductase [Mortierella alpina]
  misc_feature (10)..(224): Homolog of NCBI NO: 40739560 NR Description: hypothetical protein AN6366.2 [Aspergillus
  misc_feature (115)..(224): Homolog of NCBI NO: 16648905 NR Description: NADH-cytochrome b5 reductase [Arabidopsis
  misc_feature (1)..(224): Homolog of NCBI NO: 4336205 NR Description: cytochrome b5 reductase [Zea mays]
  misc_feature (2)..(224): Homolog of NCBI NO: 15238025 NR Description: NADH-cytochrome b5 reductase [Arabidopsis
  misc_feature (1)..(224): Homolog of NCBI NO: 17221690 NR Description: cytochrome b5 reductase isoform II [Zea mays]
MEFSQSHRVEMISMAVALVAIVGGTAYYYYVTKKPKGCLDPENFKEFKLVKRTQLSHNVATFRFDLPTPKSVLGLPIGQHISCRGKDSLGEEVVKPYTPTTLDTDVGYFELVVKMYPQGRMSHHFREIREGDYMAVKGPKGRFKYQPNQVRALGMIAGGTGITPMFQVTRAILENQQDKTNINLIYANVTFDDILLKEELDAFAIKFPNQFKVYYVLNQPPEIWGRWCWIRH

SEQ ID NO: 56445 - protein, 222 aa, Glycine max
  peptide (1)..(222): Ceres Seq. ID no. 15223185
  misc_feature (36)..(135): Pfam Name: Oxidoreductase FAD-binding domain Pfam Description: Oxidoreductase FAD-binding domain
  misc_feature (32)..(214): Homolog of NCBI NO: 19075352 NR Description: putative nadh-cytochrome b5 reductase
  misc_feature (26)..(214): Homolog of NCBI NO: 27924030 NR Description: reductase [Fusarium sporotrichioides]
  misc_feature (26)..(214): Homolog of NCBI NO: 28202143 NR Description: reductase [Gibberella zeae]
  misc_feature (26)..(214): Homolog of NCBI NO: 29126014 NR Description: putative NADH cytb-reductase [Gibberella zeae]
  misc_feature (29)..(214): Homolog of NCBI NO: 6070342 NR Description: NADH-cytochrome b5 reductase [Mortierella alpina]
  misc_feature (1)..(214): Homolog of NCBI NO: 40739560 NR Description: hypothetical protein AN6366.2 [Aspergillus
  misc_feature (105)..(214): Homolog of NCBI NO: 16648905 NR Description: NADH-cytochrome b5 reductase [Arabidopsis
  misc_feature (1)..(214): Homolog of NCBI NO: 4336205 NR Description: cytochrome b5 reductase [Zea mays]
  misc_feature (1)..(214): Homolog of NCBI NO: 15238025 NR Description: NADH-cytochrome b5 reductase [Arabidopsis
  misc_feature (1)..(214): Homolog of NCBI NO: 17221690 NR Description: cytochrome b5 reductase isoform II [Zea mays]
MISMAVALVAIVGGTAYYYYVTKKPKGCLDPENFKEFKLVKRTQLSHNVATFRFDLPTPKSVLGLPIGQHISCRGKDSLGEEVVKPYTPTTLDTDVGYFELVVKMYPQGRMSHHFREIREGDYMAVKGPKGRFKYQPNQVRALGMIAGGTGITPMFQVTRAILENQQDKTNINLIYANVTFDDILLKEELDAFAIKFPNQFKVYYVLNQPPEIWGRWCWIRH

SEQ ID NO: 56446 - protein, 219 aa, Glycine max
  peptide (1)..(219): Ceres Seq. ID no. 15223186
  misc_feature (33)..(132): Pfam Name: Oxidoreductase FAD-binding domain Pfam Description: Oxidoreductase FAD-binding domain
  misc_feature (29)..(211): Homolog of NCBI NO: 19075352 NR Description: putative nadh-cytochrome b5 reductase
  misc_feature (23)..(211): Homolog of NCBI NO: 27924030 NR Description: reductase [Fusarium sporotrichioides]
  misc_feature (23)..(211): Homolog of NCBI NO: 28202143 NR Description: reductase [Gibberella zeae]
  misc_feature (23)..(211): Homolog of NCBI NO: 29126014 NR Description: putative NADH cytb-reductase [Gibberella zeae]
  misc_feature (26)..(211): Homolog of NCBI NO: 6070342 NR Description: NADH-cytochrome b5 reductase [Mortierella alpina]
  misc_feature (1)..(211): Homolog of NCBI NO: 40739560 NR Description: hypothetical protein AN6366.2 [Aspergillus
  misc_feature (102)..(211): Homolog of NCBI NO: 16648905 NR Description: NADH-cytochrome b5 reductase [Arabidopsis
  misc_feature (1)..(211): Homolog of NCBI NO: 4336205 NR Description: cytochrome b5 reductase [Zea mays]
  misc_feature (1)..(211): Homolog of NCBI NO: 15238025 NR Description: NADH-cytochrome b5 reductase [Arabidopsis
  misc_feature (1)..(211): Homolog of NCBI NO: 17221690 NR Description: cytochrome b5 reductase isoform II [Zea mays]
MAVALVAIVGGTAYYYYVTKKPKGCLDPENFKEFKLVKRTQLSHNVATFRFDLPTPKSVLGLPIGQHISCRGKDSLGEEVVKPYTPTTLDTDVGYFELVVKMYPQGRMSHHFREIREGDYMAVKGPKGRFKYQPNQVRALGMIAGGTGITPMFQVTRAILENQQDKTNINLIYANVTFDDILLKEELDAFAIKFPNQFKVYYVLNQPPEIWGRWCWIRH

SEQ ID NO: 56447 - DNA, 1343 bp, Glycine max
  misc_feature (1)..(1343): Ceres Seq. ID no. 13582564
gccgagcgtcgttctatctatttttttctctgcctgctgcacacacactgagactgagagaaagagaaccaactactacagtcnacagaaaaccaaaaaaacactgtgtgtgtgtgtttgtgtgtcaaaaaaaaaaaccctaagctaatgatgatggatccgcgacagcgagagaagctacttcacaaaaccgaggcctgtgctttcgtggcaggtgttgttccggagctttcccttgtcaccgttccagggaacaacaacaacaccaacaacgttaacaacaacaacaacaacgtttctcattctcaatctcaccggtcgggtcggatccatgaaaaccaccaccaccaccttggtctcgtggctgctgtcaccaccaccttcggaactgttcacaggaagaaaaggatggccagacaaagaagatccactaaccccactttgttgatgaaccctctcatcaacaacaacaacaacaagtctggttcttctcttccttctccaagtattgcttcctcctcgcacgtgccactctcctcctcaactctcccgcccgcacgtgaaatcgatcaaagaaggttgagattccttttccagaaggagttaaagaacagtgatgttagctcccttaggagaatgatattgccaaagaaagcagcagaggctttccttccagctcttgaatccaaagaaggaattgtaatcagcatggatgatatagatggtcttcatgtatggagtttcaagtacaggttttggcctaacaataacagtcggatgtatgtacttgaaaatactggagactttgtcaacacacatggccttcgctttggagattccattttggtttaccaagatagtgaaaacaacaattatgttattcaggcgaaaaaggcttctgatcaggatgaatttatggaagaaactagtgataccatcaatgatatcttccttaatgattatgaagtgaacaaacctggttgcttcaatgtaacctatcctgcagtgaatgatacaggcatgtcattcatatatgagactaccttctcaaatgactcccctcttgattttttgggtggatcaatgaccaatttttcaaggattggaccagttgaaacctttggctctgttgagaatttgtcacttgatgacttctattaaaggcatcaaatcacaaaggaagcattaacatggtaccaagactagcactattaagtgtgtgcttctttattttggtactaaagaaacatataaagtgtgctttgttgttgtcgtggtcatgaccatgagagaatttgtgtagaataaaagagtagccatgccaatgggcatgtttcctgtcc

SEQ ID NO: 56448 - protein, 337 aa, Glycine max
  peptide (1)..(337): Ceres Seq. ID no. 13582565
  misc_feature (148)..(253): Pfam Name: B3 DNA binding domain Pfam Description: B3 DNA binding domain
  misc_feature (99)..(291): Homolog of NCBI NO: 586238 NR Description: Viviparous protein homolog
  misc_feature (36)..(249): Homolog of NCBI NO: 15230140 NR Description: abscisic acid-insensitive protein 3 (ABI3)
  misc_feature (77)..(261): Homolog of NCBI NO: 25518439 NR Description: hypothetical protein F3H9.5 - Arabidopsis
  misc_feature (77)..(261): Homolog of NCBI NO: 18396728 NR Description: transcriptional factor B3 protein leafy cotyledon
  misc_feature (77)..(261): Homolog of NCBI NO: 15987516 NR Description: LEAFY COTYLEDON 2 [Arabidopsis thaliana]
  misc_feature (47)..(254): Homolog of NCBI NO: 10764150 NR Description: transcription factor viviparous 1 [Picea abies]
  misc_feature (115)..(270): Homolog of NCBI NO: 9279669 NR Description: FUSCA3 [Arabidopsis thaliana]
  misc_feature (128)..(270): Homolog of NCBI NO: 3582518 NR Description: FUSCA3 [Arabidopsis thaliana]
  misc_feature (115)..(270): Homolog of NCBI NO: 18405094 NR Description: transcriptional regulator (FUSCA3) [Arabidopsis
  misc_feature (115)..(270): Homolog of NCBI NO: 3582520 NR Description: FUSCA3 [Arabidopsis thaliana]
MMMDPRQREKLLHKTEACAFVAGVVPELSLVTVPGNNNNTNNVNNNNNNVSHSQSHRSGRIHENHHHHLGLVAAVTTTFGTVHRKKRMARQRRSTNPTLLMNPLINNNNNKSGSSLPSPSIASSSHVPLSSSTLPPAREIDQRRLRFLFQKELKNSDVSSLRRMILPKKAAEAFLPALESKEGIVISMDDIDGLHVWSFKYRFWPNNNSRMYVLENTGDFVNTHGLRFGDSILVYQDSENNNYVIQAKKASDQDEFMEETSDTINDIFLNDYEVNKPGCFNVTYPAVNDTGMSFIYETTFSNDSPLDFLGGSMTNFSRIGPVETFGSVENLSLDDFY

SEQ ID NO: 56449 - protein, 336 aa, Glycine max
  peptide (1)..(336): Ceres Seq. ID no. 13582566
  misc_feature (147)..(252): Pfam Name: B3 DNA binding domain Pfam Description: B3 DNA binding domain
  misc_feature (98)..(290): Homolog of NCBI NO: 586238 NR Description: Viviparous protein homolog
  misc_feature (35)..(248): Homolog of NCBI NO: 15230140 NR Description: abscisic acid-insensitive protein 3 (ABI3)
  misc_feature (76)..(260): Homolog of NCBI NO: 25518439 NR Description: hypothetical protein F3H9.5 - Arabidopsis
  misc_feature (76)..(260): Homolog of NCBI NO: 18396728 NR Description: transcriptional factor B3 protein leafy cotyledon
  misc_feature (76)..(260): Homolog of NCBI NO: 15987516 NR Description: LEAFY COTYLEDON 2 [Arabidopsis thaliana]
  misc_feature (46)..(253): Homolog of NCBI NO: 10764150 NR Description: transcription factor viviparous 1 [Picea abies]
  misc_feature (114)..(269): Homolog of NCBI NO: 9279669 NR Description: FUSCA3 [Arabidopsis thaliana]
  misc_feature (127)..(269): Homolog of NCBI NO: 3582518 NR Description: FUSCA3 [Arabidopsis thaliana]
  misc_feature (114)..(269): Homolog of NCBI NO: 18405094 NR Description: transcriptional regulator (FUSCA3) [Arabidopsis
  misc_feature (114)..(269): Homolog of NCBI NO: 3582520 NR Description: FUSCA3 [Arabidopsis thaliana]
MMDPRQREKLLHKTEACAFVAGVVPELSLVTVPGNNNNTNNVNNNNNNVSHSQSHRSGRIHENHHHHLGLVAAVTTTFGTVHRKKRMARQRRSTNPTLLMNPLINNNNNKSGSSLPSPSIASSSHVPLSSSTLPPAREIDQRRLRFLFQKELKNSDVSSLRRMILPKKAAEAFLPALESKEGIVISMDDIDGLHVWSFKYRFWPNNNSRMYVLENTGDFVNTHGLRFGDSILVYQDSENNNYVIQAKKASDQDEFMEETSDTINDIFLNDYEVNKPGCFNVTYPAVNDTGMSFIYETTFSNDSPLDFLGGSMTNFSRIGPVETFGSVENLSLDDFY

SEQ ID NO: 56450 - protein, 335 aa, Glycine max
  peptide (1)..(335): Ceres Seq. ID no. 13582567
  misc_feature (146)..(251): Pfam Name: B3 DNA binding domain Pfam Description: B3 DNA binding domain
  misc_feature (97)..(289): Homolog of NCBI NO: 586238 NR Description: Viviparous protein homolog
  misc_feature (34)..(247): Homolog of NCBI NO: 15230140 NR Description: abscisic acid-insensitive protein 3 (ABI3)
  misc_feature (75)..(259): Homolog of NCBI NO: 25518439 NR Description: hypothetical protein F3H9.5 - Arabidopsis
  misc_feature (75)..(259): Homolog of NCBI NO: 18396728 NR Description: transcriptional factor B3 protein leafy cotyledon
  misc_feature (75)..(259): Homolog of NCBI NO: 15987516 NR Description: LEAFY COTYLEDON 2 [Arabidopsis thaliana]
  misc_feature (45)..(252): Homolog of NCBI NO: 10764150 NR Description: transcription factor viviparous 1 [Picea abies]
  misc_feature (113)..(268): Homolog of NCBI NO: 9279669 NR Description: FUSCA3 [Arabidopsis thaliana]
  misc_feature (126)..(268): Homolog of NCBI NO: 3582518 NR Description: FUSCA3 [Arabidopsis thaliana]
  misc_feature (113)..(268): Homolog of NCBI NO: 18405094 NR Description: transcriptional regulator (FUSCA3) [Arabidopsis
  misc_feature (113)..(268): Homolog of NCBI NO: 3582520 NR Description: FUSCA3 [Arabidopsis thaliana]
MDPRQREKLLHKTEACAFVAGVVPELSLVTVPGNNNNTNNVNNNNNNVSHSQSHRSGRIHENHHHHLGLVAAVTTTFGTVHRKKRMARQRRSTNPTLLMNPLINNNNNKSGSSLPSPSIASSSHVPLSSSTLPPAREIDQRRLRFLFQKELKNSDVSSLRRMILPKKAAEAFLPALESKEGIVISMDDIDGLHVWSFKYRFWPNNNSRMYVLENTGDFVNTHGLRFGDSILVYQDSENNNYVIQAKKASDQDEFMEETSDTINDIFLNDYEVNKPGCFNVTYPAVNDTGMSFIYETTFSNDSPLDFLGGSMTNFSRIGPVETFGSVENLSLDDFY

SEQ ID NO: 56451 - DNA, 1301 bp, Glycine max
  misc_feature (1)..(1301): Ceres Seq. ID no. 12611435
tttttgagtctgggttttagttcaaaacaaaatgcatgggcagggcctgatcattggaagtatcgaaaatccaaagtctcagaggttcatcctacttctgaagatgggtcgaccctaaaaagtagacagccaaagagtaagagacaaactgaagttgatttaaatttcacaaattctcttgagaaaaaaatgctagatacattttctcctcccaagaatcccaaattgttactgcttcctgaaagcagattaccttgcaatacaaaacttcctgaggattgtcactatcagccagaagatcttgtcaagttatttcttctgtctaatgtaaagtgtctcgggaggaaggcaaacaggttctcagatggatctagagaacaatccgatgaatatgaatcattcccttcgtgggataatggaagtgtttgtggggatgacgctggtgactacggaggtgatcttcatggtgacatggaggacaccgacactcttgttactcagcctcgtcaggtcagtaaaattgaagtccagtatgacaagacttccaaacaagtcgatgttcatgcactaaaaattactctttgggaccatgttcaagaatctgttaaacttcctttagagggtcaaaaagataccttatctttcaggaatatattagccaactttcctagcgaatgcaatgctgctgcaacaattagtgacatctctcctcatctgtgcttcatatgtctattgcatttggcaaacgagaaaggattgagcattcaaaactcccctaatttggatgatcttgccatacggtttccacaagttgctgattctatgaggggaacagtttagattcctcttcactcaattattcttcagctcaggaatcaagaaacgatggggactgttttactagtgaaacacgtccaagaaagcattgaagtgagcaacaagtttgtggttggaggttgcaaatatcagtttgcttatggtggtttaacactcgttaaggaaatttcagacctataatggctccttgttattattctgtacatgaaagtatgcaacacatgtagtgctcaatttcattctccactgcagcccgttacatgaaagtattcaacacatgtagtacgagaatggctagtgttggtataaacaaaggcatagactgatggatgagcgactgattattgaatcgcacttacctatccctccattttctattaattgtcaaactgaaataatcaaatttatttgtaaataataataataataatagtagtagtagtagtaagttttatttatctgcc

SEQ ID NO: 56452 - protein, 279 aa, Glycine max
  peptide (1)..(279): Ceres Seq. ID no. 12611436
  misc_feature (1)..(266): Pfam Name: Barren protein Pfam Description: Barren protein
  misc_feature (6)..(266): Homolog of NCBI NO: 33417152 NR Description: Unknown (protein for MGC:69107) [Xenopus laevis]
  misc_feature (1)..(269): Homolog of NCBI NO: 34913488 NR Description: putative condensin complex subunit
  misc_feature (1)..(266): Homolog of NCBI NO: 15225709 NR Description: hypothetical protein; protein id: At2g32590.1
FLSLGFSSKQNAWAGPDHWKYRKSKVSEVHPTSEDGSTLKSRQPKSKRQTEVDLNFTNSLEKKMLDTFSPPKNPKLLLLPESRLPCNTKLPEDCHYQPEDLVKLFLLSNVKCLGRKANRFSDGSREQSDEYESFPSWDNGSVCGDDAGDYGGDLHGDMEDTDTLVTQPRQVSKIEVQYDKTSKQVDVHALKITLWDHVQESVKLPLEGQKDTLSFRNILANFPSECNAAATISDISPHLCFICLLHLANEKGLSIQNSPNLDDLAIRFPQVADSMRGTV

SEQ ID NO: 56453 - protein, 216 aa, Glycine max
  peptide (1)..(216): Ceres Seq. ID no. 12611437
  misc_feature (1)..(203): Pfam Name: Barren protein Pfam Description: Barren protein
  misc_feature (1)..(203): Homolog of NCBI NO: 33417152 NR Description: Unknown (protein for MGC:69107) [Xenopus laevis]
  misc_feature (1)..(206): Homolog of NCBI NO: 34913488 NR Description: putative condensin complex subunit
  misc_feature (1)..(203): Homolog of NCBI NO: 15225709 NR Description: hypothetical protein; protein id: At2g32590.1
MLDTFSPPKNPKLLLLPESRLPCNTKLPEDCHYQPEDLVKLFLLSNVKCLGRKANRFSDGSREQSDEYESFPSWDNGSVCGDDAGDYGGDLHGDMEDTDTLVTQPRQVSKIEVQYDKTSKQVDVHALKITLWDHVQESVKLPLEGQKDTLSFRNILANFPSECNAAATISDISPHLCFICLLHLANEKGLSIQNSPNLDDLAIRFPQVADSMRGTV

SEQ ID NO: 56454 - DNA, 863 bp, Glycine max
  misc_feature (1)..(863): Ceres Seq. ID no. 13595452
aaagaaacattctagagctccgctccactcccagtaatggcggcgacatggacttgttttgtaacttcgttgtgtatttcttcaccttcttataaaccatcgtcgttgcacggtctgtctttccggaggcaagcagtgaccagaacgaacagattttttaccaggatatatgcgctgtctagcaacgacatcaaagtcgggacaagcatagaagtcgatggtgctccgtggcgtgttctggagtttctgcatgtgaagccaggcaaaggtgctgcttttgtcagaaccaaaatcaggaactacgtcaatggtagcacagtcgagagaacctttcgtgctgggattactatagaagaggccaatgtctccaaggagactaagcaattcacttataaagacggctctcagtttgttttcatggacttgagcagttatgaggaaacacgtttaaacgaggctgatatgggcgacaagaccaaatggcttaaagagggaatggactgcaatttgctctactggaaggacaaggtcatcgattttgaacttcccattacagttcagcttaaaatagttgacgttgatcctggtctccgaggtgacactgcacaaggtggaactaaacctgccacactcgagactggtgcagttgtcaatgtacccctctttgtcaatgttggtgaagatattatggtggacacgagaaccggtacgtacatgagccgggtctgacacttcttccctattgctaacgactaaggaatgtgatatttaatgagcggttttgcttagactactctgattagttgagtgaacgcccagaattgctactattggtttccctaataatgattctgtattatttt

SEQ ID NO: 56455 - protein, 230 aa, Glycine max
  peptide (1)..(230): Ceres Seq. ID no. 13595453
  misc_feature (47)..(229): Pfam Name: Elongation factor P (EF-P) Pfam Description: Elongation factor P (EF-P)
  misc_feature (47)..(229): Homolog of NCBI NO: 33239478 NR Description: Translation elongation factor P
  misc_feature (47)..(229): Homolog of NCBI NO: 37520854 NR Description: elongation factor P [Gloeobacter violaceus]
  misc_feature (47)..(229): Homolog of NCBI NO: 16331453 NR Description: elongation factor P [Synechocystis sp. PCC 6803]
  misc_feature (47)..(229): Homolog of NCBI NO: 33860586 NR Description: Elongation factor P (EF-P)
  misc_feature (47)..(229): Homolog of NCBI NO: 23042812 NR Description: hypothetical protein [Trichodesmium erythraeum
  misc_feature (47)..(229): Homolog of NCBI NO: 23125000 NR Description: hypothetical protein [Nostoc punctiforme]
  misc_feature (47)..(229): Homolog of NCBI NO: 22298837 NR Description: translation elongation factor EF-P
  misc_feature (47)..(229): Homolog of NCBI NO: 2494275 NR Description: Elongation factor P (EF-P)
  misc_feature (47)..(229): Homolog of NCBI NO: 12322730 NR Description: putative elongation factor P (EF-P); 66839-65711
  misc_feature (6)..(229): Homolog of NCBI NO: 18398225 NR Description: elongation factor P (EF-P) -related [Arabidopsis
MAATWTCFVTSLCISSPSYKPSSLHGLSFRRQAVTRTNRFFTRIYALSSNDIKVGTSIEVDGAPWRVLEFLHVKPGKGAAFVRTKIRNYVNGSTVERTFRAGITIEEANVSKETKQFTYKDGSQFVFMDLSSYEETRLNEADMGDKTKWLKEGMDCNLLYWKDKVIDFELPITVQLKIVDVDPGLRGDTAQGGTKPATLETGAVVNVPLFVNVGEDIMVDTRTGTYMSRV

SEQ ID NO: 56456 - DNA, 1363 bp, Glycine max
  misc_feature (1)..(1363): Ceres Seq. ID no. 13595442
gtttccaaggttgctctgggaatccgaggttctaaactctgcaactaactttaatggcaactgggcaagtcattaataaacctccttcacttcctccgtaccctgaggtatattctaactctttttaatcttttttttttctagctactataattgatctaacattaccctatttatccactgatctaaatctagtccgatttaaaaataaatgttcaggtttatttatttatttatttttcactgttttgactataattgaacattttcatgcgaatttcataatcataaatatagacaaataagtgatgtgttaatttttttaccatagatatagaagggaaaaaaaggtcgattctaccattctacttttatgaaattattattaagtgatgggttaattttttttaaaggaaataattatgaagactgagttaaggtgtgtaatttatctatagatgattcgggaggcaattgaagcactgaatgaagagaatggttcgaataaatcatcaatttcgaagtacatcgaatccacctatggtggattgcctcaggcccacaaggttttgctcaatgtgcacctcgcgaaaatgagggaaagtggagtgctagtgttttggaagaacaactacaccaagcgtgacccaaatgcgccgccacggcggggccgtggcaggccacccaagcccaaggagcctctgccaccgggcactgtcttatcaccgcccaggcccaggggccgtccttcgaaggacccaaatgacctgcagaagcctcttaaggcttcggtggtgggtagtggtaggcctcgaggccggcccagaaaaatggcctggcccactggaggccttggtgaagtatcgcaggcctctaaggcgaagcctgtcactagtaatgggaggcctagaggtaggcctcccaaagtgaaggccgtattcactgaaattagtgtttgactataaaggcttatagggcttgcatggaatagggaagtgttgtttctacaaaaagttggactgagtaacggttttgtgtgtttactagattcttctcttatgtgttacacttagctgaaatgctgaattgttgtgtacaatcgtgtagtgtagtgtagtgtagttagttgctgaggctttgttcgtttgtaaattgtaactgtgaaaataggacaatgggtggagctaatggacgcaatctctcaaattcttgatgtgaagagtctgtgtgttatgcaccaaattgattggaggcaaagtctttaaaaaaaaaaaaaaaaaaaaaaaaaaaaaaaccagaaaaaaaaaaaaaaaaaagcttatcgataccgtcccggacctcgaggggggggccccggtaccca

SEQ ID NO: 56457 - protein, 166 aa, Glycine max
  peptide (1)..(166): Ceres Seq. ID no. 15221580
  misc_feature (1)..(63): Pfam Name: linker histone H1 and H5 family Pfam Description: linker histone H1 and H5 family
  misc_feature (1)..(166): Homolog of NCBI NO: 7439645 NR Description: high mobility group protein HMGI/Y-2 - sword bean
  misc_feature (1)..(166): Homolog of NCBI NO: 7439663 NR Description: high mobility group protein HMGI/Y-1 - sword bean
MIREAIEALNEENGSNKSSISKYIESTYGGLPQAHKVLLNVHLAKMRESGVLVFWKNNYTKRDPNAPPRRGRGRPPKPKEPLPPGTVLSPPRPRGRPSKDPNDLQKPLKASVVGSGRPRGRPRKMAWPTGGLGEVSQASKAKPVTSNGRPRGRPPKVKAVFTEISV

SEQ ID NO: 56458 - protein, 121 aa, Glycine max
  peptide (1)..(121): Ceres Seq. ID no. 15221581
  misc_feature (1)..(121): Homolog of NCBI NO: 7439645 NR Description: high mobility group protein HMGI/Y-2 - sword bean
  misc_feature (1)..(121): Homolog of NCBI NO: 7439663 NR Description: high mobility group protein HMGI/Y-1 - sword bean
MRESGVLVFWKNNYTKRDPNAPPRRGRGRPPKPKEPLPPGTVLSPPRPRGRPSKDPNDLQKPLKASVVGSGRPRGRPRKMAWPTGGLGEVSQASKAKPVTSNGRPRGRPPKVKAVFTEISV

SEQ ID NO: 56459 - protein, 92 aa, Glycine max
  peptide (1)..(92): Ceres Seq. ID no. 15221582
MRRHGGAVAGHPSPRSLCHRALSYHRPGPGAVLRRTQMTCRSLLRLRWWVVVGLEAGPEKWPGPLEALVKYRRPLRRSLSLVMGGLEVGLPK

SEQ ID NO: 56460 - DNA, 901 bp, Glycine max
  misc_feature (1)..(901): Ceres Seq. ID no. 14304209
aaccacacactgccttgttcatctcgaacataaatcaagagcatatcattctttgtgagctttattgatctaaaccaatggcgaactcgacgattcttcttgattactggccaagcatgttctgtatgagggctagagtcgcgttgagggagaaaggtgttgtgttcgaggccagagaagaggatctcacgaacaagagccctttgctcctccagagtaatccgattcacaagaaggtcccggttctgatccacaacggtaaaccggtttgcgagtccctcaatgttgtccagtacgtggacgaggcttggtctgacaagaacccattcttcccttctgatccttacgggaaagctcaggctaggttttgggctgatttcgtggacaagaagtttagtgatgcccaattcaagatatggggaaagaaaggtgaggaacaagcagcaggggtgaaggagtttattgaggcagtgaagattcttgaagctgagcttggagacaaaccttactttggtggagatagctttggatatgtagacattgcactgattacattctacagttggttcggagcatacgagaagtttggtaacttcagcatcgaggcagagagtccaaaactgattgcttgggctaagaggtgtatggagaaagagagtgtgtctaagtctctccctgaccaagagaaaattgttgcgtacgccgctgagtttaggaagaataatctctgatctgaataaaaccttgtttgtgccttctgtttcggatgatgctgtagtctgtttttaactgtggtttttgtgtgtttcctaataatgcgtgagggcaagcgtcggcctttgtgtggtggtgttgtatggatcctgagtaatgcatttttaaataaaatatattttcaaat

SEQ ID NO: 56461 - protein, 217 aa, Glycine max
  peptide (1)..(217): Ceres Seq. ID no. 14304210
  misc_feature (85)..(193): Pfam Name: Glutathione S-transferase, C-terminal domain Pfam Description: Glutathione S-transferase, C-terminal domain
  misc_feature (1)..(214): Homolog of NCBI NO: 15218304 NR Description: glutathione transferase, putative [Arabidopsis
  misc_feature (1)..(214): Homolog of NCBI NO: 8052535 NR Description: F3F9.13 [Arabidopsis thaliana]
  misc_feature (1)..(214): Homolog of NCBI NO: 7447307 NR Description: glutathione transferase (EC 2.5.1.18) - papaya
  misc_feature (1)..(168): Homolog of NCBI NO: 8052534 NR Description: F3F9.11 [Arabidopsis thaliana]
  misc_feature (1)..(214): Homolog of NCBI NO: 15220041 NR Description: glutathione transferase, putative [Arabidopsis
  misc_feature (1)..(214): Homolog of NCBI NO: 8052534 NR Description: F3F9.11 [Arabidopsis thaliana]
  misc_feature (1)..(214): Homolog of NCBI NO: 21592644 NR Description: glutathione transferase, putative [Arabidopsis
  misc_feature (1)..(214): Homolog of NCBI NO: 18411929 NR Description: glutathione transferase, putative [Arabidopsis
  misc_feature (1)..(217): Homolog of NCBI NO: 21592638 NR Description: 2,4-D inducible glutathione S-transferase,
  misc_feature (1)..(217): Homolog of NCBI NO: 15218311 NR Description: glutathione transferase, putative [Arabidopsis
MANSTILLDYWPSMFCMRARVALREKGVVFEAREEDLTNKSPLLLQSNPIHKKVPVLIHNGKPVCESLNVVQYVDEAWSDKNPFFPSDPYGKAQARFWADFVDKKFSDAQFKIWGKKGEEQAAGVKEFIEAVKILEAELGDKPYFGGDSFGYVDIALITFYSWFGAYEKFGNFSIEAESPKLIAWAKRCMEKESVSKSLPDQEKIVAYAAEFRKNNL

SEQ ID NO: 56462 - protein, 204 aa, Glycine max
  peptide (1)..(204): Ceres Seq. ID no. 14304211
  misc_feature (72)..(180): Pfam Name: Glutathione S-transferase, C-terminal domain Pfam Description: Glutathione S-transferase, C-terminal domain
  misc_feature (1)..(201): Homolog of NCBI NO: 15218304 NR Description: glutathione transferase, putative [Arabidopsis
  misc_feature (1)..(201): Homolog of NCBI NO: 8052535 NR Description: F3F9.13 [Arabidopsis thaliana]
  misc_feature (1)..(201): Homolog of NCBI NO: 7447307 NR Description: glutathione transferase (EC 2.5.1.18) - papaya
  misc_feature (1)..(155): Homolog of NCBI NO: 8052534 NR Description: F3F9.11 [Arabidopsis thaliana]
  misc_feature (1)..(201): Homolog of NCBI NO: 15220041 NR Description: glutathione transferase, putative [Arabidopsis
  misc_feature (1)..(201): Homolog of NCBI NO: 8052534 NR Description: F3F9.11 [Arabidopsis thaliana]
  misc_feature (1)..(201): Homolog of NCBI NO: 21592644 NR Description: glutathione transferase, putative [Arabidopsis
  misc_feature (1)..(201): Homolog of NCBI NO: 18411929 NR Description: glutathione transferase, putative [Arabidopsis
  misc_feature (1)..(204): Homolog of NCBI NO: 21592638 NR Description: 2,4-D inducible glutathione S-transferase,
  misc_feature (1)..(204): Homolog of NCBI NO: 15218311 NR Description: glutathione transferase, putative [Arabidopsis
MFCMRARVALREKGVVFEAREEDLTNKSPLLLQSNPIHKKVPVLIHNGKPVCESLNVVQYVDEAWSDKNPFFPSDPYGKAQARFWADFVDKKFSDAQFKIWGKKGEEQAAGVKEFIEAVKILEAELGDKPYFGGDSFGYVDIALITFYSWFGAYEKFGNFSIEAESPKLIAWAKRCMEKESVSKSLPDQEKIVAYAAEFRKNNL

SEQ ID NO: 56463 - protein, 201 aa, Glycine max
  peptide (1)..(201): Ceres Seq. ID no. 14304212
  misc_feature (69)..(177): Pfam Name: Glutathione S-transferase, C-terminal domain Pfam Description: Glutathione S-transferase, C-terminal domain
  misc_feature (1)..(198): Homolog of NCBI NO: 15218304 NR Description: glutathione transferase, putative [Arabidopsis
  misc_feature (1)..(198): Homolog of NCBI NO: 8052535 NR Description: F3F9.13 [Arabidopsis thaliana]
  misc_feature (1)..(198): Homolog of NCBI NO: 7447307 NR Description: glutathione transferase (EC 2.5.1.18) - papaya
  misc_feature (1)..(152): Homolog of NCBI NO: 8052534 NR Description: F3F9.11 [Arabidopsis thaliana]
  misc_feature (1)..(198): Homolog of NCBI NO: 15220041 NR Description: glutathione transferase, putative [Arabidopsis
  misc_feature (1)..(198): Homolog of NCBI NO: 8052534 NR Description: F3F9.11 [Arabidopsis thaliana]
  misc_feature (1)..(198): Homolog of NCBI NO: 21592644 NR Description: glutathione transferase, putative [Arabidopsis
  misc_feature (1)..(198): Homolog of NCBI NO: 18411929 NR Description: glutathione transferase, putative [Arabidopsis
  misc_feature (1)..(201): Homolog of NCBI NO: 21592638 NR Description: 2,4-D inducible glutathione S-transferase,
  misc_feature (1)..(201): Homolog of NCBI NO: 15218311 NR Description: glutathione transferase, putative [Arabidopsis
MRARVALREKGVVFEAREEDLTNKSPLLLQSNPIHKKVPVLIHNGKPVCESLNVVQYVDEAWSDKNPFFPSDPYGKAQARFWADFVDKKFSDAQFKIWGKKGEEQAAGVKEFIEAVKILEAELGDKPYFGGDSFGYVDIALITFYSWFGAYEKFGNFSIEAESPKLIAWAKRCMEKESVSKSLPDQEKIVAYAAEFRKNNL

SEQ ID NO: 56464 - DNA, 1598 bp, Glycine max
  misc_feature (1)..(1598): Ceres Seq. ID no. 15174875
acacttgtttctctctcttcaatggccgagccccactccaccgccgcgattcttcctccctccaccgcccggttggaggaaactccgtccgggagctctcagactcccctccgctccggaagaggcggctggagtattgtcgatggctccttcgccattgttagggacaatacctgctcctgcttcgtcgtcgtcttcagcttgtggttcttcgtgtcgatgactatgatactgggggtttatgggtccatgaccatcgtgctgggtccaaaatcttcaattgttttccaacctagtcccgtgttcgttcaatctgtgaaggtagaaaacttaaaggcaaaccctggcccaggacccattctttatgggacatatcggtatcccccacttgatgttgttaccacttggggagaaagtattaatgtttctcttccctctggctcatacaaggaatggaaatattatctgaattgtgggtcttcaataaatatttcgtatcacgtgagctctaagagctcttctgttttccttataatcgccgaaggggacgtgagcctcacacggtggctggaggacccaacagaacctaatacaactctgtcatggaatgtgatccatggaactggtatgatcacacaggacatattctggtcgtcgagctattatgtggcattgggcaatttggatgaggatgtggaggtagcattaaacctcagtataagggcctccttgcataatacaacgaatgctttctacaaatgtgatcttgccaatggtccatgcagtttgaatcttttgttttctgatggaagtgcagctgtcttagttactcctggtccacaacagaatgcatccaatgagtggtatgtcaaactgtcctatggaccaagatgggtgacctatatttttggaattggtggattgactttgcttgtgtttggggccttcaacttcttgaacaagcttcagtgtgctcatgaagatagagcaggagttagatctgagggaacagaacgtcagagagcccctttgcttcctcacaaagatgatgatctttcaagttggggttcatcgtatgagtccttgccacaagatgagaaggatcttggctttcttccaggaggccccattgatgggaagactttagttgatggtgaaaccagtaataacacacggcatctttgtgctatttgctttgatgctccgagggactgcttcttccttccatgtggacactgtgtggcttgctttgcttgtggaactaggatagccgaggcagctggtacttgccctgtttgtcgtaggaacatgaagaaggttaggaagattttcactgtttgatcagtgcacttcctagtgtagagattaaatgagtagtcaccagaatcatagaataccttttatgtactcaactatacattattttcttgccaatcattaacaatgatcaagcaaatggtgtctgctgatgagggtcgtattggccattgcagcattgcctactgtaatagtgactagatgaatagccaccggaatcatagattactttttatgtattcaactacacattattttcttgccaatcaacaacaataatc

SEQ ID NO: 56465 - protein, 446 aa, Glycine max
  peptide (1)..(446): Ceres Seq. ID no. 15174876
  misc_feature (395)..(433): Pfam Name: Zinc finger, C3HC4 type (RING finger) Pfam Description: Zinc finger, C3HC4 type (RING finger)
  misc_feature (232)..(398): Homolog of NCBI NO: 29648940 NR Description: hypothetical protein [Arabidopsis thaliana]
  misc_feature (207)..(316): Homolog of NCBI NO: 15224468 NR Description: hypothetical protein [Arabidopsis thaliana]
  misc_feature (54)..(150): Homolog of NCBI NO: 18404666 NR Description: expressed protein [Arabidopsis thaliana]
  misc_feature (60)..(203): Homolog of NCBI NO: 15224468 NR Description: hypothetical protein [Arabidopsis thaliana]
  misc_feature (384)..(445): Homolog of NCBI NO: 29648940 NR Description: hypothetical protein [Arabidopsis thaliana]
  misc_feature (190)..(324): Homolog of NCBI NO: 15224464 NR Description: hypothetical protein [Arabidopsis thaliana]
  misc_feature (315)..(446): Homolog of NCBI NO: 15224462 NR Description: zinc finger (C3HC4-type RING finger) protein
  misc_feature (60)..(236): Homolog of NCBI NO: 29648951 NR Description: hypothetical protein [Arabidopsis thaliana]
  misc_feature (108)..(446): Homolog of NCBI NO: 11357966 NR Description: hypothetical protein T10O8.160 - Arabidopsis
  misc_feature (60)..(446): Homolog of NCBI NO: 30679266 NR Description: expressed protein [Arabidopsis thaliana]
TLVSLSSMAEPHSTAAILPPSTARLEETPSGSSQTPLRSGRGGWSIVDGSFAIVRDNTCSCFVVVFSLWFFVSMTMILGVYGSMTIVLGPKSSIVFQPSPVFVQSVKVENLKANPGPGPILYGTYRYPPLDVVTTWGESINVSLPSGSYKEWKYYLNCGSSINISYHVSSKSSSVFLIIAEGDVSLTRWLEDPTEPNTTLSWNVIHGTGMITQDIFWSSSYYVALGNLDEDVEVALNLSIRASLHNTTNAFYKCDLANGPCSLNLLFSDGSAAVLVTPGPQQNASNEWYVKLSYGPRWVTYIFGIGGLTLLVFGAFNFLNKLQCAHEDRAGVRSEGTERQRAPLLPHKDDDLSSWGSSYESLPQDEKDLGFLPGGPIDGKTLVDGETSNNTRHLCAICFDAPRDCFFLPCGHCVACFACGTRIAEAAGTCPVCRRNMKKVRKIFTV

SEQ ID NO: 56466 - protein, 439 aa, Glycine max
  peptide (1)..(439): Ceres Seq. ID no. 15174877
  misc_feature (388)..(426): Pfam Name: Zinc finger, C3HC4 type (RING finger) Pfam Description: Zinc finger, C3HC4 type (RING finger)
  misc_feature (225)..(391): Homolog of NCBI NO: 29648940 NR Description: hypothetical protein [Arabidopsis thaliana]
  misc_feature (200)..(309): Homolog of NCBI NO: 15224468 NR Description: hypothetical protein [Arabidopsis thaliana]
  misc_feature (47)..(143): Homolog of NCBI NO: 18404666 NR Description: expressed protein [Arabidopsis thaliana]
  misc_feature (53)..(196): Homolog of NCBI NO: 15224468 NR Description: hypothetical protein [Arabidopsis thaliana]
  misc_feature (377)..(438): Homolog of NCBI NO: 29648940 NR Description: hypothetical protein [Arabidopsis thaliana]
  misc_feature (183)..(317): Homolog of NCBI NO: 15224464 NR Description: hypothetical protein [Arabidopsis thaliana]
  misc_feature (308)..(439): Homolog of NCBI NO: 15224462 NR Description: zinc finger (C3HC4-type RING finger) protein
  misc_feature (53)..(229): Homolog of NCBI NO: 29648951 NR Description: hypothetical protein [Arabidopsis thaliana]
  misc_feature (101)..(439): Homolog of NCBI NO: 11357966 NR Description: hypothetical protein T10O8.160 - Arabidopsis
  misc_feature (53)..(439): Homolog of NCBI NO: 30679266 NR Description: expressed protein [Arabidopsis thaliana]
MAEPHSTAAILPPSTARLEETPSGSSQTPLRSGRGGWSIVDGSFAIVRDNTCSCFVVVFSLWFFVSMTMILGVYGSMTIVLGPKSSIVFQPSPVFVQSVKVENLKANPGPGPILYGTYRYPPLDVVTTWGESINVSLPSGSYKEWKYYLNCGSSINISYHVSSKSSSVFLIIAEGDVSLTRWLEDPTEPNTTLSWNVIHGTGMITQDIFWSSSYYVALGNLDEDVEVALNLSIRASLHNTTNAFYKCDLANGPCSLNLLFSDGSAAVLVTPGPQQNASNEWYVKLSYGPRWVTYIFGIGGLTLLVFGAFNFLNKLQCAHEDRAGVRSEGTERQRAPLLPHKDDDLSSWGSSYESLPQDEKDLGFLPGGPIDGKTLVDGETSNNTRHLCAICFDAPRDCFFLPCGHCVACFACGTRIAEAAGTCPVCRRNMKKVRKIFTV

SEQ ID NO: 56467 - protein, 373 aa, Glycine max
  peptide (1)..(373): Ceres Seq. ID no. 15174878
  misc_feature (322)..(360): Pfam Name: Zinc finger, C3HC4 type (RING finger) Pfam Description: Zinc finger, C3HC4 type (RING finger)
  misc_feature (159)..(325): Homolog of NCBI NO: 29648940 NR Description: hypothetical protein [Arabidopsis thaliana]
  misc_feature (134)..(243): Homolog of NCBI NO: 15224468 NR Description: hypothetical protein [Arabidopsis thaliana]
  misc_feature (1)..(77): Homolog of NCBI NO: 18404666 NR Description: expressed protein [Arabidopsis thaliana]
  misc_feature (1)..(130): Homolog of NCBI NO: 15224468 NR Description: hypothetical protein [Arabidopsis thaliana]
  misc_feature (311)..(372): Homolog of NCBI NO: 29648940 NR Description: hypothetical protein [Arabidopsis thaliana]
  misc_feature (117)..(251): Homolog of NCBI NO: 15224464 NR Description: hypothetical protein [Arabidopsis thaliana]
  misc_feature (242)..(373): Homolog of NCBI NO: 15224462 NR Description: zinc finger (C3HC4-type RING finger) protein
  misc_feature (1)..(163): Homolog of NCBI NO: 29648951 NR Description: hypothetical protein [Arabidopsis thaliana]
  misc_feature (35)..(373): Homolog of NCBI NO: 11357966 NR Description: hypothetical protein T10O8.160 - Arabidopsis
  misc_feature (1)..(373): Homolog of NCBI NO: 30679266 NR Description: expressed protein [Arabidopsis thaliana]
MTMILGVYGSMTIVLGPKSSIVFQPSPVFVQSVKVENLKANPGPGPILYGTYRYPPLDVVTTWGESINVSLPSGSYKEWKYYLNCGSSINISYHVSSKSSSVFLIIAEGDVSLTRWLEDPTEPNTTLSWNVIHGTGMITQDIFWSSSYYVALGNLDEDVEVALNLSIRASLHNTTNAFYKCDLANGPCSLNLLFSDGSAAVLVTPGPQQNASNEWYVKLSYGPRWVTYIFGIGGLTLLVFGAFNFLNKLQCAHEDRAGVRSEGTERQRAPLLPHKDDDLSSWGSSYESLPQDEKDLGFLPGGPIDGKTLVDGETSNNTRHLCAICFDAPRDCFFLPCGHCVACFACGTRIAEAAGTCPVCRRNMKKVRKIFTV

SEQ ID NO: 56468 - DNA, 744 bp, Glycine max
  misc_feature (1)..(744): Ceres Seq. ID no. 13582293
aacatcctaatcgaaaaatctttttcaacaaccttatcaacaatgcaagagcttcatgaagcggcaattgcttattacaacaacggctccacggatcaacagactttggcatggcagtttttctgttcaatggacggtgacggtaatggccgtgtcagctttcgagagtataccgacttcttgtgtagaaccaccggtttcgcttgggtccatagcgagatgtttcaggagctcgaccggaatagagacggccagcttgacttctgggaggtcttgacgctttactatgtggctcggacgcggaccattggctgccgcacgtgcctccagcctctcattggtttgtactttacgtgtgtaacgtgctttgaatcgcaatgtgttggcgacacgtttgatctctgcgtcaagtgttatatgcggcggaattataatcatccgcatcgtgtcttcctggatagttttgttttattacgatctaagcgtagccaccctcctatgttgcaggagccgcctggcgaccaaaacatgcccgaacaacatcctgggatgatgggatggtgcaccgcgttgtcagcaatggaagctgcatttgctgtgggatcttttgctggcttttgcactattatgtaaaaatcatgttctatctcattgttgtttttgttcttaaatatttagccaataaacgcactataagtttaaatggcagactacaagataagagagtaatactacaaccttgat

SEQ ID NO: 56469 - protein, 210 aa, Glycine max
  peptide (1)..(210): Ceres Seq. ID no. 13582294
  misc_feature (70)..(98): Pfam Name: EF hand Pfam Description: EF hand
  misc_feature (15)..(166): Homolog of NCBI NO: 15235705 NR Description: calcium-binding EF-hand family protein
NILIEKSFSTTLSTMQELHEAAIAYYNNGSTDQQTLAWQFFCSMDGDGNGRVSFREYTDFLCRTTGFAWVHSEMFQELDRNRDGQLDFWEVLTLYYVARTRTIGCRTCLQPLIGLYFTCVTCFESQCVGDTFDLCVKCYMRRNYNHPHRVFLDSFVLLRSKRSHPPMLQEPPGDQNMPEQHPGMMGWCTALSAMEAAFAVGSFAGFCTIM

SEQ ID NO: 56470 - protein, 196 aa, Glycine max
  peptide (1)..(196): Ceres Seq. ID no. 13582295
  misc_feature (56)..(84): Pfam Name: EF hand Pfam Description: EF hand
  misc_feature (1)..(152): Homolog of NCBI NO: 15235705 NR Description: calcium-binding EF-hand family protein
MQELHEAAIAYYNNGSTDQQTLAWQFFCSMDGDGNGRVSFREYTDFLCRTTGFAWVHSEMFQELDRNRDGQLDFWEVLTLYYVARTRTIGCRTCLQPLIGLYFTCVTCFESQCVGDTFDLCVKCYMRRNYNHPHRVFLDSFVLLRSKRSHPPMLQEPPGDQNMPEQHPGMMGWCTALSAMEAAFAVGSFAGFCTIM

SEQ ID NO: 56471 - protein, 167 aa, Glycine max
  peptide (1)..(167): Ceres Seq. ID no. 13582296
  misc_feature (27)..(55): Pfam Name: EF hand Pfam Description: EF hand
  misc_feature (1)..(123): Homolog of NCBI NO: 15235705 NR Description: calcium-binding EF-hand family protein
MDGDGNGRVSFREYTDFLCRTTGFAWVHSEMFQELDRNRDGQLDFWEVLTLYYVARTRTIGCRTCLQPLIGLYFTCVTCFESQCVGDTFDLCVKCYMRRNYNHPHRVFLDSFVLLRSKRSHPPMLQEPPGDQNMPEQHPGMMGWCTALSAMEAAFAVGSFAGFCTIM

SEQ ID NO: 56472 - DNA, 1137 bp, Glycine max
  misc_feature (1)..(1137): Ceres Seq. ID no. 14304231
gactcctttcgcctcctcctcctcctcctctggattgcggcgcgacggcggccgtgagcgagcggtgctcctactcctcctccacgccctcgcgcccagatccgctccccaatggcgcggaacccggcctccagcgtctacgtaggcaacttggatgagaaggtgcctgaaagagtcttgtatgagattcttattcaggctggtcatgtagtagacctgcacataccatgtgacaaagaaactgggcgtcccaaaggttttgcttttgctgagtatgagacagacgcaattgctcagtatgctgttagacttttttcaggacttgttaggcttaatggtaaaacacttaaatttgcgctttctggacaagacaagccctcatcaaatggcaataatccagtaatgcctaaactcaaccctataccattaccaaagcagcctcagtttgtgcattctagtgatacgcttgtgtcgcataaaccagcatatccggtggtaaatggtgggattccacataatgttttttcacaaggctatcatccttacaatgttcaccctcaagcattaccaactcgacccgtgcatgagcaccgagagtttgtccatggtacgtatggttacaacagtcatgtatatggttctgttctgaatgctagctatggaggttatgttgtgaatgctgttggtcatcgagctgtgaggcaaccaatcatttacccatcctactaggttgtaggcaccaaattgcgggatctggtattcagagtaggcaggttaatcgtagcttcttggtccctcaaattctcagtagcatctttgttgtacccttgtacttcaattccctgcatgtaaatagggctggtatatccattttatcaacggtaagttggcaacggaaagctctgcccactacattgtacacctttgtacttgtctagcctggtacatcttttctctttcttggaattggaaaataaagaaatgcaacatcgtgggctgttttgcccccccactgactcggattatttgagctattcctaaagctccttttcatgtactcgaatgatcattgctgttacttacacagaagatgttgatgtctcagctccggggcctcatataattataaattcaagc

SEQ ID NO: 56473 - protein, 205 aa, Glycine max
  peptide (1)..(205): Ceres Seq. ID no. 14304232
  misc_feature (9)..(81): Pfam Name: RNA recognition motif. (a.k.a. RRM, RBD, or RNP domain) Pfam Description: RNA recognition motif. (a.k.a. RRM, RBD, or RNP
  misc_feature (3)..(103): Homolog of NCBI NO: 34193906 NR Description: Splicing factor 3b, subunit 4 [Danio rerio]
  misc_feature (3)..(103): Homolog of NCBI NO: 24119253 NR Description: splicing factor 3b, subunit 4 [Danio rerio]
  misc_feature (3)..(103): Homolog of NCBI NO: 38512254 NR Description: Spx-prov protein [Silurana tropicalis]
  misc_feature (3)..(103): Homolog of NCBI NO: 28374170 NR Description: Similar to splicing factor 3b, subunit 4, 49kD
  misc_feature (3)..(103): Homolog of NCBI NO: 37535012 NR Description: putative spliceosomal protein
  misc_feature (1)..(103): Homolog of NCBI NO: 34858075 NR Description: similar to Sf3b4 protein [Rattus norvegicus]
  misc_feature (3)..(104): Homolog of NCBI NO: 19114913 NR Description: spliceosome associated protein 49; RNA binding
  misc_feature (27)..(95): Homolog of NCBI NO: 7486312 NR Description: hypothetical protein F28M11.30 - Arabidopsis
  misc_feature (8)..(95): Homolog of NCBI NO: 30681329 NR Description: RNA recognition motif (RRM)-containing protein
  misc_feature (1)..(163): Homolog of NCBI NO: 34907328 NR Description: P0698A10.26 [Oryza sativa (japonica
MARNPASSVYVGNLDEKVPERVLYEILIQAGHVVDLHIPCDKETGRPKGFAFAEYETDAIAQYAVRLFSGLVRLNGKTLKFALSGQDKPSSNGNNPVMPKLNPIPLPKQPQFVHSSDTLVSHKPAYPVVNGGIPHNVFSQGYHPYNVHPQALPTRPVHEHREFVHGTYGYNSHVYGSVLNASYGGYVVNAVGHRAVRQPIIYPSY

SEQ ID NO: 56474 - protein, 108 aa, Glycine max
  peptide (1)..(108): Ceres Seq. ID no. 14304233
  misc_feature (1)..(55): Homolog of NCBI NO: 39930581 NR Description: RNA binding motif protein 11 [Mus musculus]
  misc_feature (1)..(55): Homolog of NCBI NO: 26333183 NR Description: unnamed protein product [Mus musculus]
  misc_feature (1)..(49): Homolog of NCBI NO: 21426833 NR Description: RNA binding motif protein 11 [Homo sapiens]
  misc_feature (1)..(27): Homolog of NCBI NO: 20129123 NR Description: CG11454-PA [Drosophila melanogaster]
  misc_feature (1)..(27): Homolog of NCBI NO: 16769726 NR Description: LP01585p [Drosophila melanogaster]
  misc_feature (1)..(66): Homolog of NCBI NO: 34907328 NR Description: P0698A10.26 [Oryza sativa (japonica
MPKLNPIPLPKQPQFVHSSDTLVSHKPAYPVVNGGIPHNVFSQGYHPYNVHPQALPTRPVHEHREFVHGTYGYNSHVYGSVLNASYGGYVVNAVGHRAVRQPIIYPSY

SEQ ID NO: 56475 - DNA, 783 bp, Glycine max
  misc_feature (1)..(783): Ceres Seq. ID no. 14304132
atcctctctctcatcagaagaagaagggacgaaagaagaagtatctttgttttcgctctcttctctctcctttcgatctttgacgattagaaaacgaaagtgatggctgcagttaatgggtaccaaggaaacactccggcggcgtcaaagcaatctgctcctctgactaagactgttgatagccaatctgttctcaaaaggctgcaatctgaactaatgggcttgatgatgggtggtgacccggggatatctgctttcccagaggaagacaacatattctgttggaaagggacaataacaggaagcaaagatactgtgtttgaaggaactgagtacagactctcactctctttctccaatgactatcctttcaagcctcctaagatcaagttccacactggttgcttccaccccaatgttgatgtctatggcaatatctgtttggacattcttcaggataaatggtcatctgcatatgatgtgaggacaatactactatcgattcagagccttttgggagaaccgaacatcagctcaccattgaacactcaagcagcgcagctctggagcaaccaagaagagtataggaagatggttgagaagctctacaagccccccagtgcatgataacttcaggatgtgtcattcctttgctctataatttgtttctgatcatcaacagttttatctgtaacattttacctagccttttgacctgagccaaatattgatattgatgtgagcttttcaaaaattaatcagaatgatatacacattcttctt

SEQ ID NO: 56476 - protein, 174 aa, Glycine max
  peptide (1)..(174): Ceres Seq. ID no. 14304133
  misc_feature (15)..(170): Homolog of NCBI NO: 24663332 NR Description: vihar CG10682-PA [Drosophila melanogaster]
  misc_feature (4)..(170): Homolog of NCBI NO: 31216813 NR Description: ENSANGP00000020629 [Anopheles gambiae]
  misc_feature (21)..(170): Homolog of NCBI NO: 4388942 NR Description: E2-C, An Ubiquitin Conjugating Enzyme Required
  misc_feature (8)..(170): Homolog of NCBI NO: 3915196 NR Description: Ubiquitin-conjugating enzyme E2-C
  misc_feature (9)..(171): Homolog of NCBI NO: 34903234 NR Description: unnamed protein product [Oryza sativa (japonica
  misc_feature (30)..(174): Homolog of NCBI NO: 9454557 NR Description: Putative ubiquitin carrier protein [Arabidopsis
  misc_feature (15)..(174): Homolog of NCBI NO: 25293673 NR Description: hypothetical protein F17J6.3 [imported] -
  misc_feature (1)..(174): Homolog of NCBI NO: 18402475 NR Description: ubiquitin-conjugating enzyme (UBC19) [Arabidopsis
  misc_feature (1)..(174): Homolog of NCBI NO: 21618179 NR Description: E2, ubiquitin-conjugating enzyme, putative
  misc_feature (1)..(174): Homolog of NCBI NO: 18403097 NR Description: ubiquitin-conjugating enzyme (UBC20) [Arabidopsis
MAAVNGYQGNTPAASKQSAPLTKTVDSQSVLKRLQSELMGLMMGGDPGISAFPEEDNIFCWKGTITGSKDTVFEGTEYRLSLSFSNDYPFKPPKIKFHTGCFHPNVDVYGNICLDILQDKWSSAYDVRTILLSIQSLLGEPNISSPLNTQAAQLWSNQEEYRKMVEKLYKPPSA

SEQ ID NO: 56477 - protein, 136 aa, Glycine max
  peptide (1)..(136): Ceres Seq. ID no. 14304134
  misc_feature (1)..(132): Homolog of NCBI NO: 24663332 NR Description: vihar CG10682-PA [Drosophila melanogaster]
  misc_feature (1)..(132): Homolog of NCBI NO: 31216813 NR Description: ENSANGP00000020629 [Anopheles gambiae]
  misc_feature (1)..(132): Homolog of NCBI NO: 4388942 NR Description: E2-C, An Ubiquitin Conjugating Enzyme Required
  misc_feature (1)..(132): Homolog of NCBI NO: 3915196 NR Description: Ubiquitin-conjugating enzyme E2-C
  misc_feature (1)..(133): Homolog of NCBI NO: 34903234 NR Description: unnamed protein product [Oryza sativa (japonica
  misc_feature (1)..(136): Homolog of NCBI NO: 9454557 NR Description: Putative ubiquitin carrier protein [Arabidopsis
  misc_feature (1)..(136): Homolog of NCBI NO: 25293673 NR Description: hypothetical protein F17J6.3 [imported] -
  misc_feature (1)..(136): Homolog of NCBI NO: 18402475 NR Description: ubiquitin-conjugating enzyme (UBC19) [Arabidopsis
  misc_feature (1)..(136): Homolog of NCBI NO: 21618179 NR Description: E2, ubiquitin-conjugating enzyme, putative
  misc_feature (1)..(136): Homolog of NCBI NO: 18403097 NR Description: ubiquitin-conjugating enzyme (UBC20) [Arabidopsis
MGLMMGGDPGISAFPEEDNIFCWKGTITGSKDTVFEGTEYRLSLSFSNDYPFKPPKIKFHTGCFHPNVDVYGNICLDILQDKWSSAYDVRTILLSIQSLLGEPNISSPLNTQAAQLWSNQEEYRKMVEKLYKPPSA

SEQ ID NO: 56478 - protein, 133 aa, Glycine max
  peptide (1)..(133): Ceres Seq. ID no. 14304135
  misc_feature (1)..(129): Homolog of NCBI NO: 24663332 NR Description: vihar CG10682-PA [Drosophila melanogaster]
  misc_feature (1)..(129): Homolog of NCBI NO: 31216813 NR Description: ENSANGP00000020629 [Anopheles gambiae]
  misc_feature (1)..(129): Homolog of NCBI NO: 4388942 NR Description: E2-C, An Ubiquitin Conjugating Enzyme Required
  misc_feature (1)..(129): Homolog of NCBI NO: 3915196 NR Description: Ubiquitin-conjugating enzyme E2-C
  misc_feature (1)..(130): Homolog of NCBI NO: 34903234 NR Description: unnamed protein product [Oryza sativa (japonica
  misc_feature (1)..(133): Homolog of NCBI NO: 9454557 NR Description: Putative ubiquitin carrier protein [Arabidopsis
  misc_feature (1)..(133): Homolog of NCBI NO: 25293673 NR Description: hypothetical protein F17J6.3 [imported] -
  misc_feature (1)..(133): Homolog of NCBI NO: 18402475 NR Description: ubiquitin-conjugating enzyme (UBC19) [Arabidopsis
  misc_feature (1)..(133): Homolog of NCBI NO: 21618179 NR Description: E2, ubiquitin-conjugating enzyme, putative
  misc_feature (1)..(133): Homolog of NCBI NO: 18403097 NR Description: ubiquitin-conjugating enzyme (UBC20) [Arabidopsis
MMGGDPGISAFPEEDNIFCWKGTITGSKDTVFEGTEYRLSLSFSNDYPFKPPKIKFHTGCFHPNVDVYGNICLDILQDKWSSAYDVRTILLSIQSLLGEPNISSPLNTQAAQLWSNQEEYRKMVEKLYKPPSA

SEQ ID NO: 56479 - DNA, 1209 bp, Glycine max
  misc_feature (1)..(1209): Ceres Seq. ID no. 14304198
acacactctgcagtgaaacaccctgctccaaactccttcgatggaaaacatccagcacagtcacgtggaagttaagggactaaagctccatgttgctgagattggaagtggtcaaaaggcactggttttcttacatggattcccagaaatatggtatacatggaggcaccagatgattgctgcagcaaatgctggctaccgggctattgcctttgatttcagaggctatggactttctgagcatcctgcggagccagaaaaagcaaacttacttgaccttgttgatgatgtcgtgggtctgttggattcattaagcattaccaaggctgtgcttgttggtaaggactttggtgcctttccagcgtatattgttgccgctctccatccagacaaagtagattcagtcataatgttaggtgttccattcatgcttccaggtccctctgctattcagaacctcccaaaaggctcctacgttattaagtggcaggagcctgggagggcagaagcagattttggccgctttgatgttaagtcagttataaggaacatctacacactcttctctggaagtgagataccaatagcaggtgataatcaggaaatcatggatttgtatgacccaactactcccctgccaccatggttctctgaggaagacctggcaacctatgcatcactatacgaaaaatctggcttcagatttgcattgcaggttccatacaggactcttggagtggatagtggcataagtgatcctaaaatcacagttccggcactgctgatcatgggtgagaaagactatgtcttcaagtgttttggaatggaggactacatccgaagtggcgcagtgaaacattttgtgccagacttggaaatcatatatattccagaaggaagccattttgtgcatgaacaatttcctgagaaggtgaaccagctcatcattgaattccttaacaaacaaagcatttgattgtctgatctgaagctcagagtaggatgcaatattgtataagaagcaactctctgtggcgggatgatttttaaggaatcacttatttccaaataaggcaataagtaacttgaatgagtacttattcgatagaactttgatctacactctacagacattttgataaatactatgtaattcgtatagaattgcttttgctctatcctcaacattaatgatcaatcatctcattg

SEQ ID NO: 56480 - protein, 311 aa, Glycine max
  peptide (1)..(311): Ceres Seq. ID no. 14304199
  misc_feature (53)..(303): Pfam Name: alpha/beta hydrolase fold Pfam Description: alpha/beta hydrolase fold
  misc_feature (2)..(310): Homolog of NCBI NO: 37535722 NR Description: putative epoxide hydrolase
  misc_feature (2)..(311): Homolog of NCBI NO: 37535724 NR Description: putative epoxide hydrolase
  misc_feature (1)..(311): Homolog of NCBI NO: 37535728 NR Description: putative epoxide hydrolase
  misc_feature (1)..(311): Homolog of NCBI NO: 37535732 NR Description: putative epoxide hydrolase
  misc_feature (1)..(308): Homolog of NCBI NO: 1354849 NR Description: epoxide hydrolase [Nicotiana tabacum]
MENIQHSHVEVKGLKLHVAEIGSGQKALVFLHGFPEIWYTWRHQMIAAANAGYRAIAFDFRGYGLSEHPAEPEKANLLDLVDDVVGLLDSLSITKAVLVGKDFGAFPAYIVAALHPDKVDSVIMLGVPFMLPGPSAIQNLPKGSYVIKWQEPGRAEADFGRFDVKSVIRNIYTLFSGSEIPIAGDNQEIMDLYDPTTPLPPWFSEEDLATYASLYEKSGFRFALQVPYRTLGVDSGISDPKITVPALLIMGEKDYVFKCFGMEDYIRSGAVKHFVPDLEIIYIPEGSHFVHEQFPEKVNQLIIEFLNKQSI

SEQ ID NO: 56481 - protein, 267 aa, Glycine max
  peptide (1)..(267): Ceres Seq. ID no. 14304200
  misc_feature (9)..(259): Pfam Name: alpha/beta hydrolase fold Pfam Description: alpha/beta hydrolase fold
  misc_feature (1)..(266): Homolog of NCBI NO: 37535722 NR Description: putative epoxide hydrolase
  misc_feature (1)..(267): Homolog of NCBI NO: 37535724 NR Description: putative epoxide hydrolase
  misc_feature (1)..(267): Homolog of NCBI NO: 37535728 NR Description: putative epoxide hydrolase
  misc_feature (1)..(267): Homolog of NCBI NO: 37535732 NR Description: putative epoxide hydrolase
  misc_feature (1)..(264): Homolog of NCBI NO: 1354849 NR Description: epoxide hydrolase [Nicotiana tabacum]
MIAAANAGYRAIAFDFRGYGLSEHPAEPEKANLLDLVDDVVGLLDSLSITKAVLVGKDFGAFPAYIVAALHPDKVDSVIMLGVPFMLPGPSAIQNLPKGSYVIKWQEPGRAEADFGRFDVKSVIRNIYTLFSGSEIPIAGDNQEIMDLYDPTTPLPPWFSEEDLATYASLYEKSGFRFALQVPYRTLGVDSGISDPKITVPALLIMGEKDYVFKCFGMEDYIRSGAVKHFVPDLEIIYIPEGSHFVHEQFPEKVNQLIIEFLNKQSI

SEQ ID NO: 56482 - protein, 188 aa, Glycine max
  peptide (1)..(188): Ceres Seq. ID no. 14304201
  misc_feature (1)..(180): Pfam Name: alpha/beta hydrolase fold Pfam Description: alpha/beta hydrolase fold
  misc_feature (1)..(187): Homolog of NCBI NO: 37535722 NR Description: putative epoxide hydrolase
  misc_feature (1)..(188): Homolog of NCBI NO: 37535724 NR Description: putative epoxide hydrolase
  misc_feature (1)..(188): Homolog of NCBI NO: 37535728 NR Description: putative epoxide hydrolase
  misc_feature (1)..(188): Homolog of NCBI NO: 37535732 NR Description: putative epoxide hydrolase
  misc_feature (1)..(185): Homolog of NCBI NO: 1354849 NR Description: epoxide hydrolase [Nicotiana tabacum]
MLGVPFMLPGPSAIQNLPKGSYVIKWQEPGRAEADFGRFDVKSVIRNIYTLFSGSEIPIAGDNQEIMDLYDPTTPLPPWFSEEDLATYASLYEKSGFRFALQVPYRTLGVDSGISDPKITVPALLIMGEKDYVFKCFGMEDYIRSGAVKHFVPDLEIIYIPEGSHFVHEQFPEKVNQLIIEFLNKQSI

SEQ ID NO: 56483 - DNA, 1148 bp, Glycine max
  misc_feature (1)..(1148): Ceres Seq. ID no. 14311253
acttgttccccgaagcttctcgtcccctcccctcccctcccctcctctcgcaccgccgggccggagggaggcgcctcgccgtctcctcgccgccgctcgtcgttggtggttcctggcgcgtgagtgacgcccagccggcatggcggccaacgtgggggagtccacgagcgggagcagcagcgtggccggcgacggcgggggcagcttcgagtgcaacatatgcttcgagctgccgcaggagcccatcgtcacgctctgcggccacctcttctgctggccctgcctctacaagtggctgcacatccactcgcactcccccgagtgccccgtctgcaaggccgtcgtcgaggaggacaagctcgtcccgctctatggccgcggcaaggaccgcgtcgaccccaggtccaagggcgtgccgtccggggccgagatccccaaccggccgaccgggcagcggcctgccaccgccccgcaggccgaccccaacaaccacttccccaacgccaaccctaacccctggttcatgggtggagggggcgtccctttggccaacgcgcggtgggggaactacaccttctcggccgcgtttggcggcctgttcccgctgctgagcttccaggtacatggattcccggacgcgaccgcgtacgggcagcctgccgggtttccctatgggtacggacatggacatggccacggccacgggcatgctttccatggtgggaacgcccacgccgccgccccccggcacgcgccgccagggcagcagcagcagcaggcggacgtgtacctcaaggcgctgctcatcctggtcggcttcctcgtgatcgcaagcctcatcacattctaggtttgtcggctcccactattgtcatttgtcaccgtcataataagagaaacgattgtcgtgatacttgtcagatgttgtgtgcattaccttggccccccatacaaagccctggtctagatctgagtggtgcgttttgagcgaaagcgttcatagaactgctgtatatatgtgctatttagacgcggtcctgtggggggcgcctgtgtaccgtagtggtttcgcgctgattcgcgagtgatttggaaacctctcttcggggtggatgtaccagaccaattatatatcatgtgtaattttg

SEQ ID NO: 56484 - protein, 236 aa, Glycine max
  peptide (1)..(236): Ceres Seq. ID no. 14311254
  misc_feature (25)..(65): Pfam Name: Zinc finger, C3HC4 type (RING finger) Pfam Description: Zinc finger, C3HC4 type (RING finger)
  misc_feature (7)..(124): Homolog of NCBI NO: 22795037 NR Description: putative RING protein [Populus x canescens]
  misc_feature (7)..(230): Homolog of NCBI NO: 39581891 NR Description: Hypothetical protein CBG20152 [Caenorhabditis
  misc_feature (12)..(163): Homolog of NCBI NO: 21912604 NR Description: putative ubiquitin ligase [Taenia solium]
  misc_feature (7)..(234): Homolog of NCBI NO: 17554742 NR Description: RiNg Finger protein (24.9 kD) (rnf-5)
  misc_feature (18)..(118): Homolog of NCBI NO: 15222064 NR Description: zinc finger (C3HC4-type RING finger) protein
  misc_feature (3)..(234): Homolog of NCBI NO: 21553849 NR Description: putative RING zinc finger protein [Arabidopsis
  misc_feature (3)..(234): Homolog of NCBI NO: 15224062 NR Description: zinc finger (C3HC4-type RING finger) protein
  misc_feature (3)..(233): Homolog of NCBI NO: 18394721 NR Description: zinc finger (C3HC4-type RING finger) protein
  misc_feature (1)..(236): Homolog of NCBI NO: 34909840 NR Description: P0403C05.28 [Oryza sativa (japonica
  misc_feature (1)..(236): Homolog of NCBI NO: 29150403 NR Description: unknown protein [Oryza sativa (japonica
MAANVGESTSGSSSVAGDGGGSFECNICFELPQEPIVTLCGHLFCWPCLYKWLHIHSHSPECPVCKAVVEEDKLVPLYGRGKDRVDPRSKGVPSGAEIPNRPTGQRPATAPQADPNNHFPNANPNPWFMGGGGVPLANARWGNYTFSAAFGGLFPLLSFQVHGFPDATAYGQPAGFPYGYGHGHGHGHGHAFHGGNAHAAAPRHAPPGQQQQQADVYLKALLILVGFLVIASLITF

SEQ ID NO: 56485 - protein, 202 aa, Glycine max
  peptide (1)..(202): Ceres Seq. ID no. 14311255
  misc_feature (56)..(202): Pfam Name: Glycoprotein GG/GX Pfam Description: Glycoprotein GG/GX
  misc_feature (49)..(202): Homolog of NCBI NO: 13592175 NR Description: ppg3 [Leishmania major]
  misc_feature (41)..(202): Homolog of NCBI NO: 19113482 NR Description: hypothetical serine-rich secreted protein
  misc_feature (26)..(202): Homolog of NCBI NO: 31232507 NR Description: ENSANGP00000004655 [Anopheles gambiae]
  misc_feature (69)..(202): Homolog of NCBI NO: 11359723 NR Description: proteophosphoglycan, membrane-associated
  misc_feature (3)..(202): Homolog of NCBI NO: 13592175 NR Description: ppg3 [Leishmania major]
  misc_feature (49)..(202): Homolog of NCBI NO: 13592175 NR Description: ppg3 [Leishmania major]
  misc_feature (3)..(202): Homolog of NCBI NO: 27375632 NR Description: blr0521 [Bradyrhizobium japonicum]
  misc_feature (3)..(202): Homolog of NCBI NO: 31232507 NR Description: ENSANGP00000004655 [Anopheles gambiae]
  misc_feature (56)..(202): Homolog of NCBI NO: 11359723 NR Description: proteophosphoglycan, membrane-associated
  misc_feature (20)..(202): Homolog of NCBI NO: 32699068 NR Description: hypothetical protein FLJ35107 [Homo sapiens]
LFPEASRPLPSPPLLSHRRAGGRRLAVSSPPLVVGGSWRVSDAQPAWRPTWGSPRAGAAAWPATAGAASSATYASSCRRSPSSRSAATSSAGPASTSGCTSTRTPPSAPSARPSSRRTSSSRSMAAARTASTPGPRACRPGPRSPTGRPGSGLPPPRRPTPTTTSPTPTLTPGSWVEGASLWPTRGGGTTPSRPRLAACSRC

SEQ ID NO: 56486 - DNA, 1347 bp, Glycine max
  misc_feature (1)..(1347): Ceres Seq. ID no. 13582297
atccaatcttcactcactctctaatttactacagaaaaaaaaaaaagatgagtagtgttttttcagaacacaaattccaacttcaaccctctcaccaacttctctccctcaagaaatccctgagggacatagacatcccagtcccaccaaggaagctcctcacccgccgctccgccgccgtccacgacgtctccggcgacatgttttccgatgacaccctccggcacaagtaccttccccacaatggctccaccgactcctccgacgatgactccggcgacccctacgcctccgatcaattccgcatgtttgagttcaaggtccggcgctgtactcgcagccggagccatgactggacagactgtccatttgtacatcccggcgagaaggcccgccgtcgggaccctcgccggtttcattactctgcaacagtctgtccagagtttcgccgcggtcagtgtgaccgtggcgatgcatgtgagttttctcatggggtgtttgagtgctggttacacccttctaggtatagaaccgaggcttgcaaggatggtaggaattgcaagcgaaaagtttgcttctttgctcacacccctcgccaactcagggttttgcattccaatgaaaatagcaacaagaaaaagtgcaccaatatgagccctcataacaacaacaacaacaccaacaattgttgtttggtttgccattgctcttcttctactcgttcaccaacttcaaccttgttcggcatgtctcatttttctcctccattgtcaccaccttctccttcttccccttctaggtttgagaccaaccatcatcatggtgttgtgaaatataataaggatgtgctctctgagcttatgtgttccatggagggtttgaattttggtgaggcttcacttttgtctgctgcttctaagcctcacaacaatttgtcttcttggcttgatgtttctgaggatcacaatcaaaaacagttcagtactctttcaccaaccatcactgcttgtggaagcttttccaacaacggaaatgggagatttttgagagaagaaagtggggttgttgatgatgttatttccccagatctcgcatgggtgaatgaattactgatgtagattatatgcatttgaagatgatgatgacaaaaagtggttcgtggtgggaattgtgatgaggatttaccaagtgtaaatacatgttggagctagcaacatatattacatccttggcttcttttcttattattgttttaagaattttattgctttctgaatttgttttaagatttgtcaaattaaattctgtaatttttatgtccattaattagatttgatcttttattcc

SEQ ID NO: 56487 - protein, 371 aa, Glycine max
  peptide (1)..(371): Ceres Seq. ID no. 13582298
  misc_feature (175)..(197): Pfam Name: Zinc finger C-x8-C-x5-C-x3-H type (and similar) Pfam Description: Zinc finger C-x8-C-x5-C-x3-H type (and similar)
  misc_feature (86)..(265): Homolog of NCBI NO: 25408764 NR Description: probable CCCH-type zinc finger protein
  misc_feature (86)..(265): Homolog of NCBI NO: 18405834 NR Description: CCCH-type zinc finger protein -related
  misc_feature (76)..(205): Homolog of NCBI NO: 15233491 NR Description: expressed protein [Arabidopsis thaliana]
  misc_feature (76)..(203): Homolog of NCBI NO: 21593538 NR Description: putative CCCH-type zinc finger protein
  misc_feature (76)..(211): Homolog of NCBI NO: 15224852 NR Description: CCCH-type zinc finger protein -related
  misc_feature (76)..(203): Homolog of NCBI NO: 15225213 NR Description: CCCH-type zinc finger protein -related
  misc_feature (93)..(264): Homolog of NCBI NO: 34906436 NR Description: putative zinc finger transcription factor
  misc_feature (45)..(307): Homolog of NCBI NO: 15241451 NR Description: expressed protein [Arabidopsis thaliana]
  misc_feature (16)..(307): Homolog of NCBI NO: 26449538 NR Description: unknown protein [Arabidopsis thaliana]
  misc_feature (16)..(307): Homolog of NCBI NO: 15219557 NR Description: expressed protein [Arabidopsis thaliana]
PIFTHSLIYYRKKKKMSSVFSEHKFQLQPSHQLLSLKKSLRDIDIPVPPRKLLTRRSAAVHDVSGDMFSDDTLRHKYLPHNGSTDSSDDDSGDPYASDQFRMFEFKVRRCTRSRSHDWTDCPFVHPGEKARRRDPRRFHYSATVCPEFRRGQCDRGDACEFSHGVFECWLHPSRYRTEACKDGRNCKRKVCFFAHTPRQLRVLHSNENSNKKKCTNMSPHNNNNNTNNCCLVCHCSSSTRSPTSTLFGMSHFSPPLSPPSPSSPSRFETNHHHGVVKYNKDVLSELMCSMEGLNFGEASLLSAASKPHNNLSSWLDVSEDHNQKQFSTLSPTITACGSFSNNGNGRFLREESGVVDDVISPDLAWVNELLM

SEQ ID NO: 56488 - protein, 356 aa, Glycine max
  peptide (1)..(356): Ceres Seq. ID no. 13582299
  misc_feature (160)..(182): Pfam Name: Zinc finger C-x8-C-x5-C-x3-H type (and similar) Pfam Description: Zinc finger C-x8-C-x5-C-x3-H type (and similar)
  misc_feature (71)..(250): Homolog of NCBI NO: 25408764 NR Description: probable CCCH-type zinc finger protein
  misc_feature (71)..(250): Homolog of NCBI NO: 18405834 NR Description: CCCH-type zinc finger protein -related
  misc_feature (61)..(190): Homolog of NCBI NO: 15233491 NR Description: expressed protein [Arabidopsis thaliana]
  misc_feature (61)..(188): Homolog of NCBI NO: 21593538 NR Description: putative CCCH-type zinc finger protein
  misc_feature (61)..(196): Homolog of NCBI NO: 15224852 NR Description: CCCH-type zinc finger protein -related
  misc_feature (61)..(188): Homolog of NCBI NO: 15225213 NR Description: CCCH-type zinc finger protein -related
  misc_feature (78)..(249): Homolog of NCBI NO: 34906436 NR Description: putative zinc finger transcription factor
  misc_feature (30)..(292): Homolog of NCBI NO: 15241451 NR Description: expressed protein [Arabidopsis thaliana]
  misc_feature (1)..(292): Homolog of NCBI NO: 26449538 NR Description: unknown protein [Arabidopsis thaliana]
  misc_feature (1)..(292): Homolog of NCBI NO: 15219557 NR Description: expressed protein [Arabidopsis thaliana]
MSSVFSEHKFQLQPSHQLLSLKKSLRDIDIPVPPRKLLTRRSAAVHDVSGDMFSDDTLRHKYLPHNGSTDSSDDDSGDPYASDQFRMFEFKVRRCTRSRSHDWTDCPFVHPGEKARRRDPRRFHYSATVCPEFRRGQCDRGDACEFSHGVFECWLHPSRYRTEACKDGRNCKRKVCFFAHTPRQLRVLHSNENSNKKKCTNMSPHNNNNNTNNCCLVCHCSSSTRSPTSTLFGMSHFSPPLSPPSPSSPSRFETNHHHGVVKYNKDVLSELMCSMEGLNFGEASLLSAASKPHNNLSSWLDVSEDHNQKQFSTLSPTITACGSFSNNGNGRFLREESGVVDDVISPDLAWVNELLM

SEQ ID NO: 56489 - protein, 305 aa, Glycine max
  peptide (1)..(305): Ceres Seq. ID no. 13582300
  misc_feature (109)..(131): Pfam Name: Zinc finger C-x8-C-x5-C-x3-H type (and similar) Pfam Description: Zinc finger C-x8-C-x5-C-x3-H type (and similar)
  misc_feature (20)..(199): Homolog of NCBI NO: 25408764 NR Description: probable CCCH-type zinc finger protein
  misc_feature (20)..(199): Homolog of NCBI NO: 18405834 NR Description: CCCH-type zinc finger protein -related
  misc_feature (10)..(139): Homolog of NCBI NO: 15233491 NR Description: expressed protein [Arabidopsis thaliana]
  misc_feature (10)..(137): Homolog of NCBI NO: 21593538 NR Description: putative CCCH-type zinc finger protein
  misc_feature (10)..(145): Homolog of NCBI NO: 15224852 NR Description: CCCH-type zinc finger protein -related
  misc_feature (10)..(137): Homolog of NCBI NO: 15225213 NR Description: CCCH-type zinc finger protein -related
  misc_feature (27)..(198): Homolog of NCBI NO: 34906436 NR Description: putative zinc finger transcription factor
  misc_feature (1)..(241): Homolog of NCBI NO: 15241451 NR Description: expressed protein [Arabidopsis thaliana]
  misc_feature (1)..(241): Homolog of NCBI NO: 26449538 NR Description: unknown protein [Arabidopsis thaliana]
  misc_feature (1)..(241): Homolog of NCBI NO: 15219557 NR Description: expressed protein [Arabidopsis thaliana]
MFSDDTLRHKYLPHNGSTDSSDDDSGDPYASDQFRMFEFKVRRCTRSRSHDWTDCPFVHPGEKARRRDPRRFHYSATVCPEFRRGQCDRGDACEFSHGVFECWLHPSRYRTEACKDGRNCKRKVCFFAHTPRQLRVLHSNENSNKKKCTNMSPHNNNNNTNNCCLVCHCSSSTRSPTSTLFGMSHFSPPLSPPSPSSPSRFETNHHHGVVKYNKDVLSELMCSMEGLNFGEASLLSAASKPHNNLSSWLDVSEDHNQKQFSTLSPTITACGSFSNNGNGRFLREESGVVDDVISPDLAWVNELLM

SEQ ID NO: 56490 - DNA, 1350 bp, Glycine max
  misc_feature (1)..(1350): Ceres Seq. ID no. 13595438
acgttagcgagaggtaaaaatccgactgcccaggggacgaaccggaacaagggttccgggcccgtctcttcttcgtttcgtttccatccacagctcgtcctccccccaaaccttaccccatgtccgacggcggcggcgagcccggggccggcggctcggcgccggtgtgcaacttcgttcagaagccgccgaagaatattcggaagcgtcccgccgcctccgtcggctctgatgacgaagaaggtagcggcggcgacgattccggggccatcgcggcggcgcgatctaagaagccgccgcctactaccagcaagctcttcttctcctccgccgacaactcacacgagccccgccgtttccagttcgagtcgtcccggactattcagtcctctaccgacaaccgcgccactgcgacgcttgagacggagacggcgtacgaccgtgatgcgcgcgccatccgcgagcgacagctcaagcaggctgaggaatccctcaagaagaacccctctgcctcctcctcctccggggagctctacaaggggatccacggctacacggatcacaaggccggcttccggcgggagcacacggtttccggagagaaggccggcggcgctcacggccccctgcgggcgtcagcgcacatacgcctctccacgcggttcgactaccaacccgacatctgcaaggattataaggagaccggctattgtggctatggcgattcctgcaagttcatgcacgacagaggtgactacaagtccggatggcagctcgagagggagtgggacgaggccgagaaagcccgcaaacggcgcatagcgatgcgtgagttgggtggtagtgatggcgaggcagaggaggaagacagcgacgacgaggaggcactgccctttgcctgcttcatatgcagggagccctttgttgacccggtggtcacaaagtgtaagcattatttctgcgagcattgcgcattaaagcatcactcgaagaacaagaagtgctttgtctgcaataaaccgacgcttggcatcttcaatgcagcgcaggagatccggaagaagattgcccaggacaagaagcagcaggacctttgatgactgctgcacaatgtagcttgtatcatggaggattacttctcttctgtaattgtattgtttgaaaatgagggggaaatgtccaggaatcagttttgtttctttagctctgtactagctcctacttaccattagccattttgccgcaacttaaaaggactacaaggaaggattgtaggagtttttgagaaaatcaacaacgaaagaactagcttattgtggacctatggaaaaatatctcaaaacttgaagg

SEQ ID NO: 56491 - protein, 325 aa, Glycine max
  peptide (1)..(325): Ceres Seq. ID no. 13595439
  misc_feature (261)..(298): Pfam Name: Zinc finger, C3HC4 type (RING finger) Pfam Description: Zinc finger, C3HC4 type (RING finger)
  misc_feature (11)..(323): Homolog of NCBI NO: 34935361 NR Description: similar to RIKEN cDNA 2310020H19 [Rattus
  misc_feature (16)..(323): Homolog of NCBI NO: 21313494 NR Description: RIKEN cDNA 2310020H19 [Mus musculus]
  misc_feature (93)..(316): Homolog of NCBI NO: 27374308 NR Description: CG4973-PA [Drosophila pseudoobscura]
  misc_feature (71)..(312): Homolog of NCBI NO: 27374394 NR Description: CG4973-PA [Drosophila willistoni]
  misc_feature (8)..(324): Homolog of NCBI NO: 27715515 NR Description: similar to RIKEN cDNA 2810428C21
  misc_feature (1)..(287): Homolog of NCBI NO: 25406720 NR Description: probable zinc finger protein [imported] -
  misc_feature (13)..(324): Homolog of NCBI NO: 22531136 NR Description: putative protein [Arabidopsis thaliana]
  misc_feature (13)..(324): Homolog of NCBI NO: 15240037 NR Description: expressed protein [Arabidopsis thaliana]
  misc_feature (1)..(324): Homolog of NCBI NO: 26451788 NR Description: unknown protein [Arabidopsis thaliana]
  misc_feature (1)..(324): Homolog of NCBI NO: 15223384 NR Description: expressed protein [Arabidopsis thaliana]
MSDGGGEPGAGGSAPVCNFVQKPPKNIRKRPAASVGSDDEEGSGGDDSGAIAAARSKKPPPTTSKLFFSSADNSHEPRRFQFESSRTIQSSTDNRATATLETETAYDRDARAIRERQLKQAEESLKKNPSASSSSGELYKGIHGYTDHKAGFRREHTVSGEKAGGAHGPLRASAHIRLSTRFDYQPDICKDYKETGYCGYGDSCKFMHDRGDYKSGWQLEREWDEAEKARKRRIAMRELGGSDGEAEEEDSDDEEALPFACFICREPFVDPVVTKCKHYFCEHCALKHHSKNKKCFVCNKPTLGIFNAAQEIRKKIAQDKKQQDL

SEQ ID NO: 56492 - protein, 273 aa, Glycine max
  peptide (1)..(273): Ceres Seq. ID no. 13595440
  misc_feature (97)..(213): Pfam Name: Cupin Pfam Description: Cupin
  misc_feature (6)..(273): Homolog of NCBI NO: 5420387 NR Description: proteophosphoglycan [Leishmania major]
  misc_feature (69)..(273): Homolog of NCBI NO: 2136504 NR Description: gastric mucin (clone PGM-2A) - pig (fragment)
TLARGKNPTAQGTNRNKGSGPVSSSFRFHPQLVLPPNLTPCPTAAASPGPAARRRCATSFRSRRRIFGSVPPPPSALMTKKVAAATIPGPSRRRDLRSRRLLPASSSSPPPTTHTSPAVSSSSRPGLFSPLPTTAPLRRLRRRRRTTVMRAPSASDSSSRLRNPSRRTPLPPPPPGSSTRGSTATRITRPASGGSTRFPERRPAALTAPCGRQRTYASPRGSTTNPTSARIIRRPAIVAMAIPASSCTTEVTTSPDGSSRGSGTRPRKPANGA

SEQ ID NO: 56493 - protein, 196 aa, Glycine max
  peptide (1)..(196): Ceres Seq. ID no. 13595441
  misc_feature (20)..(136): Pfam Name: Cupin Pfam Description: Cupin
  misc_feature (1)..(196): Homolog of NCBI NO: 5420387 NR Description: proteophosphoglycan [Leishmania major]
  misc_feature (1)..(196): Homolog of NCBI NO: 2136504 NR Description: gastric mucin (clone PGM-2A) - pig (fragment)
MTKKVAAATIPGPSRRRDLRSRRLLPASSSSPPPTTHTSPAVSSSSRPGLFSPLPTTAPLRRLRRRRRTTVMRAPSASDSSSRLRNPSRRTPLPPPPPGSSTRGSTATRITRPASGGSTRFPERRPAALTAPCGRQRTYASPRGSTTNPTSARIIRRPAIVAMAIPASSCTTEVTTSPDGSSRGSGTRPRKPANGA

SEQ ID NO: 56494 - DNA, 982 bp, Glycine max
  misc_feature (1)..(982): Ceres Seq. ID no. 14304159
tcaaaaaaaaaactttcaaatccctagaaagatgtcgacggaggaagaaaccaaggtggttgtcgagtcaggagacgccgaagcgacggtgacggagaagaagcctgctgcgaaaggcggcgctaaagctaagaagacgccggcgaagaagaagcctgctgctgctccgaggaagagaaccacttcgtctcaccctccttacgaagagatgatcaaagacgcgatcgtgacgctgaaggagagaaccggatctagccaatacgcgattcagaagttcatcgaggagaagcagaagtcgcttcctccaactttcaggaagcttctcctcgtcaatctcaggagactcgtcgcttccgggaagctagtcaaagtcaaagcctctttcaagattccgtctgcggctaaaccggcggctacgactaaaccggttaacaagaaaccagctgctgctgttactaaaccgaagggtaaagctcctgctaaggccaaaccggctgctaaaggagccaagaaacctgctgctgctgctaagcctaaggcaaagacaacagcaacaactaaagccgctgcgaagcccaaacctaagacgaagagtgtagctgctgtttcaaagaccaaggcggttgctgcgaagcctaaggcgaaggagagacctgttaaagcgtcgaggacttcgactaggacgtctccagggaagaaggcagcagctccggctaagaaagctgctgctgctgcgactaagaaggctccggctaagagtgtgaaggttaaatctccagcgaagagggcttcgacgaggaagaagtgattggttttagcttctcttagggttaaagtctttgtataattgaatcgtctatgaagggggcttgttttttcttcttccaaagtttatctttgtcttggtttcttctcgaaacccttttatcttgtaatttttggtttgtttgaaaattcaatagctatatgtgatggggtttgc

SEQ ID NO: 56495 - protein, 268 aa, Glycine max
  peptide (1)..(268): Ceres Seq. ID no. 14304160
  misc_feature (63)..(132): Pfam Name: linker histone H1 and H5 family Pfam Description: linker histone H1 and H5 family
  misc_feature (11)..(267): Homolog of NCBI NO: 121953 NR Description: HISTONE H1
  misc_feature (13)..(268): Homolog of NCBI NO: 13540401 NR Description: histone H1 [Lens culinaris]
  misc_feature (11)..(268): Homolog of NCBI NO: 28301619 NR Description: histone H1 [Pisum sativum]
  misc_feature (11)..(268): Homolog of NCBI NO: 29469895 NR Description: histone H1 subtype 5 [Pisum sativum]
  misc_feature (11)..(267): Homolog of NCBI NO: 1084419 NR Description: histone H1 - common tobacco
  misc_feature (11)..(267): Homolog of NCBI NO: 6681423 NR Description: histone H1 [Nicotiana tabacum]
  misc_feature (11)..(267): Homolog of NCBI NO: 585241 NR Description: HISTONE H1
  misc_feature (37)..(268): Homolog of NCBI NO: 16314 NR Description: histone H1-1 [Arabidopsis thaliana]
  misc_feature (14)..(268): Homolog of NCBI NO: 15222199 NR Description: histone H1, putative [Arabidopsis thaliana]
  misc_feature (11)..(267): Homolog of NCBI NO: 15224536 NR Description: histone H1 [Arabidopsis thaliana]
QKKNFQIPRKMSTEEETKVVVESGDAEATVTEKKPAAKGGAKAKKTPAKKKPAAAPRKRTTSSHPPYEEMIKDAIVTLKERTGSSQYAIQKFIEEKQKSLPPTFRKLLLVNLRRLVASGKLVKVKASFKIPSAAKPAATTKPVNKKPAAAVTKPKGKAPAKAKPAAKGAKKPAAAAKPKAKTTATTKAAAKPKPKTKSVAAVSKTKAVAAKPKAKERPVKASRTSTRTSPGKKAAAPAKKAAAAATKKAPAKSVKVKSPAKRASTRKK

SEQ ID NO: 56496 - protein, 258 aa, Glycine max
  peptide (1)..(258): Ceres Seq. ID no. 14304161
  misc_feature (53)..(122): Pfam Name: linker histone H1 and H5 family Pfam Description: linker histone H1 and H5 family
  misc_feature (1)..(257): Homolog of NCBI NO: 121953 NR Description: HISTONE H1
  misc_feature (3)..(258): Homolog of NCBI NO: 13540401 NR Description: histone H1 [Lens culinaris]
  misc_feature (1)..(258): Homolog of NCBI NO: 28301619 NR Description: histone H1 [Pisum sativum]
  misc_feature (1)..(258): Homolog of NCBI NO: 29469895 NR Description: histone H1 subtype 5 [Pisum sativum]
  misc_feature (1)..(257): Homolog of NCBI NO: 1084419 NR Description: histone H1 - common tobacco
  misc_feature (1)..(257): Homolog of NCBI NO: 6681423 NR Description: histone H1 [Nicotiana tabacum]
  misc_feature (1)..(257): Homolog of NCBI NO: 585241 NR Description: HISTONE H1
  misc_feature (27)..(258): Homolog of NCBI NO: 16314 NR Description: histone H1-1 [Arabidopsis thaliana]
  misc_feature (4)..(258): Homolog of NCBI NO: 15222199 NR Description: histone H1, putative [Arabidopsis thaliana]
  misc_feature (1)..(257): Homolog of NCBI NO: 15224536 NR Description: histone H1 [Arabidopsis thaliana]
MSTEEETKVVVESGDAEATVTEKKPAAKGGAKAKKTPAKKKPAAAPRKRTTSSHPPYEEMIKDAIVTLKERTGSSQYAIQKFIEEKQKSLPPTFRKLLLVNLRRLVASGKLVKVKASFKIPSAAKPAATTKPVNKKPAAAVTKPKGKAPAKAKPAAKGAKKPAAAAKPKAKTTATTKAAAKPKPKTKSVAAVSKTKAVAAKPKAKERPVKASRTSTRTSPGKKAAAPAKKAAAAATKKAPAKSVKVKSPAKRASTRKK

SEQ ID NO: 56497 - protein, 199 aa, Glycine max
  peptide (1)..(199): Ceres Seq. ID no. 14304162
  misc_feature (1)..(63): Pfam Name: linker histone H1 and H5 family Pfam Description: linker histone H1 and H5 family
  misc_feature (1)..(198): Homolog of NCBI NO: 121953 NR Description: HISTONE H1
  misc_feature (1)..(199): Homolog of NCBI NO: 13540401 NR Description: histone H1 [Lens culinaris]
  misc_feature (1)..(199): Homolog of NCBI NO: 28301619 NR Description: histone H1 [Pisum sativum]
  misc_feature (1)..(199): Homolog of NCBI NO: 29469895 NR Description: histone H1 subtype 5 [Pisum sativum]
  misc_feature (1)..(198): Homolog of NCBI NO: 1084419 NR Description: histone H1 - common tobacco
  misc_feature (1)..(198): Homolog of NCBI NO: 6681423 NR Description: histone H1 [Nicotiana tabacum]
  misc_feature (1)..(198): Homolog of NCBI NO: 585241 NR Description: HISTONE H1
  misc_feature (1)..(199): Homolog of NCBI NO: 16314 NR Description: histone H1-1 [Arabidopsis thaliana]
  misc_feature (1)..(199): Homolog of NCBI NO: 15222199 NR Description: histone H1, putative [Arabidopsis thaliana]
  misc_feature (1)..(198): Homolog of NCBI NO: 15224536 NR Description: histone H1 [Arabidopsis thaliana]
MIKDAIVTLKERTGSSQYAIQKFIEEKQKSLPPTFRKLLLVNLRRLVASGKLVKVKASFKIPSAAKPAATTKPVNKKPAAAVTKPKGKAPAKAKPAAKGAKKPAAAAKPKAKTTATTKAAAKPKPKTKSVAAVSKTKAVAAKPKAKERPVKASRTSTRTSPGKKAAAPAKKAAAAATKKAPAKSVKVKSPAKRASTRKK

SEQ ID NO: 56498 - DNA, 1200 bp, Glycine max
  misc_feature (1)..(1200): Ceres Seq. ID no. 14311163
agtccagagcgccgtgtccgccgaccaccacttcaactcctccactgcagcctgcaggaagctactagctagaacccgaataatctgcacctagccatggtgaagctagccacggcgcgggactgccgcgcgtacagcctcggcgccacgggcggcgagacgtcgcgcaaccggcggtgggagtacatcaacgcaggggtgtacgtcttcgccgccgtcctcctcgtcgttggcttcttggcgcagctgtggccgtgggcggtgtccaccaaggccggcctcgcggtggccgtcgtcgggctgctgggcgtgctgggagcgaacgcgcacgacctgctggcgcacgtcgccggcgtcgactacaaccttggcctggccgggctcgacacccagttcgtgctcgtcgagctcgccgcccccgccgtgcagctcgccggcgccgcgctcaccttggtcgcgctcatcttgttcgagatccagatggagagaggtcaccggcgtggcctggagaagcacggcctgaacctgctcatcgccgggccagcgctgtggtgcctcgggtccatacacaacatgtgccaagtctacgagcgagccaacgggcacgtccagatcctccagaagagcgtgcagatcccgtttctgctcggcagcaccctcttcttcatcggcggcgtcgtcaaccggaacgacgtccacggccactcctcccacagcttcaccctactggggaggagctgggcgtggtactgcctgttcgggagcctgctgttcttggcgggagggctgctgaacctgctcaaggtgttcaagatgcagcagatgggcgggcgggggctggagaagctgcgcggcggcgcgcaggagcggcttagcagggagagggagggcaaggtgcctctcatcctggaggagggacggagggggaagcacggaggcaatgtaggggacacctgggcgccgccggcgccgcggcacgagccgagggctccgccagtcccgccgccgccggagggttcttacaaggacgctgtcgtgagcggcggcaactagtgtgatcttgccgtccacggcggtaacgaataataagagaggacgtgacaaggcagctggtagaggcgaagcattggcttagggcgacgccatcctgtattttcctatctgtacacgatgtcatgtgaattatatcgacttgctgcc

SEQ ID NO: 56499 - protein, 318 aa, Glycine max
  peptide (1)..(318): Ceres Seq. ID no. 14311164
  misc_feature (1)..(315): Homolog of NCBI NO: 15237898 NR Description: expressed protein [Arabidopsis thaliana]
MVKLATARDCRAYSLGATGGETSRNRRWEYINAGVYVFAAVLLVVGFLAQLWPWAVSTKAGLAVAVVGLLGVLGANAHDLLAHVAGVDYNLGLAGLDTQFVLVELAAPAVQLAGAALTLVALILFEIQMERGHRRGLEKHGLNLLIAGPALWCLGSIHNMCQVYERANGHVQILQKSVQIPFLLGSTLFFIGGVVNRNDVHGHSSHSFTLLGRSWAWYCLFGSLLFLAGGLLNLLKVFKMQQMGGRGLEKLRGGAQERLSREREGKVPLILEEGRRGKHGGNVGDTWAPPAPRHEPRAPPVPPPPEGSYKDAVVSGGN

SEQ ID NO: 56500 - protein, 190 aa, Glycine max
  peptide (1)..(190): Ceres Seq. ID no. 14311165
  misc_feature (1)..(187): Homolog of NCBI NO: 15237898 NR Description: expressed protein [Arabidopsis thaliana]
MERGHRRGLEKHGLNLLIAGPALWCLGSIHNMCQVYERANGHVQILQKSVQIPFLLGSTLFFIGGVVNRNDVHGHSSHSFTLLGRSWAWYCLFGSLLFLAGGLLNLLKVFKMQQMGGRGLEKLRGGAQERLSREREGKVPLILEEGRRGKHGGNVGDTWAPPAPRHEPRAPPVPPPPEGSYKDAVVSGGN

SEQ ID NO: 56501 - protein, 159 aa, Glycine max
  peptide (1)..(159): Ceres Seq. ID no. 14311166
  misc_feature (1)..(156): Homolog of NCBI NO: 15237898 NR Description: expressed protein [Arabidopsis thaliana]
MCQVYERANGHVQILQKSVQIPFLLGSTLFFIGGVVNRNDVHGHSSHSFTLLGRSWAWYCLFGSLLFLAGGLLNLLKVFKMQQMGGRGLEKLRGGAQERLSREREGKVPLILEEGRRGKHGGNVGDTWAPPAPRHEPRAPPVPPPPEGSYKDAVVSGGN

SEQ ID NO: 56502 - DNA, 1311 bp, Glycine max
  misc_feature (1)..(1311): Ceres Seq. ID no. 13595454
atcttaaagacgaaccaaaatgagagagagaattattcatgatatgttttgttcttaattggaaaattgtaatgcatgcacactctcttgaagggtaagtttctgagaattttctgtcactttctcggcaaaaaattatgtcttccctctccaatcttgaacgctttctcctacgcgtcactccagatgttccgtcactcactcttcagagctgctgtagtgatctaaatgcacaatggctacctcctggcaaagacacaatcgaatatttcactctgaaagatctttgggactgctactatgaatggagtgcctttggtgctggcattcctatgatattggaaaatggtgacactctggtgcaatactatgctccatatctgtctgctacccaaatctatatcagtaaatctaggattcggaaagagtacggtgaaggagttgaagttgaatgtgattccttgagcgaggacagtgcaagtgataacctttctagatcacccagtaacaattctagcaaagcatgggatgatgcttctttggattcaggctctgaccaagtgggttcatgcacaacaaaggatatgcttggcgctctttacttacaatactctgagaactctccaccttaccagcgggttccattttctgagaagataaccgagttagctaaaagccatccaggattgatgaggttgaagagtgtggatatttcccccacaagttggatggctgtttcatggtatcccatttattccgtaccatgccacaaaaataaaagggaccaaacaagcttcctcactttccattcactttcatctttccaagactgtgcaagcaaatatgacgaaattcacacagggaataacaaaagttgtttaattgattggcgaagtattgtgggagagaaatgcaagaaaaaagagaggggttgcatgtctctctctccttttgggttagccacgtacaaaatgaggaaaaacatatggttaaatccctataacaataaccaagtggtgaccgatctatacaacgctgcagactggtggttgaagcatatcaacgctgaccaccctgacttcaacttcttcacacgccaacctaccttgtagattggtttgtgttgtgttcatcaccaccagctcaatgcccctttgctcagtttgctactctcatttcggtatcagaatttgcttagtttggtactctgaccttcaccctaggtccaactctgagaacattaataaataaaatgtaaagtttagtttaatgggttcatgtaaagtgatatttatcttagcttctttaccc

SEQ ID NO: 56503 - protein, 324 aa, Glycine max
  peptide (1)..(324): Ceres Seq. ID no. 13595455
  misc_feature (5)..(318): Pfam Name: Protein of unknown function (DUF789) Pfam Description: Protein of unknown function (DUF789)
  misc_feature (5)..(202): Homolog of NCBI NO: 7485906 NR Description: hypothetical protein F21B7.13 - Arabidopsis
  misc_feature (5)..(318): Homolog of NCBI NO: 18958013 NR Description: At1g03610/F21B7_13 [Arabidopsis thaliana]
  misc_feature (5)..(318): Homolog of NCBI NO: 18379117 NR Description: expressed protein [Arabidopsis thaliana]
  misc_feature (5)..(318): Homolog of NCBI NO: 9280648 NR Description: F21B7.22 [Arabidopsis thaliana]
  misc_feature (5)..(320): Homolog of NCBI NO: 22328289 NR Description: expressed protein [Arabidopsis thaliana]
  misc_feature (5)..(318): Homolog of NCBI NO: 15219407 NR Description: expressed protein [Arabidopsis thaliana]
  misc_feature (5)..(324): Homolog of NCBI NO: 25373431 NR Description: hypothetical protein AT4g03420 [imported] -
  misc_feature (5)..(318): Homolog of NCBI NO: 27754726 NR Description: unknown protein [Arabidopsis thaliana]
  misc_feature (5)..(324): Homolog of NCBI NO: 21593308 NR Description: unknown [Arabidopsis thaliana]
  misc_feature (5)..(324): Homolog of NCBI NO: 18394539 NR Description: expressed protein [Arabidopsis thaliana]
MSSLSNLERFLLRVTPDVPSLTLQSCCSDLNAQWLPPGKDTIEYFTLKDLWDCYYEWSAFGAGIPMILENGDTLVQYYAPYLSATQIYISKSRIRKEYGEGVEVECDSLSEDSASDNLSRSPSNNSSKAWDDASLDSGSDQVGSCTTKDMLGALYLQYSENSPPYQRVPFSEKITELAKSHPGLMRLKSVDISPTSWMAVSWYPIYSVPCHKNKRDQTSFLTFHSLSSFQDCASKYDEIHTGNNKSCLIDWRSIVGEKCKKKERGCMSLSPFGLATYKMRKNIWLNPYNNNQVVTDLYNAADWWLKHINADHPDFNFFTRQPTL

SEQ ID NO: 56504 - protein, 259 aa, Glycine max
  peptide (1)..(259): Ceres Seq. ID no. 13595456
  misc_feature (1)..(253): Pfam Name: Protein of unknown function (DUF789) Pfam Description: Protein of unknown function (DUF789)
  misc_feature (1)..(137): Homolog of NCBI NO: 7485906 NR Description: hypothetical protein F21B7.13 - Arabidopsis
  misc_feature (1)..(253): Homolog of NCBI NO: 18958013 NR Description: At1g03610/F21B7_13 [Arabidopsis thaliana]
  misc_feature (1)..(253): Homolog of NCBI NO: 18379117 NR Description: expressed protein [Arabidopsis thaliana]
  misc_feature (1)..(253): Homolog of NCBI NO: 9280648 NR Description: F21B7.22 [Arabidopsis thaliana]
  misc_feature (1)..(255): Homolog of NCBI NO: 22328289 NR Description: expressed protein [Arabidopsis thaliana]
  misc_feature (1)..(253): Homolog of NCBI NO: 15219407 NR Description: expressed protein [Arabidopsis thaliana]
  misc_feature (1)..(259): Homolog of NCBI NO: 25373431 NR Description: hypothetical protein AT4g03420 [imported] -
  misc_feature (1)..(253): Homolog of NCBI NO: 27754726 NR Description: unknown protein [Arabidopsis thaliana]
  misc_feature (1)..(259): Homolog of NCBI NO: 21593308 NR Description: unknown [Arabidopsis thaliana]
  misc_feature (1)..(259): Homolog of NCBI NO: 18394539 NR Description: expressed protein [Arabidopsis thaliana]
MILENGDTLVQYYAPYLSATQIYISKSRIRKEYGEGVEVECDSLSEDSASDNLSRSPSNNSSKAWDDASLDSGSDQVGSCTTKDMLGALYLQYSENSPPYQRVPFSEKITELAKSHPGLMRLKSVDISPTSWMAVSWYPIYSVPCHKNKRDQTSFLTFHSLSSFQDCASKYDEIHTGNNKSCLIDWRSIVGEKCKKKERGCMSLSPFGLATYKMRKNIWLNPYNNNQVVTDLYNAADWWLKHINADHPDFNFFTRQPTL

SEQ ID NO: 56505 - protein, 175 aa, Glycine max
  peptide (1)..(175): Ceres Seq. ID no. 13595457
  misc_feature (1)..(169): Pfam Name: Protein of unknown function (DUF789) Pfam Description: Protein of unknown function (DUF789)
  misc_feature (1)..(53): Homolog of NCBI NO: 7485906 NR Description: hypothetical protein F21B7.13 - Arabidopsis
  misc_feature (1)..(169): Homolog of NCBI NO: 18958013 NR Description: At1g03610/F21B7_13 [Arabidopsis thaliana]
  misc_feature (1)..(169): Homolog of NCBI NO: 18379117 NR Description: expressed protein [Arabidopsis thaliana]
  misc_feature (1)..(169): Homolog of NCBI NO: 9280648 NR Description: F21B7.22 [Arabidopsis thaliana]
  misc_feature (1)..(171): Homolog of NCBI NO: 22328289 NR Description: expressed protein [Arabidopsis thaliana]
  misc_feature (1)..(169): Homolog of NCBI NO: 15219407 NR Description: expressed protein [Arabidopsis thaliana]
  misc_feature (1)..(175): Homolog of NCBI NO: 25373431 NR Description: hypothetical protein AT4g03420 [imported] -
  misc_feature (1)..(169): Homolog of NCBI NO: 27754726 NR Description: unknown protein [Arabidopsis thaliana]
  misc_feature (1)..(175): Homolog of NCBI NO: 21593308 NR Description: unknown [Arabidopsis thaliana]
  misc_feature (1)..(175): Homolog of NCBI NO: 18394539 NR Description: expressed protein [Arabidopsis thaliana]
MLGALYLQYSENSPPYQRVPFSEKITELAKSHPGLMRLKSVDISPTSWMAVSWYPIYSVPCHKNKRDQTSFLTFHSLSSFQDCASKYDEIHTGNNKSCLIDWRSIVGEKCKKKERGCMSLSPFGLATYKMRKNIWLNPYNNNQVVTDLYNAADWWLKHINADHPDFNFFTRQPTL

SEQ ID NO: 56506 - DNA, 673 bp, Glycine max
  misc_feature (1)..(673): Ceres Seq. ID no. 12783386
acatcgattccttcctgccactccttcctcgcatgccccctgagttcctgcaccgagactgctagctagctataatctcctcggcttctttctccgtcccctcggccggcctgccacccgatcgttcctgatgtccggcaccgtgtgctccatgtgcggcgacgtcggcttccaggacaagctcttccgctgcgcccgttgccgctgccgcttccaacactcctattgcacgaactactacggcgacgcggccccggctgacgcgggcgccggcgtgtgcgactggtgcctcagcgacgaccccctcgtgaagaacaggcgcccttcggcgccgccggccatgcagcaccgcggtccgccgaccgggatgggctgcggcaaggtcaaggtgaccggcggcggcgagcaggagggcggccggagagtggccaaggcggccgtccgcaggtacaagctcctcaaagacgtccttgctagctagctggtgcatgcatggtcctgggtcaccgcactcctttccttagatcgggacctcgtcatcatgtgtactaaaaaacgatgctgtttaattaagtagtcgatagtcgttgtacctagctagctggcgaggttctgcttccatatcgatccttgtgtgcaaatgtcggcatgtcacaatgagatctacttctgt

SEQ ID NO: 56507 - protein, 116 aa, Glycine max
  peptide (1)..(116): Ceres Seq. ID no. 12783387
  misc_feature (2)..(58): Homolog of NCBI NO: 21740708 NR Description: OSJNBa0086B14.1 [Oryza sativa (japonica
  misc_feature (8)..(63): Homolog of NCBI NO: 21554245 NR Description: unknown [Arabidopsis thaliana]
  misc_feature (5)..(53): Homolog of NCBI NO: 15232353 NR Description: putative protein
  misc_feature (8)..(62): Homolog of NCBI NO: 21553800 NR Description: unknown [Arabidopsis thaliana]
  misc_feature (5)..(62): Homolog of NCBI NO: 18378917 NR Description: hypothetical protein    predicted by genefinder
  misc_feature (2)..(107): Homolog of NCBI NO: 21742342 NR Description: OSJNBb0034G17.21 [Oryza sativa (japonica
  misc_feature (2)..(114): Homolog of NCBI NO: 38345466 NR Description: OSJNBa0010H02.4 [Oryza sativa (japonica
MSGTVCSMCGDVGFQDKLFRCARCRCRFQHSYCTNYYGDAAPADAGAGVCDWCLSDDPLVKNRRPSAPPAMQHRGPPTGMGCGKVKVTGGGEQEGGRRVAKAAVRRYKLLKDVLAS

SEQ ID NO: 56508 - protein, 109 aa, Glycine max
  peptide (1)..(109): Ceres Seq. ID no. 12783388
  misc_feature (1)..(51): Homolog of NCBI NO: 21740708 NR Description: OSJNBa0086B14.1 [Oryza sativa (japonica
  misc_feature (1)..(56): Homolog of NCBI NO: 21554245 NR Description: unknown [Arabidopsis thaliana]
  misc_feature (1)..(46): Homolog of NCBI NO: 15232353 NR Description: putative protein
  misc_feature (1)..(55): Homolog of NCBI NO: 21553800 NR Description: unknown [Arabidopsis thaliana]
  misc_feature (1)..(55): Homolog of NCBI NO: 18378917 NR Description: hypothetical protein    predicted by genefinder
  misc_feature (1)..(100): Homolog of NCBI NO: 21742342 NR Description: OSJNBb0034G17.21 [Oryza sativa (japonica
  misc_feature (1)..(107): Homolog of NCBI NO: 38345466 NR Description: OSJNBa0010H02.4 [Oryza sativa (japonica
MCGDVGFQDKLFRCARCRCRFQHSYCTNYYGDAAPADAGAGVCDWCLSDDPLVKNRRPSAPPAMQHRGPPTGMGCGKVKVTGGGEQEGGRRVAKAAVRRYKLLKDVLAS

SEQ ID NO: 56509 - DNA, 1365 bp, Glycine max
  misc_feature (1)..(1365): Ceres Seq. ID no. 13582301
agagattagaaactaattactcttgtgatattctctcacaagggtgtgtaattaaggcatagaaaatatggcatcctttgccagcaataattatcctttggtgtttttctttgttctcttttcactggccatgcgcttagctcatgggactaattatgcaccaacattattcatatttggagactcaacttttgatgttggaaccaacaactttcttaattctaaagcaaaggccaacttcccctacaatggcattgatttttatcctccatttcccacaggaaggtttagtaatggcttcaacactgctgaccaaattgcgagacaattcggttataagcagagcccaccaccatttttaactttggagaaagaccaatacagcctaaagaagaacattctgaagggtgtaaattttgcttcagggggatctggaattcttagagaaacagggcactcagaatggggagaagtggttttctttgaaaggcaggtggaacaatttgcatcggttggtggaaacatcagtgagatgttgggacatgcacaagctgctaaatttgtttccaaggctttgtttctcattagcgttggaagcaacgacatcttcgattatgcacgtaacgacagtggctccattcatttgggcgcagaagaatacttagctgttgtacaactcacatattactctcatataaagaaactatatgagttgggggcaaggaaatttggcatcataagcgttgcaaccgtaggttgctgtcctgctgtaagctctctcaatggagggaagtgcgtggaaccactgaatgattttgcagttgcattttatttagctacacaagctcttctgcaaaagttgagttcagaattgaaagggttcaagtactcacttggcaactcttttgaaatgacctcgaccttgttaaagagtccatcgtccttcgggttgaagtatacacagtcagcatgctgcggaattggatatctgaatgggcaaggtggatgcataaaagcccaaaacgccaatctttgcacaaatcgcaatgagttcttgttttgggattggtttcatcccactgagatagcttctttgttggcagctaagacattatttgaaggagacaaagagtttgtaactccagtgaatttacgtcagctagcttattcctattgatcatgtctaagccataacataagtaaccaattactataatttgaagtgaaataacgtagctggcatctctcactagtgccggttttaggctctttttttcttttgttgagaaaaattctcatgcataatctaatgatatgctaataagagttgctatttataaaaaaaaaaaaaaaaaagcttatcga

SEQ ID NO: 56510 - protein, 369 aa, Glycine max
  peptide (1)..(369): Ceres Seq. ID no. 13582302
  misc_feature (34)..(342): Pfam Name: GDSL-like Lipase/Acylhydrolase Pfam Description: GDSL-like Lipase/Acylhydrolase
  misc_feature (19)..(366): Homolog of NCBI NO: 7485419 NR Description: hypothetical protein F13C5.140 - Arabidopsis
  misc_feature (15)..(362): Homolog of NCBI NO: 15242808 NR Description: GDSL-motif lipase/hydrolase protein [Arabidopsis
  misc_feature (11)..(366): Homolog of NCBI NO: 21553940 NR Description: GDSL-motif lipase/hydrolase-like protein
  misc_feature (11)..(366): Homolog of NCBI NO: 15242458 NR Description: GDSL-motif lipase/hydrolase protein [Arabidopsis
  misc_feature (27)..(366): Homolog of NCBI NO: 18409881 NR Description: GDSL-motif lipase/hydrolase protein [Arabidopsis
  misc_feature (10)..(366): Homolog of NCBI NO: 34909504 NR Description: putative GDSL-motif lipase/hydrolase-like protein
  misc_feature (33)..(365): Homolog of NCBI NO: 15238210 NR Description: GDSL-motif lipase/hydrolase protein [Arabidopsis
  misc_feature (6)..(365): Homolog of NCBI NO: 15240452 NR Description: GDSL-motif lipase/hydrolase protein [Arabidopsis
  misc_feature (5)..(366): Homolog of NCBI NO: 29837765 NR Description: putative GDSL-like lipase/acylhydrolase
  misc_feature (9)..(366): Homolog of NCBI NO: 38345853 NR Description: OSJNBa0084K11.17 [Oryza sativa (japonica
MASFASNNYPLVFFFVLFSLAMRLAHGTNYAPTLFIFGDSTFDVGTNNFLNSKAKANFPYNGIDFYPPFPTGRFSNGFNTADQIARQFGYKQSPPPFLTLEKDQYSLKKNILKGVNFASGGSGILRETGHSEWGEVVFFERQVEQFASVGGNISEMLGHAQAAKFVSKALFLISVGSNDIFDYARNDSGSIHLGAEEYLAVVQLTYYSHIKKLYELGARKFGIISVATVGCCPAVSSLNGGKCVEPLNDFAVAFYLATQALLQKLSSELKGFKYSLGNSFEMTSTLLKSPSSFGLKYTQSACCGIGYLNGQGGCIKAQNANLCTNRNEFLFWDWFHPTEIASLLAAKTLFEGDKEFVTPVNLRQLAYSY

SEQ ID NO: 56511 - protein, 348 aa, Glycine max
  peptide (1)..(348): Ceres Seq. ID no. 13582303
  misc_feature (13)..(321): Pfam Name: GDSL-like Lipase/Acylhydrolase Pfam Description: GDSL-like Lipase/Acylhydrolase
  misc_feature (1)..(345): Homolog of NCBI NO: 7485419 NR Description: hypothetical protein F13C5.140 - Arabidopsis
  misc_feature (1)..(341): Homolog of NCBI NO: 15242808 NR Description: GDSL-motif lipase/hydrolase protein [Arabidopsis
  misc_feature (1)..(345): Homolog of NCBI NO: 21553940 NR Description: GDSL-motif lipase/hydrolase-like protein
  misc_feature (1)..(345): Homolog of NCBI NO: 15242458 NR Description: GDSL-motif lipase/hydrolase protein [Arabidopsis
  misc_feature (6)..(345): Homolog of NCBI NO: 18409881 NR Description: GDSL-motif lipase/hydrolase protein [Arabidopsis
  misc_feature (1)..(345): Homolog of NCBI NO: 34909504 NR Description: putative GDSL-motif lipase/hydrolase-like protein
  misc_feature (12)..(344): Homolog of NCBI NO: 15238210 NR Description: GDSL-motif lipase/hydrolase protein [Arabidopsis
  misc_feature (1)..(344): Homolog of NCBI NO: 15240452 NR Description: GDSL-motif lipase/hydrolase protein [Arabidopsis
  misc_feature (1)..(345): Homolog of NCBI NO: 29837765 NR Description: putative GDSL-like lipase/acylhydrolase
  misc_feature (1)..(345): Homolog of NCBI NO: 38345853 NR Description: OSJNBa0084K11.17 [Oryza sativa (japonica
MRLAHGTNYAPTLFIFGDSTFDVGTNNFLNSKAKANFPYNGIDFYPPFPTGRFSNGFNTADQIARQFGYKQSPPPFLTLEKDQYSLKKNILKGVNFASGGSGILRETGHSEWGEVVFFERQVEQFASVGGNISEMLGHAQAAKFVSKALFLISVGSNDIFDYARNDSGSIHLGAEEYLAVVQLTYYSHIKKLYELGARKFGIISVATVGCCPAVSSLNGGKCVEPLNDFAVAFYLATQALLQKLSSELKGFKYSLGNSFEMTSTLLKSPSSFGLKYTQSACCGIGYLNGQGGCIKAQNANLCTNRNEFLFWDWFHPTEIASLLAAKTLFEGDKEFVTPVNLRQLAYSY

SEQ ID NO: 56512 - protein, 214 aa, Glycine max
  peptide (1)..(214): Ceres Seq. ID no. 13582304
  misc_feature (1)..(187): Pfam Name: GDSL-like Lipase/Acylhydrolase Pfam Description: GDSL-like Lipase/Acylhydrolase
  misc_feature (1)..(211): Homolog of NCBI NO: 7485419 NR Description: hypothetical protein F13C5.140 - Arabidopsis
  misc_feature (1)..(207): Homolog of NCBI NO: 15242808 NR Description: GDSL-motif lipase/hydrolase protein [Arabidopsis
  misc_feature (1)..(211): Homolog of NCBI NO: 21553940 NR Description: GDSL-motif lipase/hydrolase-like protein
  misc_feature (1)..(211): Homolog of NCBI NO: 15242458 NR Description: GDSL-motif lipase/hydrolase protein [Arabidopsis
  misc_feature (1)..(211): Homolog of NCBI NO: 18409881 NR Description: GDSL-motif lipase/hydrolase protein [Arabidopsis
  misc_feature (1)..(211): Homolog of NCBI NO: 34909504 NR Description: putative GDSL-motif lipase/hydrolase-like protein
  misc_feature (1)..(210): Homolog of NCBI NO: 15238210 NR Description: GDSL-motif lipase/hydrolase protein [Arabidopsis
  misc_feature (1)..(210): Homolog of NCBI NO: 15240452 NR Description: GDSL-motif lipase/hydrolase protein [Arabidopsis
  misc_feature (1)..(211): Homolog of NCBI NO: 29837765 NR Description: putative GDSL-like lipase/acylhydrolase
  misc_feature (1)..(211): Homolog of NCBI NO: 38345853 NR Description: OSJNBa0084K11.17 [Oryza sativa (japonica
MLGHAQAAKFVSKALFLISVGSNDIFDYARNDSGSIHLGAEEYLAVVQLTYYSHIKKLYELGARKFGIISVATVGCCPAVSSLNGGKCVEPLNDFAVAFYLATQALLQKLSSELKGFKYSLGNSFEMTSTLLKSPSSFGLKYTQSACCGIGYLNGQGGCIKAQNANLCTNRNEFLFWDWFHPTEIASLLAAKTLFEGDKEFVTPVNLRQLAYSY

SEQ ID NO: 56513 - DNA, 808 bp, Glycine max
  misc_feature (1)..(808): Ceres Seq. ID no. 12583465
agaaagattagatagcgtgtgggaaatcaagagcagagctgaaacttcttctcttcacttgaaactgtgtttgaaaaagaaaaaaaacatggccacactattctcacctttgtctctgcactctgctcgcccctcttcttcttccttttcttcttcttcttcttcttcttcatcttctcccttctttgccttttgcagcttccctttgcgctctcgcatttcatctttgaaggcacaaacaattcttcttcagaagatgaagcgcgtggtaaaggcagtggaagaagagacccagcaagaactcaccgctgtggatgagtctgaacaaccatcaacctccgaagcaccacccgttgtggttcccgtttccccatcagatactctcaccatgttctttcaggcagagggaacagtgagtgaaacagctattccagctttaaccaaagctttagaggagacagatggtgttactgatttgaagtttcagcttgccgagggacttgcaattttagagttgaagaagcagacaacagtccaagctacaggagtggcttctggtcttttagaaaccatacaaggttcaggctttaaactacagacattaaatctgagttttgaggatgaagaagttgcagttgcctagactaaatgtgctggtgttataacaatagtttgagggagtaaaaaaaaaatttaaagaacatgcctttcacacattcctgactagagcctcgaacaatcattttggtttgtatagggctgactgaggatattggttattattattattgttgttcttgttatcatt

SEQ ID NO: 56514 - protein, 213 aa, Glycine max
  peptide (1)..(213): Ceres Seq. ID no. 12583466
  misc_feature (99)..(212): Homolog of NCBI NO: 11346179 NR Description: hypothetical protein F2G14_30 - Arabidopsis
  misc_feature (99)..(212): Homolog of NCBI NO: 18417512 NR Description: putative protein
ERLDSVWEIKSRAETSSLHLKLCLKKKKNMATLFSPLSLHSARPSSSSFSSSSSSSSSSPFFAFCSFPLRSRISSLKAQTILLQKMKRVVKAVEEETQQELTAVDESEQPSTSEAPPVVVPVSPSDTLTMFFQAEGTVSETAIPALTKALEETDGVTDLKFQLAEGLAILELKKQTTVQATGVASGLLETIQGSGFKLQTLNLSFEDEEVAVA

SEQ ID NO: 56515 - protein, 184 aa, Glycine max
  peptide (1)..(184): Ceres Seq. ID no. 12583467
  misc_feature (70)..(183): Homolog of NCBI NO: 11346179 NR Description: hypothetical protein F2G14_30 - Arabidopsis
  misc_feature (70)..(183): Homolog of NCBI NO: 18417512 NR Description: putative protein
MATLFSPLSLHSARPSSSSFSSSSSSSSSSPFFAFCSFPLRSRISSLKAQTILLQKMKRVVKAVEEETQQELTAVDESEQPSTSEAPPVVVPVSPSDTLTMFFQAEGTVSETAIPALTKALEETDGVTDLKFQLAEGLAILELKKQTTVQATGVASGLLETIQGSGFKLQTLNLSFEDEEVAVA

SEQ ID NO: 56516 - protein, 128 aa, Glycine max
  peptide (1)..(128): Ceres Seq. ID no. 12583468
  misc_feature (14)..(127): Homolog of NCBI NO: 11346179 NR Description: hypothetical protein F2G14_30 - Arabidopsis
  misc_feature (14)..(127): Homolog of NCBI NO: 18417512 NR Description: putative protein
MKRVVKAVEEETQQELTAVDESEQPSTSEAPPVVVPVSPSDTLTMFFQAEGTVSETAIPALTKALEETDGVTDLKFQLAEGLAILELKKQTTVQATGVASGLLETIQGSGFKLQTLNLSFEDEEVAVA

SEQ ID NO: 56517 - DNA, 1368 bp, Glycine max
  misc_feature (1)..(1368): Ceres Seq. ID no. 12583425
gagattttatctgttaggaagaggtccttttgcttctgaatgagagtgtccaatgaaagtttggtccttgatgcataattaaattgttctattgagtggtggcaagtcaaaaaggtctcggctttttcgtaagagaatattgttttttttagtaagattatatatggtgttgttgctatatttaaattaaagaacctgcaaggccctgtgtgcttcttgtttcagcattgccataatcttcttcttcttcttcttctttttcttcttgttcttcttctcatggctcttatgttaggctatgatccttgttcccatttaagtagggccttttcccattttccttctgtttcttcctctgaggctaacagaaacgttggattcactcttaaagcctgttttgatgccaatagcggtgataatgccaatagggtctttgtgaaggaaaagaaaaaacccaatggttttgcatgtgttcctcaccctcccttgttaggtggtttagagaagggtattgatgttgaagatagatctttgggtggaagtcccaccaaacccttttgtttctctgatcaacaattgccccagaaacttgttgttgctgttgatgttgatgaagtattaggaaactttgtgtcagctctgaacaagttcatagcagatcgatactcatcaaattgttcagtttctgagtatcacgtgtatgagttcttcaagatatggaactgctcacgtgacgaagcaaatacccgtgttcatgagttttttgagacaccatacttcaagtcagggatccaacctatcccaggtgctcagacatccctgcagaagttatcaacattttgtagcctatcagttgtaacatctcggcaaaatgtaatcaaggatcatacacttgagtggatagagaagcatttttcaggattgtttcaggagattcactttggaaaccactttgcccttgatgggatgtctagaccaaagtcggagatttgtaggtctataaatgctacggttctcattgatgataacccaagatacgccatagagtgcgctgaagccggaattagagtcctactttttgattatgaaaactcgtacccttggtccaagaccaattcagctgatgagcatcccctggtgatcaaagttaagaactgggaagaagttgaacaacaattgatgtcattggtagctttgtagttactaaaatcctgcagcaaggatttgttaaaagcactcttattagattaagtagtggatagtttcttatgcctgaaatatctaattaagacaccataaaggtgaaattaggggaagtaactgcaagaagttatagtcctgtttggaaaaatataaaattacctgatt

SEQ ID NO: 56518 - protein, 306 aa, Glycine max
  peptide (1)..(306): Ceres Seq. ID no. 12583426
  misc_feature (190)..(303): Homolog of NCBI NO: 7486452 NR Description: hypothetical protein F4I10.70 - Arabidopsis
  misc_feature (91)..(304): Homolog of NCBI NO: 17082482 NR Description: unknown [Zea mays]
  misc_feature (98)..(304): Homolog of NCBI NO: 18092343 NR Description: unknown [Zea mays]
  misc_feature (33)..(303): Homolog of NCBI NO: 18418156 NR Description: expressed protein
MALMLGYDPCSHLSRAFSHFPSVSSSEANRNVGFTLKACFDANSGDNANRVFVKEKKKPNGFACVPHPPLLGGLEKGIDVEDRSLGGSPTKPFCFSDQQLPQKLVVAVDVDEVLGNFVSALNKFIADRYSSNCSVSEYHVYEFFKIWNCSRDEANTRVHEFFETPYFKSGIQPIPGAQTSLQKLSTFCSLSVVTSRQNVIKDHTLEWIEKHFSGLFQEIHFGNHFALDGMSRPKSEICRSINATVLIDDNPRYAIECAEAGIRVLLFDYENSYPWSKTNSADEHPLVIKVKNWEEVEQQLMSLVAL

SEQ ID NO: 56519 - protein, 303 aa, Glycine max
  peptide (1)..(303): Ceres Seq. ID no. 12583427
  misc_feature (187)..(300): Homolog of NCBI NO: 7486452 NR Description: hypothetical protein F4I10.70 - Arabidopsis
  misc_feature (88)..(301): Homolog of NCBI NO: 17082482 NR Description: unknown [Zea mays]
  misc_feature (95)..(301): Homolog of NCBI NO: 18092343 NR Description: unknown [Zea mays]
  misc_feature (30)..(300): Homolog of NCBI NO: 18418156 NR Description: expressed protein
MLGYDPCSHLSRAFSHFPSVSSSEANRNVGFTLKACFDANSGDNANRVFVKEKKKPNGFACVPHPPLLGGLEKGIDVEDRSLGGSPTKPFCFSDQQLPQKLVVAVDVDEVLGNFVSALNKFIADRYSSNCSVSEYHVYEFFKIWNCSRDEANTRVHEFFETPYFKSGIQPIPGAQTSLQKLSTFCSLSVVTSRQNVIKDHTLEWIEKHFSGLFQEIHFGNHFALDGMSRPKSEICRSINATVLIDDNPRYAIECAEAGIRVLLFDYENSYPWSKTNSADEHPLVIKVKNWEEVEQQLMSLVAL

SEQ ID NO: 56520 - DNA, 1412 bp, Glycine max
  misc_feature (1)..(1412): Ceres Seq. ID no. 13582619
agtcacttctcaccgtcactttagtcttctcttgcggtggcacaaactatatcacgtttcgaaagagtaacttggtgaccggtgaggtgttcctagttaccatacgaaagaggattttggtgtaggatgggatcgatagagaacgcttccaaaccaaggaaggaaaatccgaaatttgaattgccagcgggttttagatttcatccaacagatgaagaactcataaatcaatacctcacaaagaaggttgttgacaactgtttctgtgctatagccattggtgaggttgatttgaacaagtgtgagccatgggatttgcctgggttggctaaaatgggtgaaactgagtggtattttttctgtgtgagggacagaaaattcccaactggtataaggactaatagggccactgatattggttattggaaagccacaggaaaagacaaggagataataatggagaatgcactcattgggatgaagaaaaccttggttttctacaagggaagagctcctaaaggtgaaaagacaaactgggttatgcatgaatataggttggaagggaaacataatcaacccaaacctggaaagagtgaatgggtgatttgtagagtctttgagaagagtcgttgtgggaagaaaatgcatgttccaaagtgtgggaggttcaacaacccctttggagaggaaccatcatcaggtgcttctctattgcctcctttgatggattcttctccatacaacagtgaaacaagaaccaccactgctggggagttgtctcaggtgacatgcttctctgatccaaatcaaactgaggatcagaacaacacacatgatgacattgttgatagcatggaaactcctattttgaacttctcacccttttcaaggcctgatgatgcatccactttggccaaagcaaccctttcttcagcctcaaaccaatcagcacagattgcacaccaaattggggaatcacagttcccagattattgttatgcgcctcaagaaccgtccatgttgaggatgctgatggaaaaccatgaaccctgtgcgaagcaaactcagaaagaagagtttcctgagggaagagactttgatggagatatctcatctatgatatacagcagtgacatgataaacagaatgtttgggaatcaagaacattcttcatcagcttctgcagggcctgtggacactgatttcctatggaattactgaaggttaaggaatattatttagtgttaagacagaaaatatgttaattatatttatattcatatgatacatacaggttggttacctgcaacttcatgaacttattgtaggaattatgggaaatgcatgaaattgaatttcccccctctggttgataactttgataaaaactagtgatgaatagtccatatgtt

SEQ ID NO: 56521 - protein, 364 aa, Glycine max
  peptide (1)..(364): Ceres Seq. ID no. 13582620
  misc_feature (19)..(145): Pfam Name: No apical meristem (NAM) protein Pfam Description: No apical meristem (NAM) protein
  misc_feature (18)..(249): Homolog of NCBI NO: 21537315 NR Description: NAM, no apical meristem,-like protein
  misc_feature (11)..(249): Homolog of NCBI NO: 15240252 NR Description: NAM, no apical meristem, - like protein
MGSIENASKPRKENPKFELPAGFRFHPTDEELINQYLTKKVVDNCFCAIAIGEVDLNKCEPWDLPGLAKMGETEWYFFCVRDRKFPTGIRTNRATDIGYWKATGKDKEIIMENALIGMKKTLVFYKGRAPKGEKTNWVMHEYRLEGKHNQPKPGKSEWVICRVFEKSRCGKKMHVPKCGRFNNPFGEEPSSGASLLPPLMDSSPYNSETRTTTAGELSQVTCFSDPNQTEDQNNTHDDIVDSMETPILNFSPFSRPDDASTLAKATLSSASNQSAQIAHQIGESQFPDYCYAPQEPSMLRMLMENHEPCAKQTQKEEFPEGRDFDGDISSMIYSSDMINRMFGNQEHSSSASAGPVDTDFLWNY

SEQ ID NO: 56522 - protein, 295 aa, Glycine max
  peptide (1)..(295): Ceres Seq. ID no. 13582621
  misc_feature (1)..(76): Pfam Name: No apical meristem (NAM) protein Pfam Description: No apical meristem (NAM) protein
  misc_feature (1)..(180): Homolog of NCBI NO: 21537315 NR Description: NAM, no apical meristem,-like protein
  misc_feature (1)..(180): Homolog of NCBI NO: 15240252 NR Description: NAM, no apical meristem, - like protein
MGETEWYFFCVRDRKFPTGIRTNRATDIGYWKATGKDKEIIMENALIGMKKTLVFYKGRAPKGEKTNWVMHEYRLEGKHNQPKPGKSEWVICRVFEKSRCGKKMHVPKCGRFNNPFGEEPSSGASLLPPLMDSSPYNSETRTTTAGELSQVTCFSDPNQTEDQNNTHDDIVDSMETPILNFSPFSRPDDASTLAKATLSSASNQSAQIAHQIGESQFPDYCYAPQEPSMLRMLMENHEPCAKQTQKEEFPEGRDFDGDISSMIYSSDMINRMFGNQEHSSSASAGPVDTDFLWNY

SEQ ID NO: 56523 - protein, 254 aa, Glycine max
  peptide (1)..(254): Ceres Seq. ID no. 13582622
  misc_feature (1)..(139): Homolog of NCBI NO: 21537315 NR Description: NAM, no apical meristem,-like protein
  misc_feature (1)..(139): Homolog of NCBI NO: 15240252 NR Description: NAM, no apical meristem, - like protein
MENALIGMKKTLVFYKGRAPKGEKTNWVMHEYRLEGKHNQPKPGKSEWVICRVFEKSRCGKKMHVPKCGRFNNPFGEEPSSGASLLPPLMDSSPYNSETRTTTAGELSQVTCFSDPNQTEDQNNTHDDIVDSMETPILNFSPFSRPDDASTLAKATLSSASNQSAQIAHQIGESQFPDYCYAPQEPSMLRMLMENHEPCAKQTQKEEFPEGRDFDGDISSMIYSSDMINRMFGNQEHSSSASAGPVDTDFLWNY

SEQ ID NO: 56524 - DNA, 939 bp, Glycine max
  misc_feature (1)..(939): Ceres Seq. ID no. 13595821
ccrtttaamcwagaacatcctaatcgaaaagtcttgtaaagaaatctaaagctcatctcttagctcctctgtactcctcctccacacttccttccctccaacgagttccaaaacgcgagtagccatgtcgctcacgatcccgacgaacctcgttctcaacccgagatccaacaaatctctcactcaatccttgcctaaatccaccgcgagattcgtttgctccgatgacaaatccgcgacgcagcaacagtccatgaaggctttctccgccgcagtcgctctctcttccatcctcctatcagctccgatgccagccgtcgctgatatctcggggttgacaccttgcaaggagtcgaaacagttcgccaagagggagaagcaacagatcaagaagcttcaatcatctcttaagctctacgctcctgaaagtgctcctgctcttgctcttaacgctcagatcgagaagaccaaacgcaggttcgacaactacggcaagtatggacttctctgtggcgcagacggtctaccccacctgatagtgaacggagaccagcggcattggggagagttcataactccaggccttctcttcctttacattgctggatggatcgggtgggttggacgaagctacttgatagcaatcagcgatgagaagaaaccagcaatgaaagagatcatcattgatgttccattggctagtcgcctcatcttccgtggtttcatttggcctgttgctgcttacagagcgttactcaatggcgatctcattgccaaggatgtctagaaaaacaaaaacaaatctatatttgttgttttggtttgcttctctctctttctctctatctcatgttttccagtgtatgtattgatatctctaattaactcttcctttcaaagaaaaaaaaaaaaaaaaaagcttatcgataccgtcgacct

SEQ ID NO: 56525 - protein, 220 aa, Glycine max
  peptide (1)..(220): Ceres Seq. ID no. 15221669
  misc_feature (46)..(220): Pfam Name: Photosystem I reaction centre subunit III Pfam Description: Photosystem I reaction centre subunit III
  misc_feature (39)..(215): Homolog of NCBI NO: 37522301 NR Description: photosystem I subunit III [Gloeobacter violaceus]
  misc_feature (43)..(219): Homolog of NCBI NO: 3885892 NR Description: photosystem-1 F subunit precursor [Oryza sativa]
  misc_feature (1)..(219): Homolog of NCBI NO: 548604 NR Description: Photosystem I reaction centre subunit III,
  misc_feature (1)..(216): Homolog of NCBI NO: 131187 NR Description: Photosystem I reaction centre subunit III,
  misc_feature (1)..(216): Homolog of NCBI NO: 1172664 NR Description: Photosystem I reaction centre subunit III,
  misc_feature (1)..(216): Homolog of NCBI NO: 30013659 NR Description: putative photosystem I subunit III precursor
  misc_feature (1)..(220): Homolog of NCBI NO: 8954295 NR Description: photosystem I reaction center subunit III [Vigna
  misc_feature (1)..(220): Homolog of NCBI NO: 15450361 NR Description: At1g31330/T19E23_1 [Arabidopsis thaliana]
  misc_feature (1)..(220): Homolog of NCBI NO: 15221681 NR Description: photosystem I subunit III precursor -related
  misc_feature (1)..(220): Homolog of NCBI NO: 5734518 NR Description: photosystem I subunit III precursor [Arabidopsis
MSLTIPTNLVLNPRSNKSLTQSLPKSTARFVCSDDKSATQQQSMKAFSAAVALSSILLSAPMPAVADISGLTPCKESKQFAKREKQQIKKLQSSLKLYAPESAPALALNAQIEKTKRRFDNYGKYGLLCGADGLPHLIVNGDQRHWGEFITPGLLFLYIAGWIGWVGRSYLIAISDEKKPAMKEIIIDVPLASRLIFRGFIWPVAAYRALLNGDLIAKDV

SEQ ID NO: 56526 - protein, 177 aa, Glycine max
  peptide (1)..(177): Ceres Seq. ID no. 15221670
  misc_feature (3)..(177): Pfam Name: Photosystem I reaction centre subunit III Pfam Description: Photosystem I reaction centre subunit III
  misc_feature (1)..(172): Homolog of NCBI NO: 37522301 NR Description: photosystem I subunit III [Gloeobacter violaceus]
  misc_feature (1)..(176): Homolog of NCBI NO: 3885892 NR Description: photosystem-1 F subunit precursor [Oryza sativa]
  misc_feature (1)..(176): Homolog of NCBI NO: 548604 NR Description: Photosystem I reaction centre subunit III,
  misc_feature (1)..(173): Homolog of NCBI NO: 131187 NR Description: Photosystem I reaction centre subunit III,
  misc_feature (1)..(173): Homolog of NCBI NO: 1172664 NR Description: Photosystem I reaction centre subunit III,
  misc_feature (1)..(173): Homolog of NCBI NO: 30013659 NR Description: putative photosystem I subunit III precursor
  misc_feature (1)..(177): Homolog of NCBI NO: 8954295 NR Description: photosystem I reaction center subunit III [Vigna
  misc_feature (1)..(177): Homolog of NCBI NO: 15450361 NR Description: At1g31330/T19E23_1 [Arabidopsis thaliana]
  misc_feature (1)..(177): Homolog of NCBI NO: 15221681 NR Description: photosystem I subunit III precursor -related
  misc_feature (1)..(177): Homolog of NCBI NO: 5734518 NR Description: photosystem I subunit III precursor [Arabidopsis
MKAFSAAVALSSILLSAPMPAVADISGLTPCKESKQFAKREKQQIKKLQSSLKLYAPESAPALALNAQIEKTKRRFDNYGKYGLLCGADGLPHLIVNGDQRHWGEFITPGLLFLYIAGWIGWVGRSYLIAISDEKKPAMKEIIIDVPLASRLIFRGFIWPVAAYRALLNGDLIAKDV

SEQ ID NO: 56527 - protein, 159 aa, Glycine max
  peptide (1)..(159): Ceres Seq. ID no. 15221671
  misc_feature (1)..(159): Pfam Name: Photosystem I reaction centre subunit III Pfam Description: Photosystem I reaction centre subunit III
  misc_feature (1)..(154): Homolog of NCBI NO: 37522301 NR Description: photosystem I subunit III [Gloeobacter violaceus]
  misc_feature (1)..(158): Homolog of NCBI NO: 3885892 NR Description: photosystem-1 F subunit precursor [Oryza sativa]
  misc_feature (1)..(158): Homolog of NCBI NO: 548604 NR Description: Photosystem I reaction centre subunit III,
  misc_feature (1)..(155): Homolog of NCBI NO: 131187 NR Description: Photosystem I reaction centre subunit III,
  misc_feature (1)..(155): Homolog of NCBI NO: 1172664 NR Description: Photosystem I reaction centre subunit III,
  misc_feature (1)..(155): Homolog of NCBI NO: 30013659 NR Description: putative photosystem I subunit III precursor
  misc_feature (1)..(159): Homolog of NCBI NO: 8954295 NR Description: photosystem I reaction center subunit III [Vigna
  misc_feature (1)..(159): Homolog of NCBI NO: 15450361 NR Description: At1g31330/T19E23_1 [Arabidopsis thaliana]
  misc_feature (1)..(159): Homolog of NCBI NO: 15221681 NR Description: photosystem I subunit III precursor -related
  misc_feature (1)..(159): Homolog of NCBI NO: 5734518 NR Description: photosystem I subunit III precursor [Arabidopsis
MPAVADISGLTPCKESKQFAKREKQQIKKLQSSLKLYAPESAPALALNAQIEKTKRRFDNYGKYGLLCGADGLPHLIVNGDQRHWGEFITPGLLFLYIAGWIGWVGRSYLIAISDEKKPAMKEIIIDVPLASRLIFRGFIWPVAAYRALLNGDLIAKDV

SEQ ID NO: 56528 - DNA, 722 bp, Glycine max
  misc_feature (1)..(722): Ceres Seq. ID no. 13595411
acacccaaacacgtagtgcaccacttccgctaaaagatcatcagcattcagcagagctacactagctccaagccaccgagagaaaatggccggcttctcgtacacgagccacgttgcagttgcactggtttcggtgctgctgctgagcctcgcgcacggctcactggggctgggggccaggaggctcatggagctgtacaagccggaccccagcgagctcctcacgtaccacaacggcgccgtgctgcagggcgccatcccggtctccgtgctctggtacggccgcttcacgcccgcgcagaaggccgtcgtctccgacttcctcctctcgctcaccaccgcctcgccggcgctgaccccgtccgtctctcagtggtggaacaccatccaccagctctacctctccaaggccaagggcgccaacggccaagcgcgcgacgcaggtggcgctcgccgggcaggtctccgacgagcggtgctcgctcgggaagagcctcaagctaccccagctcgcggcgctggcggcgagcgccaagccccggaagggcgggatcgcgctggtgctcaccgcggaggacgtggccgtggagggcttctgccggagccggtgcggcctgcacggctccgacgccgcggcccgcaccgcgtacgtgtgggtcggcaactccgcctcgcagtgccccgtgttaaacacaataaagtgggaactggaggggggaaag

SEQ ID NO: 56529 - protein, 212 aa, Glycine max
  peptide (1)..(212): Ceres Seq. ID no. 13595412
  misc_feature (46)..(100): Pfam Name: Phosphate-induced protein 1 conserved region Pfam Description: Phosphate-induced protein 1 conserved region
  misc_feature (13)..(105): Homolog of NCBI NO: 21593043 NR Description: putative phi-1-like phosphate-induced protein
  misc_feature (46)..(113): Homolog of NCBI NO: 25408357 NR Description: hypothetical protein At2g35150 [imported] -
  misc_feature (7)..(110): Homolog of NCBI NO: 3759184 NR Description: phi-1 [Nicotiana tabacum]
  misc_feature (46)..(113): Homolog of NCBI NO: 18403760 NR Description: expressed protein [Arabidopsis thaliana]
  misc_feature (54)..(100): Homolog of NCBI NO: 15242420 NR Description: expressed protein [Arabidopsis thaliana]
  misc_feature (48)..(105): Homolog of NCBI NO: 15219504 NR Description: phosphate-induced (phi-1) protein -related
  misc_feature (48)..(105): Homolog of NCBI NO: 11762144 NR Description: At1g35140 [Arabidopsis thaliana]
  misc_feature (18)..(100): Homolog of NCBI NO: 15237656 NR Description: phi-1-related protein [Arabidopsis thaliana]
  misc_feature (7)..(100): Homolog of NCBI NO: 31074969 NR Description: erg-1 [Solanum tuberosum]
  misc_feature (9)..(135): Homolog of NCBI NO: 37533672 NR Description: putative phosphate-induced protein
MAGFSYTSHVAVALVSVLLLSLAHGSLGLGARRLMELYKPDPSELLTYHNGAVLQGAIPVSVLWYGRFTPAQKAVVSDFLLSLTTASPALTPSVSQWWNTIHQLYLSKAKGANGQARDAGGARRAGLRRAVLAREEPQATPARGAGGERQAPEGRDRAGAHRGGRGRGGLLPEPVRPARLRRRGPHRVRVGRQLRLAVPRVKHNKVGTGGGK

SEQ ID NO: 56530 - protein, 178 aa, Glycine max
  peptide (1)..(178): Ceres Seq. ID no. 13595413
  misc_feature (12)..(66): Pfam Name: Phosphate-induced protein 1 conserved region Pfam Description: Phosphate-induced protein 1 conserved region
  misc_feature (1)..(71): Homolog of NCBI NO: 21593043 NR Description: putative phi-1-like phosphate-induced protein
  misc_feature (12)..(79): Homolog of NCBI NO: 25408357 NR Description: hypothetical protein At2g35150 [imported] -
  misc_feature (1)..(76): Homolog of NCBI NO: 3759184 NR Description: phi-1 [Nicotiana tabacum]
  misc_feature (12)..(79): Homolog of NCBI NO: 18403760 NR Description: expressed protein [Arabidopsis thaliana]
  misc_feature (20)..(66): Homolog of NCBI NO: 15242420 NR Description: expressed protein [Arabidopsis thaliana]
  misc_feature (14)..(71): Homolog of NCBI NO: 15219504 NR Description: phosphate-induced (phi-1) protein -related
  misc_feature (14)..(71): Homolog of NCBI NO: 11762144 NR Description: At1g35140 [Arabidopsis thaliana]
  misc_feature (1)..(66): Homolog of NCBI NO: 15237656 NR Description: phi-1-related protein [Arabidopsis thaliana]
  misc_feature (1)..(66): Homolog of NCBI NO: 31074969 NR Description: erg-1 [Solanum tuberosum]
  misc_feature (1)..(101): Homolog of NCBI NO: 37533672 NR Description: putative phosphate-induced protein
MELYKPDPSELLTYHNGAVLQGAIPVSVLWYGRFTPAQKAVVSDFLLSLTTASPALTPSVSQWWNTIHQLYLSKAKGANGQARDAGGARRAGLRRAVLAREEPQATPARGAGGERQAPEGRDRAGAHRGGRGRGGLLPEPVRPARLRRRGPHRVRVGRQLRLAVPRVKHNKVGTGGGK

SEQ ID NO: 56531 - DNA, 890 bp, Glycine max
  misc_feature (1)..(890): Ceres Seq. ID no. 14302532
accgcattcacctgatctagctcgacgccggccagtaaacccaagcagccactcactctcaggttatcactgacacagcaaccaagctcgggacaagggggaaatggaagccgctccggtctcggcgaagcccaccctccgcgtggccgctctcagcggctccctccgcagcaactcgtggcaccacggcctcatccgcgccgccgaggagctgtgcgaggagtgcatcccggggctgcgcatcgaccacgtggacatctccggcctgcccatggccaacccggacctggagaccgacggcggcgacggcttcccgccggccgtggaggccttccgcgacagggtcagcgccgccgactgcttcctcttcgcctcgcccgagtacaactactccgtcaccggctcgctgaagaacgcgctggactgggcgtccaggggcacgcacaaatgctgggccgacaaggcggcggcgatcgtctgcgcgggaggcgacttcggcgggggcagggcgtcgctccacctgcgcgagatcgggatatacctagacctgcacttcatcaacaagccggagctccacatcagggcgtacgaggacccgcccaagttcgacggcgaggggaacctcatcgacgccaaagccagggagcggctcaagaaggtgctcctctcgctgcaggtcttcgcgctcaggctgcaacgcagggagaattgactcgagatcgaataaatttggcaccagagctacctaaataatctgcatttccgctcagatgatcacttttagtttgggctatggccctggtttcgttagtctgagcaattttacttcgtattcgtgtaattgtattttgtacttccgtgaaataaaaagacgatgctgctactgtaac

SEQ ID NO: 56532 - protein, 202 aa, Glycine max
  peptide (1)..(202): Ceres Seq. ID no. 14302533
  misc_feature (12)..(185): Pfam Name: NADPH-dependent FMN reductase Pfam Description: NADPH-dependent FMN reductase
  misc_feature (12)..(199): Homolog of NCBI NO: 37520248 NR Description: hypothetical protein glr0679 [Gloeobacter
  misc_feature (11)..(198): Homolog of NCBI NO: 40549313 NR Description: YieF [Salmonella enterica]
  misc_feature (10)..(187): Homolog of NCBI NO: 22964797 NR Description: hypothetical protein [Rhodopseudomonas palustris]
  misc_feature (12)..(198): Homolog of NCBI NO: 32041222 NR Description: hypothetical protein [Pseudomonas aeruginosa
  misc_feature (12)..(198): Homolog of NCBI NO: 15596401 NR Description: conserved hypothetical protein [Pseudomonas
  misc_feature (6)..(198): Homolog of NCBI NO: 24745889 NR Description: NAD(P)H:quinone oxidoreductase [Solanum tuberosum]
  misc_feature (1)..(198): Homolog of NCBI NO: 5002232 NR Description: NADPH:quinone oxidoreductase [Arabidopsis
  misc_feature (1)..(198): Homolog of NCBI NO: 15232856 NR Description: NADPH:quinone oxidoreductase (NQR) [Arabidopsis
  misc_feature (7)..(198): Homolog of NCBI NO: 34906652 NR Description: putative NADPH:quinone oxidoreductase
  misc_feature (1)..(201): Homolog of NCBI NO: 34906648 NR Description: putative NADPH:quinone oxidoreductase
MEAAPVSAKPTLRVAALSGSLRSNSWHHGLIRAAEELCEECIPGLRIDHVDISGLPMANPDLETDGGDGFPPAVEAFRDRVSAADCFLFASPEYNYSVTGSLKNALDWASRGTHKCWADKAAAIVCAGGDFGGGRASLHLREIGIYLDLHFINKPELHIRAYEDPPKFDGEGNLIDAKARERLKKVLLSLQVFALRLQRREN

SEQ ID NO: 56533 - protein, 146 aa, Glycine max
  peptide (1)..(146): Ceres Seq. ID no. 14302534
  misc_feature (1)..(129): Pfam Name: NADPH-dependent FMN reductase Pfam Description: NADPH-dependent FMN reductase
  misc_feature (1)..(143): Homolog of NCBI NO: 37520248 NR Description: hypothetical protein glr0679 [Gloeobacter
  misc_feature (1)..(142): Homolog of NCBI NO: 40549313 NR Description: YieF [Salmonella enterica]
  misc_feature (1)..(131): Homolog of NCBI NO: 22964797 NR Description: hypothetical protein [Rhodopseudomonas palustris]
  misc_feature (1)..(142): Homolog of NCBI NO: 32041222 NR Description: hypothetical protein [Pseudomonas aeruginosa
  misc_feature (1)..(142): Homolog of NCBI NO: 15596401 NR Description: conserved hypothetical protein [Pseudomonas
  misc_feature (1)..(142): Homolog of NCBI NO: 24745889 NR Description: NAD(P)H:quinone oxidoreductase [Solanum tuberosum]
  misc_feature (1)..(142): Homolog of NCBI NO: 5002232 NR Description: NADPH:quinone oxidoreductase [Arabidopsis
  misc_feature (1)..(142): Homolog of NCBI NO: 15232856 NR Description: NADPH:quinone oxidoreductase (NQR) [Arabidopsis
  misc_feature (1)..(142): Homolog of NCBI NO: 34906652 NR Description: putative NADPH:quinone oxidoreductase
  misc_feature (1)..(145): Homolog of NCBI NO: 34906648 NR Description: putative NADPH:quinone oxidoreductase
MANPDLETDGGDGFPPAVEAFRDRVSAADCFLFASPEYNYSVTGSLKNALDWASRGTHKCWADKAAAIVCAGGDFGGGRASLHLREIGIYLDLHFINKPELHIRAYEDPPKFDGEGNLIDAKARERLKKVLLSLQVFALRLQRREN

SEQ ID NO: 56534 - protein, 101 aa, Glycine max
  peptide (1)..(101): Ceres Seq. ID no. 14302535
  misc_feature (1)..(71): Pfam Name: High molecular weight glutenin subunit Pfam Description: High molecular weight glutenin subunit
MLGRQGGGDRLRGRRLRRGQGVAPPARDRDIPRPALHQQAGAPHQGVRGPAQVRRRGEPHRRQSQGAAQEGAPLAAGLRAQAATQGELTRDRINLAPELPK

SEQ ID NO: 56535 - DNA, 1537 bp, Glycine max
  misc_feature (1)..(1537): Ceres Seq. ID no. 12611314
tatcctccctttctgctttctttcgctcacaagacaaagttgaacgaaatgaagtctttcggttctgtaactggttttgtcttgccagacccaaagaataggttgctcctttggagtgtcctcatcttggtttcattgatttctggtgcttatttcgttggtaatgcattctttgcaaaggaatacaaacaaagattagcacgatgggggctaattcatacaatgccacattcaaaatttaatgcgtgcaagagacaatgcttgccttttggaagtgaggcattgcctgaaggaattattgctagaacatctaacttggaaatgcggcccttatgggactctggtaaagataatagaattttaaaacgcccattgaacttgttggctatggcagtaggacttaagcagaaagaaatagtcaacaaaattgttgaaaagttcttgtcaagtggttttgttgtgatgctttttcattatgatggttttgtggatggatggaagagtttagcctggagcagttgtgccatacatgtatctgctatcaatcaaacaaaatggtggtttgcaaagcggtttttgcatccagacatagttgctgaatacaattatatatttctttgggatgaggatcttcttgttgataattttgacccaaaaaggtatttatctattgttaaagaagaaggacttgagatatcacagccagctctggatcctaccaaatctgaagtacatcatccactgacagtccataaagcagtatcaaaagtgcacagaaggtattataaattaaaaggtagtggaaggtgtgatgacaaaagcactgctcctccttgcattggttgggtggaaatgatggcaccagtgttttctaagaagtcttggcaatgtgtatggcatttgatccagaatgacttaatccatgcatggggcctggataggcagcttggctattgtgcacagggagatcgaatgagaaatgttggtgtggttgattctgagtacatagttcatctgggtctgcctactcttgggggctcaaatggcaatgaggcgccatcagactccccaggagataatagagctaaagttaggatgcagtcatacattgaaatgcaggtttttggtaaaaggtggaaagatgcagcagagaaagacaaatgttggattgatccgtatgaacaggcaaacaagacaagccattagtgtattttgtgaggctttaagtgatcaaaatccaagtacagtgtccatgttcataatcagcttttgttttctagtcttcgttagagcttttgatttgatatctcaggtgtgggatctcgtaagagtttgcaggaacattgcttcctttaccattattttactttcgttttgtcatcaagccattcatttccttaaatattggtgtacatagggtggtatagagttgtttatatggcagcagaaaaatgtgtggcatagattttttttttcatccgtgaagtcaatgtaaagcggttgcttgtatgaaataatctataattttctcggatcc

SEQ ID NO: 56536 - protein, 401 aa, Glycine max
  peptide (1)..(401): Ceres Seq. ID no. 12611315
  misc_feature (83)..(393): Pfam Name: Protein of unknown function (DUF707) Pfam Description: Protein of unknown function (DUF707)
  misc_feature (282)..(389): Homolog of NCBI NO: 34899756 NR Description: OJ1773_H01.1 [Oryza sativa (japonica
  misc_feature (106)..(259): Homolog of NCBI NO: 34899756 NR Description: OJ1773_H01.1 [Oryza sativa (japonica
  misc_feature (122)..(152): Homolog of NCBI NO: 15233917 NR Description: putative protein; protein id: At4g18530.1
  misc_feature (11)..(78): Homolog of NCBI NO: 15233917 NR Description: putative protein; protein id: At4g18530.1
  misc_feature (220)..(393): Homolog of NCBI NO: 15233917 NR Description: putative protein; protein id: At4g18530.1
  misc_feature (95)..(398): Homolog of NCBI NO: 33146749 NR Description: putative lysine ketoglutarate reductase
  misc_feature (93)..(391): Homolog of NCBI NO: 24636978 NR Description: lysine ketoglutarate reductase trans-splicing
  misc_feature (93)..(391): Homolog of NCBI NO: 15219892 NR Description: hypothetical protein; protein id: At1g61240.1
  misc_feature (93)..(399): Homolog of NCBI NO: 22329488 NR Description: hypothetical protein
  misc_feature (83)..(393): Homolog of NCBI NO: 19386727 NR Description: P0678F11.16 [Oryza sativa (japonica
YPPFLLSFAHKTKLNEMKSFGSVTGFVLPDPKNRLLLWSVLILVSLISGAYFVGNAFFAKEYKQRLARWGLIHTMPHSKFNACKRQCLPFGSEALPEGIIARTSNLEMRPLWDSGKDNRILKRPLNLLAMAVGLKQKEIVNKIVEKFLSSGFVVMLFHYDGFVDGWKSLAWSSCAIHVSAINQTKWWFAKRFLHPDIVAEYNYIFLWDEDLLVDNFDPKRYLSIVKEEGLEISQPALDPTKSEVHHPLTVHKAVSKVHRRYYKLKGSGRCDDKSTAPPCIGWVEMMAPVFSKKSWQCVWHLIQNDLIHAWGLDRQLGYCAQGDRMRNVGVVDSEYIVHLGLPTLGGSNGNEAPSDSPGDNRAKVRMQSYIEMQVFGKRWKDAAEKDKCWIDPYEQANKTSH

SEQ ID NO: 56537 - protein, 385 aa, Glycine max
  peptide (1)..(385): Ceres Seq. ID no. 12611316
  misc_feature (67)..(377): Pfam Name: Protein of unknown function (DUF707) Pfam Description: Protein of unknown function (DUF707)
  misc_feature (266)..(373): Homolog of NCBI NO: 34899756 NR Description: OJ1773_H01.1 [Oryza sativa (japonica
  misc_feature (90)..(243): Homolog of NCBI NO: 34899756 NR Description: OJ1773_H01.1 [Oryza sativa (japonica
  misc_feature (106)..(136): Homolog of NCBI NO: 15233917 NR Description: putative protein; protein id: At4g18530.1
  misc_feature (1)..(62): Homolog of NCBI NO: 15233917 NR Description: putative protein; protein id: At4g18530.1
  misc_feature (204)..(377): Homolog of NCBI NO: 15233917 NR Description: putative protein; protein id: At4g18530.1
  misc_feature (79)..(382): Homolog of NCBI NO: 33146749 NR Description: putative lysine ketoglutarate reductase
  misc_feature (77)..(375): Homolog of NCBI NO: 24636978 NR Description: lysine ketoglutarate reductase trans-splicing
  misc_feature (77)..(375): Homolog of NCBI NO: 15219892 NR Description: hypothetical protein; protein id: At1g61240.1
  misc_feature (77)..(383): Homolog of NCBI NO: 22329488 NR Description: hypothetical protein
  misc_feature (67)..(377): Homolog of NCBI NO: 19386727 NR Description: P0678F11.16 [Oryza sativa (japonica
MKSFGSVTGFVLPDPKNRLLLWSVLILVSLISGAYFVGNAFFAKEYKQRLARWGLIHTMPHSKFNACKRQCLPFGSEALPEGIIARTSNLEMRPLWDSGKDNRILKRPLNLLAMAVGLKQKEIVNKIVEKFLSSGFVVMLFHYDGFVDGWKSLAWSSCAIHVSAINQTKWWFAKRFLHPDIVAEYNYIFLWDEDLLVDNFDPKRYLSIVKEEGLEISQPALDPTKSEVHHPLTVHKAVSKVHRRYYKLKGSGRCDDKSTAPPCIGWVEMMAPVFSKKSWQCVWHLIQNDLIHAWGLDRQLGYCAQGDRMRNVGVVDSEYIVHLGLPTLGGSNGNEAPSDSPGDNRAKVRMQSYIEMQVFGKRWKDAAEKDKCWIDPYEQANKTSH

SEQ ID NO: 56538 - protein, 327 aa, Glycine max
  peptide (1)..(327): Ceres Seq. ID no. 12611317
  misc_feature (9)..(319): Pfam Name: Protein of unknown function (DUF707) Pfam Description: Protein of unknown function (DUF707)
  misc_feature (48)..(321): Homolog of NCBI NO: 34903420 NR Description: hypothetical protein~similar to Oryza sativa
  misc_feature (208)..(315): Homolog of NCBI NO: 34899756 NR Description: OJ1773_H01.1 [Oryza sativa (japonica
  misc_feature (32)..(185): Homolog of NCBI NO: 34899756 NR Description: OJ1773_H01.1 [Oryza sativa (japonica
  misc_feature (48)..(78): Homolog of NCBI NO: 15233917 NR Description: putative protein; protein id: At4g18530.1
  misc_feature (146)..(319): Homolog of NCBI NO: 15233917 NR Description: putative protein; protein id: At4g18530.1
  misc_feature (21)..(324): Homolog of NCBI NO: 33146749 NR Description: putative lysine ketoglutarate reductase
  misc_feature (19)..(317): Homolog of NCBI NO: 24636978 NR Description: lysine ketoglutarate reductase trans-splicing
  misc_feature (19)..(317): Homolog of NCBI NO: 15219892 NR Description: hypothetical protein; protein id: At1g61240.1
  misc_feature (19)..(325): Homolog of NCBI NO: 22329488 NR Description: hypothetical protein
  misc_feature (9)..(319): Homolog of NCBI NO: 19386727 NR Description: P0678F11.16 [Oryza sativa (japonica
MPHSKFNACKRQCLPFGSEALPEGIIARTSNLEMRPLWDSGKDNRILKRPLNLLAMAVGLKQKEIVNKIVEKFLSSGFVVMLFHYDGFVDGWKSLAWSSCAIHVSAINQTKWWFAKRFLHPDIVAEYNYIFLWDEDLLVDNFDPKRYLSIVKEEGLEISQPALDPTKSEVHHPLTVHKAVSKVHRRYYKLKGSGRCDDKSTAPPCIGWVEMMAPVFSKKSWQCVWHLIQNDLIHAWGLDRQLGYCAQGDRMRNVGVVDSEYIVHLGLPTLGGSNGNEAPSDSPGDNRAKVRMQSYIEMQVFGKRWKDAAEKDKCWIDPYEQANKTSH

SEQ ID NO: 56539 - DNA, 1261 bp, Glycine max
  misc_feature (1)..(1261): Ceres Seq. ID no. 13595414
atattataaactacatctcactctcactaccttctcttcacccgcaaatggcgaccgctcctctctccggcttcttcctcacctctctttctccttctcagccttctctccaaaaacagactcttcgttcttctcccaccgtggcttgccttccctcatcctcttcttcctcctcctcctcctcctcctctcgttccgttccaacacttatccgtaacgagcccgtttttgccgctcctgctcctatcatcaccccttactggagcgaagagatgggtagcgaagcatacgaagaggccattgaagctctcaagaagcttattatcgagaaggaggagctaaagactgttgcggccgctaaggtggagcaggccacggcagcacttcagacaggtacttcctccgacaagaaagctttcgaccccgtcgaaaacattaagcaaggcttcatcactttcaagaaggagaaatacgaaaccaaccctgctttgtacggtgagctcgccaagggtcaaagtcctaagtatatggtgtttgcttgttccgactcgcgtgtgtgtccatcgcacgttctcaactttcagccaggagaggccttcgttgtccgtaacatagccaacatggttcctccttttgacaaggtcaaatacggtggagttggagcagccatcgaatacgctgttttgcaccttaaggtggagaacattgtggtgataggacacagcgcttgtggtgggatcaagggacttatgtcttttcctttggatggaaacaactccactgatttcatagaggactgggtcaaaatctgtttaccagccaagtcaaaagtcatatcagaacttggagattcagcctttgaggaccagtgtggccgatgtgaaagggaggcagtgaatgtttcactagcaaacttgttgacatatccattcgtgagagaaggacttgtgaaaggaacccttgctttgaagggaggttactatgattttataaagggtgcttttgagctttggggacttgagtttggcctctccgaaactagctcagtatgaaccaatccaccatcatcatcatgagcatccatcatcatcatatatctctattccatatgtaatttgtaatgtgctgagttgttttcctatcttcatggtatccaactttcatataaataaaaaagaaaatccagatgaaaaaaaaaaaaaaaaaagcttatcgatacctgtttaaacacaataaagwcctaacgggagggggggcccgg

SEQ ID NO: 56540 - protein, 349 aa, Glycine max
  peptide (1)..(349): Ceres Seq. ID no. 15221574
  misc_feature (16)..(349): Homolog of NCBI NO: 22550386 NR Description: beta-carbonic anhydrase [Nicotiana tabacum]
  misc_feature (16)..(349): Homolog of NCBI NO: 115473 NR Description: CARBONIC ANHYDRASE, CHLOROPLAST PRECURSOR
  misc_feature (91)..(349): Homolog of NCBI NO: 438449 NR Description: carbonic anhydrase
  misc_feature (16)..(349): Homolog of NCBI NO: 7436819 NR Description: carbonate dehydratase (EC 4.2.1.1) 1a - Populus
  misc_feature (91)..(349): Homolog of NCBI NO: 30685030 NR Description: CARBONIC ANHYDRASE 2 [Arabidopsis thaliana]
  misc_feature (91)..(349): Homolog of NCBI NO: 21903379 NR Description: Carbonic anhydrase 2 (Carbonate dehydratase 2)
  misc_feature (16)..(349): Homolog of NCBI NO: 7436820 NR Description: carbonate dehydratase (EC 4.2.1.1) 1b - Populus
  misc_feature (91)..(349): Homolog of NCBI NO: 30678347 NR Description: carbonic anhydrase, chloroplast precursor
  misc_feature (16)..(349): Homolog of NCBI NO: 30678353 NR Description: carbonic anhydrase, chloroplast precursor
  misc_feature (16)..(349): Homolog of NCBI NO: 30678350 NR Description: carbonic anhydrase, chloroplast precursor
IINYISLSLPSLHPQMATAPLSGFFLTSLSPSQPSLQKQTLRSSPTVACLPSSSSSSSSSSSSRSVPTLIRNEPVFAAPAPIITPYWSEEMGSEAYEEAIEALKKLIIEKEELKTVAAAKVEQATAALQTGTSSDKKAFDPVENIKQGFITFKKEKYETNPALYGELAKGQSPKYMVFACSDSRVCPSHVLNFQPGEAFVVRNIANMVPPFDKVKYGGVGAAIEYAVLHLKVENIVVIGHSACGGIKGLMSFPLDGNNSTDFIEDWVKICLPAKSKVISELGDSAFEDQCGRCEREAVNVSLANLLTYPFVREGLVKGTLALKGGYYDFIKGAFELWGLEFGLSETSSV

SEQ ID NO: 56541 - protein, 334 aa, Glycine max
  peptide (1)..(334): Ceres Seq. ID no. 15221575
  misc_feature (1)..(334): Homolog of NCBI NO: 22550386 NR Description: beta-carbonic anhydrase [Nicotiana tabacum]
  misc_feature (1)..(334): Homolog of NCBI NO: 115473 NR Description: CARBONIC ANHYDRASE, CHLOROPLAST PRECURSOR
  misc_feature (76)..(334): Homolog of NCBI NO: 438449 NR Description: carbonic anhydrase
  misc_feature (1)..(334): Homolog of NCBI NO: 7436819 NR Description: carbonate dehydratase (EC 4.2.1.1) 1a - Populus
  misc_feature (76)..(334): Homolog of NCBI NO: 30685030 NR Description: CARBONIC ANHYDRASE 2 [Arabidopsis thaliana]
  misc_feature (76)..(334): Homolog of NCBI NO: 21903379 NR Description: Carbonic anhydrase 2 (Carbonate dehydratase 2)
  misc_feature (1)..(334): Homolog of NCBI NO: 7436820 NR Description: carbonate dehydratase (EC 4.2.1.1) 1b - Populus
  misc_feature (76)..(334): Homolog of NCBI NO: 30678347 NR Description: carbonic anhydrase, chloroplast precursor
  misc_feature (1)..(334): Homolog of NCBI NO: 30678353 NR Description: carbonic anhydrase, chloroplast precursor
  misc_feature (1)..(334): Homolog of NCBI NO: 30678350 NR Description: carbonic anhydrase, chloroplast precursor
MATAPLSGFFLTSLSPSQPSLQKQTLRSSPTVACLPSSSSSSSSSSSSRSVPTLIRNEPVFAAPAPIITPYWSEEMGSEAYEEAIEALKKLIIEKEELKTVAAAKVEQATAALQTGTSSDKKAFDPVENIKQGFITFKKEKYETNPALYGELAKGQSPKYMVFACSDSRVCPSHVLNFQPGEAFVVRNIANMVPPFDKVKYGGVGAAIEYAVLHLKVENIVVIGHSACGGIKGLMSFPLDGNNSTDFIEDWVKICLPAKSKVISELGDSAFEDQCGRCEREAVNVSLANLLTYPFVREGLVKGTLALKGGYYDFIKGAFELWGLEFGLSETSSV

SEQ ID NO: 56542 - protein, 259 aa, Glycine max
  peptide (1)..(259): Ceres Seq. ID no. 15221576
  misc_feature (1)..(259): Homolog of NCBI NO: 22550386 NR Description: beta-carbonic anhydrase [Nicotiana tabacum]
  misc_feature (1)..(259): Homolog of NCBI NO: 115473 NR Description: CARBONIC ANHYDRASE, CHLOROPLAST PRECURSOR
  misc_feature (1)..(259): Homolog of NCBI NO: 438449 NR Description: carbonic anhydrase
  misc_feature (1)..(259): Homolog of NCBI NO: 7436819 NR Description: carbonate dehydratase (EC 4.2.1.1) 1a - Populus
  misc_feature (1)..(259): Homolog of NCBI NO: 30685030 NR Description: CARBONIC ANHYDRASE 2 [Arabidopsis thaliana]
  misc_feature (1)..(259): Homolog of NCBI NO: 21903379 NR Description: Carbonic anhydrase 2 (Carbonate dehydratase 2)
  misc_feature (1)..(259): Homolog of NCBI NO: 7436820 NR Description: carbonate dehydratase (EC 4.2.1.1) 1b - Populus
  misc_feature (1)..(259): Homolog of NCBI NO: 30678347 NR Description: carbonic anhydrase, chloroplast precursor
  misc_feature (1)..(259): Homolog of NCBI NO: 30678353 NR Description: carbonic anhydrase, chloroplast precursor
  misc_feature (1)..(259): Homolog of NCBI NO: 30678350 NR Description: carbonic anhydrase, chloroplast precursor
MGSEAYEEAIEALKKLIIEKEELKTVAAAKVEQATAALQTGTSSDKKAFDPVENIKQGFITFKKEKYETNPALYGELAKGQSPKYMVFACSDSRVCPSHVLNFQPGEAFVVRNIANMVPPFDKVKYGGVGAAIEYAVLHLKVENIVVIGHSACGGIKGLMSFPLDGNNSTDFIEDWVKICLPAKSKVISELGDSAFEDQCGRCEREAVNVSLANLLTYPFVREGLVKGTLALKGGYYDFIKGAFELWGLEFGLSETSSV

SEQ ID NO: 56543 - DNA, 921 bp, Glycine max
  misc_feature (1)..(921): Ceres Seq. ID no. 14302561
attttcccaaattctcattatctctctctctctctgtttcgctttcaccgaagaataacttgactttcccgaactccacctgagaaaaagatacccttaattcgcaggcgcgtcttgtgttggacaacaaccacaagatgattaacttcgaagaaaccgagttgcgactcggcctccctggcaacgactcagcactcaagggaagtgctgccaagagaggcttctctgaaactgcttctgttgatttgaagcttaatctttcttcttgcattaacgactctgcctcggattcaccctcatctgtgtctacagagaagcccaaagagaacaagactaccactgctgaacctcctccagctaatgatccagcaaaaccacctgcaaaggcacaagtggtgggttggccaccagttaggtcatttagaaagaacatagttcaaaggaacagcaatgaagaagaggcagagaagagcacgaagaatgctttcgtgaaggtgagcatggatggtgcaccgtatctacgaaaggtggacataaagttgtacaagagctaccaggagctgtcagatgcgctggctaagatgttcagttccttcacgattgaaaagtgtgggtcccaagggatgaaggactttatgaatgagaccaatggctctgactatgtacccacatatgaagacaaggacggagactggatgctcgtcggtgatgtgccctgggagatgttcgttgaatcatgcaagcgtcttcgcataatgaaaggctccgaggcaatcggtcttgcgccaagagccgtggaaaagtgcaagaacagaagctgaagaagtgatttcatctgcgtcacaaggaagcaaattgactcgagcaagatcgagtctaatataggaataagagtttaattatcatgtgcctttgttatct

SEQ ID NO: 56544 - protein, 227 aa, Glycine max
  peptide (1)..(227): Ceres Seq. ID no. 14302562
  misc_feature (2)..(219): Pfam Name: AUX/IAA family Pfam Description: AUX/IAA family
  misc_feature (2)..(227): Homolog of NCBI NO: 21592887 NR Description: putative auxin-induced protein, IAA17/AXR3-1
  misc_feature (2)..(227): Homolog of NCBI NO: 15219694 NR Description: auxin-responsive protein IAA17 (Indoleacetic
  misc_feature (2)..(227): Homolog of NCBI NO: 22328628 NR Description: auxin-responsive protein, putative [Arabidopsis
  misc_feature (1)..(215): Homolog of NCBI NO: 20269061 NR Description: aux/IAA protein [Populus tremula x Populus
  misc_feature (1)..(227): Homolog of NCBI NO: 5139697 NR Description: expressed in cucumber hypocotyls [Cucumis sativus]
  misc_feature (2)..(227): Homolog of NCBI NO: 4887020 NR Description: Nt-iaa28 deduced protein [Nicotiana tabacum]
  misc_feature (2)..(227): Homolog of NCBI NO: 114734 NR Description: AUXIN-INDUCED PROTEIN AUX28
  misc_feature (1)..(107): Homolog of NCBI NO: 20269059 NR Description: aux/IAA protein [Populus tremula x Populus
  misc_feature (84)..(227): Homolog of NCBI NO: 20269059 NR Description: aux/IAA protein [Populus tremula x Populus
  misc_feature (1)..(227): Homolog of NCBI NO: 20385508 NR Description: auxin-regulated protein [Populus tremula x
MINFEETELRLGLPGNDSALKGSAAKRGFSETASVDLKLNLSSCINDSASDSPSSVSTEKPKENKTTTAEPPPANDPAKPPAKAQVVGWPPVRSFRKNIVQRNSNEEEAEKSTKNAFVKVSMDGAPYLRKVDIKLYKSYQELSDALAKMFSSFTIEKCGSQGMKDFMNETNGSDYVPTYEDKDGDWMLVGDVPWEMFVESCKRLRIMKGSEAIGLAPRAVEKCKNRS

SEQ ID NO: 56545 - DNA, 713 bp, Glycine max
  misc_feature (1)..(713): Ceres Seq. ID no. 13595468
aaaataaaactgcatgttgattgcctttactccgaaaaatgaatttttttataatatttatgttgattattgctatgattttaggggtgagcgaagcaatttggcataaagttgttgcgcctttgtctaagtgtgagaagaaccgagtaattattcgaaatgaacttggtccaggtagaagtctagaatatcattgtcattctaatggtaaagatcaaggcgtccagtttttaaaattcaatgaagaaaggaactttgaatttgtcgatcatttttttggaaaaaaaaataaagtgaattgtgttttgaggcaagggttgtggatgcagagttcttctcgagactttgaagcataccatacaagtaaaagtaatggtaacaattgtggacagactcgtgaatggattgcgagaacagatggaacatactttcaaagaaatcgaattaagccagcagcttttgtgtttgcttggattaataaaaaaccttaaaaaaatctaattgatgtttctgattaagacactcaaaatctttaatcgtttctaattttaattattgttgttcgttttgtaaactttgtcatgattctgctttcgtgtcgaatattaagaaaataaatattgtatctatgtaattatgtatatttttttgtttgtcatctatttataatgtgttttaaataataagtatgcaaaaaaaaattggatttgtgg

SEQ ID NO: 56546 - protein, 150 aa, Glycine max
  peptide (1)..(150): Ceres Seq. ID no. 15221586
  misc_feature (35)..(145): Pfam Name: Plant self-incompatibility protein S1 Pfam Description: Plant self-incompatibility protein S1
  misc_feature (32)..(145): Homolog of NCBI NO: 15223785 NR Description: hypothetical protein [Arabidopsis thaliana]
  misc_feature (32)..(145): Homolog of NCBI NO: 15223787 NR Description: hypothetical protein [Arabidopsis thaliana]
  misc_feature (33)..(146): Homolog of NCBI NO: 15231647 NR Description: self-incompatibility protein-related [Arabidopsis
  misc_feature (1)..(145): Homolog of NCBI NO: 25372948 NR Description: hypothetical protein F11M15.11 [imported] -
  misc_feature (1)..(145): Homolog of NCBI NO: 25372947 NR Description: hypothetical protein F11M15.10 [imported] -
  misc_feature (1)..(138): Homolog of NCBI NO: 15237693 NR Description: self-incompatibility protein-related [Arabidopsis
  misc_feature (32)..(138): Homolog of NCBI NO: 10177698 NR Description: gb|AAD30637.1~gene_id:MUL8.19~similar to unknown
  misc_feature (32)..(148): Homolog of NCBI NO: 10178217 NR Description: gene_id:MLF18.17~unknown protein [Arabidopsis
  misc_feature (1)..(148): Homolog of NCBI NO: 30681033 NR Description: expressed protein [Arabidopsis thaliana]
MNFFIIFMLIIAMILGVSEAIWHKVVAPLSKCEKNRVIIRNELGPGRSLEYHCHSNGKDQGVQFLKFNEERNFEFVDHFFGKKNKVNCVLRQGLWMQSSSRDFEAYHTSKSNGNNCGQTREWIARTDGTYFQRNRIKPAAFVFAWINKKP

SEQ ID NO: 56547 - protein, 143 aa, Glycine max
  peptide (1)..(143): Ceres Seq. ID no. 15221587
  misc_feature (28)..(138): Pfam Name: Plant self-incompatibility protein S1 Pfam Description: Plant self-incompatibility protein S1
  misc_feature (25)..(138): Homolog of NCBI NO: 15223785 NR Description: hypothetical protein [Arabidopsis thaliana]
  misc_feature (25)..(138): Homolog of NCBI NO: 15223787 NR Description: hypothetical protein [Arabidopsis thaliana]
  misc_feature (26)..(139): Homolog of NCBI NO: 15231647 NR Description: self-incompatibility protein-related [Arabidopsis
  misc_feature (1)..(138): Homolog of NCBI NO: 25372948 NR Description: hypothetical protein F11M15.11 [imported] -
  misc_feature (1)..(138): Homolog of NCBI NO: 25372947 NR Description: hypothetical protein F11M15.10 [imported] -
  misc_feature (1)..(131): Homolog of NCBI NO: 15237693 NR Description: self-incompatibility protein-related [Arabidopsis
  misc_feature (25)..(131): Homolog of NCBI NO: 10177698 NR Description: gb|AAD30637.1~gene_id:MUL8.19~similar to unknown
  misc_feature (25)..(141): Homolog of NCBI NO: 10178217 NR Description: gene_id:MLF18.17~unknown protein [Arabidopsis
  misc_feature (1)..(141): Homolog of NCBI NO: 30681033 NR Description: expressed protein [Arabidopsis thaliana]
MLIIAMILGVSEAIWHKVVAPLSKCEKNRVIIRNELGPGRSLEYHCHSNGKDQGVQFLKFNEERNFEFVDHFFGKKNKVNCVLRQGLWMQSSSRDFEAYHTSKSNGNNCGQTREWIARTDGTYFQRNRIKPAAFVFAWINKKP

SEQ ID NO: 56548 - protein, 138 aa, Glycine max
  peptide (1)..(138): Ceres Seq. ID no. 15221588
  misc_feature (23)..(133): Pfam Name: Plant self-incompatibility protein S1 Pfam Description: Plant self-incompatibility protein S1
  misc_feature (20)..(133): Homolog of NCBI NO: 15223785 NR Description: hypothetical protein [Arabidopsis thaliana]
  misc_feature (20)..(133): Homolog of NCBI NO: 15223787 NR Description: hypothetical protein [Arabidopsis thaliana]
  misc_feature (21)..(134): Homolog of NCBI NO: 15231647 NR Description: self-incompatibility protein-related [Arabidopsis
  misc_feature (1)..(133): Homolog of NCBI NO: 25372948 NR Description: hypothetical protein F11M15.11 [imported] -
  misc_feature (1)..(133): Homolog of NCBI NO: 25372947 NR Description: hypothetical protein F11M15.10 [imported] -
  misc_feature (1)..(126): Homolog of NCBI NO: 15237693 NR Description: self-incompatibility protein-related [Arabidopsis
  misc_feature (20)..(126): Homolog of NCBI NO: 10177698 NR Description: gb|AAD30637.1~gene_id:MUL8.19~similar to unknown
  misc_feature (20)..(136): Homolog of NCBI NO: 10178217 NR Description: gene_id:MLF18.17~unknown protein [Arabidopsis
  misc_feature (1)..(136): Homolog of NCBI NO: 30681033 NR Description: expressed protein [Arabidopsis thaliana]
MILGVSEAIWHKVVAPLSKCEKNRVIIRNELGPGRSLEYHCHSNGKDQGVQFLKFNEERNFEFVDHFFGKKNKVNCVLRQGLWMQSSSRDFEAYHTSKSNGNNCGQTREWIARTDGTYFQRNRIKPAAFVFAWINKKP

SEQ ID NO: 56549 - DNA, 1087 bp, Glycine max
  misc_feature (1)..(1087): Ceres Seq. ID no. 12611474
aaaaagtgaagaaaacagaccaaaaatagaaagaaagagaaataccaaaaccttggcgcatcatattctttattccctcacttggatcgttaattccgcgaacgagcttctgcccttcaaattaaccatggagaatattggtgaggagtacggctactggccggagaacgacatgcttttccaaaacgaagaccttggcagctgggcgataatggatgaggcagcgttatcagggtcagggtactatgattcaagctccccggacggtactggtgcttcttcatcggtggcatctaagaacattgtctccgagaggaatagaaggaagaagctcaacgataggctttttgctctaagagcagtggtccccaacattaccaagatggataaggcttctatcattaaggatgctattgagtacatccagcacttgcatgaccaagagaagagaatccaagctgagattttggatcttgaatctgggaataaactcaaaaacccaacctatgaatttgaccaggacctccctattctgctcaggtccaagaagaagagaacagaacagctattcggttctgtcagttcaagaaattctccaattgaaataattgacctgagggtaacatacatgggagagaagacgtttgtggtgagcttgacatgtagcaaaaggacagacacaatggtaaaactgtgtgcggtgttcgaatctttaaagctgaaagtcattacggccaatatcacttctttttcaggcacgcttctgaagacagtcttcatccaggcagatgaagaagagagagactttttgcatataaaaattcagacagcgatttcagctctcaatgatcctctaagcccaatgagtatctgatgaagaaacgagttcagatcgaagctgagattgttctgtttgttgagtttccttttctcactcaatgttaattatctgtagtgaatgagtcttaaactcgaaagttggcaagttttctttttcttttccattttctgtatgttgatgttgatagcctctaacgttgtaagctttacgttattaatgaaatcgcattttcatgttcttcatggt

SEQ ID NO: 56550 - protein, 290 aa, Glycine max
  peptide (1)..(290): Ceres Seq. ID no. 12611475
  misc_feature (98)..(144): Pfam Name: Helix-loop-helix DNA-binding domain Pfam Description: Helix-loop-helix DNA-binding domain
  misc_feature (43)..(205): Homolog of NCBI NO: 7486225 NR Description: hypothetical protein F27B13.170 - Arabidopsis
  misc_feature (74)..(160): Homolog of NCBI NO: 29466635 NR Description: Transcription Factor [Oryza sativa]
  misc_feature (199)..(289): Homolog of NCBI NO: 29466635 NR Description: Transcription Factor [Oryza sativa]
  misc_feature (74)..(160): Homolog of NCBI NO: 32489775 NR Description: OSJNBb0018A10.6 [Oryza sativa (japonica
  misc_feature (199)..(289): Homolog of NCBI NO: 32489775 NR Description: OSJNBb0018A10.6 [Oryza sativa (japonica
  misc_feature (43)..(261): Homolog of NCBI NO: 16604348 NR Description: AT5g57150/MUL3_10 [Arabidopsis thaliana]
  misc_feature (43)..(261): Homolog of NCBI NO: 8843817 NR Description: contains similarity to unknown
  misc_feature (43)..(284): Homolog of NCBI NO: 30688496 NR Description: bHLH protein family [Arabidopsis thaliana]
  misc_feature (43)..(290): Homolog of NCBI NO: 21554896 NR Description: unknown [Arabidopsis thaliana]
  misc_feature (43)..(290): Homolog of NCBI NO: 18423944 NR Description: bHLH protein; protein id: At5g57150.1, supported
KSEENRPKIERKRNTKTLAHHILYSLTWIVNSANELLPFKLTMENIGEEYGYWPENDMLFQNEDLGSWAIMDEAALSGSGYYDSSSPDGTGASSSVASKNIVSERNRRKKLNDRLFALRAVVPNITKMDKASIIKDAIEYIQHLHDQEKRIQAEILDLESGNKLKNPTYEFDQDLPILLRSKKKRTEQLFGSVSSRNSPIEIIDLRVTYMGEKTFVVSLTCSKRTDTMVKLCAVFESLKLKVITANITSFSGTLLKTVFIQADEEERDFLHIKIQTAISALNDPLSPMSI

SEQ ID NO: 56551 - protein, 248 aa, Glycine max
  peptide (1)..(248): Ceres Seq. ID no. 12611476
  misc_feature (56)..(102): Pfam Name: Helix-loop-helix DNA-binding domain Pfam Description: Helix-loop-helix DNA-binding domain
  misc_feature (1)..(163): Homolog of NCBI NO: 7486225 NR Description: hypothetical protein F27B13.170 - Arabidopsis
  misc_feature (32)..(118): Homolog of NCBI NO: 29466635 NR Description: Transcription Factor [Oryza sativa]
  misc_feature (157)..(247): Homolog of NCBI NO: 29466635 NR Description: Transcription Factor [Oryza sativa]
  misc_feature (32)..(118): Homolog of NCBI NO: 32489775 NR Description: OSJNBb0018A10.6 [Oryza sativa (japonica
  misc_feature (157)..(247): Homolog of NCBI NO: 32489775 NR Description: OSJNBb0018A10.6 [Oryza sativa (japonica
  misc_feature (1)..(219): Homolog of NCBI NO: 16604348 NR Description: AT5g57150/MUL3_10 [Arabidopsis thaliana]
  misc_feature (1)..(219): Homolog of NCBI NO: 8843817 NR Description: contains similarity to unknown
  misc_feature (1)..(242): Homolog of NCBI NO: 30688496 NR Description: bHLH protein family [Arabidopsis thaliana]
  misc_feature (1)..(248): Homolog of NCBI NO: 21554896 NR Description: unknown [Arabidopsis thaliana]
  misc_feature (1)..(248): Homolog of NCBI NO: 18423944 NR Description: bHLH protein; protein id: At5g57150.1, supported
MENIGEEYGYWPENDMLFQNEDLGSWAIMDEAALSGSGYYDSSSPDGTGASSSVASKNIVSERNRRKKLNDRLFALRAVVPNITKMDKASIIKDAIEYIQHLHDQEKRIQAEILDLESGNKLKNPTYEFDQDLPILLRSKKKRTEQLFGSVSSRNSPIEIIDLRVTYMGEKTFVVSLTCSKRTDTMVKLCAVFESLKLKVITANITSFSGTLLKTVFIQADEEERDFLHIKIQTAISALNDPLSPMSI

SEQ ID NO: 56552 - protein, 233 aa, Glycine max
  peptide (1)..(233): Ceres Seq. ID no. 12611477
  misc_feature (41)..(87): Pfam Name: Helix-loop-helix DNA-binding domain Pfam Description: Helix-loop-helix DNA-binding domain
  misc_feature (1)..(148): Homolog of NCBI NO: 7486225 NR Description: hypothetical protein F27B13.170 - Arabidopsis
  misc_feature (17)..(103): Homolog of NCBI NO: 29466635 NR Description: Transcription Factor [Oryza sativa]
  misc_feature (142)..(232): Homolog of NCBI NO: 29466635 NR Description: Transcription Factor [Oryza sativa]
  misc_feature (17)..(103): Homolog of NCBI NO: 32489775 NR Description: OSJNBb0018A10.6 [Oryza sativa (japonica
  misc_feature (142)..(232): Homolog of NCBI NO: 32489775 NR Description: OSJNBb0018A10.6 [Oryza sativa (japonica
  misc_feature (1)..(204): Homolog of NCBI NO: 16604348 NR Description: AT5g57150/MUL3_10 [Arabidopsis thaliana]
  misc_feature (1)..(204): Homolog of NCBI NO: 8843817 NR Description: contains similarity to unknown
  misc_feature (1)..(227): Homolog of NCBI NO: 30688496 NR Description: bHLH protein family [Arabidopsis thaliana]
  misc_feature (1)..(233): Homolog of NCBI NO: 21554896 NR Description: unknown [Arabidopsis thaliana]
  misc_feature (1)..(233): Homolog of NCBI NO: 18423944 NR Description: bHLH protein; protein id: At5g57150.1, supported
MLFQNEDLGSWAIMDEAALSGSGYYDSSSPDGTGASSSVASKNIVSERNRRKKLNDRLFALRAVVPNITKMDKASIIKDAIEYIQHLHDQEKRIQAEILDLESGNKLKNPTYEFDQDLPILLRSKKKRTEQLFGSVSSRNSPIEIIDLRVTYMGEKTFVVSLTCSKRTDTMVKLCAVFESLKLKVITANITSFSGTLLKTVFIQADEEERDFLHIKIQTAISALNDPLSPMSI

SEQ ID NO: 56553 - DNA, 1309 bp, Glycine max
  misc_feature (1)..(1309): Ceres Seq. ID no. 14301430
atcacatcgtctcaccaagcagcagctagctaagctaagcctagccaaagcttctctagcttcggtagtccaggaaacatgaggctcgcggtggttctcctctgcgccctggtggccgtccaggtcgcgctcctcgccgccccggcggaggccggcgagctggtggtcgggtactacgacaagaaatgcaggggcgtggagaacgtcgtccagtggcacgtcaggagggcgctcaagaccaaccgccgcgccggtgccgccctcgtccgcctcctcttccacgactgcttcgtcaggggttgcgatgcctctgtgctccttgacgcgtcccccgagaaccctcacccggagaaggaggcgccggtgaacatcgggctggccgccttcgacctcctggaggagatcaaggcggccgtcgaggacaggtgccccggcgtggtgtcctgctctgacatcctcatttacgcagcccgtgacgcggcccacgccctcagcaatggcaacatccacttcgacgtccctgccgggcgcctcgacggcctcgtctcctcggccgccgaggcccaggcggagctcccggactccaccttcaccgtgcagcagctcatcgacaacttcgcacgcaaggacttcgacgtggaggagctggtcatcctgtccggcgcgcactccatcggcgtcggccactgctcctccttcaccggccgcctcaccgcgccgccggagcagatcaacccggcctaccgcaaccttctcaaccacaagtgccaccagggcgccaacccggccgtcgtcaacaacgtccgcgatgaggactacgagacggtgtccaagttcatgcccgggttcaccagccgggtgcgcaagatcagcgacttcctcgacaacaccttctaccacaacaacctcgccaggatcgtcagcttcaactccgactggcagctcatgacccacaccgaggccaggggccacgtccacgagtacgccgacaacgccacgctctgggacggcgacttcgcggaatccctgctcaagctcagcaagctgtccatgcccgccgggagcaagggcggcatcaggaagaagtgcagcatcgccacccaccctctctactaaacaagtcgtatgcatgcatgaacaaggtcgatccaacgaagaagagaacctttgcccctggcggtgtgcggatttcttcaataatcatgtgatttttctggttcaatccattcttttgattcccattggttgtgtattttatttatggcaacatatatgtatcacggaaataaagttacggtctttcaaatgt

SEQ ID NO: 56554 - protein, 345 aa, Glycine max
  peptide (1)..(345): Ceres Seq. ID no. 14301431
  misc_feature (44)..(305): Pfam Name: Peroxidase Pfam Description: Peroxidase
  misc_feature (4)..(342): Homolog of NCBI NO: 34896944 NR Description: putative peroxidase [Oryza sativa]
  misc_feature (21)..(337): Homolog of NCBI NO: 34896268 NR Description: putative peroxidase [Oryza sativa]
  misc_feature (12)..(339): Homolog of NCBI NO: 12039335 NR Description: putative peroxidase [Oryza sativa]
  misc_feature (12)..(339): Homolog of NCBI NO: 12039346 NR Description: putative peroxidase [Oryza sativa]
  misc_feature (213)..(339): Homolog of NCBI NO: 27261094 NR Description: putative peroxidase [Oryza sativa (japonica
  misc_feature (7)..(235): Homolog of NCBI NO: 27261094 NR Description: putative peroxidase [Oryza sativa (japonica
  misc_feature (11)..(337): Homolog of NCBI NO: 34894398 NR Description: putative peroxidase [Oryza sativa (japonica
  misc_feature (3)..(337): Homolog of NCBI NO: 34894402 NR Description: putative peroxidase [Oryza sativa (japonica
  misc_feature (1)..(342): Homolog of NCBI NO: 34894394 NR Description: putative peroxidase [Oryza sativa (japonica
  misc_feature (1)..(345): Homolog of NCBI NO: 34894404 NR Description: putative peroxidase [Oryza sativa (japonica
MRLAVVLLCALVAVQVALLAAPAEAGELVVGYYDKKCRGVENVVQWHVRRALKTNRRAGAALVRLLFHDCFVRGCDASVLLDASPENPHPEKEAPVNIGLAAFDLLEEIKAAVEDRCPGVVSCSDILIYAARDAAHALSNGNIHFDVPAGRLDGLVSSAAEAQAELPDSTFTVQQLIDNFARKDFDVEELVILSGAHSIGVGHCSSFTGRLTAPPEQINPAYRNLLNHKCHQGANPAVVNNVRDEDYETVSKFMPGFTSRVRKISDFLDNTFYHNNLARIVSFNSDWQLMTHTEARGHVHEYADNATLWDGDFAESLLKLSKLSMPAGSKGGIRKKCSIATHPLY

SEQ ID NO: 56555 - DNA, 987 bp, Glycine max
  misc_feature (1)..(987): Ceres Seq. ID no. 13639250
cttctcccttctcctacctcccacacatcctcgaatcacaacctcacacctcctcccctgagtcctgaccgaccaccccgcagctagcttcgcgcagccagcaccgaccgatcacacgctagctgctgctgctgaggcgaccgaccggctatccatggcggtgaaagactgcggcgggcacaagggcgggggctgcgagtgccaccgccgccggctctaccgcaagtgctgcggcgcgctgctggccctcgtcatcctcgccctcttcatcatcctcatcgtctacctggtgctccgcccccacaagccccgcttctacctgcaggacctggcggtgctctgcctcaacgtcacgccgcccacctccgcctacctcttcaccaccatgcaggccacggtcgcggcgcgcaaccccaacgaccgcgtcggcgtctactacgacgaggcggacatgtacgcggagtacaagggcgtgcccatcaccgtccccacccgcctccccgtcgcctaccagggccaccgggaccagtccgtctggtcgccctacctccggtccatggacagcgtcgtgctcccgccgcagctcgccatcgcgctggcgcaggacgagacggccgggtacgtgctggtggacgtcaaggtggacggtcaggtgcgctggaaggtgggcacgtggatctccggccactaccacctccgggtcaactgcccggccctcatcagggtgaacgagggcaagggcagctacggcgccaccaccggcggcggccccgactacttccgcttccagcaggccgccgcctgcgccgtcgacgtctgatcatgcatcatcggttcgacctccaccgatccatgcctgtgtccaaattcaaattcaggggaatcgattgattgcttttctctctctagtttctttcttgcttctttttagtctctttttgacttgttgatcgattggttaaagaaatgaatgaaaacaaaaggttg

SEQ ID NO: 56556 - protein, 221 aa, Glycine max
  peptide (1)..(221): Ceres Seq. ID no. 13639251
  misc_feature (1)..(221): Homolog of NCBI NO: 15240001 NR Description: harpin-induced protein, putative (HIN1)
  misc_feature (3)..(221): Homolog of NCBI NO: 28392929 NR Description: putative VAMP protein SEC22 [Arabidopsis thaliana]
  misc_feature (3)..(221): Homolog of NCBI NO: 18399308 NR Description: harpin-induced protein 1 family (HIN1)
  misc_feature (4)..(221): Homolog of NCBI NO: 15231227 NR Description: harpin-induced protein 1 family (HIN1)
  misc_feature (1)..(221): Homolog of NCBI NO: 15227538 NR Description: harpin-induced protein 1 family (HIN1)
  misc_feature (1)..(221): Homolog of NCBI NO: 22326984 NR Description: harpin-induced protein 1 family (HIN1)
  misc_feature (14)..(221): Homolog of NCBI NO: 15229906 NR Description: harpin-induced protein 1 family (HIN1)
  misc_feature (17)..(221): Homolog of NCBI NO: 38344036 NR Description: OJ991214_12.17 [Oryza sativa (japonica
  misc_feature (1)..(221): Homolog of NCBI NO: 38637038 NR Description: harpin-induced protein 1 family (HIN1)-like
  misc_feature (3)..(221): Homolog of NCBI NO: 32488715 NR Description: OSJNBa0088H09.16 [Oryza sativa (japonica
MAVKDCGGHKGGGCECHRRRLYRKCCGALLALVILALFIILIVYLVLRPHKPRFYLQDLAVLCLNVTPPTSAYLFTTMQATVAARNPNDRVGVYYDEADMYAEYKGVPITVPTRLPVAYQGHRDQSVWSPYLRSMDSVVLPPQLAIALAQDETAGYVLVDVKVDGQVRWKVGTWISGHYHLRVNCPALIRVNEGKGSYGATTGGGPDYFRFQQAAACAVDV

SEQ ID NO: 56557 - protein, 144 aa, Glycine max
  peptide (1)..(144): Ceres Seq. ID no. 13639252
  misc_feature (1)..(144): Homolog of NCBI NO: 15240001 NR Description: harpin-induced protein, putative (HIN1)
  misc_feature (1)..(144): Homolog of NCBI NO: 28392929 NR Description: putative VAMP protein SEC22 [Arabidopsis thaliana]
  misc_feature (1)..(144): Homolog of NCBI NO: 18399308 NR Description: harpin-induced protein 1 family (HIN1)
  misc_feature (1)..(144): Homolog of NCBI NO: 15231227 NR Description: harpin-induced protein 1 family (HIN1)
  misc_feature (1)..(144): Homolog of NCBI NO: 15227538 NR Description: harpin-induced protein 1 family (HIN1)
  misc_feature (1)..(144): Homolog of NCBI NO: 22326984 NR Description: harpin-induced protein 1 family (HIN1)
  misc_feature (1)..(144): Homolog of NCBI NO: 15229906 NR Description: harpin-induced protein 1 family (HIN1)
  misc_feature (1)..(144): Homolog of NCBI NO: 38344036 NR Description: OJ991214_12.17 [Oryza sativa (japonica
  misc_feature (1)..(144): Homolog of NCBI NO: 38637038 NR Description: harpin-induced protein 1 family (HIN1)-like
  misc_feature (1)..(144): Homolog of NCBI NO: 32488715 NR Description: OSJNBa0088H09.16 [Oryza sativa (japonica
MQATVAARNPNDRVGVYYDEADMYAEYKGVPITVPTRLPVAYQGHRDQSVWSPYLRSMDSVVLPPQLAIALAQDETAGYVLVDVKVDGQVRWKVGTWISGHYHLRVNCPALIRVNEGKGSYGATTGGGPDYFRFQQAAACAVDV

SEQ ID NO: 56558 - protein, 122 aa, Glycine max
  peptide (1)..(122): Ceres Seq. ID no. 13639253
  misc_feature (1)..(122): Homolog of NCBI NO: 15240001 NR Description: harpin-induced protein, putative (HIN1)
  misc_feature (1)..(122): Homolog of NCBI NO: 28392929 NR Description: putative VAMP protein SEC22 [Arabidopsis thaliana]
  misc_feature (1)..(122): Homolog of NCBI NO: 18399308 NR Description: harpin-induced protein 1 family (HIN1)
  misc_feature (1)..(122): Homolog of NCBI NO: 15231227 NR Description: harpin-induced protein 1 family (HIN1)
  misc_feature (1)..(122): Homolog of NCBI NO: 15227538 NR Description: harpin-induced protein 1 family (HIN1)
  misc_feature (1)..(122): Homolog of NCBI NO: 22326984 NR Description: harpin-induced protein 1 family (HIN1)
  misc_feature (1)..(122): Homolog of NCBI NO: 15229906 NR Description: harpin-induced protein 1 family (HIN1)
  misc_feature (1)..(122): Homolog of NCBI NO: 38344036 NR Description: OJ991214_12.17 [Oryza sativa (japonica
  misc_feature (1)..(122): Homolog of NCBI NO: 38637038 NR Description: harpin-induced protein 1 family (HIN1)-like
  misc_feature (1)..(122): Homolog of NCBI NO: 32488715 NR Description: OSJNBa0088H09.16 [Oryza sativa (japonica
MYAEYKGVPITVPTRLPVAYQGHRDQSVWSPYLRSMDSVVLPPQLAIALAQDETAGYVLVDVKVDGQVRWKVGTWISGHYHLRVNCPALIRVNEGKGSYGATTGGGPDYFRFQQAAACAVDV

SEQ ID NO: 56559 - DNA, 1105 bp, Glycine max
  misc_feature (1)..(1105): Ceres Seq. ID no. 13595851
atcgccgcctcatcgccgccaggagttcgagttccccccgaaccgtcgccatggctgccgcaccagtcatctccccgaaagaaaatctgcccccttcgctgacctccacctccgagccccctccactcttcgacggcaccaccaggttgtatgttgcatatcactgcccatatgcgcagcgcgcttggattgccaggaactacaagggtttgcaagacaagatcaagatagtcgggatcgatctcgcagacaggccggcttggtacaaggagaaggtttacccacagaacaaggtgccttcactggagcataacaacgaggtgaaaggagaaagcttggatttggtcaagtacattgacagcaatttcgatggcccagcattgctccccgatgattctgcaaagaagcagtttgccgaggagctgcttgtgtacatcgatgagttcaataaagcactatactcatccataacctccaagggagatgtggcagaggaaactgttgctgcgctggataaaatagaagcggccctgggaaagttcagtgatggccctttcttccttggccagttcagtttggtggacattgcatatgtgccatttatcgaaaggtttcagatattcttttctggtatcaaaaactatgatatcaccaaggacagacctaatattcagaaattcatcgaggaagtgaacaagatcgatgcgtacacgcaaacgaaactggacccacaatttctacttgaacacacaaagaagcggcttgggattgagtgaagatgtgaccaaggatgaccaagagaccagggaactactgcagcatggaagatgaagaggaagacactcaggagtgtgcttgcttgctactactactagatcatgaaaggcacgcgttgctgcgcccgtcttatggtaataataaattttaggcttgacacaattgtgcggaagcattgtatgtaaactttagatcttctagtattataaataattttgtgtaatttcatttttacctggaatttaaagcaatgtagtagtattaggcttatgccgttgtcattacaatacaacgattgttcaaagaccttggtgaacaacaacggttc

SEQ ID NO: 56560 - protein, 257 aa, Glycine max
  peptide (1)..(257): Ceres Seq. ID no. 13595852
  misc_feature (15)..(256): Homolog of NCBI NO: 7489703 NR Description: safener-induced In2.1-like protein - wheat
  misc_feature (15)..(256): Homolog of NCBI NO: 1352460 NR Description: IN2-1 PROTEIN
  misc_feature (15)..(254): Homolog of NCBI NO: 24796810 NR Description: putative glutathione S-transferase
  misc_feature (15)..(256): Homolog of NCBI NO: 7939638 NR Description: XIG [Oryza sativa]
  misc_feature (16)..(256): Homolog of NCBI NO: 24796806 NR Description: putative glutathione S-transferase
RRLIAARSSSSPRTVAMAAAPVISPKENLPPSLTSTSEPPPLFDGTTRLYVAYHCPYAQRAWIARNYKGLQDKIKIVGIDLADRPAWYKEKVYPQNKVPSLEHNNEVKGESLDLVKYIDSNFDGPALLPDDSAKKQFAEELLVYIDEFNKALYSSITSKGDVAEETVAALDKIEAALGKFSDGPFFLGQFSLVDIAYVPFIERFQIFFSGIKNYDITKDRPNIQKFIEEVNKIDAYTQTKLDPQFLLEHTKKRLGIE

SEQ ID NO: 56561 - protein, 241 aa, Glycine max
  peptide (1)..(241): Ceres Seq. ID no. 13595853
  misc_feature (1)..(240): Homolog of NCBI NO: 7489703 NR Description: safener-induced In2.1-like protein - wheat
  misc_feature (1)..(240): Homolog of NCBI NO: 1352460 NR Description: IN2-1 PROTEIN
  misc_feature (1)..(238): Homolog of NCBI NO: 24796810 NR Description: putative glutathione S-transferase
  misc_feature (1)..(240): Homolog of NCBI NO: 7939638 NR Description: XIG [Oryza sativa]
  misc_feature (1)..(240): Homolog of NCBI NO: 24796806 NR Description: putative glutathione S-transferase
MAAAPVISPKENLPPSLTSTSEPPPLFDGTTRLYVAYHCPYAQRAWIARNYKGLQDKIKIVGIDLADRPAWYKEKVYPQNKVPSLEHNNEVKGESLDLVKYIDSNFDGPALLPDDSAKKQFAEELLVYIDEFNKALYSSITSKGDVAEETVAALDKIEAALGKFSDGPFFLGQFSLVDIAYVPFIERFQIFFSGIKNYDITKDRPNIQKFIEEVNKIDAYTQTKLDPQFLLEHTKKRLGIE

SEQ ID NO: 56562 - DNA, 1808 bp, Glycine max
  misc_feature (1)..(1808): Ceres Seq. ID no. 13595437
aaaaaccctagattttcaaatctagggttttgttttcttaacttgttacggttatggttatggttctggttcaggaactgaactcccacccttgctaatttcacttttctcttctcaatcttagcctctggtttttctacattttccctccctcgctaacctctgccatgggattttcaatgctgattttgtttcacctctaaagccactccctctcttattttcttcaaccttttggcattcgcaactcatcttctttgtggtgtttctaggtaaacgagacccttgtacgtgcattcacttgacaaaatctccgagcttgttacttgaatatctggagctagcttctgggctttagatcctcttctttcttctttgcattagggttaaagatctattttttccatcattgtgaaagctatttgcttttgactagtagaagggtacctagctaaacccctgtttttacatcttcactagtttcatagtttaagaagttagtagcaccagtgaaagggtttgaagttgaggaggaaaaattatcacaattgacaaacctgttagtaaatgcatggatgggagagaaggcatggcatttcctggtggctctgctccatattacatgcagcatagaggaggaggggttggtgggtctgttccaggaaccgggacacagagtggagggtttcaaccaccctctggctttagagctttgtcaaatgtctctccaggttctgcatttaaagtagagtctcagcctcaacatgctagttttagtcatggcattaacacaggttcctctcctgatggtggaagtggagtgccttcttctggtgagcctgtgaagaagaaaagagggaggcctaggaagtatggccctgatggatctgtttccttgatgctctctcccatgtctgccactgctaattccaccccgggatcgggcacttcttcggagaaacgacccagggggcgcccacctggaagtggaaggaagcaacagcttgccactctaggtgaatggatgaacaattctgcaggactggccttttcacctcatgttatcaccgttggagttggggaggacattgtagcaaagttattgtcatttgcaaggcagagaccaagggctgtgtgcatcttaacaggaactgggacaatttcttcagtcactctgcgccaacccgcttctactagcatcagtgttacatatgagggccgatttcaaatattatgcttgtctggttcttacttggttgctgaagaaggtggacctcacaatagramcgggtggcatgagtgtttccctttctagtcctgatggtcatatcattggtggtggtgttactaggcttgttgctgcaagcccagtgcaggtggtagcatgcagtttcgtatatgggggctccaagccaaagactaaagaagtgaccactaccactactvctacaaaagatagcagttcagagcctcagagtagtgataagttagcgtctccagccagtgctcctccacctaatcaaaactacacctcttcttctccgttcccaggcatttggcctgcatcgtcaaggccagtagaggttaaaagtgcacatccacatactggtattgacttgacgcgtgggtgaagaccatttattattctataagagactttgtagttttgtatagagatctcttgtaaatgaaccgaatttgtgagcattgtgactcttcctatctatcactgttgatgggtgacaagttcgcgctaacctatgctgtaaccaatggatttcagggttaagtaacagtcttgactttgc

SEQ ID NO: 56563 - protein, 247 aa, Glycine max
  peptide (1)..(247): Ceres Seq. ID no. 15221577
  misc_feature (48)..(240): Homolog of NCBI NO: 14326504 NR Description: At2g33620/F4P9.39 [Arabidopsis thaliana]
  misc_feature (12)..(240): Homolog of NCBI NO: 11281387 NR Description: probable DNA-binding protein - Arabidopsis
  misc_feature (1)..(240): Homolog of NCBI NO: 30695388 NR Description: DNA-binding protein -related [Arabidopsis
  misc_feature (7)..(240): Homolog of NCBI NO: 17979309 NR Description: putative DNA-binding protein [Arabidopsis
  misc_feature (1)..(240): Homolog of NCBI NO: 22330402 NR Description: DNA-binding protein -related [Arabidopsis
  misc_feature (52)..(240): Homolog of NCBI NO: 6633838 NR Description: F2K11.15 [Arabidopsis thaliana]
  misc_feature (1)..(240): Homolog of NCBI NO: 6633838 NR Description: F2K11.15 [Arabidopsis thaliana]
  misc_feature (52)..(240): Homolog of NCBI NO: 30696854 NR Description: DNA-binding protein -related [Arabidopsis
  misc_feature (1)..(240): Homolog of NCBI NO: 2213534 NR Description: DNA-binding PD1-like protein [Pisum sativum]
  misc_feature (1)..(240): Homolog of NCBI NO: 7488825 NR Description: probable DNA-binding protein - garden pea
  misc_feature (238)..(238): Xaa is any aa, unknown or other
  misc_feature (239)..(239): Xaa is any aa, unknown or other
MDGREGMAFPGGSAPYYMQHRGGGVGGSVPGTGTQSGGFQPPSGFRALSNVSPGSAFKVESQPQHASFSHGINTGSSPDGGSGVPSSGEPVKKKRGRPRKYGPDGSVSLMLSPMSATANSTPGSGTSSEKRPRGRPPGSGRKQQLATLGEWMNNSAGLAFSPHVITVGVGEDIVAKLLSFARQRPRAVCILTGTGTISSVTLRQPASTSISVTYEGRFQILCLSGSYLVAEEGGPHNXXGWHECFPF

SEQ ID NO: 56564 - protein, 241 aa, Glycine max
  peptide (1)..(241): Ceres Seq. ID no. 15221578
  misc_feature (42)..(234): Homolog of NCBI NO: 14326504 NR Description: At2g33620/F4P9.39 [Arabidopsis thaliana]
  misc_feature (6)..(234): Homolog of NCBI NO: 11281387 NR Description: probable DNA-binding protein - Arabidopsis
  misc_feature (1)..(234): Homolog of NCBI NO: 30695388 NR Description: DNA-binding protein -related [Arabidopsis
  misc_feature (1)..(234): Homolog of NCBI NO: 17979309 NR Description: putative DNA-binding protein [Arabidopsis
  misc_feature (1)..(234): Homolog of NCBI NO: 22330402 NR Description: DNA-binding protein -related [Arabidopsis
  misc_feature (46)..(234): Homolog of NCBI NO: 6633838 NR Description: F2K11.15 [Arabidopsis thaliana]
  misc_feature (1)..(234): Homolog of NCBI NO: 6633838 NR Description: F2K11.15 [Arabidopsis thaliana]
  misc_feature (46)..(234): Homolog of NCBI NO: 30696854 NR Description: DNA-binding protein -related [Arabidopsis
  misc_feature (1)..(234): Homolog of NCBI NO: 2213534 NR Description: DNA-binding PD1-like protein [Pisum sativum]
  misc_feature (1)..(234): Homolog of NCBI NO: 7488825 NR Description: probable DNA-binding protein - garden pea
  misc_feature (232)..(232): Xaa is any aa, unknown or other
  misc_feature (233)..(233): Xaa is any aa, unknown or other
MAFPGGSAPYYMQHRGGGVGGSVPGTGTQSGGFQPPSGFRALSNVSPGSAFKVESQPQHASFSHGINTGSSPDGGSGVPSSGEPVKKKRGRPRKYGPDGSVSLMLSPMSATANSTPGSGTSSEKRPRGRPPGSGRKQQLATLGEWMNNSAGLAFSPHVITVGVGEDIVAKLLSFARQRPRAVCILTGTGTISSVTLRQPASTSISVTYEGRFQILCLSGSYLVAEEGGPHNXXGWHECFPF

SEQ ID NO: 56565 - protein, 230 aa, Glycine max
  peptide (1)..(230): Ceres Seq. ID no. 15221579
  misc_feature (31)..(223): Homolog of NCBI NO: 14326504 NR Description: At2g33620/F4P9.39 [Arabidopsis thaliana]
  misc_feature (1)..(223): Homolog of NCBI NO: 11281387 NR Description: probable DNA-binding protein - Arabidopsis
  misc_feature (1)..(223): Homolog of NCBI NO: 30695388 NR Description: DNA-binding protein -related [Arabidopsis
  misc_feature (1)..(223): Homolog of NCBI NO: 17979309 NR Description: putative DNA-binding protein [Arabidopsis
  misc_feature (1)..(223): Homolog of NCBI NO: 22330402 NR Description: DNA-binding protein -related [Arabidopsis
  misc_feature (35)..(223): Homolog of NCBI NO: 6633838 NR Description: F2K11.15 [Arabidopsis thaliana]
  misc_feature (1)..(223): Homolog of NCBI NO: 6633838 NR Description: F2K11.15 [Arabidopsis thaliana]
  misc_feature (35)..(223): Homolog of NCBI NO: 30696854 NR Description: DNA-binding protein -related [Arabidopsis
  misc_feature (1)..(223): Homolog of NCBI NO: 2213534 NR Description: DNA-binding PD1-like protein [Pisum sativum]
  misc_feature (1)..(223): Homolog of NCBI NO: 7488825 NR Description: probable DNA-binding protein - garden pea
  misc_feature (221)..(221): Xaa is any aa, unknown or other
  misc_feature (222)..(222): Xaa is any aa, unknown or other
MQHRGGGVGGSVPGTGTQSGGFQPPSGFRALSNVSPGSAFKVESQPQHASFSHGINTGSSPDGGSGVPSSGEPVKKKRGRPRKYGPDGSVSLMLSPMSATANSTPGSGTSSEKRPRGRPPGSGRKQQLATLGEWMNNSAGLAFSPHVITVGVGEDIVAKLLSFARQRPRAVCILTGTGTISSVTLRQPASTSISVTYEGRFQILCLSGSYLVAEEGGPHNXXGWHECFPF

SEQ ID NO: 56566 - DNA, 628 bp, Glycine max
  misc_feature (1)..(628): Ceres Seq. ID no. 13595146
atcttctctcgtctccactgatcccaccaaccacacttacttctctcaatggcgacgatgtacgttcctccggcgacgctttacgccggcaaaccgactccagtgacttcaaacctccagagatcgtctttcttgccgtattactcgttgaggatactcggcgacaagaagaagaagtctctttccaagtcttcatcatcctcctctgctccaagattctccatgcgtgtctcctccaagcaagcttatatctgccgtgattgcgggtatatatacaatgacagaactccattcgataagttgcctgataattacttctgtccagtgtgtgctgctcctaaacggcggttcagaccgtacatgcctgatgtgagcaagaacgtcaacgacaaggatgtgagaaaggctagaaaagctgagctccaacgtgacgaagccgttgggaaggctttgcctatagcaattgctgttggggttctagctttagcagctctttacttctatgtcaacagtaccgcatgaactgctgcatcaagaggctagctacattcttgtttcgttttgtattaacatgtcttctctgagttgttgttagacattataaatgaagtaaaatgttgagatttct

SEQ ID NO: 56567 - protein, 157 aa, Glycine max
  peptide (1)..(157): Ceres Seq. ID no. 13595147
  misc_feature (64)..(101): Pfam Name: Rubredoxin Pfam Description: Rubredoxin
  misc_feature (55)..(112): Homolog of NCBI NO: 34905300 NR Description: P0577B11.21 [Oryza sativa (japonica
  misc_feature (45)..(112): Homolog of NCBI NO: 18418200 NR Description: expressed protein [Arabidopsis thaliana]
  misc_feature (4)..(157): Homolog of NCBI NO: 18423226 NR Description: expressed protein [Arabidopsis thaliana]
MATMYVPPATLYAGKPTPVTSNLQRSSFLPYYSLRILGDKKKKSLSKSSSSSSAPRFSMRVSSKQAYICRDCGYIYNDRTPFDKLPDNYFCPVCAAPKRRFRPYMPDVSKNVNDKDVRKARKAELQRDEAVGKALPIAIAVGVLALAALYFYVNSTA

SEQ ID NO: 56568 - protein, 154 aa, Glycine max
  peptide (1)..(154): Ceres Seq. ID no. 13595148
  misc_feature (61)..(98): Pfam Name: Rubredoxin Pfam Description: Rubredoxin
  misc_feature (52)..(109): Homolog of NCBI NO: 34905300 NR Description: P0577B11.21 [Oryza sativa (japonica
  misc_feature (42)..(109): Homolog of NCBI NO: 18418200 NR Description: expressed protein [Arabidopsis thaliana]
  misc_feature (1)..(154): Homolog of NCBI NO: 18423226 NR Description: expressed protein [Arabidopsis thaliana]
MYVPPATLYAGKPTPVTSNLQRSSFLPYYSLRILGDKKKKSLSKSSSSSSAPRFSMRVSSKQAYICRDCGYIYNDRTPFDKLPDNYFCPVCAAPKRRFRPYMPDVSKNVNDKDVRKARKAELQRDEAVGKALPIAIAVGVLALAALYFYVNSTA

SEQ ID NO: 56569 - protein, 99 aa, Glycine max
  peptide (1)..(99): Ceres Seq. ID no. 13595149
  misc_feature (6)..(43): Pfam Name: Rubredoxin Pfam Description: Rubredoxin
  misc_feature (1)..(54): Homolog of NCBI NO: 34905300 NR Description: P0577B11.21 [Oryza sativa (japonica
  misc_feature (1)..(54): Homolog of NCBI NO: 18418200 NR Description: expressed protein [Arabidopsis thaliana]
  misc_feature (1)..(99): Homolog of NCBI NO: 18423226 NR Description: expressed protein [Arabidopsis thaliana]
MRVSSKQAYICRDCGYIYNDRTPFDKLPDNYFCPVCAAPKRRFRPYMPDVSKNVNDKDVRKARKAELQRDEAVGKALPIAIAVGVLALAALYFYVNSTA

SEQ ID NO: 56570 - DNA, 727 bp, Glycine max
  misc_feature (1)..(727): Ceres Seq. ID no. 13582362
tacctagaacatcctaatcgaaaacaaaagcactcaaaatgatcgctctggtctttttggctctcttctcggtagcagctgcatacccgtacaaacacgacatcggttcgagtacgaaggcaaattgggccacaacctcccataccagaaggaattctacggcaaggaatacacccagggcaagggatacccattcggtgaatacttccacaaacaaggttacggatacccacagtaccagggacaatactacggttacccaggatactactcccactggtccacaccatactacggccgccagactggtttcgcccgttacggatacggccagaaccgcattggatacggatatgaatacccacaaggaagctacggctacaaaccattctacggtgaatacggactccacaacttcccatactacggaatcaagaactacgaatacggatcctacggcccatacggatacggtttgggatacaatcctttctaccgctactacggcagctactacccaaaatcctaccttggcgaatacaaatactgaactgatgtttgataattgacaattgaaaattttgccagcttgttcaatagtaactttgtcgaattgacaccaacaatagcgtacctgtaaacagtgcaaacaattagaaacctacaccaaacaattgtaccaatcaaatttcatggattttctctgaaataaaaaatgacttctgat

SEQ ID NO: 56571 - protein, 176 aa, Glycine max
  peptide (1)..(176): Ceres Seq. ID no. 13582363
  misc_feature (24)..(170): Pfam Name: Equine herpesvirus glycoprotein gp2 Pfam Description: Equine herpesvirus glycoprotein gp2
  misc_feature (24)..(170): Homolog of NCBI NO: 32264364 NR Description: MBCTL1 [Monosiga brevicollis]
  misc_feature (24)..(170): Homolog of NCBI NO: 7494135 NR Description: mucin-like glycoprotein 900 - Cryptosporidium
  misc_feature (24)..(170): Homolog of NCBI NO: 6322611 NR Description: Delayed Anaerobic Gene; Dan4p [Saccharomyces
  misc_feature (33)..(170): Homolog of NCBI NO: 24641644 NR Description: CG32644-PB [Drosophila melanogaster]
  misc_feature (24)..(170): Homolog of NCBI NO: 7494135 NR Description: mucin-like glycoprotein 900 - Cryptosporidium
  misc_feature (19)..(170): Homolog of NCBI NO: 7494135 NR Description: mucin-like glycoprotein 900 - Cryptosporidium
  misc_feature (24)..(170): Homolog of NCBI NO: 7494135 NR Description: mucin-like glycoprotein 900 - Cryptosporidium
  misc_feature (24)..(170): Homolog of NCBI NO: 6322611 NR Description: Delayed Anaerobic Gene; Dan4p [Saccharomyces
  misc_feature (17)..(168): Homolog of NCBI NO: 7494135 NR Description: mucin-like glycoprotein 900 - Cryptosporidium
  misc_feature (24)..(170): Homolog of NCBI NO: 39583863 NR Description: Hypothetical protein CBG08535 [Caenorhabditis
MIALVFLALFSVAAAYPYKHDIGSSTKANWATTSHTRRNSTARNTPRARDTHSVNTSTNKVTDTHSTRDNTTVTQDTTPTGPHHTTAARLVSPVTDTARTALDTDMNTHKEATATNHSTVNTDSTTSHTTESRTTNTDPTAHTDTVWDTILSTATTAATTQNPTLANTNTELMFDN

SEQ ID NO: 56572 - DNA, 1378 bp, Glycine max
  misc_feature (1)..(1378): Ceres Seq. ID no. 15224803
accaccaccacaccacggccagccatctcacaacataagctagccagcatacacgagtccagactacctagctagcgttgccaaggttccaatcatcaatggcgagagcgatcgtgcatgcggccgtcatggccgcggccgcactgttcgtgctgctggccgctgcgccggcgccggcgagcgccattgacttcggcgaccacgacctggcgtcggaggactccctgtgggcgctgtacgagcgctggagggagcagcacacggtggcgcgagacctcggcgagaaagcccgccgcttcaacgtcttcagggagaacgtccgcctcatccacgagttcaaccgcggcgacgccccctacaagctccgcctcaaccgcttcggcgacatgaccgcggacgagttccgccgcgcctacgcctcctcccgcgtctctcaccaccgcatgttcagccgtaaggagggcgatggcggcttcatgcacgggagcgctcgggacgtgccgccttcggtggactggcggcagaagggcgcggtgaccgccgtcaaggaccaggggcagtgcggcagctgctgggctttctccacgatcgcggccgtggagggcgtcaacgcgatccgcaccaagaacctcacgtctctgtccgagcagcagctcgtggactgcgacaccaagtccaacgccggctgcaacggcggcctcatggactacgccttccagtacatcgccaagcacggcggggtcgccgccgaggacgcgtacccctacaaggcccggcaggcctcctcctgcaacaagaagccgtccgccgtggtcaccatcgacgggtacgaggacgtgccggccaacgacgagacggcgctgaagaaggcggtggccgcgcagccggtggccgtggccatcgaggctagcgggtcgcacttccagttctactcggagggggtgtttgcgggcaagtgcgggacggagctggaccatggcgtgacggcggtggggtacggcgccaccgtggacggcaccaagtactggatcgtgaagaactcgtgggggccggagtggggcgaaaaggggtacatccgcatgaagcgcgatgtgaaagacaaggaggggctctgcggcatcgccatggaggcgtcctaccccgtcaagacctcagccaacccgaagcatgccagtgccaatgacgagctctgaatctctcatcgattgtcttacaaattattggccccaatatgcatgatcagggcattatcgctagggaaaaaaataagtagtcaatcgttatgcacccatcacatatagtgcactactacttaattgtttgtactagtaaaacgcccatgcgttgccacgggcttttgaaaaaaatttaagatgcc

SEQ ID NO: 56573 - protein, 364 aa, Glycine max
  peptide (1)..(364): Ceres Seq. ID no. 15224804
  misc_feature (134)..(349): Pfam Name: Papain family cysteine protease Pfam Description: Papain family cysteine protease
  misc_feature (17)..(364): Homolog of NCBI NO: 7435817 NR Description: cysteine endopeptidase (EC 3.4.22.-) precursor -
  misc_feature (11)..(364): Homolog of NCBI NO: 629792 NR Description: cysteine proteinase (EC 3.4.22.-) - rice
  misc_feature (10)..(364): Homolog of NCBI NO: 18423124 NR Description: cysteine proteinase [Arabidopsis thaliana]
  misc_feature (14)..(364): Homolog of NCBI NO: 4100157 NR Description: cysteine proteinase precursor [Hordeum vulgare]
  misc_feature (14)..(364): Homolog of NCBI NO: 7435798 NR Description: probable cysteine proteinase (EC 3.4.22.-)
  misc_feature (18)..(364): Homolog of NCBI NO: 1173630 NR Description: cysteine proteinase
  misc_feature (14)..(364): Homolog of NCBI NO: 7435797 NR Description: cysteine proteinase (EC 3.4.22.-) - barley
  misc_feature (18)..(364): Homolog of NCBI NO: 537437 NR Description: cysteine proteinase [Hemerocallis hybrid cultivar]
  misc_feature (15)..(364): Homolog of NCBI NO: 40806500 NR Description: putative cysteine protease 2 [Iris hollandica]
  misc_feature (27)..(364): Homolog of NCBI NO: 1169186 NR Description: Thiol protease SEN102 precursor
MARAIVHAAVMAAAALFVLLAAAPAPASAIDFGDHDLASEDSLWALYERWREQHTVARDLGEKARRFNVFRENVRLIHEFNRGDAPYKLRLNRFGDMTADEFRRAYASSRVSHHRMFSRKEGDGGFMHGSARDVPPSVDWRQKGAVTAVKDQGQCGSCWAFSTIAAVEGVNAIRTKNLTSLSEQQLVDCDTKSNAGCNGGLMDYAFQYIAKHGGVAAEDAYPYKARQASSCNKKPSAVVTIDGYEDVPANDETALKKAVAAQPVAVAIEASGSHFQFYSEGVFAGKCGTELDHGVTAVGYGATVDGTKYWIVKNSWGPEWGEKGYIRMKRDVKDKEGLCGIAMEASYPVKTSANPKHASANDEL

SEQ ID NO: 56574 - protein, 354 aa, Glycine max
  peptide (1)..(354): Ceres Seq. ID no. 15224805
  misc_feature (124)..(339): Pfam Name: Papain family cysteine protease Pfam Description: Papain family cysteine protease
  misc_feature (7)..(354): Homolog of NCBI NO: 7435817 NR Description: cysteine endopeptidase (EC 3.4.22.-) precursor -
  misc_feature (1)..(354): Homolog of NCBI NO: 629792 NR Description: cysteine proteinase (EC 3.4.22.-) - rice
  misc_feature (1)..(354): Homolog of NCBI NO: 18423124 NR Description: cysteine proteinase [Arabidopsis thaliana]
  misc_feature (4)..(354): Homolog of NCBI NO: 4100157 NR Description: cysteine proteinase precursor [Hordeum vulgare]
  misc_feature (4)..(354): Homolog of NCBI NO: 7435798 NR Description: probable cysteine proteinase (EC 3.4.22.-)
  misc_feature (8)..(354): Homolog of NCBI NO: 1173630 NR Description: cysteine proteinase
  misc_feature (4)..(354): Homolog of NCBI NO: 7435797 NR Description: cysteine proteinase (EC 3.4.22.-) - barley
  misc_feature (8)..(354): Homolog of NCBI NO: 537437 NR Description: cysteine proteinase [Hemerocallis hybrid cultivar]
  misc_feature (5)..(354): Homolog of NCBI NO: 40806500 NR Description: putative cysteine protease 2 [Iris hollandica]
  misc_feature (17)..(354): Homolog of NCBI NO: 1169186 NR Description: Thiol protease SEN102 precursor
MAAAALFVLLAAAPAPASAIDFGDHDLASEDSLWALYERWREQHTVARDLGEKARRFNVFRENVRLIHEFNRGDAPYKLRLNRFGDMTADEFRRAYASSRVSHHRMFSRKEGDGGFMHGSARDVPPSVDWRQKGAVTAVKDQGQCGSCWAFSTIAAVEGVNAIRTKNLTSLSEQQLVDCDTKSNAGCNGGLMDYAFQYIAKHGGVAAEDAYPYKARQASSCNKKPSAVVTIDGYEDVPANDETALKKAVAAQPVAVAIEASGSHFQFYSEGVFAGKCGTELDHGVTAVGYGATVDGTKYWIVKNSWGPEWGEKGYIRMKRDVKDKEGLCGIAMEASYPVKTSANPKHASANDEL

SEQ ID NO: 56575 - protein, 268 aa, Glycine max
  peptide (1)..(268): Ceres Seq. ID no. 15224806
  misc_feature (38)..(253): Pfam Name: Papain family cysteine protease Pfam Description: Papain family cysteine protease
  misc_feature (1)..(268): Homolog of NCBI NO: 7435817 NR Description: cysteine endopeptidase (EC 3.4.22.-) precursor -
  misc_feature (1)..(268): Homolog of NCBI NO: 629792 NR Description: cysteine proteinase (EC 3.4.22.-) - rice
  misc_feature (1)..(268): Homolog of NCBI NO: 18423124 NR Description: cysteine proteinase [Arabidopsis thaliana]
  misc_feature (1)..(268): Homolog of NCBI NO: 4100157 NR Description: cysteine proteinase precursor [Hordeum vulgare]
  misc_feature (1)..(268): Homolog of NCBI NO: 7435798 NR Description: probable cysteine proteinase (EC 3.4.22.-)
  misc_feature (1)..(268): Homolog of NCBI NO: 1173630 NR Description: cysteine proteinase
  misc_feature (1)..(268): Homolog of NCBI NO: 7435797 NR Description: cysteine proteinase (EC 3.4.22.-) - barley
  misc_feature (1)..(268): Homolog of NCBI NO: 537437 NR Description: cysteine proteinase [Hemerocallis hybrid cultivar]
  misc_feature (1)..(268): Homolog of NCBI NO: 40806500 NR Description: putative cysteine protease 2 [Iris hollandica]
  misc_feature (1)..(268): Homolog of NCBI NO: 1169186 NR Description: Thiol protease SEN102 precursor
MTADEFRRAYASSRVSHHRMFSRKEGDGGFMHGSARDVPPSVDWRQKGAVTAVKDQGQCGSCWAFSTIAAVEGVNAIRTKNLTSLSEQQLVDCDTKSNAGCNGGLMDYAFQYIAKHGGVAAEDAYPYKARQASSCNKKPSAVVTIDGYEDVPANDETALKKAVAAQPVAVAIEASGSHFQFYSEGVFAGKCGTELDHGVTAVGYGATVDGTKYWIVKNSWGPEWGEKGYIRMKRDVKDKEGLCGIAMEASYPVKTSANPKHASANDEL

SEQ ID NO: 56576 - DNA, 1318 bp, Glycine max
  misc_feature (1)..(1318): Ceres Seq. ID no. 13639246
atccgtcaaactcccaagaaacccttcagaaccttcctcactctttctctcttcctttttttttctttttttttctataaacctaacctaaccaaaaaacccttttcattattcttcattcatttattcttattcatcttttcattcactcactctcactcatggctgaagatgggaacaacaacgatgtacccttacacaaattcaaagacagcaatccaaaccctgaagagttcgatgcaaagggttacagcctcagcggaaaaatcatgctttcagcaataatccttcttttcttcgtcgtcgttttgatgttgtgccttcatatctacgcgcgctggtacctccggcgtgctcgccgccgccagctccggcgccaacgcgagctccgccgcacccagcttgtcttttacaacgacgacgccacccccgcagccgtgtcacgtggcctcgacgccgccatccttgccacgctccccgtcttcaccttcgacccggaaaaaaccgggccggagtgcgctgtttgcttgtcggagttcgaacccggtgaaacgggtcgggtcttgcccaaatgtaatcacagtttccacatagaatgtattgacatgtggttccattctcatgacacgtgtcctctttgtcgcgccccggttgaacgcgcgccggaaccggaagttgttgttataacagtacccgatccggtttccgaaaccggttcaggcgaaaatgagaaccgaaccggttcttcttcttcttcctcttcggttggattgagtaagcctaagccttcgttggttggtgtgacaattgaggtgcctccgagggacgagaattttcaaaacgagttgcaaccgagttgcgactcatcctcctcgtttcggtcgccgatgagtcgcatgctgtcgtttacgaggatgctcggcagggaaaagaaggggaacgtgtcgccgtcgtcgtgcggcggcggcgattgtagctccgccgcggagcgaggtgagcgagaggagactcagtgagtcggtgactcgggtgctgacgtggcacttgttggaagcggaaaaacttgggttgttggcgcgtggcggtgtgtaatagtgacgtttctggattttaatgtaggcggtgagcggcgcgtgagttaggtggcgcgagatactgacgtagaatggttttgggatgaacataaatgatgtacttattcgttgatatatatattttttctttatttgtttcttatcttcgggttccaaaaatagttaaatagaatacgaaaattgctaattgtaatgcttgcttacatagaaatgaaaccaatttt

SEQ ID NO: 56577 - protein, 284 aa, Glycine max
  peptide (1)..(284): Ceres Seq. ID no. 13639247
  misc_feature (119)..(160): Pfam Name: Zinc finger, C3HC4 type (RING finger) Pfam Description: Zinc finger, C3HC4 type (RING finger)
  misc_feature (37)..(242): Homolog of NCBI NO: 21537244 NR Description: unknown [Arabidopsis thaliana]
  misc_feature (37)..(242): Homolog of NCBI NO: 18414561 NR Description: expressed protein [Arabidopsis thaliana]
  misc_feature (32)..(248): Homolog of NCBI NO: 12003386 NR Description: Avr9/Cf-9 rapidly elicited protein 132 [Nicotiana
  misc_feature (31)..(242): Homolog of NCBI NO: 7485154 NR Description: hypothetical protein - Arabidopsis thaliana
  misc_feature (27)..(226): Homolog of NCBI NO: 15226628 NR Description: hypothetical protein [Arabidopsis thaliana]
  misc_feature (30)..(246): Homolog of NCBI NO: 15228830 NR Description: RING-H2 zinc finger protein ATL5 [Arabidopsis
  misc_feature (30)..(246): Homolog of NCBI NO: 4928401 NR Description: RING-H2 zinc finger protein ATL5 [Arabidopsis
  misc_feature (6)..(263): Homolog of NCBI NO: 25456278 NR Description: probable zinc finger protein [imported] -
  misc_feature (6)..(263): Homolog of NCBI NO: 21593806 NR Description: putative RING zinc finger protein [Arabidopsis
  misc_feature (6)..(263): Homolog of NCBI NO: 15228302 NR Description: RING zinc finger protein -related [Arabidopsis
MAEDGNNNDVPLHKFKDSNPNPEEFDAKGYSLSGKIMLSAIILLFFVVVLMLCLHIYARWYLRRARRRQLRRQRELRRTQLVFYNDDATPAAVSRGLDAAILATLPVFTFDPEKTGPECAVCLSEFEPGETGRVLPKCNHSFHIECIDMWFHSHDTCPLCRAPVERAPEPEVVVITVPDPVSETGSGENENRTGSSSSSSSVGLSKPKPSLVGVTIEVPPRDENFQNELQPSCDSSSSFRSPMSRMLSFTRMLGREKKGNVSPSSCGGGDCSSAAERGEREETQ

SEQ ID NO: 56578 - protein, 248 aa, Glycine max
  peptide (1)..(248): Ceres Seq. ID no. 13639248
  misc_feature (83)..(124): Pfam Name: Zinc finger, C3HC4 type (RING finger) Pfam Description: Zinc finger, C3HC4 type (RING finger)
  misc_feature (1)..(206): Homolog of NCBI NO: 21537244 NR Description: unknown [Arabidopsis thaliana]
  misc_feature (1)..(206): Homolog of NCBI NO: 18414561 NR Description: expressed protein [Arabidopsis thaliana]
  misc_feature (1)..(212): Homolog of NCBI NO: 12003386 NR Description: Avr9/Cf-9 rapidly elicited protein 132 [Nicotiana
  misc_feature (1)..(206): Homolog of NCBI NO: 7485154 NR Description: hypothetical protein - Arabidopsis thaliana
  misc_feature (1)..(190): Homolog of NCBI NO: 15226628 NR Description: hypothetical protein [Arabidopsis thaliana]
  misc_feature (1)..(210): Homolog of NCBI NO: 15228830 NR Description: RING-H2 zinc finger protein ATL5 [Arabidopsis
  misc_feature (1)..(210): Homolog of NCBI NO: 4928401 NR Description: RING-H2 zinc finger protein ATL5 [Arabidopsis
  misc_feature (1)..(227): Homolog of NCBI NO: 21593806 NR Description: putative RING zinc finger protein [Arabidopsis
  misc_feature (1)..(227): Homolog of NCBI NO: 25456278 NR Description: probable zinc finger protein [imported] -
  misc_feature (1)..(227): Homolog of NCBI NO: 15228302 NR Description: RING zinc finger protein -related [Arabidopsis
MLSAIILLFFVVVLMLCLHIYARWYLRRARRRQLRRQRELRRTQLVFYNDDATPAAVSRGLDAAILATLPVFTFDPEKTGPECAVCLSEFEPGETGRVLPKCNHSFHIECIDMWFHSHDTCPLCRAPVERAPEPEVVVITVPDPVSETGSGENENRTGSSSSSSSVGLSKPKPSLVGVTIEVPPRDENFQNELQPSCDSSSSFRSPMSRMLSFTRMLGREKKGNVSPSSCGGGDCSSAAERGEREETQ

SEQ ID NO: 56579 - protein, 234 aa, Glycine max
  peptide (1)..(234): Ceres Seq. ID no. 13639249
  misc_feature (69)..(110): Pfam Name: Zinc finger, C3HC4 type (RING finger) Pfam Description: Zinc finger, C3HC4 type (RING finger)
  misc_feature (1)..(192): Homolog of NCBI NO: 21537244 NR Description: unknown [Arabidopsis thaliana]
  misc_feature (1)..(192): Homolog of NCBI NO: 18414561 NR Description: expressed protein [Arabidopsis thaliana]
  misc_feature (1)..(198): Homolog of NCBI NO: 12003386 NR Description: Avr9/Cf-9 rapidly elicited protein 132 [Nicotiana
  misc_feature (1)..(192): Homolog of NCBI NO: 7485154 NR Description: hypothetical protein - Arabidopsis thaliana
  misc_feature (1)..(176): Homolog of NCBI NO: 15226628 NR Description: hypothetical protein [Arabidopsis thaliana]
  misc_feature (1)..(196): Homolog of NCBI NO: 15228830 NR Description: RING-H2 zinc finger protein ATL5 [Arabidopsis
  misc_feature (1)..(196): Homolog of NCBI NO: 4928401 NR Description: RING-H2 zinc finger protein ATL5 [Arabidopsis
  misc_feature (1)..(213): Homolog of NCBI NO: 21593806 NR Description: putative RING zinc finger protein [Arabidopsis
  misc_feature (1)..(213): Homolog of NCBI NO: 25456278 NR Description: probable zinc finger protein [imported] -
  misc_feature (1)..(213): Homolog of NCBI NO: 15228302 NR Description: RING zinc finger protein -related [Arabidopsis
MLCLHIYARWYLRRARRRQLRRQRELRRTQLVFYNDDATPAAVSRGLDAAILATLPVFTFDPEKTGPECAVCLSEFEPGETGRVLPKCNHSFHIECIDMWFHSHDTCPLCRAPVERAPEPEVVVITVPDPVSETGSGENENRTGSSSSSSSVGLSKPKPSLVGVTIEVPPRDENFQNELQPSCDSSSSFRSPMSRMLSFTRMLGREKKGNVSPSSCGGGDCSSAAERGEREETQ

SEQ ID NO: 56580 - DNA, 782 bp, Glycine max
  misc_feature (1)..(782): Ceres Seq. ID no. 14301420
ccccaccctttcgcctagtgcccctaggccggcctccgggctcgaacccactgctctaacaaataataaatccgcgtacaaatctacccccactgacccagatcatcctcgtccccatccgcccccgccgccgatccgcgccacaattcacatctgacttcccccaattttatcttgcttcgattcgattctcttggttcgttcgtaggggctagggttgggagccgatcgcgcgccgccggagccggtcgatagggttagggttagagtggggaggggctgagatggagaagaagaaggcggcggtgccgctggtctgccacggccactcgcggccggtcgtcgacctgttctacagccccgtcacgcccgacggctacttcctcatcagcgccagcaaggactcaaatccaatgcttcgtaatggtgagactggagattggattgggacttttgaaggtcataaaggtgctgtttggagctgttgccttgacacaaatgctctgcgtgctgcctctggttcagcagacttttcagctaaagtatgggatgcactaacaggtgatgaactacattcatttgaacacaagcatatagtccgtgcgtgtgcgtgtccatgaataaatcttagcttgtctcggcaagctgggtgcgagtcccttgtttgttttttgtatgattattaccagtgtgcatgcgttgttgtttcttgttgggtttatgggattatcccggccggtcaatccttctctcatgtagtaagattttattttgggcaaatc

SEQ ID NO: 56581 - protein, 111 aa, Glycine max
  peptide (1)..(111): Ceres Seq. ID no. 14301421
  misc_feature (7)..(47): Pfam Name: WD domain, G-beta repeat Pfam Description: WD domain, G-beta repeat
  misc_feature (9)..(106): Homolog of NCBI NO: 20149592 NR Description: unr-interacting protein [Homo sapiens]
  misc_feature (9)..(106): Homolog of NCBI NO: 6755682 NR Description: serine/threonine kinase receptor associated
  misc_feature (9)..(106): Homolog of NCBI NO: 4519417 NR Description: WD-40 repeat protein [Homo sapiens]
  misc_feature (9)..(107): Homolog of NCBI NO: 12667270 NR Description: serine-threonine kinase receptor-associated
  misc_feature (9)..(107): Homolog of NCBI NO: 29437263 NR Description: Similar to serine/threonine kinase receptor
  misc_feature (8)..(109): Homolog of NCBI NO: 19922822 NR Description: CG3957-PA [Drosophila melanogaster]
  misc_feature (9)..(109): Homolog of NCBI NO: 18394249 NR Description: transducin / WD-40 repeat protein family
  misc_feature (1)..(109): Homolog of NCBI NO: 15219076 NR Description: unknown protein; protein id: At1g52730.1
  misc_feature (1)..(109): Homolog of NCBI NO: 30695318 NR Description: transducin / WD-40 repeat protein family
  misc_feature (1)..(109): Homolog of NCBI NO: 18400838 NR Description: transducin / WD-40 repeat protein family
MEKKKAAVPLVCHGHSRPVVDLFYSPVTPDGYFLISASKDSNPMLRNGETGDWIGTFEGHKGAVWSCCLDTNALRAASGSADFSAKVWDALTGDELHSFEHKHIVRACACP

SEQ ID NO: 56582 - protein, 68 aa, Glycine max
  peptide (1)..(68): Ceres Seq. ID no. 14301422
  misc_feature (1)..(63): Homolog of NCBI NO: 20149592 NR Description: unr-interacting protein [Homo sapiens]
  misc_feature (1)..(63): Homolog of NCBI NO: 6755682 NR Description: serine/threonine kinase receptor associated
  misc_feature (1)..(63): Homolog of NCBI NO: 4519417 NR Description: WD-40 repeat protein [Homo sapiens]
  misc_feature (1)..(64): Homolog of NCBI NO: 12667270 NR Description: serine-threonine kinase receptor-associated
  misc_feature (1)..(64): Homolog of NCBI NO: 29437263 NR Description: Similar to serine/threonine kinase receptor
  misc_feature (1)..(66): Homolog of NCBI NO: 19922822 NR Description: CG3957-PA [Drosophila melanogaster]
  misc_feature (1)..(66): Homolog of NCBI NO: 18394249 NR Description: transducin / WD-40 repeat protein family
  misc_feature (1)..(66): Homolog of NCBI NO: 15219076 NR Description: unknown protein; protein id: At1g52730.1
  misc_feature (1)..(66): Homolog of NCBI NO: 30695318 NR Description: transducin / WD-40 repeat protein family
  misc_feature (1)..(66): Homolog of NCBI NO: 18400838 NR Description: transducin / WD-40 repeat protein family
MLRNGETGDWIGTFEGHKGAVWSCCLDTNALRAASGSADFSAKVWDALTGDELHSFEHKHIVRACACP

SEQ ID NO: 56583 - DNA, 919 bp, Glycine max
  misc_feature (1)..(919): Ceres Seq. ID no. 13595484
aaatacaaccaacccctctcgccgtctgctcgcttgcccgtccgtccgtccccccaaatccaaccccctccccgcacgaaccccggcggcgtcaccggcgatggagtgcgtcatcggcgtggtcggccgcgacttcgcggtggtggccgcggacacgtccgccgtgcagagcatcctcgtccacaagacggacgaggacaagatcatgctcctcgactcccacaagctcatgggcgcctccggggagcccggcgaccgcgtgcagttcaccgagttcatccagaagaacctccacctctaccagttccgcaacaacatgccgctcagcaccgccgccaccgccaacttcacccgcggcgagctcgccaccgccctccgcaagaatccctactctgtaaacatcatacttgcagggtttgataaagatgctggtgcatcgatgtactacattgactacatcgcaacgctccacaaaattgacaagggagcattcgggtacgggtcgtacttctgtttgtcgctgatggacaagttgtaccgccctgacatgactgtcgaggaagcggtagaccttgttgacaagtgcatcaaggagatcagactccggctggtcgtcgcgcctcagaatttcgccatcaagatcgtggacaaggatggcgccagggactatgctaggcgtgagataggaggtgacagtcctgcagtcgcaaccgcaaccgcaacaatagcaacaactgcctgaggtgattggcgctgtcggtggtcatttggctggctggaggctgaaccctttctgttaattgtttccaagtactgtcactatgtaatcgcaatacgtttcggttcgagaactgtgttgcaaattctcccagatgtggactagtctgtttatgacccctatttcatggttatatgttcc

SEQ ID NO: 56584 - protein, 246 aa, Glycine max
  peptide (1)..(246): Ceres Seq. ID no. 13595485
  misc_feature (34)..(215): Pfam Name: Proteasome A-type and B-type Pfam Description: Proteasome A-type and B-type
  misc_feature (4)..(222): Homolog of NCBI NO: 16758370 NR Description: proteasome (prosome, macropain) subunit, beta
  misc_feature (34)..(222): Homolog of NCBI NO: 30585195 NR Description: Homo sapiens proteasome (prosome, macropain)
  misc_feature (34)..(222): Homolog of NCBI NO: 4506195 NR Description: proteasome beta 2 subunit
  misc_feature (34)..(222): Homolog of NCBI NO: 19113828 NR Description: proteasome component; c7-I subfamily
  misc_feature (34)..(222): Homolog of NCBI NO: 29841035 NR Description: similar to NM_017284 proteasome (prosome,
  misc_feature (34)..(167): Homolog of NCBI NO: 14594929 NR Description: putative beta4 proteasome subunit [Nicotiana
  misc_feature (34)..(227): Homolog of NCBI NO: 15228805 NR Description: 20S proteasome beta subunit D (PBD1) [Arabidopsis
  misc_feature (34)..(226): Homolog of NCBI NO: 15233580 NR Description: 20S proteasome beta subunit D2 (PBD2)
  misc_feature (34)..(243): Homolog of NCBI NO: 17380213 NR Description: Proteasome subunit beta type 2 (20S proteasome
  misc_feature (34)..(243): Homolog of NCBI NO: 27552546 NR Description: 20S proteasome beta 4 subunit
NTTNPSRRLLACPSVRPPKSNPLPARTPAASPAMECVIGVVGRDFAVVAADTSAVQSILVHKTDEDKIMLLDSHKLMGASGEPGDRVQFTEFIQKNLHLYQFRNNMPLSTAATANFTRGELATALRKNPYSVNIILAGFDKDAGASMYYIDYIATLHKIDKGAFGYGSYFCLSLMDKLYRPDMTVEEAVDLVDKCIKEIRLRLVVAPQNFAIKIVDKDGARDYARREIGGDSPAVATATATIATTA

SEQ ID NO: 56585 - protein, 213 aa, Glycine max
  peptide (1)..(213): Ceres Seq. ID no. 13595486
  misc_feature (1)..(182): Pfam Name: Proteasome A-type and B-type Pfam Description: Proteasome A-type and B-type
  misc_feature (1)..(189): Homolog of NCBI NO: 16758370 NR Description: proteasome (prosome, macropain) subunit, beta
  misc_feature (1)..(189): Homolog of NCBI NO: 30585195 NR Description: Homo sapiens proteasome (prosome, macropain)
  misc_feature (1)..(189): Homolog of NCBI NO: 4506195 NR Description: proteasome beta 2 subunit
  misc_feature (1)..(189): Homolog of NCBI NO: 19113828 NR Description: proteasome component; c7-I subfamily
  misc_feature (1)..(189): Homolog of NCBI NO: 29841035 NR Description: similar to NM_017284 proteasome (prosome,
  misc_feature (1)..(134): Homolog of NCBI NO: 14594929 NR Description: putative beta4 proteasome subunit [Nicotiana
  misc_feature (1)..(194): Homolog of NCBI NO: 15228805 NR Description: 20S proteasome beta subunit D (PBD1) [Arabidopsis
  misc_feature (1)..(193): Homolog of NCBI NO: 15233580 NR Description: 20S proteasome beta subunit D2 (PBD2)
  misc_feature (1)..(210): Homolog of NCBI NO: 17380213 NR Description: Proteasome subunit beta type 2 (20S proteasome
  misc_feature (1)..(210): Homolog of NCBI NO: 27552546 NR Description: 20S proteasome beta 4 subunit
MECVIGVVGRDFAVVAADTSAVQSILVHKTDEDKIMLLDSHKLMGASGEPGDRVQFTEFIQKNLHLYQFRNNMPLSTAATANFTRGELATALRKNPYSVNIILAGFDKDAGASMYYIDYIATLHKIDKGAFGYGSYFCLSLMDKLYRPDMTVEEAVDLVDKCIKEIRLRLVVAPQNFAIKIVDKDGARDYARREIGGDSPAVATATATIATTA

SEQ ID NO: 56586 - protein, 178 aa, Glycine max
  peptide (1)..(178): Ceres Seq. ID no. 13595487
  misc_feature (1)..(147): Pfam Name: Proteasome A-type and B-type Pfam Description: Proteasome A-type and B-type
  misc_feature (1)..(154): Homolog of NCBI NO: 16758370 NR Description: proteasome (prosome, macropain) subunit, beta
  misc_feature (1)..(154): Homolog of NCBI NO: 30585195 NR Description: Homo sapiens proteasome (prosome, macropain)
  misc_feature (1)..(154): Homolog of NCBI NO: 4506195 NR Description: proteasome beta 2 subunit
  misc_feature (1)..(154): Homolog of NCBI NO: 19113828 NR Description: proteasome component; c7-I subfamily
  misc_feature (1)..(154): Homolog of NCBI NO: 29841035 NR Description: similar to NM_017284 proteasome (prosome,
  misc_feature (1)..(99): Homolog of NCBI NO: 14594929 NR Description: putative beta4 proteasome subunit [Nicotiana
  misc_feature (1)..(159): Homolog of NCBI NO: 15228805 NR Description: 20S proteasome beta subunit D (PBD1) [Arabidopsis
  misc_feature (1)..(158): Homolog of NCBI NO: 15233580 NR Description: 20S proteasome beta subunit D2 (PBD2)
  misc_feature (1)..(175): Homolog of NCBI NO: 17380213 NR Description: Proteasome subunit beta type 2 (20S proteasome
  misc_feature (1)..(175): Homolog of NCBI NO: 27552546 NR Description: 20S proteasome beta 4 subunit
MLLDSHKLMGASGEPGDRVQFTEFIQKNLHLYQFRNNMPLSTAATANFTRGELATALRKNPYSVNIILAGFDKDAGASMYYIDYIATLHKIDKGAFGYGSYFCLSLMDKLYRPDMTVEEAVDLVDKCIKEIRLRLVVAPQNFAIKIVDKDGARDYARREIGGDSPAVATATATIATTA

SEQ ID NO: 56587 - DNA, 479 bp, Glycine max
  misc_feature (1)..(479): Ceres Seq. ID no. 13595195
gtttgtctatgggcgaatctctccggcaacggcgacctctcttcccctgcgcgtccctcttccggcgttgccaccccgtcgtccatcgctaccagatcgacgaccgccccttcatcctctctggtctctgcagatctacgccggcggcccgccttaccgacggttcttcctagccacgctgaagtctccatcctagagggtagaggcattccatttccttcagttcagtgattgagaatggaaaatggatttcctggcgaagttctgaaggctgtttttcctctactggatggtaaagacttagtcttttgcatgcttgtatgccgccaatggtgcgaaattgcaaaggatgattacttctggaaatgcatctgctcacggaaatggccttccatctgcaagcagcctccttctgacacaaacttccaaaagctctatttaacgttctccaagccacggaagacggtgcaccttcctgt

SEQ ID NO: 56588 - protein, 80 aa, Glycine max
  peptide (1)..(80): Ceres Seq. ID no. 13595196
  misc_feature (5)..(47): Pfam Name: F-box domain Pfam Description: F-box domain
  misc_feature (5)..(79): Homolog of NCBI NO: 15241675 NR Description: F-box protein family [Arabidopsis thaliana]
  misc_feature (1)..(79): Homolog of NCBI NO: 30089733 NR Description: hypothetical protein [Oryza sativa (japonica
MENGFPGEVLKAVFPLLDGKDLVFCMLVCRQWCEIAKDDYFWKCICSRKWPSICKQPPSDTNFQKLYLTFSKPRKTVHLP

SEQ ID NO: 56589 - protein, 76 aa, Glycine max
  peptide (1)..(76): Ceres Seq. ID no. 13595197
VCLWANLSGNGDLSSPARPSSGVATPSSIATRSTTAPSSSLVSADLRRRPALPTVLPSHAEVSILEGRGIPFPSVQ

SEQ ID NO: 56590 - protein, 64 aa, Glycine max
  peptide (1)..(64): Ceres Seq. ID no. 13595198
FVYGRISPATATSLPLRVPLPALPPRRPSLPDRRPPLHPLWSLQIYAGGPPYRRFFLATLKSPS

SEQ ID NO: 56591 - DNA, 1114 bp, Glycine max
  misc_feature (1)..(1114): Ceres Seq. ID no. 12610713
acaacatccatgtcccatacatctttagcagcaagagaactcaaacagtttaattttcttcaaaactagtttttttttggttttagttggtatcctcggaagagagagaaaatgttgggaattttcagcggagctatagtatcattgccggaagagctggtggctgccgggaaccgaactccgtcgccgaagacaaccggatcggtcctagtcaacaagttcgtagagaaaaatccctctgccgtgtccgtacaggtcggcgactacgtgcagcttgcttatagccaccacaaagagagtcctctccggccaaggtcatttggggctaaggatgagatattctgcttgttccaaggctcacttgacaacctaggaagccttaaacaacaatatgggctggcaaagaatgcaaacgaggttctcttggtcattgaggcttacaagactctccgtgacagagctccttacccagccaaccacgtcgtgtcacacctaagtggcgattttgcctttgtggtctttgataaatcaacctccactctgtttgtagcctctgaccaagaaggtaaggtaccattgtactgggggataacagctgatgggtatgtggcatttgctgatgatattgagttgctaaaaggtgcttgtggcaaatctcttgcttctttccctcaaggctgtttttactcgactgccttaggtgggcttaggagctttgagaaccctaagaacaagatcactgccattcctgctagagaggaagaaatttggggagccaccttcaaggtggaaggagcagcagttcttgcacatggagagtgaaagaatcaagatccatctctcttaatatctaaactccaacagcaaacaaaataatgatgtagagaaaacaagaagctgttctatgagtttttttttttttttaaatgttatcaatggttggtgatgatgatgcgtgtagtgtgttctctcttttgtacaatccgtgtccgtctcttctgctgtttgtagtgactttgtcccaataagttatgtctcaaaactcaaaatctaccttctcttgatcctttttttatctcatgttcagatcttgtgtttcttcagtaagtcttgc

SEQ ID NO: 56592 - protein, 236 aa, Glycine max
  peptide (1)..(236): Ceres Seq. ID no. 12610714
  misc_feature (1)..(230): Homolog of NCBI NO: 15228883 NR Description: unknown protein
  misc_feature (1)..(230): Homolog of NCBI NO: 32352176 NR Description: hypothetical protein [Oryza sativa (japonica
  misc_feature (1)..(230): Homolog of NCBI NO: 30017570 NR Description: unknown protein [Oryza sativa (japonica
  misc_feature (1)..(227): Homolog of NCBI NO: 20340249 NR Description: aluminum-induced protein-like protein
  misc_feature (2)..(222): Homolog of NCBI NO: 7489671 NR Description: hypothetical protein wali7 - wheat (fragment)
  misc_feature (1)..(233): Homolog of NCBI NO: 13958130 NR Description: aluminium induced protein [Avicennia marina]
  misc_feature (1)..(236): Homolog of NCBI NO: 7488881 NR Description: hypothetical protein ARG10 - mung bean
  misc_feature (1)..(236): Homolog of NCBI NO: 34541994 NR Description: Al-induced protein [Gossypium hirsutum]
  misc_feature (1)..(233): Homolog of NCBI NO: 15239658 NR Description: aluminium-induced protein - like
  misc_feature (1)..(227): Homolog of NCBI NO: 7488440 NR Description: aluminum-induced protein - rape
MLGIFSGAIVSLPEELVAAGNRTPSPKTTGSVLVNKFVEKNPSAVSVQVGDYVQLAYSHHKESPLRPRSFGAKDEIFCLFQGSLDNLGSLKQQYGLAKNANEVLLVIEAYKTLRDRAPYPANHVVSHLSGDFAFVVFDKSTSTLFVASDQEGKVPLYWGITADGYVAFADDIELLKGACGKSLASFPQGCFYSTALGGLRSFENPKNKITAIPAREEEIWGATFKVEGAAVLAHGE

SEQ ID NO: 56593 - DNA, 1380 bp, Glycine max
  misc_feature (1)..(1380): Ceres Seq. ID no. 15176016
aggaaattgggaaagatactaaaactttccctggaactgagttggagtataattttttcttgttttgcgcacttctcagatgaatccctagtttccttacaaggtcctctgtaccatttacaatggaacatgcagataaaggaaaagaatcatcaaatagtgtaaatgaagtagaagtcactaattctccaattatttgtggccttccagatgatatttctcttatgtgcctggcaagaattccaagaaaatatcattctgtcctgaagtgtgtctcaaagagctggaggaacttgatttgcagtgaagaatggttctgttatcgccgaaagcacaaacttgatgaaacctggatttatgctttgtgcagggacaaatcaaatgagattttctgttatgtattggatccaaccttgtcaagaagatactggaagctcattgataaccttccacctcaaatctcgaaaagaaaaggcataggttttgaagctttgggaaataagctattcttattgggtggttgtagcgagtttctagattctactgatgaggtttattcatatgatgcttcctcaaactgttgggctcaagctacttccttgtcaactgctaggtacaactttggttgtgaagttttggataaaaaactatatgctatcgggggaggaggttcaaagtcaagttatcattcttgggagacttttgaccctttgacaaattgttggacatctcagacagatcctaaaattgttaatgaaattaaagattcagtggttcttgacgggaagatatacgtcgnatgtagcagatatcctgtaactcctcatgtatttgctgttgtatatgaaccatcaagtggcacatgggagtatgcagatgatgacatggtttcaggatggactggtcctgcagttgctgttgatggtaccctttatgtcttggatcagagtgcaggaactaagttaatgatgtggcataaagagagacgcgagtggatactcgttggaaagctatcaccattgcctattagacaaccctgccagcttgttgcagttggtaaaagcattttcattgttgggagagtgcttagcactgtggttgttgatgttgataatttggggaatgaggatcaggtgattgtgggttctgctatacctggattattatttgatgtcaatgtaacaagtgttaaatgcttgtcaaactgaagcattaattagtttgtgggtagtgttatgctatgaaacatgcatcaatgttacatgaaacttttttcttttcttggtacaatcatagtactgaagtttgaaccattggcttatatgtaaattactcaaatccggcacagtttgcattgtcaatcctagtagtattttgcat

SEQ ID NO: 56594 - protein, 361 aa, Glycine max
  peptide (1)..(361): Ceres Seq. ID no. 15176017
  misc_feature (25)..(70): Pfam Name: F-box domain Pfam Description: F-box domain
  misc_feature (21)..(294): Homolog of NCBI NO: 15220452 NR Description: Kelch repeat containing F-box protein family
  misc_feature (22)..(345): Homolog of NCBI NO: 15229392 NR Description: Kelch repeat containing F-box protein family
  misc_feature (1)..(329): Homolog of NCBI NO: 18397351 NR Description: Kelch repeat containing F-box protein family
  misc_feature (12)..(331): Homolog of NCBI NO: 25405811 NR Description: unknown protein, 58496-60308 [imported] -
  misc_feature (12)..(331): Homolog of NCBI NO: 18405298 NR Description: Kelch repeat containing F-box protein family
  misc_feature (9)..(331): Homolog of NCBI NO: 37534254 NR Description: unknown protein [Oryza sativa (japonica
  misc_feature (8)..(331): Homolog of NCBI NO: 19071626 NR Description: putative Kelch motif containing protein
  misc_feature (48)..(360): Homolog of NCBI NO: 10716953 NR Description: SKP1 interacting partner 4 [Arabidopsis thaliana]
  misc_feature (15)..(360): Homolog of NCBI NO: 26453288 NR Description: putative SKP1 interacting partner 4 SKIP4
  misc_feature (15)..(360): Homolog of NCBI NO: 18411974 NR Description: SKP1 interacting partner 4 (SKIP4), putative
  misc_feature (226)..(226): Xaa is any aa, unknown or other
MEHADKGKESSNSVNEVEVTNSPIICGLPDDISLMCLARIPRKYHSVLKCVSKSWRNLICSEEWFCYRRKHKLDETWIYALCRDKSNEIFCYVLDPTLSRRYWKLIDNLPPQISKRKGIGFEALGNKLFLLGGCSEFLDSTDEVYSYDASSNCWAQATSLSTARYNFGCEVLDKKLYAIGGGGSKSSYHSWETFDPLTNCWTSQTDPKIVNEIKDSVVLDGKIYVXCSRYPVTPHVFAVVYEPSSGTWEYADDDMVSGWTGPAVAVDGTLYVLDQSAGTKLMMWHKERREWILVGKLSPLPIRQPCQLVAVGKSIFIVGRVLSTVVVDVDNLGNEDQVIVGSAIPGLLFDVNVTSVKCLSN

SEQ ID NO: 56595 - protein, 327 aa, Glycine max
  peptide (1)..(327): Ceres Seq. ID no. 15176018
  misc_feature (1)..(36): Pfam Name: F-box domain Pfam Description: F-box domain
  misc_feature (1)..(260): Homolog of NCBI NO: 15220452 NR Description: Kelch repeat containing F-box protein family
  misc_feature (1)..(311): Homolog of NCBI NO: 15229392 NR Description: Kelch repeat containing F-box protein family
  misc_feature (1)..(295): Homolog of NCBI NO: 18397351 NR Description: Kelch repeat containing F-box protein family
  misc_feature (1)..(297): Homolog of NCBI NO: 25405811 NR Description: unknown protein, 58496-60308 [imported] -
  misc_feature (1)..(297): Homolog of NCBI NO: 18405298 NR Description: Kelch repeat containing F-box protein family
  misc_feature (1)..(297): Homolog of NCBI NO: 37534254 NR Description: unknown protein [Oryza sativa (japonica
  misc_feature (1)..(297): Homolog of NCBI NO: 19071626 NR Description: putative Kelch motif containing protein
  misc_feature (14)..(326): Homolog of NCBI NO: 10716953 NR Description: SKP1 interacting partner 4 [Arabidopsis thaliana]
  misc_feature (1)..(326): Homolog of NCBI NO: 26453288 NR Description: putative SKP1 interacting partner 4 SKIP4
  misc_feature (1)..(326): Homolog of NCBI NO: 18411974 NR Description: SKP1 interacting partner 4 (SKIP4), putative
  misc_feature (192)..(192): Xaa is any aa, unknown or other
MCLARIPRKYHSVLKCVSKSWRNLICSEEWFCYRRKHKLDETWIYALCRDKSNEIFCYVLDPTLSRRYWKLIDNLPPQISKRKGIGFEALGNKLFLLGGCSEFLDSTDEVYSYDASSNCWAQATSLSTARYNFGCEVLDKKLYAIGGGGSKSSYHSWETFDPLTNCWTSQTDPKIVNEIKDSVVLDGKIYVXCSRYPVTPHVFAVVYEPSSGTWEYADDDMVSGWTGPAVAVDGTLYVLDQSAGTKLMMWHKERREWILVGKLSPLPIRQPCQLVAVGKSIFIVGRVLSTVVVDVDNLGNEDQVIVGSAIPGLLFDVNVTSVKCLSN

SEQ ID NO: 56596 - DNA, 787 bp, Glycine max
  misc_feature (1)..(787): Ceres Seq. ID no. 12610718
gaatcaacctaaaaataaaaccaaaccaaccaatctccttattagaagaagcatgaacatagtctgtgtccgcgctctctatccgccctccaggttgctacatcgtgccgagagatgtagagtgggagggagaaactacgaaaaacctgaactcaagcaaagcaacttctcaaaagacgaagacgatctcatccttaggcttcatgcacttcttggcaatagatggtcattgatagcgggaaggttacctggacgaaccgatactgaaataaggatccattgggaaacttacttaaagaggaaactcatgaaaatgggaatagacccaaccaaccatcgtctctaccatcacgcaaactacatttcaagacaatacctcaattcctctcataagaaacttgaaacagatatcattagtgatcaatcttcttcggtatccgaatcatgtgatatgagaatgttacccgtttcaagtaccaattgctatgatagtgctagtagtagtgctggacatagtcgtttgcctgacctcaacatcagtctcatccccgcggagacggtggtttctcggccagtttgtggccttcaagaatctaacagcaatggttcaacgcgtcaagaaacgcttcttcttttccagtgaaatcggatattttattgctacataaaaatgaaaaatggtgtatttatctgtactattttgctagatatttttttttttgtaattttactagataaaaatactcaattgagaggataataaatgatgttcaaaattttcaacccg

SEQ ID NO: 56597 - protein, 213 aa, Glycine max
  peptide (1)..(213): Ceres Seq. ID no. 12610719
  misc_feature (53)..(98): Pfam Name: Myb-like DNA-binding domain Pfam Description: Myb-like DNA-binding domain
  misc_feature (22)..(157): Homolog of NCBI NO: 82308 NR Description: myb-related protein 308 - garden snapdragon
  misc_feature (22)..(181): Homolog of NCBI NO: 2129933 NR Description: myb-related protein TMH27 - tomato
  misc_feature (22)..(181): Homolog of NCBI NO: 28628961 NR Description: MYB8 [Dendrobium sp. XMW-2002-8]
  misc_feature (22)..(121): Homolog of NCBI NO: 23476317 NR Description: myb-like transcription factor 6 [Gossypioides
  misc_feature (22)..(148): Homolog of NCBI NO: 23476313 NR Description: myb-like transcription factor 6 [Gossypium
  misc_feature (22)..(148): Homolog of NCBI NO: 23476311 NR Description: myb-like transcription factor 6 [Gossypium
  misc_feature (22)..(148): Homolog of NCBI NO: 23476315 NR Description: myb-like transcription factor 6 [Gossypium
  misc_feature (22)..(148): Homolog of NCBI NO: 7446161 NR Description: myb-related protein - upland cotton
  misc_feature (18)..(186): Homolog of NCBI NO: 2129650 NR Description: myb-related 24.7K transcription factor -
  misc_feature (18)..(213): Homolog of NCBI NO: 15223923 NR Description: myb family transcription factor
NQPKNKTKPTNLLIRRSMNIVCVRALYPPSRLLHRAERCRVGGRNYEKPELKQSNFSKDEDDLILRLHALLGNRWSLIAGRLPGRTDTEIRIHWETYLKRKLMKMGIDPTNHRLYHHANYISRQYLNSSHKKLETDIISDQSSSVSESCDMRMLPVSSTNCYDSASSSAGHSRLPDLNISLIPAETVVSRPVCGLQESNSNGSTRQETLLLFQ

SEQ ID NO: 56598 - protein, 196 aa, Glycine max
  peptide (1)..(196): Ceres Seq. ID no. 12610720
  misc_feature (36)..(81): Pfam Name: Myb-like DNA-binding domain Pfam Description: Myb-like DNA-binding domain
  misc_feature (5)..(140): Homolog of NCBI NO: 82308 NR Description: myb-related protein 308 - garden snapdragon
  misc_feature (5)..(164): Homolog of NCBI NO: 2129933 NR Description: myb-related protein TMH27 - tomato
  misc_feature (5)..(164): Homolog of NCBI NO: 28628961 NR Description: MYB8 [Dendrobium sp. XMW-2002-8]
  misc_feature (5)..(104): Homolog of NCBI NO: 23476317 NR Description: myb-like transcription factor 6 [Gossypioides
  misc_feature (5)..(131): Homolog of NCBI NO: 23476313 NR Description: myb-like transcription factor 6 [Gossypium
  misc_feature (5)..(131): Homolog of NCBI NO: 23476311 NR Description: myb-like transcription factor 6 [Gossypium
  misc_feature (5)..(131): Homolog of NCBI NO: 23476315 NR Description: myb-like transcription factor 6 [Gossypium
  misc_feature (5)..(131): Homolog of NCBI NO: 7446161 NR Description: myb-related protein - upland cotton
  misc_feature (1)..(169): Homolog of NCBI NO: 2129650 NR Description: myb-related 24.7K transcription factor -
  misc_feature (1)..(196): Homolog of NCBI NO: 15223923 NR Description: myb family transcription factor
MNIVCVRALYPPSRLLHRAERCRVGGRNYEKPELKQSNFSKDEDDLILRLHALLGNRWSLIAGRLPGRTDTEIRIHWETYLKRKLMKMGIDPTNHRLYHHANYISRQYLNSSHKKLETDIISDQSSSVSESCDMRMLPVSSTNCYDSASSSAGHSRLPDLNISLIPAETVVSRPVCGLQESNSNGSTRQETLLLFQ

SEQ ID NO: 56599 - protein, 111 aa, Glycine max
  peptide (1)..(111): Ceres Seq. ID no. 12610721
  misc_feature (1)..(55): Homolog of NCBI NO: 82308 NR Description: myb-related protein 308 - garden snapdragon
  misc_feature (1)..(79): Homolog of NCBI NO: 2129933 NR Description: myb-related protein TMH27 - tomato
  misc_feature (1)..(79): Homolog of NCBI NO: 28628961 NR Description: MYB8 [Dendrobium sp. XMW-2002-8]
  misc_feature (1)..(19): Homolog of NCBI NO: 23476317 NR Description: myb-like transcription factor 6 [Gossypioides
  misc_feature (1)..(46): Homolog of NCBI NO: 23476313 NR Description: myb-like transcription factor 6 [Gossypium
  misc_feature (1)..(46): Homolog of NCBI NO: 23476311 NR Description: myb-like transcription factor 6 [Gossypium
  misc_feature (1)..(46): Homolog of NCBI NO: 23476315 NR Description: myb-like transcription factor 6 [Gossypium
  misc_feature (1)..(46): Homolog of NCBI NO: 7446161 NR Description: myb-related protein - upland cotton
  misc_feature (1)..(84): Homolog of NCBI NO: 2129650 NR Description: myb-related 24.7K transcription factor -
  misc_feature (1)..(111): Homolog of NCBI NO: 15223923 NR Description: myb family transcription factor
MKMGIDPTNHRLYHHANYISRQYLNSSHKKLETDIISDQSSSVSESCDMRMLPVSSTNCYDSASSSAGHSRLPDLNISLIPAETVVSRPVCGLQESNSNGSTRQETLLLFQ

SEQ ID NO: 56600 - DNA, 1352 bp, Glycine max
  misc_feature (1)..(1352): Ceres Seq. ID no. 12611506
aaaaaccaaaaccctagcgaggttggttcccaattcccatggtttctcacccgaaatcgaagttcagtgtctatcaaaacccttccttttcggcggttctcacttccaacagtcttcaaccttccaagttcaccatcctctccttcttctctgcctccgcattcgcttttctcgctgtcttcttcagggaaaacggcttcgtccacattttgagcttcgcagctttttcccctgtcacagcttgtaagtttccaacctcaatttttttaattagggtaatttctgatccctttattgaacttcagattggcttgccaagacgctacaagctatagtgggttttatcttcattgtttctgcactcttcaaagttgtgtttctgcgtagagttaggtatgctggtggaggtgttgttgcggctaagtctctgtctgatgctaacagcgttcataggaatgagattttgctaacaaaacatcaattagggcttttaggagtgaagccaaaggttgatttggctcaacctgattcagcaaagaagccccccaagtctaaacttcaactgccttcttcagatttgcttgttccccttcaccggccaattcccagtcccactcagggttcttcgtctagcattgatgccgatggttcaaattctaataggggtggtgctgctcgttctattggtactccatcgaggtagtcaggttcggtgtcattctatctttcgccaggttcggtttcgcctccaaggggttcggctggagtggattcagcattttcgagtccttggtctaacaggcaagcctcctctgttactaagataacggctgaagaaaagctggagaaattcatagctgaagtggatgaaaggatcaatgagtctgctgggaagatgtctaccccgcctcctattgtttctggttttggcatagtgagccctattacagttacaggctcaaccaatacctctggaactgctaggcgtacgtcattgaggcttgtgaggatgtctccgggctcgcaaaagtttaacactccccctaagaagggtgagggcaagtttcctgcaccaatgtccatggaagaatctgttcaagcttttgaacatcttggcatctatcctcaaattgaacagtggcatgatcaactctggcaatggttttctttgcttctgctcaatcctttgcttaacaagattgagacaagtcacattaaggtttcttttattcttcatttcttctcttatgttcaaagcaaggttaaacaaacaagaaaaatattgactttggaagtcaatatatgtgatggcaacaataattttcaatgacagacaaagtagtatttgatgt

SEQ ID NO: 56601 - protein, 144 aa, Glycine max
  peptide (1)..(144): Ceres Seq. ID no. 12611507
  misc_feature (1)..(109): Homolog of NCBI NO: 15223059 NR Description: hypothetical protein; protein id: At1g07970.1
MSTPPPIVSGFGIVSPITVTGSTNTSGTARRTSLRLVRMSPGSQKFNTPPKKGEGKFPAPMSMEESVQAFEHLGIYPQIEQWHDQLWQWFSLLLLNPLLNKIETSHIKVSFILHFFSYVQSKVKQTRKILTLEVNICDGNNNFQ

SEQ ID NO: 56602 - protein, 106 aa, Glycine max
  peptide (1)..(106): Ceres Seq. ID no. 12611508
  misc_feature (1)..(71): Homolog of NCBI NO: 15223059 NR Description: hypothetical protein; protein id: At1g07970.1
MSPGSQKFNTPPKKGEGKFPAPMSMEESVQAFEHLGIYPQIEQWHDQLWQWFSLLLLNPLLNKIETSHIKVSFILHFFSYVQSKVKQTRKILTLEVNICDGNNNFQ

SEQ ID NO: 56603 - protein, 98 aa, Glycine max
  peptide (1)..(98): Ceres Seq. ID no. 12611509
  misc_feature (5)..(68): Homolog of NCBI NO: 15223059 NR Description: hypothetical protein; protein id: At1g07970.1
MVSHPKSKFSVYQNPSFSAVLTSNSLQPSKFTILSFFSASAFAFLAVFFRENGFVHILSFAAFSPVTACKFPTSIFLIRVISDPFIELQIGLPRRYKL

SEQ ID NO: 56604 - DNA, 882 bp, Glycine max
  misc_feature (1)..(882): Ceres Seq. ID no. 13639080
agcaagcagctgatccgagttaaccattagccaaaagtaatcttgcttttccatttcccgagagagctcagttcgtgtctgcactccagtccagtgtttgtttgagcagcagccatggcctccaaccaggacaaggcaagctaccgcgccggcgaggccaaggcccacaccgaggagaaggccggacaggtgaccggcgcggccaaggacgaggcgtgcgacgccaaggaccgggcgtcgggcgcggcggggcaagcgacggggaaggggcagggcgccgtggaggccacgaagcagaaggccggcgaggcggggcagaagacgtccgagacggcgcaggccggcaaggaccgggccgccgagggcaaggaccggaccggcagctacctcggccacgcgaccgaggggaccaagcagaaggcctccgaggcgacggggtacacgcaggacagggcttccgacgcggcgcagtacaccaaggactccgccgtcgccggcaaggacaagaccggcagcgtcctcagccaggccggcgagcaggtgaagaacgcggtggtcggcgcgaaagacgcggtggcgagcacgctggggatggggggagacaacacctccagcgcaaccaaggacgcgagcaccaccgagaccatcaccaagagccgtcactagattatacctgtcgcggttgcataatgctttctttccttcagttcccctcgagctccacattcctgtggtgtgtccgagtctctatgtcgaggtcgggcgagaatgtctgactgacgagagatgtatcttggtgttcagagttctcgttttaagttccacaatggtgtaataataacaataataataaagtactgcgtaccgtaagtaatttcgtcc

SEQ ID NO: 56605 - protein, 183 aa, Glycine max
  peptide (1)..(183): Ceres Seq. ID no. 13639081
  misc_feature (79)..(152): Pfam Name: Late embryogenesis abundant protein Pfam Description: Late embryogenesis abundant protein
  misc_feature (1)..(183): Homolog of NCBI NO: 7387828 NR Description: Late embryogenesis abundant protein, group 3
  misc_feature (1)..(183): Homolog of NCBI NO: 25989705 NR Description: LEA1 protein [Triticum aestivum]
  misc_feature (1)..(180): Homolog of NCBI NO: 25989707 NR Description: LEA3 protein [Triticum aestivum]
  misc_feature (1)..(180): Homolog of NCBI NO: 33342178 NR Description: ABA inducible protein [Triticum aestivum]
  misc_feature (1)..(183): Homolog of NCBI NO: 25989709 NR Description: LEA2 protein [Triticum aestivum]
  misc_feature (1)..(178): Homolog of NCBI NO: 126081 NR Description: ABA-inducible protein PHV A1
  misc_feature (1)..(174): Homolog of NCBI NO: 4929080 NR Description: ABA-inducible protein WRAB1 [Triticum aestivum]
  misc_feature (1)..(181): Homolog of NCBI NO: 7489569 NR Description: protein LEA type 1 - rice
  misc_feature (1)..(181): Homolog of NCBI NO: 4105441 NR Description: group 3 LEA protein [Oryza sativa]
  misc_feature (1)..(181): Homolog of NCBI NO: 7489493 NR Description: LEA protein - rice
MASNQDKASYRAGEAKAHTEEKAGQVTGAAKDEACDAKDRASGAAGQATGKGQGAVEATKQKAGEAGQKTSETAQAGKDRAAEGKDRTGSYLGHATEGTKQKASEATGYTQDRASDAAQYTKDSAVAGKDKTGSVLSQAGEQVKNAVVGAKDAVASTLGMGGDNTSSATKDASTTETITKSRH

SEQ ID NO: 56606 - DNA, 1706 bp, Glycine max
  misc_feature (1)..(1706): Ceres Seq. ID no. 13595201
aggcaccacacaacacaacttccttgtgcagccaccattattgttgttattggagatttcaattctctgtctttcaaactcctcaagttgggtttatgtgatgatggctctcaacatctcttctccagctgaagtcaagtccatttttttcgctgattccttcaagtctaactgcctcacagcaaaattctcaggtgggtttgcttttaagagaaaagagcgtagagcagcatctggaggacgggtttattgctcagtgcaggcaacaccaccaccaccagcctggccgggacgagcggttccggaacaaggtcgtaagacttgggatggaccaaaacccatttcaattgtggggagtactggttcaattggaactcagacactagatattgtggcagagaatccagataagtttaaagttgtggcacttgcagctggttcaaatgttactcttcttgcagaccaggtaaaaagatttaagcctcaacttgttgctgttagaaatgagtccctaattgctgaacttgaagaggccttgcatgatgttgaagaaaaacctgagatcatccctggagagcagggaatcattgaggttgctcgtcacccagatgcagttagtgtagtcacaggaatagtaggctgtgcaggactgaagccaacmgttgcagcgatagaagcagggaaagacatagctttggccaacaaagagacattgattgctggaggtccttttgttcttcctcttgctcagaagcataatgtaaaaatacttccagctgattcagaacattctgccatctttcagtgtatccaggggttgccagagggtgcacttaggagagttattttaactgcatctggaggtgctttcagggattggccagttgataaactgaaagatgttaaagttgctgatgcattaaaacatcctaactggaatatggggaaaaagataactgtggactctgctaccctttttaataagggtctagaagtaattgaagcacattacttgtttggagctgactacgatcatattgagattgtcattcatccacaatcaatcatacattcaatgattgaaacacaggattcatctgttcttgcacaattggggtggcctgatatgcgtttgccaatcctctatacattatcatggcctgacaggatttattgttctgaagtcacttggccacgccttgatctttgcaagcttggttcacttacatttaaaactccagataatgtaaagtatccatccatgaatcttgcattttctgctggccgtgctggaggcacaatgacaggagttcttagtgcagcaaatgaaaaagctgtagagatgtttattgatgaaaagattagctatttggatatattcaaagttgtggagctaacatgtgagaagcatcaaaatgaattggtatcctctccttcccttgaggaaattattcactatgacctgtgggcgcgaaaatatgctgctagtctgcaagactcttccagcttcactcctattcttgcatgaggatgattaaactagggatgtggctgatgcttcccaattgcctgctttcaccataatttcttcgggcattgaacaatgtagaatggtgcattccacagatgttgaaaattaaataggttttttgtttatggaatgttggtgttttaacacctttcaattgatcttatagttttgtcgt

SEQ ID NO: 56607 - protein, 508 aa, Glycine max
  peptide (1)..(508): Ceres Seq. ID no. 15221510
  misc_feature (114)..(494): Pfam Name: 1-deoxy-D-xylulose 5-phosphate reductoisomerase Pfam Description: 1-deoxy-D-xylulose 5-phosphate reductoisomerase
  misc_feature (35)..(507): Homolog of NCBI NO: 8134417 NR Description: 1-deoxy-D-xylulose 5-phosphate reductoisomerase, precursor (DXP reductoisomerase) (1-deoxyxylulose-5-phosphate
  misc_feature (67)..(508): Homolog of NCBI NO: 34996397 NR Description: putative 1-deoxy-D-xylulose 5-phosphate
  misc_feature (35)..(507): Homolog of NCBI NO: 9800656 NR Description: 1-deoxy-D-xylulose-5-phosphate reductoisomerase
  misc_feature (35)..(506): Homolog of NCBI NO: 22797429 NR Description: 1-deoxy-D-xylulose 5-phosphate reductoisomerase
  misc_feature (35)..(506): Homolog of NCBI NO: 17225989 NR Description: 1-deoxy-D-xylulose 5-phosphate reductoisomerase
  misc_feature (35)..(506): Homolog of NCBI NO: 34894108 NR Description: 1-deoxy-d-xylulose-5-phosphate reductoisomerase
  misc_feature (34)..(508): Homolog of NCBI NO: 9801280 NR Description: putative 1-deoxy-D-xylulose 5-phosphate
  misc_feature (35)..(507): Homolog of NCBI NO: 7621710 NR Description: 1-deoxy-D-xylulose-5-phosphate reductoisomerase
  misc_feature (34)..(508): Homolog of NCBI NO: 15241970 NR Description: 1-deoxy-D-xylulose 5-phosphate reductoisomerase
  misc_feature (35)..(507): Homolog of NCBI NO: 15679908 NR Description: 1-deoxy-D-xylulose-5-phosphate reductoisomerase
  misc_feature (220)..(220): Xaa is any aa, unknown or other
GTTQHNFLVQPPLLLLLEISILCLSNSSSWVYVMMALNISSPAEVKSIFFADSFKSNCLTAKFSGGFAFKRKERRAASGGRVYCSVQATPPPPAWPGRAVPEQGRKTWDGPKPISIVGSTGSIGTQTLDIVAENPDKFKVVALAAGSNVTLLADQVKRFKPQLVAVRNESLIAELEEALHDVEEKPEIIPGEQGIIEVARHPDAVSVVTGIVGCAGLKPXVAAIEAGKDIALANKETLIAGGPFVLPLAQKHNVKILPADSEHSAIFQCIQGLPEGALRRVILTASGGAFRDWPVDKLKDVKVADALKHPNWNMGKKITVDSATLFNKGLEVIEAHYLFGADYDHIEIVIHPQSIIHSMIETQDSSVLAQLGWPDMRLPILYTLSWPDRIYCSEVTWPRLDLCKLGSLTFKTPDNVKYPSMNLAFSAGRAGGTMTGVLSAANEKAVEMFIDEKISYLDIFKVVELTCEKHQNELVSSPSLEEIIHYDLWARKYAASLQDSSSFTPILA

SEQ ID NO: 56608 - protein, 475 aa, Glycine max
  peptide (1)..(475): Ceres Seq. ID no. 15221511
  misc_feature (81)..(461): Pfam Name: 1-deoxy-D-xylulose 5-phosphate reductoisomerase Pfam Description: 1-deoxy-D-xylulose 5-phosphate reductoisomerase
  misc_feature (2)..(474): Homolog of NCBI NO: 8134417 NR Description: 1-deoxy-D-xylulose 5-phosphate reductoisomerase, precursor (DXP reductoisomerase) (1-deoxyxylulose-5-phosphate
  misc_feature (34)..(475): Homolog of NCBI NO: 34996397 NR Description: putative 1-deoxy-D-xylulose 5-phosphate
  misc_feature (2)..(474): Homolog of NCBI NO: 9800656 NR Description: 1-deoxy-D-xylulose-5-phosphate reductoisomerase
  misc_feature (2)..(473): Homolog of NCBI NO: 22797429 NR Description: 1-deoxy-D-xylulose 5-phosphate reductoisomerase
  misc_feature (2)..(473): Homolog of NCBI NO: 17225989 NR Description: 1-deoxy-D-xylulose 5-phosphate reductoisomerase
  misc_feature (2)..(473): Homolog of NCBI NO: 34894108 NR Description: 1-deoxy-d-xylulose-5-phosphate reductoisomerase
  misc_feature (1)..(475): Homolog of NCBI NO: 9801280 NR Description: putative 1-deoxy-D-xylulose 5-phosphate
  misc_feature (2)..(474): Homolog of NCBI NO: 7621710 NR Description: 1-deoxy-D-xylulose-5-phosphate reductoisomerase
  misc_feature (1)..(475): Homolog of NCBI NO: 15241970 NR Description: 1-deoxy-D-xylulose 5-phosphate reductoisomerase
  misc_feature (2)..(474): Homolog of NCBI NO: 15679908 NR Description: 1-deoxy-D-xylulose-5-phosphate reductoisomerase
  misc_feature (187)..(187): Xaa is any aa, unknown or other
MMALNISSPAEVKSIFFADSFKSNCLTAKFSGGFAFKRKERRAASGGRVYCSVQATPPPPAWPGRAVPEQGRKTWDGPKPISIVGSTGSIGTQTLDIVAENPDKFKVVALAAGSNVTLLADQVKRFKPQLVAVRNESLIAELEEALHDVEEKPEIIPGEQGIIEVARHPDAVSVVTGIVGCAGLKPXVAAIEAGKDIALANKETLIAGGPFVLPLAQKHNVKILPADSEHSAIFQCIQGLPEGALRRVILTASGGAFRDWPVDKLKDVKVADALKHPNWNMGKKITVDSATLFNKGLEVIEAHYLFGADYDHIEIVIHPQSIIHSMIETQDSSVLAQLGWPDMRLPILYTLSWPDRIYCSEVTWPRLDLCKLGSLTFKTPDNVKYPSMNLAFSAGRAGGTMTGVLSAANEKAVEMFIDEKISYLDIFKVVELTCEKHQNELVSSPSLEEIIHYDLWARKYAASLQDSSSFTPILA

SEQ ID NO: 56609 - protein, 474 aa, Glycine max
  peptide (1)..(474): Ceres Seq. ID no. 15221512
  misc_feature (80)..(460): Pfam Name: 1-deoxy-D-xylulose 5-phosphate reductoisomerase Pfam Description: 1-deoxy-D-xylulose 5-phosphate reductoisomerase
  misc_feature (1)..(473): Homolog of NCBI NO: 8134417 NR Description: 1-deoxy-D-xylulose 5-phosphate reductoisomerase, precursor (DXP reductoisomerase) (1-deoxyxylulose-5-phosphate
  misc_feature (33)..(474): Homolog of NCBI NO: 34996397 NR Description: putative 1-deoxy-D-xylulose 5-phosphate
  misc_feature (1)..(473): Homolog of NCBI NO: 9800656 NR Description: 1-deoxy-D-xylulose-5-phosphate reductoisomerase
  misc_feature (1)..(472): Homolog of NCBI NO: 22797429 NR Description: 1-deoxy-D-xylulose 5-phosphate reductoisomerase
  misc_feature (1)..(472): Homolog of NCBI NO: 17225989 NR Description: 1-deoxy-D-xylulose 5-phosphate reductoisomerase
  misc_feature (1)..(472): Homolog of NCBI NO: 34894108 NR Description: 1-deoxy-d-xylulose-5-phosphate reductoisomerase
  misc_feature (1)..(474): Homolog of NCBI NO: 9801280 NR Description: putative 1-deoxy-D-xylulose 5-phosphate
  misc_feature (1)..(473): Homolog of NCBI NO: 7621710 NR Description: 1-deoxy-D-xylulose-5-phosphate reductoisomerase
  misc_feature (1)..(474): Homolog of NCBI NO: 15241970 NR Description: 1-deoxy-D-xylulose 5-phosphate reductoisomerase
  misc_feature (1)..(473): Homolog of NCBI NO: 15679908 NR Description: 1-deoxy-D-xylulose-5-phosphate reductoisomerase
  misc_feature (186)..(186): Xaa is any aa, unknown or other
MALNISSPAEVKSIFFADSFKSNCLTAKFSGGFAFKRKERRAASGGRVYCSVQATPPPPAWPGRAVPEQGRKTWDGPKPISIVGSTGSIGTQTLDIVAENPDKFKVVALAAGSNVTLLADQVKRFKPQLVAVRNESLIAELEEALHDVEEKPEIIPGEQGIIEVARHPDAVSVVTGIVGCAGLKPXVAAIEAGKDIALANKETLIAGGPFVLPLAQKHNVKILPADSEHSAIFQCIQGLPEGALRRVILTASGGAFRDWPVDKLKDVKVADALKHPNWNMGKKITVDSATLFNKGLEVIEAHYLFGADYDHIEIVIHPQSIIHSMIETQDSSVLAQLGWPDMRLPILYTLSWPDRIYCSEVTWPRLDLCKLGSLTFKTPDNVKYPSMNLAFSAGRAGGTMTGVLSAANEKAVEMFIDEKISYLDIFKVVELTCEKHQNELVSSPSLEEIIHYDLWARKYAASLQDSSSFTPILA

SEQ ID NO: 56610 - DNA, 1168 bp, Glycine max
  misc_feature (1)..(1168): Ceres Seq. ID no. 13639102
acttgttcttctctagctaccttatcatcataaaaacgagaaacgaatgattcacattagccaaaactaaacgccgctctatttccgtctcattttcactcactatggcttcggatgagaccatgaactttcactcttgttcgttacacgaagatgactttgatgatgatgatgatgatcacccccacaacttgtcgaggctctccgtgtgcactggcagcacctttggtgtcgacgacgatgttgacaatctggcctccatgtgcgtgtcacacttgtccatcgaaagcttcgacgcagatggtgagttatcatccgactcagaaaacgaattgggaagttgttactctctgccctctacgcccccacgaatgaggaaacagcttaaggactatgccagtgacaatgggaatgaaattacaaacaagagtgatccacggagaaggagaagatcctttaggagggagaggtgggggtttgagaagactaagatcaggaaagaggaggggcttagtggggatagtgatcaaagtggtgtcatgctcataactagacccaaaggtggaattaggtctctttgcatggacttggaagaagttaaggcttgtagagatcttggatttgagttggaacacgaacgtatgcttgagatcccttctcgtctctctttttccaattccacacttgacactagcagtggtagcaactctcccatcgccaattggcgtatctctgctccaggtgatgatccacgagacgtgaaggcacggctcaaagtgtgggcgcaggcggtggcacttgcgtctgcctcaaaatacggcacatgaattcaattttcttctaactcgttcttgctttttgttcgattgagactatatgttatagcgtattagtataatataagcctttttgtcttcccactatgattggtggttgtatcattttgttgtagattttaggttgtttttttcccactaggagtgttgaggtttcaggtggaagttcgttttttgagtgatggtcacttttgttctgtacagtagtagtgtttgaataaaatgaagaggccgtgattggagaaagtaaagtagtgtgtgcatagctagtgaaaatatgtagtaccaatgtgaacgcccaaagaaaaaacactggtgaaatttttggattc

SEQ ID NO: 56611 - protein, 240 aa, Glycine max
  peptide (1)..(240): Ceres Seq. ID no. 13639103
  misc_feature (155)..(231): Homolog of NCBI NO: 30684991 NR Description: expressed protein [Arabidopsis thaliana]
  misc_feature (202)..(231): Homolog of NCBI NO: 26451183 NR Description: unknown protein [Arabidopsis thaliana]
  misc_feature (155)..(232): Homolog of NCBI NO: 15221309 NR Description: expressed protein [Arabidopsis thaliana]
  misc_feature (155)..(231): Homolog of NCBI NO: 30689349 NR Description: expressed protein [Arabidopsis thaliana]
  misc_feature (155)..(231): Homolog of NCBI NO: 25406874 NR Description: hypothetical protein [imported] - Arabidopsis
  misc_feature (95)..(213): Homolog of NCBI NO: 25334719 NR Description: hypothetical protein AT4g01670 [imported] -
  misc_feature (84)..(240): Homolog of NCBI NO: 34902536 NR Description: P0581F09.27 [Oryza sativa (japonica
  misc_feature (1)..(214): Homolog of NCBI NO: 15226471 NR Description: expressed protein [Arabidopsis thaliana]
  misc_feature (95)..(238): Homolog of NCBI NO: 30678941 NR Description: expressed protein [Arabidopsis thaliana]
  misc_feature (29)..(237): Homolog of NCBI NO: 15228678 NR Description: expressed protein [Arabidopsis thaliana]
MASDETMNFHSCSLHEDDFDDDDDDHPHNLSRLSVCTGSTFGVDDDVDNLASMCVSHLSIESFDADGELSSDSENELGSCYSLPSTPPRMRKQLKDYASDNGNEITNKSDPRRRRRSFRRERWGFEKTKIRKEEGLSGDSDQSGVMLITRPKGGIRSLCMDLEEVKACRDLGFELEHERMLEIPSRLSFSNSTLDTSSGSNSPIANWRISAPGDDPRDVKARLKVWAQAVALASASKYGT

SEQ ID NO: 56612 - protein, 234 aa, Glycine max
  peptide (1)..(234): Ceres Seq. ID no. 13639104
  misc_feature (149)..(225): Homolog of NCBI NO: 30684991 NR Description: expressed protein [Arabidopsis thaliana]
  misc_feature (196)..(225): Homolog of NCBI NO: 26451183 NR Description: unknown protein [Arabidopsis thaliana]
  misc_feature (149)..(226): Homolog of NCBI NO: 15221309 NR Description: expressed protein [Arabidopsis thaliana]
  misc_feature (149)..(225): Homolog of NCBI NO: 30689349 NR Description: expressed protein [Arabidopsis thaliana]
  misc_feature (149)..(225): Homolog of NCBI NO: 25406874 NR Description: hypothetical protein [imported] - Arabidopsis
  misc_feature (89)..(207): Homolog of NCBI NO: 25334719 NR Description: hypothetical protein AT4g01670 [imported] -
  misc_feature (78)..(234): Homolog of NCBI NO: 34902536 NR Description: P0581F09.27 [Oryza sativa (japonica
  misc_feature (1)..(208): Homolog of NCBI NO: 15226471 NR Description: expressed protein [Arabidopsis thaliana]
  misc_feature (89)..(232): Homolog of NCBI NO: 30678941 NR Description: expressed protein [Arabidopsis thaliana]
  misc_feature (23)..(231): Homolog of NCBI NO: 15228678 NR Description: expressed protein [Arabidopsis thaliana]
MNFHSCSLHEDDFDDDDDDHPHNLSRLSVCTGSTFGVDDDVDNLASMCVSHLSIESFDADGELSSDSENELGSCYSLPSTPPRMRKQLKDYASDNGNEITNKSDPRRRRRSFRRERWGFEKTKIRKEEGLSGDSDQSGVMLITRPKGGIRSLCMDLEEVKACRDLGFELEHERMLEIPSRLSFSNSTLDTSSGSNSPIANWRISAPGDDPRDVKARLKVWAQAVALASASKYGT

SEQ ID NO: 56613 - protein, 188 aa, Glycine max
  peptide (1)..(188): Ceres Seq. ID no. 13639105
  misc_feature (103)..(179): Homolog of NCBI NO: 30684991 NR Description: expressed protein [Arabidopsis thaliana]
  misc_feature (150)..(179): Homolog of NCBI NO: 26451183 NR Description: unknown protein [Arabidopsis thaliana]
  misc_feature (103)..(180): Homolog of NCBI NO: 15221309 NR Description: expressed protein [Arabidopsis thaliana]
  misc_feature (103)..(179): Homolog of NCBI NO: 30689349 NR Description: expressed protein [Arabidopsis thaliana]
  misc_feature (103)..(179): Homolog of NCBI NO: 25406874 NR Description: hypothetical protein [imported] - Arabidopsis
  misc_feature (43)..(161): Homolog of NCBI NO: 25334719 NR Description: hypothetical protein AT4g01670 [imported] -
  misc_feature (32)..(188): Homolog of NCBI NO: 34902536 NR Description: P0581F09.27 [Oryza sativa (japonica
  misc_feature (1)..(162): Homolog of NCBI NO: 15226471 NR Description: expressed protein [Arabidopsis thaliana]
  misc_feature (43)..(186): Homolog of NCBI NO: 30678941 NR Description: expressed protein [Arabidopsis thaliana]
  misc_feature (1)..(185): Homolog of NCBI NO: 15228678 NR Description: expressed protein [Arabidopsis thaliana]
MCVSHLSIESFDADGELSSDSENELGSCYSLPSTPPRMRKQLKDYASDNGNEITNKSDPRRRRRSFRRERWGFEKTKIRKEEGLSGDSDQSGVMLITRPKGGIRSLCMDLEEVKACRDLGFELEHERMLEIPSRLSFSNSTLDTSSGSNSPIANWRISAPGDDPRDVKARLKVWAQAVALASASKYGT

SEQ ID NO: 56614 - DNA, 1221 bp, Glycine max
  misc_feature (1)..(1221): Ceres Seq. ID no. 13505291
aacgtgccctctctcacctcctgcacgttctccctcttttctctcaccatcagaaagcgctttttttttttttttttcttctacctccgtttctccgtctccacatttctccttcacgaactcccgatttttcttcctcttcaatctcgtccctctctgtctctccatccttaaatatacacaacatcttctaaggagaaaggggttccgaaagttacgataaaataaaaatggatccaaacgcggtgaagtccactctctccaatctggcgtttggaaacgtaatggcggcagctgcccgtgattatcagaaggaattgcatgctcaagagaagacacatgcatcaagttcagtacatcaggaggttgaccttgacgagttaatggatgatcctgagttggaaaaattgcatgcagataggattgcagctcttaagaaagaagcagagaaacgggaggaatggaagaagaaaggtcatggagaatttagggaagtaaccgagggtgatttcttaggcgaagtcacaggaagtgaaaaagtgatttgtcacttctaccataaggagttctatagatgcaagataatggataagcatttaaagtctcttgcaccaaagcatatcgatacaaagttcatcaagcttgatgcagagaatgcaccattctttgttacaaaactggctatcaagactttaccctgcgtcatactgttcagacaaggagtagcagtagatagattggtaggatttcaagatgtgggaggtaaagatgattttaccacaagaacgctggaggctctgctgataaagaaaggtataattgaggtgaagaaagctgaggatgatgaagatgatgaatatcaagacagtacacgtagagttgtaagatcctccatgattgctggttctgattctgattctgattaaaattaatcagctggtggcattaaaagaagaatcctctgtttatcttcttcatatccttttggatttcgggcttgtataatctttgctgcacttgtggtttgtttgcttttgggaagtggtttgatgaatccatagcaatcatacagaagctatactgcgctacaactgttgtatgaacctgtccctgtaggaaattgctaacgtttctcgcatccgaggggtatcaaaagttagaacttcatttgtaacagtagaaattgatataggttttctaaaatggatttaattattgttc

SEQ ID NO: 56615 - protein, 231 aa, Glycine max
  peptide (1)..(231): Ceres Seq. ID no. 13505292
  misc_feature (37)..(188): Homolog of NCBI NO: 2342477 NR Description: ATP binding protein [Homo sapiens]
  misc_feature (19)..(231): Homolog of NCBI NO: 28277604 NR Description: Similar to ATP binding protein associated with
  misc_feature (37)..(200): Homolog of NCBI NO: 19683948 NR Description: Similar to ATP binding protein associated with
  misc_feature (37)..(231): Homolog of NCBI NO: 18104959 NR Description: ATP binding protein associated with cell
  misc_feature (35)..(188): Homolog of NCBI NO: 25282435 NR Description: ES cell-related protein; ATP binding protein
  misc_feature (35)..(188): Homolog of NCBI NO: 25286717 NR Description: ATP binding protein associated with cell
  misc_feature (19)..(229): Homolog of NCBI NO: 7485705 NR Description: hypothetical protein F18B3.240 - Arabidopsis
  misc_feature (1)..(231): Homolog of NCBI NO: 10177522 NR Description: contains similarity to ATP binding protein
  misc_feature (1)..(231): Homolog of NCBI NO: 18425069 NR Description: expressed protein [Arabidopsis thaliana]
  misc_feature (1)..(229): Homolog of NCBI NO: 30693386 NR Description: expressed protein [Arabidopsis thaliana]
MDPNAVKSTLSNLAFGNVMAAAARDYQKELHAQEKTHASSSVHQEVDLDELMDDPELEKLHADRIAALKKEAEKREEWKKKGHGEFREVTEGDFLGEVTGSEKVICHFYHKEFYRCKIMDKHLKSLAPKHIDTKFIKLDAENAPFFVTKLAIKTLPCVILFRQGVAVDRLVGFQDVGGKDDFTTRTLEALLIKKGIIEVKKAEDDEDDEYQDSTRRVVRSSMIAGSDSDSD

SEQ ID NO: 56616 - protein, 213 aa, Glycine max
  peptide (1)..(213): Ceres Seq. ID no. 13505293
  misc_feature (19)..(170): Homolog of NCBI NO: 2342477 NR Description: ATP binding protein [Homo sapiens]
  misc_feature (1)..(213): Homolog of NCBI NO: 28277604 NR Description: Similar to ATP binding protein associated with
  misc_feature (19)..(182): Homolog of NCBI NO: 19683948 NR Description: Similar to ATP binding protein associated with
  misc_feature (19)..(213): Homolog of NCBI NO: 18104959 NR Description: ATP binding protein associated with cell
  misc_feature (17)..(170): Homolog of NCBI NO: 25282435 NR Description: ES cell-related protein; ATP binding protein
  misc_feature (17)..(170): Homolog of NCBI NO: 25286717 NR Description: ATP binding protein associated with cell
  misc_feature (1)..(211): Homolog of NCBI NO: 7485705 NR Description: hypothetical protein F18B3.240 - Arabidopsis
  misc_feature (1)..(213): Homolog of NCBI NO: 10177522 NR Description: contains similarity to ATP binding protein
  misc_feature (1)..(213): Homolog of NCBI NO: 18425069 NR Description: expressed protein [Arabidopsis thaliana]
  misc_feature (1)..(211): Homolog of NCBI NO: 30693386 NR Description: expressed protein [Arabidopsis thaliana]
MAAAARDYQKELHAQEKTHASSSVHQEVDLDELMDDPELEKLHADRIAALKKEAEKREEWKKKGHGEFREVTEGDFLGEVTGSEKVICHFYHKEFYRCKIMDKHLKSLAPKHIDTKFIKLDAENAPFFVTKLAIKTLPCVILFRQGVAVDRLVGFQDVGGKDDFTTRTLEALLIKKGIIEVKKAEDDEDDEYQDSTRRVVRSSMIAGSDSDSD

SEQ ID NO: 56617 - protein, 180 aa, Glycine max
  peptide (1)..(180): Ceres Seq. ID no. 13505294
  misc_feature (1)..(137): Homolog of NCBI NO: 2342477 NR Description: ATP binding protein [Homo sapiens]
  misc_feature (1)..(180): Homolog of NCBI NO: 28277604 NR Description: Similar to ATP binding protein associated with
  misc_feature (1)..(149): Homolog of NCBI NO: 19683948 NR Description: Similar to ATP binding protein associated with
  misc_feature (1)..(180): Homolog of NCBI NO: 18104959 NR Description: ATP binding protein associated with cell
  misc_feature (1)..(137): Homolog of NCBI NO: 25282435 NR Description: ES cell-related protein; ATP binding protein
  misc_feature (1)..(137): Homolog of NCBI NO: 25286717 NR Description: ATP binding protein associated with cell
  misc_feature (1)..(178): Homolog of NCBI NO: 7485705 NR Description: hypothetical protein F18B3.240 - Arabidopsis
  misc_feature (1)..(180): Homolog of NCBI NO: 10177522 NR Description: contains similarity to ATP binding protein
  misc_feature (1)..(180): Homolog of NCBI NO: 18425069 NR Description: expressed protein [Arabidopsis thaliana]
  misc_feature (1)..(178): Homolog of NCBI NO: 30693386 NR Description: expressed protein [Arabidopsis thaliana]
MDDPELEKLHADRIAALKKEAEKREEWKKKGHGEFREVTEGDFLGEVTGSEKVICHFYHKEFYRCKIMDKHLKSLAPKHIDTKFIKLDAENAPFFVTKLAIKTLPCVILFRQGVAVDRLVGFQDVGGKDDFTTRTLEALLIKKGIIEVKKAEDDEDDEYQDSTRRVVRSSMIAGSDSDSD

SEQ ID NO: 56618 - DNA, 1064 bp, Glycine max
  misc_feature (1)..(1064): Ceres Seq. ID no. 14302012
agcactttcgccgctgctctccgctttcatagggtttatctctttcctcttcccctctcgcgcacggcagccggattccctaccgcaggcgagccaccacgccggccggagctcggagataaggtagttgtttagcaagcaatcgagaatgtcgtcggtgcagctctccggtgccggtgttgccacggtggccttcaacaacactggtctgcgcccctctcaggcgtcagcagtcagagtgtgctcatcgaggcgctcatctcgtagcctcgttgtcagggctgccactgtcgtcaccccgaagtatacatcactcaagcctctgggagacagagtgcttgtgaagcttagcgcagctgaggagaagaccattggtggaattttgcttccatcctccgcgcagtccaagcctcagggaggcgagattgttgctgttggagggggtagaaccattggggataagaaggtggaggtcagcataccgactggatctcaagttgtatattcaaagtatgctggtactgaggttgaatacaacaactccaagcatcttattatgaaagaggatgacatcataggtattcttgaatctgatgatgtcaaagacatgaagcctctcaatgaccggattctcatcaaggttgcagaggcttcagacaagactgaagctggtcttatcctcaccgagacaaccaaggagaagccatccattggaacagtcgtagctgttggtccgggctctcttgacgaggaaggcaagaggcagccattgccagtgtcaccaggcagcaccgtgctgtactccaagtacgcaggcggcgagttcaagggagctgatggcacgaactacattgtgttgagagtgtctgatgtgatggctgagctctcttaagtgtgtggtttattactttgtttcagttttgagttcacgatataggctagcatgagtggtaagattgctatgtgataaccacttgatgctgtttcggatgattacggaattgtacgagcaaacctgttgtctgggataaaaacatttactgaatttgtttacaaagggagcc

SEQ ID NO: 56619 - protein, 247 aa, Glycine max
  peptide (1)..(247): Ceres Seq. ID no. 14302013
  misc_feature (152)..(247): Pfam Name: Chaperonin 10 Kd subunit Pfam Description: Chaperonin 10 Kd subunit
  misc_feature (56)..(147): Homolog of NCBI NO: 15895961 NR Description: Co-chaperonin GroES, HSP10 family [Clostridium
  misc_feature (55)..(147): Homolog of NCBI NO: 23474135 NR Description: hypothetical protein [Desulfovibrio desulfuricans
  misc_feature (151)..(244): Homolog of NCBI NO: 22297730 NR Description: 10kD chaperonin [Thermosynechococcus elongatus
  misc_feature (56)..(147): Homolog of NCBI NO: 20807075 NR Description: Co-chaperonin GroES (HSP10) [Thermoanaerobacter
  misc_feature (56)..(147): Homolog of NCBI NO: 2493659 NR Description: 10 kDa chaperonin (Protein Cpn10) (groES protein)
  misc_feature (19)..(247): Homolog of NCBI NO: 399241 NR Description: 20 kDa chaperonin, chloroplast precursor (Protein (Chloroplast protein Cpn10) (Chloroplast chaperonin 10)
  misc_feature (1)..(247): Homolog of NCBI NO: 21780187 NR Description: cp10-like protein [Gossypium hirsutum]
  misc_feature (1)..(247): Homolog of NCBI NO: 7331143 NR Description: chaperonin 21 precursor [Lycopersicon esculentum]
  misc_feature (1)..(247): Homolog of NCBI NO: 25453528 NR Description: chaperonin 10 [imported] - Arabidopsis thaliana
  misc_feature (1)..(247): Homolog of NCBI NO: 15242045 NR Description: chloroplast Cpn21 protein [Arabidopsis thaliana]
MSSVQLSGAGVATVAFNNTGLRPSQASAVRVCSSRRSSRSLVVRAATVVTPKYTSLKPLGDRVLVKLSAAEEKTIGGILLPSSAQSKPQGGEIVAVGGGRTIGDKKVEVSIPTGSQVVYSKYAGTEVEYNNSKHLIMKEDDIIGILESDDVKDMKPLNDRILIKVAEASDKTEAGLILTETTKEKPSIGTVVAVGPGSLDEEGKRQPLPVSPGSTVLYSKYAGGEFKGADGTNYIVLRVSDVMAELS

SEQ ID NO: 56620 - DNA, 1497 bp, Glycine max
  misc_feature (1)..(1497): Ceres Seq. ID no. 13582369
atctatctctcttcgaatcccctcccccttaacaagttagcactcatgattccctcttcactccgatccactcgcatataacaacccttatttctccattgcaaggttcataaaagcacaggaatggaattaagcgcggagtattttaaaattcataacgatgtagacttatttttttaagaaaatctaaatgtataccgtattatttttacaaaaagaacgaacttggatgagcccgttttttctaacccttataagaaagtatgagtggttgaattagaaaaaattaatagcggcatcacatcgaagctcaatagttaatagcggcctctcgccggcaagaggtggtcgcagcggtggttctgagcattgggagctgacagtggcagcaccgttgctttctgtttcagtttattttaattgatttgtgccttcttgcttctccgtcctcgtcaaggtgtccatggctgaagattcaaggaaacgcacattggaggctttggagagaagaatagcttttgctaaagttgaagttctccaaaaagaaaagaaaaacaaaaagactataaatgaagatgggaaactacctattcctgcagattctacttctaatgatccttccccacatttgttgcattcatcatcagtctcatccaagaaagggaatttcagtttctctggtcataccactttgcaagacattgaagatggtccagcatatgcccaactttctgtgcctgtaaatggaaatctgctcacaactaatgaggagttttctgctgaaagaggaggttcaattgatggcatattgcatgagcttcttcagaagggagatgcagcacataagtacatgcaaggatctagaaacatgaaaattgacaactggatccttcttgataattatgtacaaggacgggtgctttcctctggttctcaagctagggctttgcaacttcattcaaaacgctctaagaaacacatgtctatgaaacggcataagaaggatggatcattagatcttcctcaagagttccagaaatttgatattttcaagccaatgcacgaaatgtggaaagattacataatgttgcttcttaaatccactgggaaaaatcaattggctcaatgtctccttggtgcagatctacatggtgcttttattttagttgtggagtgtaaaataacccattttactggaatttgtggcatcatgattcgtgaaactgcagaagcatttgggataattactgaagataataaattccgagttgttcccaaaaaggtttctgtgtttgtattccaagttgattgctggaaagtcactctgcatggagataaacttggttcaagaaaggttggattatgatattggtgataatccttcaactgtagaatatccacgtgacacctgtgcaatttgaaagtcccaagcagtctatgggagaaagggaaaagtttgattgctgatttgtatcagtagagaagttggaggttgct

SEQ ID NO: 56621 - protein, 300 aa, Glycine max
  peptide (1)..(300): Ceres Seq. ID no. 13582370
  misc_feature (216)..(296): Pfam Name: Domain of unknown function UPF0086 Pfam Description: Domain of unknown function UPF0086
  misc_feature (165)..(296): Homolog of NCBI NO: 21430298 NR Description: LD45688p [Drosophila melanogaster]
  misc_feature (154)..(296): Homolog of NCBI NO: 39579971 NR Description: Hypothetical protein CBG23842 [Caenorhabditis
  misc_feature (167)..(296): Homolog of NCBI NO: 5729986 NR Description: POP4 (processing of precursor , S. cerevisiae)
  misc_feature (167)..(296): Homolog of NCBI NO: 4309676 NR Description: ribonuclease P protein subunit p29 [Homo sapiens]
  misc_feature (167)..(296): Homolog of NCBI NO: 13384772 NR Description: RIKEN cDNA 1110023P21 [Mus musculus]
  misc_feature (167)..(296): Homolog of NCBI NO: 34855765 NR Description: similar to POP4 (processing of precursor , S.
  misc_feature (233)..(275): Homolog of NCBI NO: 25370825 NR Description: hypothetical protein At2g43190 [imported] -
  misc_feature (1)..(233): Homolog of NCBI NO: 25370825 NR Description: hypothetical protein At2g43190 [imported] -
  misc_feature (1)..(296): Homolog of NCBI NO: 30689290 NR Description: expressed protein [Arabidopsis thaliana]
  misc_feature (1)..(296): Homolog of NCBI NO: 18406178 NR Description: expressed protein [Arabidopsis thaliana]
MAEDSRKRTLEALERRIAFAKVEVLQKEKKNKKTINEDGKLPIPADSTSNDPSPHLLHSSSVSSKKGNFSFSGHTTLQDIEDGPAYAQLSVPVNGNLLTTNEEFSAERGGSIDGILHELLQKGDAAHKYMQGSRNMKIDNWILLDNYVQGRVLSSGSQARALQLHSKRSKKHMSMKRHKKDGSLDLPQEFQKFDIFKPMHEMWKDYIMLLLKSTGKNQLAQCLLGADLHGAFILVVECKITHFTGICGIMIRETAEAFGIITEDNKFRVVPKKVSVFVFQVDCWKVTLHGDKLGSRKVGL

SEQ ID NO: 56622 - protein, 171 aa, Glycine max
  peptide (1)..(171): Ceres Seq. ID no. 13582371
  misc_feature (87)..(167): Pfam Name: Domain of unknown function UPF0086 Pfam Description: Domain of unknown function UPF0086
  misc_feature (36)..(167): Homolog of NCBI NO: 21430298 NR Description: LD45688p [Drosophila melanogaster]
  misc_feature (25)..(167): Homolog of NCBI NO: 39579971 NR Description: Hypothetical protein CBG23842 [Caenorhabditis
  misc_feature (38)..(167): Homolog of NCBI NO: 5729986 NR Description: POP4 (processing of precursor , S. cerevisiae)
  misc_feature (38)..(167): Homolog of NCBI NO: 4309676 NR Description: ribonuclease P protein subunit p29 [Homo sapiens]
  misc_feature (38)..(167): Homolog of NCBI NO: 13384772 NR Description: RIKEN cDNA 1110023P21 [Mus musculus]
  misc_feature (38)..(167): Homolog of NCBI NO: 34855765 NR Description: similar to POP4 (processing of precursor , S.
  misc_feature (104)..(146): Homolog of NCBI NO: 25370825 NR Description: hypothetical protein At2g43190 [imported] -
  misc_feature (1)..(104): Homolog of NCBI NO: 25370825 NR Description: hypothetical protein At2g43190 [imported] -
  misc_feature (1)..(167): Homolog of NCBI NO: 30689290 NR Description: expressed protein [Arabidopsis thaliana]
  misc_feature (1)..(167): Homolog of NCBI NO: 18406178 NR Description: expressed protein [Arabidopsis thaliana]
MQGSRNMKIDNWILLDNYVQGRVLSSGSQARALQLHSKRSKKHMSMKRHKKDGSLDLPQEFQKFDIFKPMHEMWKDYIMLLLKSTGKNQLAQCLLGADLHGAFILVVECKITHFTGICGIMIRETAEAFGIITEDNKFRVVPKKVSVFVFQVDCWKVTLHGDKLGSRKVGL

SEQ ID NO: 56623 - protein, 165 aa, Glycine max
  peptide (1)..(165): Ceres Seq. ID no. 13582372
  misc_feature (81)..(161): Pfam Name: Domain of unknown function UPF0086 Pfam Description: Domain of unknown function UPF0086
  misc_feature (30)..(161): Homolog of NCBI NO: 21430298 NR Description: LD45688p [Drosophila melanogaster]
  misc_feature (19)..(161): Homolog of NCBI NO: 39579971 NR Description: Hypothetical protein CBG23842 [Caenorhabditis
  misc_feature (32)..(161): Homolog of NCBI NO: 5729986 NR Description: POP4 (processing of precursor , S. cerevisiae)
  misc_feature (32)..(161): Homolog of NCBI NO: 4309676 NR Description: ribonuclease P protein subunit p29 [Homo sapiens]
  misc_feature (32)..(161): Homolog of NCBI NO: 13384772 NR Description: RIKEN cDNA 1110023P21 [Mus musculus]
  misc_feature (32)..(161): Homolog of NCBI NO: 34855765 NR Description: similar to POP4 (processing of precursor , S.
  misc_feature (98)..(140): Homolog of NCBI NO: 25370825 NR Description: hypothetical protein At2g43190 [imported] -
  misc_feature (1)..(98): Homolog of NCBI NO: 25370825 NR Description: hypothetical protein At2g43190 [imported] -
  misc_feature (1)..(161): Homolog of NCBI NO: 30689290 NR Description: expressed protein [Arabidopsis thaliana]
  misc_feature (1)..(161): Homolog of NCBI NO: 18406178 NR Description: expressed protein [Arabidopsis thaliana]
MKIDNWILLDNYVQGRVLSSGSQARALQLHSKRSKKHMSMKRHKKDGSLDLPQEFQKFDIFKPMHEMWKDYIMLLLKSTGKNQLAQCLLGADLHGAFILVVECKITHFTGICGIMIRETAEAFGIITEDNKFRVVPKKVSVFVFQVDCWKVTLHGDKLGSRKVGL

SEQ ID NO: 56624 - DNA, 983 bp, Glycine max
  misc_feature (1)..(983): Ceres Seq. ID no. 13595495
atctttcattcgtgcctgaagcagcagccattgcccattgctaaccagagtggagtggtagagcagttcgagtttgcttttctctcttgcttgattgatcggtgcctcgatccatcgttcgtcggaggtgcatatagttagcgaggaattctccggccggccaccggcgacgacgaccgcaagtgatccgtgaggatggtgaacacgacggcggctatggtgagcggcggcggcaagggcggcgtgctgccgctggcgtccctgaaccacatcagcatagtgtgcaggtcggtggaggagtcgctcgacttctacatgaacgtcctcgggttcacccccatccgccgccccggctctttcgacttcgacggcgcatggctgttcaactacgggatcggcatccacctgctgcagtcggagcatcccgagagcttaccggcgaagaaggagatcaaccccaaggataaccacatctccttccagtgcgagagcatggtggcggtggagcggcggctcaaggagctgggcatcccgtacatccagcggtgcgtggaggagggcggcatctacgtcgaccagatcttcttccacgaccccgacggcttcatgatcgagatctgcaactgcgacaagctcccggtcgtcccgctcgccggccagaccttcgccatggccgcctgcaagagggtcgcctccgtcaagcaacagcagctgcccatgccagtcgcacaagtagcgcaagcaacccccgctccggcggcggccgcggcttcgcagtgcattccggcgccgaacccggccttgcagcgcgtcggcggcgaggaggcggcgcatatctcgtgcgcgtgaggggtggggggccggggtagccaggccgcccaactggtgggtggcgcgctccgtggagttgtggtttttgtacattgtgatatgacattgtgcgtatgaataaagcgagaggagcagagtgtagtttcagcttc

SEQ ID NO: 56625 - protein, 217 aa, Glycine max
  peptide (1)..(217): Ceres Seq. ID no. 15221592
  misc_feature (22)..(141): Pfam Name: Glyoxalase/Bleomycin resistance Pfam Description: Glyoxalase/Bleomycin resistance
  misc_feature (20)..(140): Homolog of NCBI NO: 34899880 NR Description: OJ1714_H10.23 [Oryza sativa (japonica
  misc_feature (20)..(140): Homolog of NCBI NO: 33146737 NR Description: unknown protein [Oryza sativa (japonica
  misc_feature (18)..(154): Homolog of NCBI NO: 34899038 NR Description: hypothetical protein~similar to Arabidopsis
  misc_feature (18)..(154): Homolog of NCBI NO: 34395261 NR Description: glyoxalase family-like protein
  misc_feature (19)..(151): Homolog of NCBI NO: 15529260 NR Description: At2g28420/T1B3.6 [Arabidopsis thaliana]
  misc_feature (19)..(151): Homolog of NCBI NO: 18401734 NR Description: glyoxalase family protein (lactoylglutathione
  misc_feature (15)..(182): Homolog of NCBI NO: 18394235 NR Description: glyoxalase family protein (lactoylglutathione
  misc_feature (15)..(177): Homolog of NCBI NO: 25406639 NR Description: hypothetical protein F18B13.24 [imported] -
  misc_feature (15)..(177): Homolog of NCBI NO: 18412683 NR Description: glyoxalase family protein (lactoylglutathione
  misc_feature (1)..(208): Homolog of NCBI NO: 34910246 NR Description: OSJNBa0089K24.9 [Oryza sativa (japonica
MVNTTAAMVSGGGKGGVLPLASLNHISIVCRSVEESLDFYMNVLGFTPIRRPGSFDFDGAWLFNYGIGIHLLQSEHPESLPAKKEINPKDNHISFQCESMVAVERRLKELGIPYIQRCVEEGGIYVDQIFFHDPDGFMIEICNCDKLPVVPLAGQTFAMAACKRVASVKQQQLPMPVAQVAQATPAPAAAAASQCIPAPNPALQRVGGEEAAHISCA

SEQ ID NO: 56626 - protein, 210 aa, Glycine max
  peptide (1)..(210): Ceres Seq. ID no. 15221593
  misc_feature (15)..(134): Pfam Name: Glyoxalase/Bleomycin resistance Pfam Description: Glyoxalase/Bleomycin resistance
  misc_feature (13)..(133): Homolog of NCBI NO: 34899880 NR Description: OJ1714_H10.23 [Oryza sativa (japonica
  misc_feature (13)..(133): Homolog of NCBI NO: 33146737 NR Description: unknown protein [Oryza sativa (japonica
  misc_feature (11)..(147): Homolog of NCBI NO: 34899038 NR Description: hypothetical protein~similar to Arabidopsis
  misc_feature (11)..(147): Homolog of NCBI NO: 34395261 NR Description: glyoxalase family-like protein
  misc_feature (12)..(144): Homolog of NCBI NO: 15529260 NR Description: At2g28420/T1B3.6 [Arabidopsis thaliana]
  misc_feature (12)..(144): Homolog of NCBI NO: 18401734 NR Description: glyoxalase family protein (lactoylglutathione
  misc_feature (8)..(175): Homolog of NCBI NO: 18394235 NR Description: glyoxalase family protein (lactoylglutathione
  misc_feature (8)..(170): Homolog of NCBI NO: 25406639 NR Description: hypothetical protein F18B13.24 [imported] -
  misc_feature (8)..(170): Homolog of NCBI NO: 18412683 NR Description: glyoxalase family protein (lactoylglutathione
  misc_feature (1)..(201): Homolog of NCBI NO: 34910246 NR Description: OSJNBa0089K24.9 [Oryza sativa (japonica
MVSGGGKGGVLPLASLNHISIVCRSVEESLDFYMNVLGFTPIRRPGSFDFDGAWLFNYGIGIHLLQSEHPESLPAKKEINPKDNHISFQCESMVAVERRLKELGIPYIQRCVEEGGIYVDQIFFHDPDGFMIEICNCDKLPVVPLAGQTFAMAACKRVASVKQQQLPMPVAQVAQATPAPAAAAASQCIPAPNPALQRVGGEEAAHISCA

SEQ ID NO: 56627 - protein, 177 aa, Glycine max
  peptide (1)..(177): Ceres Seq. ID no. 15221594
  misc_feature (1)..(101): Pfam Name: Glyoxalase/Bleomycin resistance Pfam Description: Glyoxalase/Bleomycin resistance
  misc_feature (1)..(100): Homolog of NCBI NO: 34899880 NR Description: OJ1714_H10.23 [Oryza sativa (japonica
  misc_feature (1)..(100): Homolog of NCBI NO: 33146737 NR Description: unknown protein [Oryza sativa (japonica
  misc_feature (1)..(114): Homolog of NCBI NO: 34899038 NR Description: hypothetical protein~similar to Arabidopsis
  misc_feature (1)..(114): Homolog of NCBI NO: 34395261 NR Description: glyoxalase family-like protein
  misc_feature (1)..(111): Homolog of NCBI NO: 15529260 NR Description: At2g28420/T1B3.6 [Arabidopsis thaliana]
  misc_feature (1)..(111): Homolog of NCBI NO: 18401734 NR Description: glyoxalase family protein (lactoylglutathione
  misc_feature (1)..(142): Homolog of NCBI NO: 18394235 NR Description: glyoxalase family protein (lactoylglutathione
  misc_feature (1)..(137): Homolog of NCBI NO: 25406639 NR Description: hypothetical protein F18B13.24 [imported] -
  misc_feature (1)..(137): Homolog of NCBI NO: 18412683 NR Description: glyoxalase family protein (lactoylglutathione
  misc_feature (1)..(168): Homolog of NCBI NO: 34910246 NR Description: OSJNBa0089K24.9 [Oryza sativa (japonica
MNVLGFTPIRRPGSFDFDGAWLFNYGIGIHLLQSEHPESLPAKKEINPKDNHISFQCESMVAVERRLKELGIPYIQRCVEEGGIYVDQIFFHDPDGFMIEICNCDKLPVVPLAGQTFAMAACKRVASVKQQQLPMPVAQVAQATPAPAAAAASQCIPAPNPALQRVGGEEAAHISCA

SEQ ID NO: 56628 - DNA, 913 bp, Glycine max
  misc_feature (1)..(913): Ceres Seq. ID no. 14302544
ccgtctctgatctcttatcactcactctctctctcccctaactcgccaagcagctacaatggccgttaccttctcagatctacacacagagcagggtgtcaagtccgtggaggagcacctcgccggaaaaacctacatctccggagatcagttgactgtggatgatgtgaaggtatacgctgccatcgtggagaaaccgagcgatgccttccctaatgctagcaagtggtacgattccgtcgcgtcccaccttgctaaaagtttccctggtaaggccgtaggagtttcaatcggtggctctgctgcttctgctcctgctcaagctgaggcacctgcagctgtagctgatgatgatgatgacatggatctgtttggtgacgagaccgaggaggaaaagaaagccgcagaggagagggaggcttctaagaaggacaccaagaagcccaaagagagtggaaagtcatctgtgctcatggaggtcaagccatgggatgacgagactgacatgaagaaacttgaggagtgtgtccgcgctgttgagatgcctggtcttctatggggagcttcaaaactggttccagttggttacgggatcaagaagctcactatcatgctcacaattgttgatgacctcgtgtccccggacaatctcatcgaagactacctcacctgtgagcctaacaacgagtacatccagagtgttgacatcgtcgcattcaacaagatctagagactttaagttgtctccctaccaaaagatacttgatttccttccaagttttgttctttttttttgtgttgttttgcttgagatgtttattttctagtagcaagacctctttcatgttgcagaaaacataaactatcaacgctttactattccttttgccattactaaaaaaaaaaaaaaaac

SEQ ID NO: 56629 - protein, 223 aa, Glycine max
  peptide (1)..(223): Ceres Seq. ID no. 14302545
  misc_feature (134)..(223): Pfam Name: EF-1 guanine nucleotide exchange domain Pfam Description: EF-1 guanine nucleotide exchange domain
  misc_feature (1)..(223): Homolog of NCBI NO: 6166140 NR Description: ELONGATION FACTOR 1-BETA (EF-1-BETA)
  misc_feature (1)..(223): Homolog of NCBI NO: 38232568 NR Description: translational elongation factor 1 subunit Bbeta
  misc_feature (1)..(223): Homolog of NCBI NO: 6015064 NR Description: ELONGATION FACTOR 1-BETA (EF-1-BETA)
  misc_feature (1)..(223): Homolog of NCBI NO: 232033 NR Description: ELONGATION FACTOR 1-BETA' (EF-1-BETA')
  misc_feature (1)..(223): Homolog of NCBI NO: 34899162 NR Description: putative translation elongation factor eEF-1
  misc_feature (1)..(223): Homolog of NCBI NO: 232031 NR Description: ELONGATION FACTOR 1-BETA' (EF-1-BETA')
  misc_feature (1)..(223): Homolog of NCBI NO: 38175744 NR Description: putative translation elongation factor eEF-1
  misc_feature (19)..(223): Homolog of NCBI NO: 27754711 NR Description: putative elongation factor 1B alpha-subunit
  misc_feature (1)..(223): Homolog of NCBI NO: 15239877 NR Description: elongation factor 1B alpha-subunit
  misc_feature (1)..(223): Homolog of NCBI NO: 30687350 NR Description: elongation factor 1B alpha-subunit [Arabidopsis
MAVTFSDLHTEQGVKSVEEHLAGKTYISGDQLTVDDVKVYAAIVEKPSDAFPNASKWYDSVASHLAKSFPGKAVGVSIGGSAASAPAQAEAPAAVADDDDDMDLFGDETEEEKKAAEEREASKKDTKKPKESGKSSVLMEVKPWDDETDMKKLEECVRAVEMPGLLWGASKLVPVGYGIKKLTIMLTIVDDLVSPDNLIEDYLTCEPNNEYIQSVDIVAFNKI

SEQ ID NO: 56630 - protein, 122 aa, Glycine max
  peptide (1)..(122): Ceres Seq. ID no. 14302546
  misc_feature (33)..(122): Pfam Name: EF-1 guanine nucleotide exchange domain Pfam Description: EF-1 guanine nucleotide exchange domain
  misc_feature (1)..(122): Homolog of NCBI NO: 6166140 NR Description: ELONGATION FACTOR 1-BETA (EF-1-BETA)
  misc_feature (1)..(122): Homolog of NCBI NO: 38232568 NR Description: translational elongation factor 1 subunit Bbeta
  misc_feature (1)..(122): Homolog of NCBI NO: 6015064 NR Description: ELONGATION FACTOR 1-BETA (EF-1-BETA)
  misc_feature (1)..(122): Homolog of NCBI NO: 232033 NR Description: ELONGATION FACTOR 1-BETA' (EF-1-BETA')
  misc_feature (1)..(122): Homolog of NCBI NO: 34899162 NR Description: putative translation elongation factor eEF-1
  misc_feature (1)..(122): Homolog of NCBI NO: 232031 NR Description: ELONGATION FACTOR 1-BETA' (EF-1-BETA')
  misc_feature (1)..(122): Homolog of NCBI NO: 38175744 NR Description: putative translation elongation factor eEF-1
  misc_feature (1)..(122): Homolog of NCBI NO: 27754711 NR Description: putative elongation factor 1B alpha-subunit
  misc_feature (1)..(122): Homolog of NCBI NO: 15239877 NR Description: elongation factor 1B alpha-subunit
  misc_feature (1)..(122): Homolog of NCBI NO: 30687350 NR Description: elongation factor 1B alpha-subunit [Arabidopsis
MDLFGDETEEEKKAAEEREASKKDTKKPKESGKSSVLMEVKPWDDETDMKKLEECVRAVEMPGLLWGASKLVPVGYGIKKLTIMLTIVDDLVSPDNLIEDYLTCEPNNEYIQSVDIVAFNKI

SEQ ID NO: 56631 - DNA, 1268 bp, Glycine max
  misc_feature (1)..(1268): Ceres Seq. ID no. 14302757
agaaaagagttgtttcagtttcgagcgcaaacaagaatgaagggagattggttggaattggagttggagaaggaaataggagacgccatttcccgaacccgattcgcgccccactctaacaccctcctcatctcttcttgggactccagtcttcgcctcttcgacgtcgacgcctctctcctcagactccaagctccctcgcaagctcccctcctcgattgctgcttccaggacgacgctgtggccttcgccgccgcctctgatggactaatccgaaggtatgacttgcattcaggacttgttgatacactgggtagtcacgatgatatggcaacatgtattggatattccaatgaaacatgtcagttggtcacatccggatttgacaaaaagttactgttatgggacatgcatatgaagaagacttctttatgtttgagaagtctagatgcagaggtggactccatgtctgtctctggatttaatgttaccgtagccattggagcatcaatgcttgtttatgatttacgttactttgaccaaccagttgagtcaaaagaggcattcaatggaacacacttaagatgtgtcagttcaattccagatgcagaaggattcgcagttgggtctgtagacggacgagtatcactgcagatttccaatccattcagttcaaacgacattagatatatattccggtgtcatccaaaatcaaaggatggacggcattatttggtatcagtgaacgacattgcattcagtccacttgtatctggtgcctttgccactggtgacaatgaaggttatgttaccatatgggatgctggaagtaggagaagactagttgagttgcccaggtatccaaatagtgttgcatccttatcatacaaccacacaggtcagcttctggctgtagcatcaagccatacttaccaagaagcaaaggaaatagaaaaaccacctcgtatattcatccatagagtggacaacattgatattggatcaatttctgctagtaagagaagttgaagcacttatgctatgcttgctgacgaagatttgtgtcatcagagacacaagtggaggcaccggtgaagaaaatagatgctctttaaaaagggatactgggagatcaagaaaaatattggaggaaaatattaaaagagtttgattgataaagtattatcattaagagtttgatttttggcggtgtttaataaaatcatgtactgtatttttatgtataaaaaattaagttatcatttttt

SEQ ID NO: 56632 - protein, 342 aa, Glycine max
  peptide (1)..(342): Ceres Seq. ID no. 14302758
  misc_feature (19)..(332): Homolog of NCBI NO: 4757880 NR Description: BUB3 budding uninhibited by benzimidazoles 3
  misc_feature (19)..(332): Homolog of NCBI NO: 37362190 NR Description: BUB3 budding uninhibited by benzimidazoles 3-like
  misc_feature (19)..(332): Homolog of NCBI NO: 13122448 NR Description: WD repeat protein Bub3 [Xenopus laevis]
  misc_feature (10)..(332): Homolog of NCBI NO: 3986296 NR Description: mitotic checkpoint [Xenopus laevis]
  misc_feature (21)..(333): Homolog of NCBI NO: 18402300 NR Description: mitotic checkpoint protein [Arabidopsis thaliana]
  misc_feature (15)..(333): Homolog of NCBI NO: 28564814 NR Description: putative mitotic checkpoint protein
  misc_feature (21)..(333): Homolog of NCBI NO: 15222841 NR Description: mitotic checkpoint protein, putative [Arabidopsis
  misc_feature (13)..(328): Homolog of NCBI NO: 12597795 NR Description: mitotic checkpoint protein, putative [Arabidopsis
  misc_feature (13)..(328): Homolog of NCBI NO: 21593642 NR Description: mitotic checkpoint protein, putative [Arabidopsis
  misc_feature (13)..(328): Homolog of NCBI NO: 18409261 NR Description: transducin / WD-40 repeat protein family
RKELFQFRAQTRMKGDWLELELEKEIGDAISRTRFAPHSNTLLISSWDSSLRLFDVDASLLRLQAPSQAPLLDCCFQDDAVAFAAASDGLIRRYDLHSGLVDTLGSHDDMATCIGYSNETCQLVTSGFDKKLLLWDMHMKKTSLCLRSLDAEVDSMSVSGFNVTVAIGASMLVYDLRYFDQPVESKEAFNGTHLRCVSSIPDAEGFAVGSVDGRVSLQISNPFSSNDIRYIFRCHPKSKDGRHYLVSVNDIAFSPLVSGAFATGDNEGYVTIWDAGSRRRLVELPRYPNSVASLSYNHTGQLLAVASSHTYQEAKEIEKPPRIFIHRVDNIDIGSISASKRS

SEQ ID NO: 56633 - protein, 330 aa, Glycine max
  peptide (1)..(330): Ceres Seq. ID no. 14302759
  misc_feature (7)..(320): Homolog of NCBI NO: 4757880 NR Description: BUB3 budding uninhibited by benzimidazoles 3
  misc_feature (7)..(320): Homolog of NCBI NO: 37362190 NR Description: BUB3 budding uninhibited by benzimidazoles 3-like
  misc_feature (7)..(320): Homolog of NCBI NO: 13122448 NR Description: WD repeat protein Bub3 [Xenopus laevis]
  misc_feature (1)..(320): Homolog of NCBI NO: 3986296 NR Description: mitotic checkpoint [Xenopus laevis]
  misc_feature (9)..(321): Homolog of NCBI NO: 18402300 NR Description: mitotic checkpoint protein [Arabidopsis thaliana]
  misc_feature (3)..(321): Homolog of NCBI NO: 28564814 NR Description: putative mitotic checkpoint protein
  misc_feature (9)..(321): Homolog of NCBI NO: 15222841 NR Description: mitotic checkpoint protein, putative [Arabidopsis
  misc_feature (1)..(316): Homolog of NCBI NO: 12597795 NR Description: mitotic checkpoint protein, putative [Arabidopsis
  misc_feature (1)..(316): Homolog of NCBI NO: 21593642 NR Description: mitotic checkpoint protein, putative [Arabidopsis
  misc_feature (1)..(316): Homolog of NCBI NO: 18409261 NR Description: transducin / WD-40 repeat protein family
MKGDWLELELEKEIGDAISRTRFAPHSNTLLISSWDSSLRLFDVDASLLRLQAPSQAPLLDCCFQDDAVAFAAASDGLIRRYDLHSGLVDTLGSHDDMATCIGYSNETCQLVTSGFDKKLLLWDMHMKKTSLCLRSLDAEVDSMSVSGFNVTVAIGASMLVYDLRYFDQPVESKEAFNGTHLRCVSSIPDAEGFAVGSVDGRVSLQISNPFSSNDIRYIFRCHPKSKDGRHYLVSVNDIAFSPLVSGAFATGDNEGYVTIWDAGSRRRLVELPRYPNSVASLSYNHTGQLLAVASSHTYQEAKEIEKPPRIFIHRVDNIDIGSISASKRS

SEQ ID NO: 56634 - protein, 233 aa, Glycine max
  peptide (1)..(233): Ceres Seq. ID no. 14302760
  misc_feature (1)..(223): Homolog of NCBI NO: 4757880 NR Description: BUB3 budding uninhibited by benzimidazoles 3
  misc_feature (1)..(223): Homolog of NCBI NO: 37362190 NR Description: BUB3 budding uninhibited by benzimidazoles 3-like
  misc_feature (1)..(223): Homolog of NCBI NO: 13122448 NR Description: WD repeat protein Bub3 [Xenopus laevis]
  misc_feature (1)..(223): Homolog of NCBI NO: 3986296 NR Description: mitotic checkpoint [Xenopus laevis]
  misc_feature (1)..(224): Homolog of NCBI NO: 18402300 NR Description: mitotic checkpoint protein [Arabidopsis thaliana]
  misc_feature (1)..(224): Homolog of NCBI NO: 28564814 NR Description: putative mitotic checkpoint protein
  misc_feature (1)..(224): Homolog of NCBI NO: 15222841 NR Description: mitotic checkpoint protein, putative [Arabidopsis
  misc_feature (1)..(219): Homolog of NCBI NO: 12597795 NR Description: mitotic checkpoint protein, putative [Arabidopsis
  misc_feature (1)..(219): Homolog of NCBI NO: 21593642 NR Description: mitotic checkpoint protein, putative [Arabidopsis
  misc_feature (1)..(219): Homolog of NCBI NO: 18409261 NR Description: transducin / WD-40 repeat protein family
MATCIGYSNETCQLVTSGFDKKLLLWDMHMKKTSLCLRSLDAEVDSMSVSGFNVTVAIGASMLVYDLRYFDQPVESKEAFNGTHLRCVSSIPDAEGFAVGSVDGRVSLQISNPFSSNDIRYIFRCHPKSKDGRHYLVSVNDIAFSPLVSGAFATGDNEGYVTIWDAGSRRRLVELPRYPNSVASLSYNHTGQLLAVASSHTYQEAKEIEKPPRIFIHRVDNIDIGSISASKRS

SEQ ID NO: 56635 - DNA, 1719 bp, Glycine max
  misc_feature (1)..(1719): Ceres Seq. ID no. 14311219
acaaaacacaactcgtcacatcacatcacatcacatctattttcattacttcatcattttcactgcaattttcacaccacacacacaccacaatcatggaagttgatagtaggtttctgaacactggcctcctccttgtggccacaatccttgtggtcaagctcatctcagccttcatagtgcccaaatccagaaagagggtacccccaattgtgaaggggtggcccttaattggaggactcatccgtttcctcaaaggtccaatctttatgctccgtgacgagtaccctaagcttggaagtgtcttcactctcaaactcttccacaagaacatcaccttcctcattggccctgaggtttctgcacacttcttcaaggcctcagagactgatctcagccagcaagaggtgtatcagttcaatgtgccaacttttggacctggggtggtctttgatgttgattactctgtgaggcaagaacagttcaggttcttcactgaggctcttagggccaacaagctcaagggttatgtcaatcagatggttgcagaagctgaggactatttctcaaagtggggaccaagtggtgaggttgatttgaagtatgagcttgagcatctgatcatcttgacagccagtagatgtctcttggggcgtgaagttcgtgacaagctctttgatgatgtctctgcattgttccacgaccttgataatgggatgcttccaatcagtgttctcttcccatacctgccaatcccagctcacaagcgccgtgaccaggcacgcaagaagcttgctgaaatctttgcaagcatcataacatctcgcaaaagtgcaagcaaatcagaagaagacatgctgcagtgcttcattgactcaaaatacaaagatggtcgctcaacaacagaagctgaagtgactgggcttctcattgctgcactttttgccggtcaacacacaagctcgattacctccacttggactggggcatatctgctgtctaacaaccagtacctttcagctgtgcaggaggagcagaagatgttgatagaaaagcatggggacagagttgatcatgatgttttggctgaaatggatgtgctgtataggtgcatcaaagaagctttgagactccatcctcctctaatcatgctgatgagaagctcacacactgattttagtgtcacaacacgagaggggaaagagtatgacattcccaagggtcatataattgccacatcacctgcttttgcaaacaggctaggtcatgttttcaaagaccctgataggtatgatcccgatcgatttgctgtggggagggaagaggacaaggtggcaggtgcattctcatacatttcatttggagggggcagacatggatgccttggggagccatttgcatatctgcagataaaagcaatatggactcatctgcttaggaattttgagctggagttggtgtcaccttttccagagatcgattggaatgccatggttgtgggagtgaaggggaaagtgatggtccgatataagcggaaggagctttcagttaatcaataggaccacataattcagtgtctggcatgattttattttaagcagttattgttagtcttttctggttcagcttctgtcaaagttcgttgtttatttggcaatgaatatctagaatcttgattttgatttttttttcttctaattctattaagtgattttaact

SEQ ID NO: 56636 - protein, 518 aa, Glycine max
  peptide (1)..(518): Ceres Seq. ID no. 14311220
  misc_feature (25)..(515): Homolog of NCBI NO: 34901524 NR Description: putative cytochrome P450(Obtusifoliol 14-alpha
  misc_feature (206)..(517): Homolog of NCBI NO: 7489685 NR Description: probable obtusifoliol 14-alpha-demethylase CYP51
  misc_feature (39)..(515): Homolog of NCBI NO: 15227817 NR Description: obtusifoliol 14-alpha demethylase, putative
  misc_feature (92)..(517): Homolog of NCBI NO: 4586676 NR Description: sterol 14-demethylase [Oryza sativa (japonica
  misc_feature (66)..(517): Homolog of NCBI NO: 6166036 NR Description: Cytochrome P450 51 (CYPL1) (P450-L1A1)
  misc_feature (39)..(517): Homolog of NCBI NO: 5921924 NR Description: Cytochrome P450 51 (CYPL1) (P450-L1A1)
  misc_feature (39)..(517): Homolog of NCBI NO: 27542762 NR Description: cytochrome P450-like protein [Sorghum bicolor]
  misc_feature (32)..(515): Homolog of NCBI NO: 15221075 NR Description: obtusifoliol 14-demethylase (CYP51) [Arabidopsis
  misc_feature (32)..(515): Homolog of NCBI NO: 27461067 NR Description: obtusifoliol-14-demethylase [Nicotiana tabacum]
  misc_feature (32)..(515): Homolog of NCBI NO: 18000074 NR Description: obtusifoliol-14-demethylase [Nicotiana tabacum]
KTQLVTSHHITSIFITSSFSLQFSHHTHTTIMEVDSRFLNTGLLLVATILVVKLISAFIVPKSRKRVPPIVKGWPLIGGLIRFLKGPIFMLRDEYPKLGSVFTLKLFHKNITFLIGPEVSAHFFKASETDLSQQEVYQFNVPTFGPGVVFDVDYSVRQEQFRFFTEALRANKLKGYVNQMVAEAEDYFSKWGPSGEVDLKYELEHLIILTASRCLLGREVRDKLFDDVSALFHDLDNGMLPISVLFPYLPIPAHKRRDQARKKLAEIFASIITSRKSASKSEEDMLQCFIDSKYKDGRSTTEAEVTGLLIAALFAGQHTSSITSTWTGAYLLSNNQYLSAVQEEQKMLIEKHGDRVDHDVLAEMDVLYRCIKEALRLHPPLIMLMRSSHTDFSVTTREGKEYDIPKGHIIATSPAFANRLGHVFKDPDRYDPDRFAVGREEDKVAGAFSYISFGGGRHGCLGEPFAYLQIKAIWTHLLRNFELELVSPFPEIDWNAMVVGVKGKVMVRYKRKELSVNQ

SEQ ID NO: 56637 - protein, 487 aa, Glycine max
  peptide (1)..(487): Ceres Seq. ID no. 14311221
  misc_feature (1)..(484): Homolog of NCBI NO: 34901524 NR Description: putative cytochrome P450(Obtusifoliol 14-alpha
  misc_feature (175)..(486): Homolog of NCBI NO: 7489685 NR Description: probable obtusifoliol 14-alpha-demethylase CYP51
  misc_feature (8)..(484): Homolog of NCBI NO: 15227817 NR Description: obtusifoliol 14-alpha demethylase, putative
  misc_feature (61)..(486): Homolog of NCBI NO: 4586676 NR Description: sterol 14-demethylase [Oryza sativa (japonica
  misc_feature (35)..(486): Homolog of NCBI NO: 6166036 NR Description: Cytochrome P450 51 (CYPL1) (P450-L1A1)
  misc_feature (8)..(486): Homolog of NCBI NO: 5921924 NR Description: Cytochrome P450 51 (CYPL1) (P450-L1A1)
  misc_feature (8)..(486): Homolog of NCBI NO: 27542762 NR Description: cytochrome P450-like protein [Sorghum bicolor]
  misc_feature (1)..(484): Homolog of NCBI NO: 15221075 NR Description: obtusifoliol 14-demethylase (CYP51) [Arabidopsis
  misc_feature (1)..(484): Homolog of NCBI NO: 27461067 NR Description: obtusifoliol-14-demethylase [Nicotiana tabacum]
  misc_feature (1)..(484): Homolog of NCBI NO: 18000074 NR Description: obtusifoliol-14-demethylase [Nicotiana tabacum]
MEVDSRFLNTGLLLVATILVVKLISAFIVPKSRKRVPPIVKGWPLIGGLIRFLKGPIFMLRDEYPKLGSVFTLKLFHKNITFLIGPEVSAHFFKASETDLSQQEVYQFNVPTFGPGVVFDVDYSVRQEQFRFFTEALRANKLKGYVNQMVAEAEDYFSKWGPSGEVDLKYELEHLIILTASRCLLGREVRDKLFDDVSALFHDLDNGMLPISVLFPYLPIPAHKRRDQARKKLAEIFASIITSRKSASKSEEDMLQCFIDSKYKDGRSTTEAEVTGLLIAALFAGQHTSSITSTWTGAYLLSNNQYLSAVQEEQKMLIEKHGDRVDHDVLAEMDVLYRCIKEALRLHPPLIMLMRSSHTDFSVTTREGKEYDIPKGHIIATSPAFANRLGHVFKDPDRYDPDRFAVGREEDKVAGAFSYISFGGGRHGCLGEPFAYLQIKAIWTHLLRNFELELVSPFPEIDWNAMVVGVKGKVMVRYKRKELSVNQ

SEQ ID NO: 56638 - protein, 429 aa, Glycine max
  peptide (1)..(429): Ceres Seq. ID no. 14311222
  misc_feature (1)..(426): Homolog of NCBI NO: 34901524 NR Description: putative cytochrome P450(Obtusifoliol 14-alpha
  misc_feature (117)..(428): Homolog of NCBI NO: 7489685 NR Description: probable obtusifoliol 14-alpha-demethylase CYP51
  misc_feature (1)..(426): Homolog of NCBI NO: 15227817 NR Description: obtusifoliol 14-alpha demethylase, putative
  misc_feature (3)..(428): Homolog of NCBI NO: 4586676 NR Description: sterol 14-demethylase [Oryza sativa (japonica
  misc_feature (1)..(428): Homolog of NCBI NO: 6166036 NR Description: Cytochrome P450 51 (CYPL1) (P450-L1A1)
  misc_feature (1)..(428): Homolog of NCBI NO: 5921924 NR Description: Cytochrome P450 51 (CYPL1) (P450-L1A1)
  misc_feature (1)..(428): Homolog of NCBI NO: 27542762 NR Description: cytochrome P450-like protein [Sorghum bicolor]
  misc_feature (1)..(426): Homolog of NCBI NO: 15221075 NR Description: obtusifoliol 14-demethylase (CYP51) [Arabidopsis
  misc_feature (1)..(426): Homolog of NCBI NO: 27461067 NR Description: obtusifoliol-14-demethylase [Nicotiana tabacum]
  misc_feature (1)..(426): Homolog of NCBI NO: 18000074 NR Description: obtusifoliol-14-demethylase [Nicotiana tabacum]
MLRDEYPKLGSVFTLKLFHKNITFLIGPEVSAHFFKASETDLSQQEVYQFNVPTFGPGVVFDVDYSVRQEQFRFFTEALRANKLKGYVNQMVAEAEDYFSKWGPSGEVDLKYELEHLIILTASRCLLGREVRDKLFDDVSALFHDLDNGMLPISVLFPYLPIPAHKRRDQARKKLAEIFASIITSRKSASKSEEDMLQCFIDSKYKDGRSTTEAEVTGLLIAALFAGQHTSSITSTWTGAYLLSNNQYLSAVQEEQKMLIEKHGDRVDHDVLAEMDVLYRCIKEALRLHPPLIMLMRSSHTDFSVTTREGKEYDIPKGHIIATSPAFANRLGHVFKDPDRYDPDRFAVGREEDKVAGAFSYISFGGGRHGCLGEPFAYLQIKAIWTHLLRNFELELVSPFPEIDWNAMVVGVKGKVMVRYKRKELSVNQ

SEQ ID NO: 56639 - DNA, 736 bp, Glycine max
  misc_feature (1)..(736): Ceres Seq. ID no. 13582048
gagatgacgatgtcgtcgccggcctccacccacctcctccgctccgcgcccgcggcgcccctgctccctcgccgcgcctccctgcagctctcctgcgtcgccagcggagccgcgccaaggagtaggagacggagcggccgcctggaggtagtccgcgcggccaccgcggaggtggccgaggccgccggcgcccccgcctacaccaccgagtccctcatcctctacttcaaggcggagggcaccatggaggagaggtctatccccaagatcacccaggctctcgaggggatggacggcgtcagtgacctggaggtgctcatcgaagaaggcatcggaagtgttgtgttaacgaaggcgacaacagtccaagctactggggtcgcctcaaacctggtggaagccatccagggagttggtttcaagctgcaaactctgagcctcagcttcgaggactttgacaaggaggatgctgctgctgtttcgggagaaggagcagacgtccaagccagcgagtgagcttcacagcgtcgtgcctgcgctgagtgcacacgatgtgctctggtcgttggggttcaatatttcttcggacgtttttctttagttgtcatacactcgctcttagcaatttttcaagctgcacgttttaccttctggcatgactacgtaccctatgtgggcttttagaaatgctgcatcttcccattaaaaatagagaagaaaaagaaattctgcgtct

SEQ ID NO: 56640 - protein, 171 aa, Glycine max
  peptide (1)..(171): Ceres Seq. ID no. 13582049
  misc_feature (8)..(154): Homolog of NCBI NO: 11346179 NR Description: hypothetical protein F2G14_30 - Arabidopsis
  misc_feature (8)..(154): Homolog of NCBI NO: 18417512 NR Description: heavy-metal-associated domain-containing protein
EMTMSSPASTHLLRSAPAAPLLPRRASLQLSCVASGAAPRSRRRSGRLEVVRAATAEVAEAAGAPAYTTESLILYFKAEGTMEERSIPKITQALEGMDGVSDLEVLIEEGIGSVVLTKATTVQATGVASNLVEAIQGVGFKLQTLSLSFEDFDKEDAAAVSGEGADVQASE

SEQ ID NO: 56641 - protein, 170 aa, Glycine max
  peptide (1)..(170): Ceres Seq. ID no. 13582050
  misc_feature (7)..(153): Homolog of NCBI NO: 11346179 NR Description: hypothetical protein F2G14_30 - Arabidopsis
  misc_feature (7)..(153): Homolog of NCBI NO: 18417512 NR Description: heavy-metal-associated domain-containing protein
MTMSSPASTHLLRSAPAAPLLPRRASLQLSCVASGAAPRSRRRSGRLEVVRAATAEVAEAAGAPAYTTESLILYFKAEGTMEERSIPKITQALEGMDGVSDLEVLIEEGIGSVVLTKATTVQATGVASNLVEAIQGVGFKLQTLSLSFEDFDKEDAAAVSGEGADVQASE

SEQ ID NO: 56642 - protein, 168 aa, Glycine max
  peptide (1)..(168): Ceres Seq. ID no. 13582051
  misc_feature (5)..(151): Homolog of NCBI NO: 11346179 NR Description: hypothetical protein F2G14_30 - Arabidopsis
  misc_feature (5)..(151): Homolog of NCBI NO: 18417512 NR Description: heavy-metal-associated domain-containing protein
MSSPASTHLLRSAPAAPLLPRRASLQLSCVASGAAPRSRRRSGRLEVVRAATAEVAEAAGAPAYTTESLILYFKAEGTMEERSIPKITQALEGMDGVSDLEVLIEEGIGSVVLTKATTVQATGVASNLVEAIQGVGFKLQTLSLSFEDFDKEDAAAVSGEGADVQASE

SEQ ID NO: 56643 - DNA, 1276 bp, Glycine max
  misc_feature (1)..(1276): Ceres Seq. ID no. 13595503
acctagaacatcccaatcaaaaaatcaaagccctgctgaatggcgccaccggcaccacccaagtcaagtcagggtcaggtgatgaataatgcaaggattcacttcttttccattctcctcgctctccaatacggtgctcaacctttgatctccaaacgcttcatcagacgtgaagttattgtgacttcatctgttttgacttgtgagcttgcaaaggttatatgtgcagtgttttttatggcaaaagatggtagtctgaggaaattgtataaagagtggactttggttggtgcgttgactgcatcaggacttcctgcagctatatatgcattgcaaaatagtttgctgcaaatttcttacaagaatcttgattcactcacattctcaatgctgaatcagaccaaaatatttttcaccgcgctctttgcatatttcatattgaggcaaaaacaatcgattgagcaaattggagccttgttcttgttaatagttgcggcagttcttttaagtgttggcgaaggctctaccaaaggttctgctattggcaatgctgatcaaattttattttatggaattattcctgtattagttgcttcagtgctctctggattggcttcatccttgtgtcaatgggcctctcaggttaagaaacactcatcatacttgatgactatagaaatgtctattgttggaagtctatgtttgcttgccagtactttgaaatctccagatggggaagctatgagacaacatgggtttttctatggttggactcctcttactttgatcccagtaattttcaatgcccttggaggaattcttgtcggtttagttacaagccatgctggtggtgttcggaaggggtttgtcattgtttctgctttactcattacagcattgctacagtttattttcgatggaaagacaccttcattgtattgccttttggctcttccactagtggtcactagcatttcaatataccagaaatacccctaccaggttaagaagaaggagtcatagaatctgaccatggggaatttatttcattagttccccccgaaactactttgtttttttatccagaatatatagcatattgtaaatgatagaacatagaaggcaagcattcttcttgatgtcttctggatctcaatagaattaggatgttatacagagctatttttttttttttgaatattctggaatctttaaatgatcaattatttgtctcctaaaaaaaaaaaaaaaaaagcttatcgataccgtcgacctc

SEQ ID NO: 56644 - protein, 327 aa, Glycine max
  peptide (1)..(327): Ceres Seq. ID no. 13595504
  misc_feature (71)..(284): Pfam Name: Nucleotide-sugar transporter Pfam Description: Nucleotide-sugar transporter
  misc_feature (17)..(315): Homolog of NCBI NO: 37725001 NR Description: solute carrier family 35 member 3 [Bos taurus]
  misc_feature (49)..(315): Homolog of NCBI NO: 6912668 NR Description: solute carrier family 35 (UDP-N-acetylglucosamine
  misc_feature (8)..(325): Homolog of NCBI NO: 7503366 NR Description: hypothetical protein F44C8.7 - Caenorhabditis
  misc_feature (17)..(321): Homolog of NCBI NO: 39593097 NR Description: Hypothetical protein CBG09317 [Caenorhabditis
  misc_feature (8)..(325): Homolog of NCBI NO: 25146317 NR Description: Integral membrane protein DUF6 family member
  misc_feature (16)..(321): Homolog of NCBI NO: 38176083 NR Description: Hypothetical protein ZC250.3 [Caenorhabditis
  misc_feature (17)..(315): Homolog of NCBI NO: 22204205 NR Description: SI:bZ30I22.3 (novel protein similar to vertebrate
  misc_feature (67)..(326): Homolog of NCBI NO: 8843764 NR Description: gene_id:MXK3.23~ref|NP_036375.1~similar to
  misc_feature (19)..(326): Homolog of NCBI NO: 18086579 NR Description: AT5g65000/MXK3_23 [Arabidopsis thaliana]
  misc_feature (19)..(326): Homolog of NCBI NO: 18424900 NR Description: expressed protein [Arabidopsis thaliana]
MAPPAPPKSSQGQVMNNARIHFFSILLALQYGAQPLISKRFIRREVIVTSSVLTCELAKVICAVFFMAKDGSLRKLYKEWTLVGALTASGLPAAIYALQNSLLQISYKNLDSLTFSMLNQTKIFFTALFAYFILRQKQSIEQIGALFLLIVAAVLLSVGEGSTKGSAIGNADQILFYGIIPVLVASVLSGLASSLCQWASQVKKHSSYLMTIEMSIVGSLCLLASTLKSPDGEAMRQHGFFYGWTPLTLIPVIFNALGGILVGLVTSHAGGVRKGFVIVSALLITALLQFIFDGKTPSLYCLLALPLVVTSISIYQKYPYQVKKKES

SEQ ID NO: 56645 - protein, 313 aa, Glycine max
  peptide (1)..(313): Ceres Seq. ID no. 13595505
  misc_feature (57)..(270): Pfam Name: Nucleotide-sugar transporter Pfam Description: Nucleotide-sugar transporter
  misc_feature (3)..(301): Homolog of NCBI NO: 37725001 NR Description: solute carrier family 35 member 3 [Bos taurus]
  misc_feature (35)..(301): Homolog of NCBI NO: 6912668 NR Description: solute carrier family 35 (UDP-N-acetylglucosamine
  misc_feature (1)..(311): Homolog of NCBI NO: 7503366 NR Description: hypothetical protein F44C8.7 - Caenorhabditis
  misc_feature (3)..(307): Homolog of NCBI NO: 39593097 NR Description: Hypothetical protein CBG09317 [Caenorhabditis
  misc_feature (1)..(311): Homolog of NCBI NO: 25146317 NR Description: Integral membrane protein DUF6 family member
  misc_feature (2)..(307): Homolog of NCBI NO: 38176083 NR Description: Hypothetical protein ZC250.3 [Caenorhabditis
  misc_feature (3)..(301): Homolog of NCBI NO: 22204205 NR Description: SI:bZ30I22.3 (novel protein similar to vertebrate
  misc_feature (53)..(312): Homolog of NCBI NO: 8843764 NR Description: gene_id:MXK3.23~ref|NP_036375.1~similar to
  misc_feature (5)..(312): Homolog of NCBI NO: 18086579 NR Description: AT5g65000/MXK3_23 [Arabidopsis thaliana]
  misc_feature (5)..(312): Homolog of NCBI NO: 18424900 NR Description: expressed protein [Arabidopsis thaliana]
MNNARIHFFSILLALQYGAQPLISKRFIRREVIVTSSVLTCELAKVICAVFFMAKDGSLRKLYKEWTLVGALTASGLPAAIYALQNSLLQISYKNLDSLTFSMLNQTKIFFTALFAYFILRQKQSIEQIGALFLLIVAAVLLSVGEGSTKGSAIGNADQILFYGIIPVLVASVLSGLASSLCQWASQVKKHSSYLMTIEMSIVGSLCLLASTLKSPDGEAMRQHGFFYGWTPLTLIPVIFNALGGILVGLVTSHAGGVRKGFVIVSALLITALLQFIFDGKTPSLYCLLALPLVVTSISIYQKYPYQVKKKES

SEQ ID NO: 56646 - protein, 261 aa, Glycine max
  peptide (1)..(261): Ceres Seq. ID no. 13595506
  misc_feature (5)..(218): Pfam Name: Nucleotide-sugar transporter Pfam Description: Nucleotide-sugar transporter
  misc_feature (1)..(249): Homolog of NCBI NO: 37725001 NR Description: solute carrier family 35 member 3 [Bos taurus]
  misc_feature (1)..(249): Homolog of NCBI NO: 6912668 NR Description: solute carrier family 35 (UDP-N-acetylglucosamine
  misc_feature (1)..(259): Homolog of NCBI NO: 7503366 NR Description: hypothetical protein F44C8.7 - Caenorhabditis
  misc_feature (1)..(255): Homolog of NCBI NO: 39593097 NR Description: Hypothetical protein CBG09317 [Caenorhabditis
  misc_feature (1)..(259): Homolog of NCBI NO: 25146317 NR Description: Integral membrane protein DUF6 family member
  misc_feature (1)..(255): Homolog of NCBI NO: 38176083 NR Description: Hypothetical protein ZC250.3 [Caenorhabditis
  misc_feature (1)..(249): Homolog of NCBI NO: 22204205 NR Description: SI:bZ30I22.3 (novel protein similar to vertebrate
  misc_feature (1)..(260): Homolog of NCBI NO: 8843764 NR Description: gene_id:MXK3.23~ref|NP_036375.1~similar to
  misc_feature (1)..(260): Homolog of NCBI NO: 18086579 NR Description: AT5g65000/MXK3_23 [Arabidopsis thaliana]
  misc_feature (1)..(260): Homolog of NCBI NO: 18424900 NR Description: expressed protein [Arabidopsis thaliana]
MAKDGSLRKLYKEWTLVGALTASGLPAAIYALQNSLLQISYKNLDSLTFSMLNQTKIFFTALFAYFILRQKQSIEQIGALFLLIVAAVLLSVGEGSTKGSAIGNADQILFYGIIPVLVASVLSGLASSLCQWASQVKKHSSYLMTIEMSIVGSLCLLASTLKSPDGEAMRQHGFFYGWTPLTLIPVIFNALGGILVGLVTSHAGGVRKGFVIVSALLITALLQFIFDGKTPSLYCLLALPLVVTSISIYQKYPYQVKKKES

SEQ ID NO: 56647 - DNA, 1262 bp, Glycine max
  misc_feature (1)..(1262): Ceres Seq. ID no. 13595840
atatttatttctcctgctgcgacgactggtacatgatcagcagttcccccattttaagttagattattatcacacctcgtgaacacagattgcagttggtgcggaggatcgatctcgccatgaatttcaattgcactgctaacaaggagcaaaagaaaaccgtagaccaatctatcttattgtgctgcaagttctttgtctctgaatcacgcaacaatgccactctcaatgcaatagaacgagctgcaaggtcaaacccagaaactgtgattgtgaacatgtttcatgatcgagcttataacagggcaaggtacgaccttgtgtcgtatgttttgcatgactgcacaggaaatcccatatacagccccttgcatcaaactgtcatagccatggctgaggctacattcaatgccgtcaaccttgaattccatgaaggtgctcaccctcgcttgggcgcagtggacgacattgttttccatccacttggtcatgcgtcgctcgacgaggcagcgtggctcgccaaagcagtggcagcagacattggcaaccgattcagtgtgccagtgtttctgtacgctgcagcccacccaacagggaaggaacttgacgccataaggcgagagcttggatattacaggccaaattctaggggcagccaatgggccgggtgggcaatgcccgaaacgcttcctctaagcccagatgaagggcctaacgtcgtttcaagagctaaaggcatcacaatgattggtgcacgcccttgggtcacactctacaacgttccaattttgtgcactgatgtgtcagtagcaagaaggattgcaaggaaggtgagtgctcgtggcggtggcctccccactgtgcaaacgattgcgcttgtccatgaggactcaactgagatagcctgcatgcttttggactccaagcaggttggagcggatagggttcaaaatagggttgagatgctggccgcacaagagggactggacatagaacaaggttatttcactgacatttctccagaaatgatcgtagagaaatacatgaaattaatcaatagtgctaacaaatcgtgatcatgcatgtgtgtaactcattgaacttgttgatgagtaatcataaatgatcgaaggctgtaattttcagtaagtgtaaaacaaaggttatgaattgtgattccaaaatggttggctgggataacaaactaagggtaacaaatatatctatctgtatttatatatcaaaataataacctttcgccc

SEQ ID NO: 56648 - protein, 318 aa, Glycine max
  peptide (1)..(318): Ceres Seq. ID no. 13595841
  misc_feature (219)..(267): Pfam Name: Formiminotransferase domain Pfam Description: Formiminotransferase domain
  misc_feature (22)..(291): Homolog of NCBI NO: 28211902 NR Description: glutamate formiminotransferase [Clostridium
  misc_feature (18)..(313): Homolog of NCBI NO: 16082441 NR Description: probable glutamate formiminotransferase
  misc_feature (18)..(302): Homolog of NCBI NO: 13540922 NR Description: Glutamate formiminotransferase [Thermoplasma
  misc_feature (19)..(291): Homolog of NCBI NO: 34540165 NR Description: formiminotransferase-cyclodeaminase-related
  misc_feature (18)..(64): Homolog of NCBI NO: 34897974 NR Description: hypothetical protein~similar to Oryza sativa
  misc_feature (155)..(316): Homolog of NCBI NO: 34897974 NR Description: hypothetical protein~similar to Oryza sativa
  misc_feature (9)..(315): Homolog of NCBI NO: 25411995 NR Description: hypothetical protein At2g20830 [imported] -
  misc_feature (17)..(315): Homolog of NCBI NO: 18399493 NR Description: expressed protein [Arabidopsis thaliana]
  misc_feature (18)..(316): Homolog of NCBI NO: 34898040 NR Description: OSJNBa0038F22.18 [Oryza sativa (japonica
  misc_feature (18)..(316): Homolog of NCBI NO: 5734618 NR Description: Similar to Arabidopsis thaliana chromosome II BAC
MNFNCTANKEQKKTVDQSILLCCKFFVSESRNNATLNAIERAARSNPETVIVNMFHDRAYNRARYDLVSYVLHDCTGNPIYSPLHQTVIAMAEATFNAVNLEFHEGAHPRLGAVDDIVFHPLGHASLDEAAWLAKAVAADIGNRFSVPVFLYAAAHPTGKELDAIRRELGYYRPNSRGSQWAGWAMPETLPLSPDEGPNVVSRAKGITMIGARPWVTLYNVPILCTDVSVARRIARKVSARGGGLPTVQTIALVHEDSTEIACMLLDSKQVGADRVQNRVEMLAAQEGLDIEQGYFTDISPEMIVEKYMKLINSANKS

SEQ ID NO: 56649 - protein, 265 aa, Glycine max
  peptide (1)..(265): Ceres Seq. ID no. 13595842
  misc_feature (166)..(214): Pfam Name: Formiminotransferase domain Pfam Description: Formiminotransferase domain
  misc_feature (1)..(238): Homolog of NCBI NO: 28211902 NR Description: glutamate formiminotransferase [Clostridium
  misc_feature (1)..(260): Homolog of NCBI NO: 16082441 NR Description: probable glutamate formiminotransferase
  misc_feature (1)..(249): Homolog of NCBI NO: 13540922 NR Description: Glutamate formiminotransferase [Thermoplasma
  misc_feature (1)..(238): Homolog of NCBI NO: 34540165 NR Description: formiminotransferase-cyclodeaminase-related
  misc_feature (1)..(11): Homolog of NCBI NO: 34897974 NR Description: hypothetical protein~similar to Oryza sativa
  misc_feature (102)..(263): Homolog of NCBI NO: 34897974 NR Description: hypothetical protein~similar to Oryza sativa
  misc_feature (1)..(262): Homolog of NCBI NO: 25411995 NR Description: hypothetical protein At2g20830 [imported] -
  misc_feature (1)..(262): Homolog of NCBI NO: 18399493 NR Description: expressed protein [Arabidopsis thaliana]
  misc_feature (1)..(263): Homolog of NCBI NO: 34898040 NR Description: OSJNBa0038F22.18 [Oryza sativa (japonica
  misc_feature (1)..(263): Homolog of NCBI NO: 5734618 NR Description: Similar to Arabidopsis thaliana chromosome II BAC
MFHDRAYNRARYDLVSYVLHDCTGNPIYSPLHQTVIAMAEATFNAVNLEFHEGAHPRLGAVDDIVFHPLGHASLDEAAWLAKAVAADIGNRFSVPVFLYAAAHPTGKELDAIRRELGYYRPNSRGSQWAGWAMPETLPLSPDEGPNVVSRAKGITMIGARPWVTLYNVPILCTDVSVARRIARKVSARGGGLPTVQTIALVHEDSTEIACMLLDSKQVGADRVQNRVEMLAAQEGLDIEQGYFTDISPEMIVEKYMKLINSANKS

SEQ ID NO: 56650 - protein, 228 aa, Glycine max
  peptide (1)..(228): Ceres Seq. ID no. 13595843
  misc_feature (129)..(177): Pfam Name: Formiminotransferase domain Pfam Description: Formiminotransferase domain
  misc_feature (1)..(223): Homolog of NCBI NO: 20806959 NR Description: Glutamate formiminotransferase
  misc_feature (1)..(201): Homolog of NCBI NO: 28211902 NR Description: glutamate formiminotransferase [Clostridium
  misc_feature (1)..(223): Homolog of NCBI NO: 16082441 NR Description: probable glutamate formiminotransferase
  misc_feature (1)..(212): Homolog of NCBI NO: 13540922 NR Description: Glutamate formiminotransferase [Thermoplasma
  misc_feature (1)..(201): Homolog of NCBI NO: 34540165 NR Description: formiminotransferase-cyclodeaminase-related
  misc_feature (65)..(226): Homolog of NCBI NO: 34897974 NR Description: hypothetical protein~similar to Oryza sativa
  misc_feature (1)..(225): Homolog of NCBI NO: 25411995 NR Description: hypothetical protein At2g20830 [imported] -
  misc_feature (1)..(225): Homolog of NCBI NO: 18399493 NR Description: expressed protein [Arabidopsis thaliana]
  misc_feature (1)..(226): Homolog of NCBI NO: 34898040 NR Description: OSJNBa0038F22.18 [Oryza sativa (japonica
  misc_feature (1)..(226): Homolog of NCBI NO: 5734618 NR Description: Similar to Arabidopsis thaliana chromosome II BAC
MAEATFNAVNLEFHEGAHPRLGAVDDIVFHPLGHASLDEAAWLAKAVAADIGNRFSVPVFLYAAAHPTGKELDAIRRELGYYRPNSRGSQWAGWAMPETLPLSPDEGPNVVSRAKGITMIGARPWVTLYNVPILCTDVSVARRIARKVSARGGGLPTVQTIALVHEDSTEIACMLLDSKQVGADRVQNRVEMLAAQEGLDIEQGYFTDISPEMIVEKYMKLINSANKS

SEQ ID NO: 56651 - DNA, 1236 bp, Glycine max
  misc_feature (1)..(1236): Ceres Seq. ID no. 13595507
gcggtctcggttttctgcaattggctggcggcctggcgctccaccccgtgcgtccttcagtccttctatccaaaagcgacggagagactcccggcggcgagcaggttgtcctgttgttctatccgattgtgcactgctggttgtcctgctctccagctgactgcagtggtgttcttctcgcagtttgaagatggatctcaaggatagcctctccagatttaagcagcagcaggagaggtgccagtcatctttggccagcatagctgcaagccaagcttcaaccacaaaaccaaagcacagggcccaaccgattaatgctccatctgctccagcaaggcctgcacaacctattaaattttcaaacgatacagaaaggctgcaagacattaattcgattaggaaatctcctgttggggcacagatcaaacttgtcattgaattgctttacaagacaagacaagcttttacggcagagcaaataaatgatgcaacttacgttgatatcaatggtaataaggctgtctttgacagtctgaggaataacctcaaagtacactatgatgggagacgtttctcgtacaagtccaagcatgatctggaggggaaagatcaactacttgatttgataaggtgtcaccaggagggtcttgctgttgtggaagtgaaggatgcatacccaagtgtattggaagatttgcaggctctgaaggcagcaggtgaagtttggctgttgtcaaacatggattcacaggaggacattgtttaccctaatgatccaaaagtgaagatcaaggttgatgatgacctgaaggagctcttccgtgggattgagttaccgcgtgatatggttgatatcgaaaaggagctccagaagaacggcatgaagccgatgaccgacaccacgaaacgacgagcagcagcccagatccatggcgtgaaaccaaaggctaagcctaagaagaagcaacgcgagataactaaacggaccaagctcacgaatgcccatctgcctgagctgttccaacatcttaaatcttgattgtgccgttatcagcaactccgatgtatttcgtttcatcctacctctagttaatgtcatcgattatatgtgcctgcaaccctagtttgtggttatgtgagctccaagatcttgatctgagagccctgttgtatgtagcataatctgacttggaagagtttgagattgttttttatcataatcctctcaaacctgcc

SEQ ID NO: 56652 - protein, 282 aa, Glycine max
  peptide (1)..(282): Ceres Seq. ID no. 13595508
  misc_feature (14)..(273): Homolog of NCBI NO: 11611843 NR Description: general transcription factor [Homo sapiens]
  misc_feature (23)..(273): Homolog of NCBI NO: 34878722 NR Description: similar to general transcription factor II E,
  misc_feature (27)..(273): Homolog of NCBI NO: 18043581 NR Description: general transcription factor II E, polypeptide 2
  misc_feature (14)..(273): Homolog of NCBI NO: 4504195 NR Description: general transcription factor IIE, polypeptide 2,
  misc_feature (14)..(273): Homolog of NCBI NO: 228300 NR Description: transcription factor IIE:SUBUNIT=beta
  misc_feature (14)..(273): Homolog of NCBI NO: 228298 NR Description: transcription factor IIE:SUBUNIT=small 34kD
  misc_feature (1)..(277): Homolog of NCBI NO: 39545898 NR Description: TFIIE-beta 1 [Arabidopsis thaliana]
  misc_feature (1)..(278): Homolog of NCBI NO: 15233477 NR Description: expressed protein [Arabidopsis thaliana]
  misc_feature (1)..(280): Homolog of NCBI NO: 15235379 NR Description: expressed protein [Arabidopsis thaliana]
  misc_feature (1)..(282): Homolog of NCBI NO: 37534050 NR Description: putative Transcription initiation factor IIE,
MDLKDSLSRFKQQQERCQSSLASIAASQASTTKPKHRAQPINAPSAPARPAQPIKFSNDTERLQDINSIRKSPVGAQIKLVIELLYKTRQAFTAEQINDATYVDINGNKAVFDSLRNNLKVHYDGRRFSYKSKHDLEGKDQLLDLIRCHQEGLAVVEVKDAYPSVLEDLQALKAAGEVWLLSNMDSQEDIVYPNDPKVKIKVDDDLKELFRGIELPRDMVDIEKELQKNGMKPMTDTTKRRAAAQIHGVKPKAKPKKKQREITKRTKLTNAHLPELFQHLKS

SEQ ID NO: 56653 - DNA, 990 bp, Glycine max
  misc_feature (1)..(990): Ceres Seq. ID no. 14301994
gcacagcttgttccttaattaaagcaaaaaaaaaatcacaatggttaaaacctctctccctctcaccgctttcttcttcctcctcctcatctcctcctccttagccgcagacaccggccggctctttctcaccgtcgtcaaccactgtcccttcaccgtctggccagccattcagcccaacgccggccaccccgtcctcgagaaaggtggcttcgctctcccaaccaacacccaccgctctttctccccaccaaccacccactggtccggtcgtatctggggtcgaaccggctgctcccactacaacggcaaattctcttgcgtcaccggagactgcggaaaccgtctcgagtgcaacggtctcggtggcgcaactccggcttctctcgctcagttcgacctccaccacggtggacacagagacttatcctcctacggtgtctctctagtcgacggtttcaacgttccgatgacagttactcctcacgaaggccgtggagtttgtcccgttgttggttgtcgcgaagacctcttgagaacgtgcccggctcatcttcagctccggtcgggacacggtggacacgtggtggcctgtaagagtgggtgtgaggcgttccgcacggatgagttgtgctgtaggaaccattacaatagtcctcaaacatgtcgtgcttcgagccattcgctgttctttaagcacgcgtgtccttcgactatgacgttcgctcatgatagtccatcgcttatgcatgattgttcttctcctagagagctcaaagtcatcttctgccactaatgtgtctctcttgttcggtttattctgtatggttgtactagtgatatcgcactaatctcttatctttctggtttgattggtttagtttgtgatttcccgcgtcagttatgttgttgttcaaaaactatgtagtccaactatgcgattatgtattattatcttttgaattgattctgcttagttatcttcttcat

SEQ ID NO: 56654 - protein, 251 aa, Glycine max
  peptide (1)..(251): Ceres Seq. ID no. 14301995
  misc_feature (34)..(251): Pfam Name: Thaumatin family Pfam Description: Thaumatin family
  misc_feature (5)..(250): Homolog of NCBI NO: 15221033 NR Description: thaumatin-like protein [Arabidopsis thaliana]
  misc_feature (5)..(250): Homolog of NCBI NO: 4105697 NR Description: thaumatin-like protein [Arabidopsis thaliana]
  misc_feature (5)..(250): Homolog of NCBI NO: 15222875 NR Description: thaumatin family [Arabidopsis thaliana]
  misc_feature (14)..(251): Homolog of NCBI NO: 34908134 NR Description: osmotin-like protein [Oryza sativa (japonica
  misc_feature (12)..(251): Homolog of NCBI NO: 5823278 NR Description: osmotin-like protein [Benincasa hispida]
  misc_feature (3)..(251): Homolog of NCBI NO: 2501182 NR Description: OSMOTIN-LIKE PROTEIN PRECURSOR
  misc_feature (1)..(251): Homolog of NCBI NO: 27373047 NR Description: cytokinin binding protein [Arabidopsis thaliana]
  misc_feature (1)..(251): Homolog of NCBI NO: 21554129 NR Description: putative thaumatin [Arabidopsis thaliana]
  misc_feature (1)..(251): Homolog of NCBI NO: 15226956 NR Description: osmotin-like protein, putative [Arabidopsis
  misc_feature (1)..(251): Homolog of NCBI NO: 27373045 NR Description: cytokinin-binding protein [Brassica oleracea]
MVKTSLPLTAFFFLLLISSSLAADTGRLFLTVVNHCPFTVWPAIQPNAGHPVLEKGGFALPTNTHRSFSPPTTHWSGRIWGRTGCSHYNGKFSCVTGDCGNRLECNGLGGATPASLAQFDLHHGGHRDLSSYGVSLVDGFNVPMTVTPHEGRGVCPVVGCREDLLRTCPAHLQLRSGHGGHVVACKSGCEAFRTDELCCRNHYNSPQTCRASSHSLFFKHACPSTMTFAHDSPSLMHDCSSPRELKVIFCH

SEQ ID NO: 56655 - DNA, 832 bp, Glycine max
  misc_feature (1)..(832): Ceres Seq. ID no. 13595127
acctagaacatcctaatcgaaaaagcagcgtggtaggcgccgcaactcgaccaaaccacacgaaggggaaacccaaattccctcccaacttctctacctctccggcctccacccaggagagccctaagccggaagcgccttacccttaagctctcttgacctctccccatggcgtccgcgtggtgcctcttggcgccggccgccaccggcgcggcgccgggcgctctcggcgtctccgcctccgaatccagaggcgtcttcgccgcgcgggcggcggtccctgagaggacgcggcgcaggtgggactcgctcgtggtgtgcgtggcccccgacgaggagaagattacgcggcgctcgcccctcgatttccccatcgaatgggagaaacctaagcctgggaggagacctgacatcttcccaaagttcagccctatgaaaacaccattgccccatccattaccagctgatgatcctctggatgatgatgaggaagaagaagaggaagaagcacaacctcaagaagaaccacaggaggatgatcctgacaaggaggatcctgaggaagatgacccagacaagccaactgagtaattttggatgaggtggcctgtggtagatagaagccgtgtcgtatcttccagagaatatgtggcgtctgagctattcagaaatgttagttgtgtcggattatataggctctagacataagtttgctcagcagggacctttgagcttttctgaagctatacaaattttgttccactagtttcaatttgaatttatatgtattcttctgaaaggtatttgcctatacgacacaataagctgttgc

SEQ ID NO: 56656 - protein, 140 aa, Glycine max
  peptide (1)..(140): Ceres Seq. ID no. 15221491
  misc_feature (52)..(136): Homolog of NCBI NO: 26452533 NR Description: unknown protein [Arabidopsis thaliana]
  misc_feature (1)..(137): Homolog of NCBI NO: 18398354 NR Description: expressed protein [Arabidopsis thaliana]
  misc_feature (5)..(136): Homolog of NCBI NO: 21553725 NR Description: unknown [Arabidopsis thaliana]
  misc_feature (5)..(136): Homolog of NCBI NO: 18404214 NR Description: expressed protein [Arabidopsis thaliana]
MASAWCLLAPAATGAAPGALGVSASESRGVFAARAAVPERTRRRWDSLVVCVAPDEEKITRRSPLDFPIEWEKPKPGRRPDIFPKFSPMKTPLPHPLPADDPLDDDEEEEEEEAQPQEEPQEDDPDKEDPEEDDPDKPTE

SEQ ID NO: 56657 - DNA, 659 bp, Glycine max
  misc_feature (1)..(659): Ceres Seq. ID no. 14301996
tcaaattctcttctgggtttcctaaattctcaacctttttctccaaattcggcttcttaaaatcatggttcgctgtagcaacaacctcgttggcatactcaacttcatcgtcttcctcctctctatccccatcttagctggaggaatctggcttagccaaaacgaaagtggaatccctaacctctacagcctccactcttggattggtattggtgtcatttctctttatggcttccaggtaaaccttagaagtgggttgcttccgtggcacgcaatcctaggcctatttgtttatatactcgcggttgggaacgcagctttagggtttctggagaagctgactttcctggagagtggtgctaagctcgacaagtacgggccagaagcgtttcttgtgaacttcacagccattgtcaccattctctttggtgccttggtggtactcactgcttctgctaagtctccctcctccattgacgatgctgataactacagctattctgctatatgaaaacgctttatacatttcttcagttcctcgcatatctttgctgctacttgtgctgtcaaaagattatataattatatgatgtatttgtagtgaaaacactttgtgtttgtgattccgctgattatgagtttgattacttctggtgtgc

SEQ ID NO: 56658 - protein, 148 aa, Glycine max
  peptide (1)..(148): Ceres Seq. ID no. 14301997
  misc_feature (11)..(135): Pfam Name: Cytochrome b561 Pfam Description: Cytochrome b561
  misc_feature (34)..(127): Homolog of NCBI NO: 15240965 NR Description: cytochrome b-561 (gb|AAD45585.1) [Arabidopsis
  misc_feature (33)..(97): Homolog of NCBI NO: 6822123 NR Description: putative cytochrome B 561 [Craterostigma
  misc_feature (34)..(133): Homolog of NCBI NO: 38637027 NR Description: putative cytochrome b561 [Oryza sativa (japonica
  misc_feature (5)..(148): Homolog of NCBI NO: 37535830 NR Description: putative cytochrome b-561
  misc_feature (33)..(144): Homolog of NCBI NO: 38346996 NR Description: OSJNBb0039L24.15 [Oryza sativa (japonica
  misc_feature (11)..(148): Homolog of NCBI NO: 25407597 NR Description: hypothetical protein AT4g25570 [imported] -
  misc_feature (11)..(148): Homolog of NCBI NO: 18416576 NR Description: expressed protein [Arabidopsis thaliana]
  misc_feature (11)..(148): Homolog of NCBI NO: 12597245 NR Description: cytochrome b561 [Arabidopsis thaliana]
  misc_feature (11)..(148): Homolog of NCBI NO: 7486819 NR Description: hypothetical protein M7J2.60 - Arabidopsis
  misc_feature (11)..(148): Homolog of NCBI NO: 21553731 NR Description: cytochrome b561 [Arabidopsis thaliana]
MVRCSNNLVGILNFIVFLLSIPILAGGIWLSQNESGIPNLYSLHSWIGIGVISLYGFQVNLRSGLLPWHAILGLFVYILAVGNAALGFLEKLTFLESGAKLDKYGPEAFLVNFTAIVTILFGALVVLTASAKSPSSIDDADNYSYSAI

SEQ ID NO: 56659 - DNA, 816 bp, Glycine max
  misc_feature (1)..(816): Ceres Seq. ID no. 13595433
ttttttcttcggttcggggttttagcagtgaagtagcgaaaatggcgtctacatcgtgttttgatccttatcaacttgagcgagttgcagatattttcacaggccaagatctaagatccgagttacaaagcaaaatggcgatggtttcaggaagacgttctacgctaaaccccaacgcgcctctctttgtcccagcagccgttagacaagtggaagatttctctccggagtggtggcagttggtgacgacctccacttggtaccacgactactggatcagccagcaccaaggagctgacggattctacgacaacggagagagtggtgaagtcgatgtagctgatcttcttccagagtcgtttgatttcgatgatattgaagatgtcttcgaggccgagtttgatcatcaaggttacggtggatatgttggacaacagatgtatcatgcaccttctgactttggtttagggaagaatggtgagatggtgaggaaatcgagtgggaacaggagtcctaggtcgattgttgaaccggcgaagtatgcagagaagccagcgaaatgggggaaccagaaggttgctccacgaaacattcaccagcctcgttgaagtgcaaagttaactaggcagagtatgttgtatctttagccacttgtacctttgtaatttttagtattttctgctttccacaagagagaacctgtaacttctttgtacctttatgatgttcagtctcaaacttgttatctcaaaaaaaaatgtaaaaacataaaaaaattgtaaaatttgaagagtaatgagaaatagagtttcacat

SEQ ID NO: 56660 - protein, 201 aa, Glycine max
  peptide (1)..(201): Ceres Seq. ID no. 13595434
  misc_feature (46)..(93): Homolog of NCBI NO: 21592596 NR Description: unknown [Arabidopsis thaliana]
  misc_feature (46)..(93): Homolog of NCBI NO: 18414176 NR Description: expressed protein [Arabidopsis thaliana]
  misc_feature (53)..(201): Homolog of NCBI NO: 34899128 NR Description: P0496C02.30 [Oryza sativa (japonica
  misc_feature (53)..(201): Homolog of NCBI NO: 34395186 NR Description: unknown protein [Oryza sativa (japonica
  misc_feature (45)..(201): Homolog of NCBI NO: 8489786 NR Description: dehydration-induced protein ERD15 [Lycopersicon
  misc_feature (45)..(201): Homolog of NCBI NO: 21592689 NR Description: ERD15 protein [Arabidopsis thaliana]
  misc_feature (45)..(201): Homolog of NCBI NO: 15227351 NR Description: ERD15 protein [Arabidopsis thaliana]
FSSVRGFSSEVAKMASTSCFDPYQLERVADIFTGQDLRSELQSKMAMVSGRRSTLNPNAPLFVPAAVRQVEDFSPEWWQLVTTSTWYHDYWISQHQGADGFYDNGESGEVDVADLLPESFDFDDIEDVFEAEFDHQGYGGYVGQQMYHAPSDFGLGKNGEMVRKSSGNRSPRSIVEPAKYAEKPAKWGNQKVAPRNIHQPR

SEQ ID NO: 56661 - protein, 188 aa, Glycine max
  peptide (1)..(188): Ceres Seq. ID no. 13595435
  misc_feature (33)..(80): Homolog of NCBI NO: 21592596 NR Description: unknown [Arabidopsis thaliana]
  misc_feature (33)..(80): Homolog of NCBI NO: 18414176 NR Description: expressed protein [Arabidopsis thaliana]
  misc_feature (40)..(188): Homolog of NCBI NO: 34899128 NR Description: P0496C02.30 [Oryza sativa (japonica
  misc_feature (40)..(188): Homolog of NCBI NO: 34395186 NR Description: unknown protein [Oryza sativa (japonica
  misc_feature (32)..(188): Homolog of NCBI NO: 8489786 NR Description: dehydration-induced protein ERD15 [Lycopersicon
  misc_feature (32)..(188): Homolog of NCBI NO: 21592689 NR Description: ERD15 protein [Arabidopsis thaliana]
  misc_feature (32)..(188): Homolog of NCBI NO: 15227351 NR Description: ERD15 protein [Arabidopsis thaliana]
MASTSCFDPYQLERVADIFTGQDLRSELQSKMAMVSGRRSTLNPNAPLFVPAAVRQVEDFSPEWWQLVTTSTWYHDYWISQHQGADGFYDNGESGEVDVADLLPESFDFDDIEDVFEAEFDHQGYGGYVGQQMYHAPSDFGLGKNGEMVRKSSGNRSPRSIVEPAKYAEKPAKWGNQKVAPRNIHQPR

SEQ ID NO: 56662 - protein, 157 aa, Glycine max
  peptide (1)..(157): Ceres Seq. ID no. 13595436
  misc_feature (2)..(49): Homolog of NCBI NO: 21592596 NR Description: unknown [Arabidopsis thaliana]
  misc_feature (2)..(49): Homolog of NCBI NO: 18414176 NR Description: expressed protein [Arabidopsis thaliana]
  misc_feature (9)..(157): Homolog of NCBI NO: 34899128 NR Description: P0496C02.30 [Oryza sativa (japonica
  misc_feature (9)..(157): Homolog of NCBI NO: 34395186 NR Description: unknown protein [Oryza sativa (japonica
  misc_feature (1)..(157): Homolog of NCBI NO: 8489786 NR Description: dehydration-induced protein ERD15 [Lycopersicon
  misc_feature (1)..(157): Homolog of NCBI NO: 21592689 NR Description: ERD15 protein [Arabidopsis thaliana]
  misc_feature (1)..(157): Homolog of NCBI NO: 15227351 NR Description: ERD15 protein [Arabidopsis thaliana]
MAMVSGRRSTLNPNAPLFVPAAVRQVEDFSPEWWQLVTTSTWYHDYWISQHQGADGFYDNGESGEVDVADLLPESFDFDDIEDVFEAEFDHQGYGGYVGQQMYHAPSDFGLGKNGEMVRKSSGNRSPRSIVEPAKYAEKPAKWGNQKVAPRNIHQPR

SEQ ID NO: 56663 - DNA, 1460 bp, Glycine max
  misc_feature (1)..(1460): Ceres Seq. ID no. 13595513
aatttatagatcgagcgagttcaacaccttattaatttgttttgtttctttcttttgatttccttagagggagggaaagagtgacacaaacaaagcaatgaaggagaagaagagaggtttcaaagaatggttcacatcatcccaagttctattgggtatgatactagtacaaatttttcttactgggttgcagttactatcaaggatcatattggttcgtggctttttcatcttttccctcattgtatatcgtcaccttgttgctgctatttgtgttgccccctttgcattctactttgaaagaggccgcacaaagaaatatactttgaaagtttggttttggctctttgttaacgcattgacagggatggttctggctcaaggattattctattatggtttgagagatacttctgccacttactctgtcaattttctcaacttggttcctatatccaccttctttacctctatcatatttagatgggagaaattgggtctgcacacttgggcgggtagagctaagtgtggaggggcaattttgtgtgttgggggagcattagctagtctttacaaagggaaggaattttatcttggtcatcatagtcatcatgttcaaattgttgttgcggcacacaaaactcacatgcttcggggcactttccttttgatttgcagttgcttctcatacacaacatggtttattgttcaagtccaattgcttaaagtatttccactaaggtatacaggaacaatgctagcatgcattttggcagcaattcaaggaggaataataggtatttgcatagattccagaaaagctgcttggagattagagtggaatttacaattggtcactatattgtactcgggagcactagctacagctgctacattcagcctactatcttgggtaattacaatcaaaggaccaagttatcccccaatgttcaatcccctaggtcttatttttgtggccttttcagaagctatcatacttggcgaaccattaaccgttggaatgttgctaggcatgattttgatcatggtaggattatacttctttttgtggggcaaaaacaatgagactaaacgcatggttcaacaaccaattgtatcaattgcagaagtatcaaacgtgactgatttgtctactggggcagaatcagtggccacaatagtgccaaattcttcacctacaaattcagtaattctagaacttgaaaagtctgacaaaaactaaaaaaaataaataatcctttgaatgtatgagagctaaagttcaaggcagagattagaaaagtgcaatattttttaaccatagtatgtgaaaggtacaacacaatgtttaaatttaaaggattgtgttgtaaaattgatagttagctttggccttcatcacaaagtggataaaatagactaaaatgcttgacatataaattaccctactaaaatgctcg

SEQ ID NO: 56664 - protein, 381 aa, Glycine max
  peptide (1)..(381): Ceres Seq. ID no. 13595514
  misc_feature (196)..(325): Pfam Name: Integral membrane protein DUF6 Pfam Description: Integral membrane protein DUF6
  misc_feature (19)..(330): Homolog of NCBI NO: 34894456 NR Description: putative MtN21 [Oryza sativa (japonica
  misc_feature (14)..(330): Homolog of NCBI NO: 38605909 NR Description: OSJNBb0088C09.3 [Oryza sativa (japonica
  misc_feature (19)..(334): Homolog of NCBI NO: 28932732 NR Description: putative nodulin protein [Gossypium hirsutum]
  misc_feature (19)..(334): Homolog of NCBI NO: 28932880 NR Description: nodulin-like protein [Gossypium hirsutum]
  misc_feature (21)..(331): Homolog of NCBI NO: 38345836 NR Description: OSJNBa0070M12.19 [Oryza sativa (japonica
  misc_feature (21)..(308): Homolog of NCBI NO: 22795260 NR Description: nodulin-like protein [Oryza sativa (japonica
  misc_feature (19)..(330): Homolog of NCBI NO: 37573001 NR Description: putative nodulin MtN21 [Oryza sativa (japonica
  misc_feature (21)..(327): Homolog of NCBI NO: 37532154 NR Description: nodulin-like protein [Oryza sativa (japonica
  misc_feature (21)..(330): Homolog of NCBI NO: 22795291 NR Description: nodulin-like protein [Oryza sativa (japonica
  misc_feature (9)..(330): Homolog of NCBI NO: 37532092 NR Description: nodulin-like protein [Oryza sativa (japonica
MKEKKRGFKEWFTSSQVLLGMILVQIFLTGLQLLSRIILVRGFFIFSLIVYRHLVAAICVAPFAFYFERGRTKKYTLKVWFWLFVNALTGMVLAQGLFYYGLRDTSATYSVNFLNLVPISTFFTSIIFRWEKLGLHTWAGRAKCGGAILCVGGALASLYKGKEFYLGHHSHHVQIVVAAHKTHMLRGTFLLICSCFSYTTWFIVQVQLLKVFPLRYTGTMLACILAAIQGGIIGICIDSRKAAWRLEWNLQLVTILYSGALATAATFSLLSWVITIKGPSYPPMFNPLGLIFVAFSEAIILGEPLTVGMLLGMILIMVGLYFFLWGKNNETKRMVQQPIVSIAEVSNVTDLSTGAESVATIVPNSSPTNSVILELEKSDKN

SEQ ID NO: 56665 - protein, 361 aa, Glycine max
  peptide (1)..(361): Ceres Seq. ID no. 13595515
  misc_feature (176)..(305): Pfam Name: Integral membrane protein DUF6 Pfam Description: Integral membrane protein DUF6
  misc_feature (1)..(310): Homolog of NCBI NO: 34894456 NR Description: putative MtN21 [Oryza sativa (japonica
  misc_feature (1)..(310): Homolog of NCBI NO: 38605909 NR Description: OSJNBb0088C09.3 [Oryza sativa (japonica
  misc_feature (1)..(314): Homolog of NCBI NO: 28932732 NR Description: putative nodulin protein [Gossypium hirsutum]
  misc_feature (1)..(314): Homolog of NCBI NO: 28932880 NR Description: nodulin-like protein [Gossypium hirsutum]
  misc_feature (1)..(311): Homolog of NCBI NO: 38345836 NR Description: OSJNBa0070M12.19 [Oryza sativa (japonica
  misc_feature (1)..(288): Homolog of NCBI NO: 22795260 NR Description: nodulin-like protein [Oryza sativa (japonica
  misc_feature (1)..(310): Homolog of NCBI NO: 37573001 NR Description: putative nodulin MtN21 [Oryza sativa (japonica
  misc_feature (1)..(307): Homolog of NCBI NO: 37532154 NR Description: nodulin-like protein [Oryza sativa (japonica
  misc_feature (1)..(310): Homolog of NCBI NO: 22795291 NR Description: nodulin-like protein [Oryza sativa (japonica
  misc_feature (1)..(310): Homolog of NCBI NO: 37532092 NR Description: nodulin-like protein [Oryza sativa (japonica
MILVQIFLTGLQLLSRIILVRGFFIFSLIVYRHLVAAICVAPFAFYFERGRTKKYTLKVWFWLFVNALTGMVLAQGLFYYGLRDTSATYSVNFLNLVPISTFFTSIIFRWEKLGLHTWAGRAKCGGAILCVGGALASLYKGKEFYLGHHSHHVQIVVAAHKTHMLRGTFLLICSCFSYTTWFIVQVQLLKVFPLRYTGTMLACILAAIQGGIIGICIDSRKAAWRLEWNLQLVTILYSGALATAATFSLLSWVITIKGPSYPPMFNPLGLIFVAFSEAIILGEPLTVGMLLGMILIMVGLYFFLWGKNNETKRMVQQPIVSIAEVSNVTDLSTGAESVATIVPNSSPTNSVILELEKSDKN

SEQ ID NO: 56666 - protein, 291 aa, Glycine max
  peptide (1)..(291): Ceres Seq. ID no. 13595516
  misc_feature (106)..(235): Pfam Name: Integral membrane protein DUF6 Pfam Description: Integral membrane protein DUF6
  misc_feature (1)..(240): Homolog of NCBI NO: 34894456 NR Description: putative MtN21 [Oryza sativa (japonica
  misc_feature (1)..(240): Homolog of NCBI NO: 38605909 NR Description: OSJNBb0088C09.3 [Oryza sativa (japonica
  misc_feature (1)..(244): Homolog of NCBI NO: 28932732 NR Description: putative nodulin protein [Gossypium hirsutum]
  misc_feature (1)..(244): Homolog of NCBI NO: 28932880 NR Description: nodulin-like protein [Gossypium hirsutum]
  misc_feature (1)..(241): Homolog of NCBI NO: 38345836 NR Description: OSJNBa0070M12.19 [Oryza sativa (japonica
  misc_feature (1)..(218): Homolog of NCBI NO: 22795260 NR Description: nodulin-like protein [Oryza sativa (japonica
  misc_feature (1)..(240): Homolog of NCBI NO: 37573001 NR Description: putative nodulin MtN21 [Oryza sativa (japonica
  misc_feature (1)..(237): Homolog of NCBI NO: 37532154 NR Description: nodulin-like protein [Oryza sativa (japonica
  misc_feature (1)..(240): Homolog of NCBI NO: 22795291 NR Description: nodulin-like protein [Oryza sativa (japonica
  misc_feature (1)..(240): Homolog of NCBI NO: 37532092 NR Description: nodulin-like protein [Oryza sativa (japonica
MVLAQGLFYYGLRDTSATYSVNFLNLVPISTFFTSIIFRWEKLGLHTWAGRAKCGGAILCVGGALASLYKGKEFYLGHHSHHVQIVVAAHKTHMLRGTFLLICSCFSYTTWFIVQVQLLKVFPLRYTGTMLACILAAIQGGIIGICIDSRKAAWRLEWNLQLVTILYSGALATAATFSLLSWVITIKGPSYPPMFNPLGLIFVAFSEAIILGEPLTVGMLLGMILIMVGLYFFLWGKNNETKRMVQQPIVSIAEVSNVTDLSTGAESVATIVPNSSPTNSVILELEKSDKN

SEQ ID NO: 56667 - DNA, 1479 bp, Glycine max
  misc_feature (1)..(1479): Ceres Seq. ID no. 13582321
aattactagttctttctggctctgccgctgtctgtttgcgaacgccattacgttatacttgcatctaaacagcatttcacaggtgacgatactgattgagaggtagaaatgcctggtttcagcagtgtaggaaccttcaagatatttgtcgggaacttggcagaaaaaacagtatctgctgatattagacccttattcgagaaatatggaaaagttatcgaatgtgatgtggttaaggattttggatttgtgcatatggaaaatgaagagtcaggcagagacgccattcaaaatctaaatggttatctggtccatggatcagcaatgaaagtggaagctgccaccagtaggaaggggccgaacacacccacaacgaaaattttcgtgggcaacctctcagataacacaagagcacctcaagttcgctcactctttactaaatacggcacagttgtggaatgtgacattgtcagaaactatggatttgtgcacattgattgtccagacgtaaacaaaatggtagaggaactgaatggtcaagtggttgatggacagccaatgaaagtacaaatatcaacaagcaaagttcgccaaaggcctggaatgggcaatccagaacaatgctacagaatgggcccagatcgtttccgtggaagaatgggctttggaagagacccttacccacccccaccaccacccccattcctgagagacaggatgcttagtggaggatttggcggaaaggacagttactacgaccgctattatgacaggccagctgcacgatttgatgaccgggactcatttgataggaggttgccccctcttcctccacgagacttaggaccacgcagagattttatgcctccccctcccatcccaccccgtgagccactccctccccttggtcttaggggcccaccctcctccctgagagactcctttgaacgttccatgtatagccgtcggtcaccaccaccgccttctgccagatatggccgcctctatgatgactattccagggactcatatgatgatcgcagaattggcctgcgaggggcgtcaccgcgccggttcacgccgtattaattactcgctcgggtaatgattggtgagcgagcggtaacggagcggtacgtatcaacagccgacgaccgttccatatgttgacgattacatcttattttatttaagaacctttattgatgtcacactgttggtgactgtcatcacgccatttaatttgtttactatagataatatgtataatgtagttgacgtacattaagtcaaatccgtgcggcttacaatgcattaaaagtcgtgctcggataactgttgtgtgttttgtatgagtcatgttttatatatgtagtaaccgagcaaatgttttgctttctgtcttattaaagaaataaaaccaaaaaaaaaaaaaaaaaagcttatcgataccgtcgacctcgagggggggcccggtac

SEQ ID NO: 56668 - protein, 326 aa, Glycine max
  peptide (1)..(326): Ceres Seq. ID no. 13582322
  misc_feature (91)..(153): Pfam Name: RNA recognition motif. (a.k.a. RRM, RBD, or RNP domain) Pfam Description: RNA recognition motif. (a.k.a. RRM, RBD, or RNP
  misc_feature (11)..(292): Homolog of NCBI NO: 27881945 NR Description: Similar to RNA binding motif protein 4 [Danio
  misc_feature (11)..(325): Homolog of NCBI NO: 38648979 NR Description: Unknown (protein for MGC:75893) [Silurana
  misc_feature (11)..(178): Homolog of NCBI NO: 13182931 NR Description: RNA-binding protein lark [Oryctolagus cuniculus]
  misc_feature (11)..(178): Homolog of NCBI NO: 26340398 NR Description: unnamed protein product [Mus musculus]
  misc_feature (11)..(178): Homolog of NCBI NO: 27754120 NR Description: RBM4-like protein [Mus musculus]
  misc_feature (11)..(178): Homolog of NCBI NO: 13899354 NR Description: hypothetical protein similar to RNA-binding
  misc_feature (11)..(178): Homolog of NCBI NO: 7657502 NR Description: RNA binding motif protein 4 [Mus musculus]
  misc_feature (11)..(178): Homolog of NCBI NO: 4506445 NR Description: RNA binding motif protein 4 [Homo sapiens]
  misc_feature (11)..(178): Homolog of NCBI NO: 28277979 NR Description: Similar to RNA binding motif protein 4 [Danio
  misc_feature (1)..(310): Homolog of NCBI NO: 17647581 NR Description: lark CG8597-PA [Drosophila melanogaster]
MPGFSSVGTFKIFVGNLAEKTVSADIRPLFEKYGKVIECDVVKDFGFVHMENEESGRDAIQNLNGYLVHGSAMKVEAATSRKGPNTPTTKIFVGNLSDNTRAPQVRSLFTKYGTVVECDIVRNYGFVHIDCPDVNKMVEELNGQVVDGQPMKVQISTSKVRQRPGMGNPEQCYRMGPDRFRGRMGFGRDPYPPPPPPPFLRDRMLSGGFGGKDSYYDRYYDRPAARFDDRDSFDRRLPPLPPRDLGPRRDFMPPPPIPPREPLPPLGLRGPPSSLRDSFERSMYSRRSPPPPSARYGRLYDDYSRDSYDDRRIGLRGASPRRFTPY

SEQ ID NO: 56669 - protein, 277 aa, Glycine max
  peptide (1)..(277): Ceres Seq. ID no. 13582323
  misc_feature (42)..(104): Pfam Name: RNA recognition motif. (a.k.a. RRM, RBD, or RNP domain) Pfam Description: RNA recognition motif. (a.k.a. RRM, RBD, or RNP
  misc_feature (1)..(243): Homolog of NCBI NO: 27881945 NR Description: Similar to RNA binding motif protein 4 [Danio
  misc_feature (1)..(276): Homolog of NCBI NO: 38648979 NR Description: Unknown (protein for MGC:75893) [Silurana
  misc_feature (1)..(129): Homolog of NCBI NO: 13182931 NR Description: RNA-binding protein lark [Oryctolagus cuniculus]
  misc_feature (1)..(129): Homolog of NCBI NO: 13899354 NR Description: hypothetical protein similar to RNA-binding
  misc_feature (1)..(129): Homolog of NCBI NO: 27754120 NR Description: RBM4-like protein [Mus musculus]
  misc_feature (1)..(129): Homolog of NCBI NO: 26340398 NR Description: unnamed protein product [Mus musculus]
  misc_feature (1)..(129): Homolog of NCBI NO: 7657502 NR Description: RNA binding motif protein 4 [Mus musculus]
  misc_feature (1)..(129): Homolog of NCBI NO: 4506445 NR Description: RNA binding motif protein 4 [Homo sapiens]
  misc_feature (1)..(129): Homolog of NCBI NO: 28277979 NR Description: Similar to RNA binding motif protein 4 [Danio
  misc_feature (1)..(261): Homolog of NCBI NO: 17647581 NR Description: lark CG8597-PA [Drosophila melanogaster]
MENEESGRDAIQNLNGYLVHGSAMKVEAATSRKGPNTPTTKIFVGNLSDNTRAPQVRSLFTKYGTVVECDIVRNYGFVHIDCPDVNKMVEELNGQVVDGQPMKVQISTSKVRQRPGMGNPEQCYRMGPDRFRGRMGFGRDPYPPPPPPPFLRDRMLSGGFGGKDSYYDRYYDRPAARFDDRDSFDRRLPPLPPRDLGPRRDFMPPPPIPPREPLPPLGLRGPPSSLRDSFERSMYSRRSPPPPSARYGRLYDDYSRDSYDDRRIGLRGASPRRFTPY

SEQ ID NO: 56670 - protein, 254 aa, Glycine max
  peptide (1)..(254): Ceres Seq. ID no. 13582324
  misc_feature (19)..(81): Pfam Name: RNA recognition motif. (a.k.a. RRM, RBD, or RNP domain) Pfam Description: RNA recognition motif. (a.k.a. RRM, RBD, or RNP
  misc_feature (1)..(220): Homolog of NCBI NO: 27881945 NR Description: Similar to RNA binding motif protein 4 [Danio
  misc_feature (1)..(253): Homolog of NCBI NO: 38648979 NR Description: Unknown (protein for MGC:75893) [Silurana
  misc_feature (1)..(106): Homolog of NCBI NO: 26340398 NR Description: unnamed protein product [Mus musculus]
  misc_feature (1)..(106): Homolog of NCBI NO: 13899354 NR Description: hypothetical protein similar to RNA-binding
  misc_feature (1)..(106): Homolog of NCBI NO: 13182931 NR Description: RNA-binding protein lark [Oryctolagus cuniculus]
  misc_feature (1)..(106): Homolog of NCBI NO: 7657502 NR Description: RNA binding motif protein 4 [Mus musculus]
  misc_feature (1)..(106): Homolog of NCBI NO: 27754120 NR Description: RBM4-like protein [Mus musculus]
  misc_feature (1)..(106): Homolog of NCBI NO: 4506445 NR Description: RNA binding motif protein 4 [Homo sapiens]
  misc_feature (1)..(106): Homolog of NCBI NO: 28277979 NR Description: Similar to RNA binding motif protein 4 [Danio
  misc_feature (1)..(238): Homolog of NCBI NO: 17647581 NR Description: lark CG8597-PA [Drosophila melanogaster]
MKVEAATSRKGPNTPTTKIFVGNLSDNTRAPQVRSLFTKYGTVVECDIVRNYGFVHIDCPDVNKMVEELNGQVVDGQPMKVQISTSKVRQRPGMGNPEQCYRMGPDRFRGRMGFGRDPYPPPPPPPFLRDRMLSGGFGGKDSYYDRYYDRPAARFDDRDSFDRRLPPLPPRDLGPRRDFMPPPPIPPREPLPPLGLRGPPSSLRDSFERSMYSRRSPPPPSARYGRLYDDYSRDSYDDRRIGLRGASPRRFTPY

SEQ ID NO: 56671 - DNA, 1349 bp, Glycine max
  misc_feature (1)..(1349): Ceres Seq. ID no. 13595142
acttttcgagaaaaatttacttccttagaaaatgtcgcgtgcgatgtgcaacccatcaatggtgagtaggagtgttctagggtcccaaacgagttcaaaatcggtgacagagacaatgagtggttcccacgagtttgtgatcaagggttactcactaacgaaaggaatgggcattgggaaatacatcgtgagtgagactttcatagtgggagggttccaatgggccatatactttttccctgatggtagggaccccaaagataatgccgcttatgtctctgtcttcgttgcactccattccaagagcaccaatgttcgtgcgttgttcgatctcacgttgctcgacctatgcaagaaaggagagcacaaggttcatagccacttcagtcactccctcacgattgggccttacactctcataaaccatggcagcatgtggggctatacgcggtttttcaaacggagacaccttgagacgtcaaattttctcaaggatgattgcttgaagataaattgcactattgcggttttagtgtcgtccatagattcttctcagttaaacacaatacaggttcctgaatctgatattggtgaacattttgggatgttgttagaggatgaggaatcatttgatgttactttctcggttggtggagaaaggtttcatgctcataagcttgtattggcagctcgatcaaccatgtttgaaactcaattttttaatgctatgaagaaggatgatcaggagatagttgttattgacatggaacctaaggttttcaaggctttacttcattttgtttatagagacactcttttggaagatgaagagctctttatgttggattcgtcattctttccttcgttttctgaatcatttatagcaaagttgttagctgctggagaaaagtatggtttgccaagactaatgttaatgtgtgaatctatactttgtaaagacatatctgtagattctgttgcctatatttttgctcttgcggaccattattgtgctacccacttgaagtccatctgtcaaaaattttctgctgaaaactttgatgcggtgatgcattctgatggttttgagtatcttaagaaaaattgcccattactgcaatcagaactgctaaagactggagtaggatgcgagaaagaatttagttgagagggaaaatactaaattgtatgtgcttaatccaaggtctagtttagaggagtgacgacctaagatccaagtttggaagagaccagaaaaatataaaagaagattatatatatagttttgcagtaatctttttatatattatattatgttactttataaatgaattgaaattacattcttc

SEQ ID NO: 56672 - protein, 378 aa, Glycine max
  peptide (1)..(378): Ceres Seq. ID no. 13595143
  misc_feature (37)..(166): Pfam Name: MATH domain Pfam Description: MATH domain
  misc_feature (18)..(368): Homolog of NCBI NO: 23617108 NR Description: contains ESTs
  misc_feature (18)..(372): Homolog of NCBI NO: 30691638 NR Description: expressed protein [Arabidopsis thaliana]
  misc_feature (18)..(372): Homolog of NCBI NO: 11282376 NR Description: hypothetical protein F23N14.80 - Arabidopsis
  misc_feature (1)..(375): Homolog of NCBI NO: 21536843 NR Description: unknown [Arabidopsis thaliana]
  misc_feature (1)..(375): Homolog of NCBI NO: 15242126 NR Description: expressed protein [Arabidopsis thaliana]
  misc_feature (1)..(375): Homolog of NCBI NO: 14596183 NR Description: Unknown protein [Arabidopsis thaliana]
  misc_feature (11)..(378): Homolog of NCBI NO: 28269444 NR Description: unknown protein [Oryza sativa (japonica
  misc_feature (12)..(378): Homolog of NCBI NO: 34900034 NR Description: OJ1641_C04.24 [Oryza sativa (japonica
  misc_feature (20)..(378): Homolog of NCBI NO: 30678912 NR Description: expressed protein [Arabidopsis thaliana]
  misc_feature (20)..(378): Homolog of NCBI NO: 21536509 NR Description: unknown [Arabidopsis thaliana]
MSRAMCNPSMVSRSVLGSQTSSKSVTETMSGSHEFVIKGYSLTKGMGIGKYIVSETFIVGGFQWAIYFFPDGRDPKDNAAYVSVFVALHSKSTNVRALFDLTLLDLCKKGEHKVHSHFSHSLTIGPYTLINHGSMWGYTRFFKRRHLETSNFLKDDCLKINCTIAVLVSSIDSSQLNTIQVPESDIGEHFGMLLEDEESFDVTFSVGGERFHAHKLVLAARSTMFETQFFNAMKKDDQEIVVIDMEPKVFKALLHFVYRDTLLEDEELFMLDSSFFPSFSESFIAKLLAAGEKYGLPRLMLMCESILCKDISVDSVAYIFALADHYCATHLKSICQKFSAENFDAVMHSDGFEYLKKNCPLLQSELLKTGVGCEKEFS

SEQ ID NO: 56673 - protein, 374 aa, Glycine max
  peptide (1)..(374): Ceres Seq. ID no. 13595144
  misc_feature (33)..(162): Pfam Name: MATH domain Pfam Description: MATH domain
  misc_feature (14)..(364): Homolog of NCBI NO: 23617108 NR Description: contains ESTs
  misc_feature (14)..(368): Homolog of NCBI NO: 30691638 NR Description: expressed protein [Arabidopsis thaliana]
  misc_feature (14)..(368): Homolog of NCBI NO: 11282376 NR Description: hypothetical protein F23N14.80 - Arabidopsis
  misc_feature (1)..(371): Homolog of NCBI NO: 21536843 NR Description: unknown [Arabidopsis thaliana]
  misc_feature (1)..(371): Homolog of NCBI NO: 15242126 NR Description: expressed protein [Arabidopsis thaliana]
  misc_feature (1)..(371): Homolog of NCBI NO: 14596183 NR Description: Unknown protein [Arabidopsis thaliana]
  misc_feature (7)..(374): Homolog of NCBI NO: 28269444 NR Description: unknown protein [Oryza sativa (japonica
  misc_feature (8)..(374): Homolog of NCBI NO: 34900034 NR Description: OJ1641_C04.24 [Oryza sativa (japonica
  misc_feature (16)..(374): Homolog of NCBI NO: 30678912 NR Description: expressed protein [Arabidopsis thaliana]
  misc_feature (16)..(374): Homolog of NCBI NO: 21536509 NR Description: unknown [Arabidopsis thaliana]
MCNPSMVSRSVLGSQTSSKSVTETMSGSHEFVIKGYSLTKGMGIGKYIVSETFIVGGFQWAIYFFPDGRDPKDNAAYVSVFVALHSKSTNVRALFDLTLLDLCKKGEHKVHSHFSHSLTIGPYTLINHGSMWGYTRFFKRRHLETSNFLKDDCLKINCTIAVLVSSIDSSQLNTIQVPESDIGEHFGMLLEDEESFDVTFSVGGERFHAHKLVLAARSTMFETQFFNAMKKDDQEIVVIDMEPKVFKALLHFVYRDTLLEDEELFMLDSSFFPSFSESFIAKLLAAGEKYGLPRLMLMCESILCKDISVDSVAYIFALADHYCATHLKSICQKFSAENFDAVMHSDGFEYLKKNCPLLQSELLKTGVGCEKEFS

SEQ ID NO: 56674 - protein, 369 aa, Glycine max
  peptide (1)..(369): Ceres Seq. ID no. 13595145
  misc_feature (28)..(157): Pfam Name: MATH domain Pfam Description: MATH domain
  misc_feature (9)..(359): Homolog of NCBI NO: 23617108 NR Description: contains ESTs
  misc_feature (9)..(363): Homolog of NCBI NO: 30691638 NR Description: expressed protein [Arabidopsis thaliana]
  misc_feature (9)..(363): Homolog of NCBI NO: 11282376 NR Description: hypothetical protein F23N14.80 - Arabidopsis
  misc_feature (1)..(366): Homolog of NCBI NO: 21536843 NR Description: unknown [Arabidopsis thaliana]
  misc_feature (1)..(366): Homolog of NCBI NO: 15242126 NR Description: expressed protein [Arabidopsis thaliana]
  misc_feature (1)..(366): Homolog of NCBI NO: 14596183 NR Description: Unknown protein [Arabidopsis thaliana]
  misc_feature (2)..(369): Homolog of NCBI NO: 28269444 NR Description: unknown protein [Oryza sativa (japonica
  misc_feature (3)..(369): Homolog of NCBI NO: 34900034 NR Description: OJ1641_C04.24 [Oryza sativa (japonica
  misc_feature (11)..(369): Homolog of NCBI NO: 30678912 NR Description: expressed protein [Arabidopsis thaliana]
  misc_feature (11)..(369): Homolog of NCBI NO: 21536509 NR Description: unknown [Arabidopsis thaliana]
MVSRSVLGSQTSSKSVTETMSGSHEFVIKGYSLTKGMGIGKYIVSETFIVGGFQWAIYFFPDGRDPKDNAAYVSVFVALHSKSTNVRALFDLTLLDLCKKGEHKVHSHFSHSLTIGPYTLINHGSMWGYTRFFKRRHLETSNFLKDDCLKINCTIAVLVSSIDSSQLNTIQVPESDIGEHFGMLLEDEESFDVTFSVGGERFHAHKLVLAARSTMFETQFFNAMKKDDQEIVVIDMEPKVFKALLHFVYRDTLLEDEELFMLDSSFFPSFSESFIAKLLAAGEKYGLPRLMLMCESILCKDISVDSVAYIFALADHYCATHLKSICQKFSAENFDAVMHSDGFEYLKKNCPLLQSELLKTGVGCEKEFS

SEQ ID NO: 56675 - DNA, 1097 bp, Glycine max
  misc_feature (1)..(1097): Ceres Seq. ID no. 14302536
atccagaaataatcactttctccattcgattcttcctcttgctcttgcacccaatctcctcgctacgtagttagctaatctaaccatcagtccaccaaagccaatccactgagtgcgagagctccatctccatctcgatctcgaccaaggagaggaagctagctagctagcaacaggcagcagcaatggcgggcgtgggtcgtaacatggtggcgccgctgctggtgctgaacctcatcatgtacctcattgtcatcggcttcgcaagctggaacctcaaccacttcatcaacggcctcaccaaccgccccggcgtcggcggcaacggagccaccttctacttcctcgtctttgccatcctcgcgggcgtcgtcggcgccgcatccaagctcgccggcgtgcaccacgtccgcacatggcgcggtgacagcctcgccacctccgcctcgtcctcgctcgtggcatgggccatcaccgccttggcgttcgggctggcgtgcaaggagatccacatcggcgggtaccgcgggtggcgcctcagggtgctggaggcgttcgtcattatcctggccttcacgcagctgctttacgtgctggcgctgcactccggcctcttcgggaaccagttgggtggcaaccatgctggtgggtacccggcggagcatgcgtacggcgcaggcggcgacccgcacaacaagggcatgggcatgggcaccggcggcgtcgccagggtctgaatcgggtagagacctcgccgtgctccatcgcttggcggttgacagtgacgggcggataataaggtgtgtgtgtgtgtgtgtgtgtgtgtgtgtgttccgtcccgtatggtgtgagcgtacgttgtatgcagacatggtgtgcacggtaggcatgtagtgacggcgtgcgtgcgtacatgtgtagtactgcaggatgggcccttcttcttagtgtgttttgtgtttattatgtagtccgagatcaagatggagatcgatcagtccatgctatgcttcttcattctccgaccagacaattgcaatgcatgtctgggtgtggatgaatggctgcacttgtttaatttagtactactactctac

SEQ ID NO: 56676 - protein, 183 aa, Glycine max
  peptide (1)..(183): Ceres Seq. ID no. 14302537
  misc_feature (14)..(143): Pfam Name: AWPM-19-like family Pfam Description: AWPM-19-like family
  misc_feature (1)..(143): Homolog of NCBI NO: 15239619 NR Description: plasma membrane associated protein -related
  misc_feature (121)..(145): Homolog of NCBI NO: 34904644 NR Description: putative ABA-induced plasma membrane protein
  misc_feature (12)..(110): Homolog of NCBI NO: 34904644 NR Description: putative ABA-induced plasma membrane protein
  misc_feature (1)..(140): Homolog of NCBI NO: 15218953 NR Description: plasma membrane associated protein -related
  misc_feature (1)..(142): Homolog of NCBI NO: 34911480 NR Description: putative plasma membrane associated protein
  misc_feature (4)..(172): Homolog of NCBI NO: 18390408 NR Description: expressed protein [Arabidopsis thaliana]
  misc_feature (1)..(177): Homolog of NCBI NO: 7488688 NR Description: maturation protein PM3 - soybean
  misc_feature (1)..(165): Homolog of NCBI NO: 4097340 NR Description: hydrophobic LEA-like protein [Oryza sativa]
  misc_feature (1)..(183): Homolog of NCBI NO: 7489659 NR Description: ABA-induced plasma membrane protein PM 19 - wheat
  misc_feature (1)..(183): Homolog of NCBI NO: 6851373 NR Description: plasma membrane associated protein [Hordeum
MAGVGRNMVAPLLVLNLIMYLIVIGFASWNLNHFINGLTNRPGVGGNGATFYFLVFAILAGVVGAASKLAGVHHVRTWRGDSLATSASSSLVAWAITALAFGLACKEIHIGGYRGWRLRVLEAFVIILAFTQLLYVLALHSGLFGNQLGGNHAGGYPAEHAYGAGGDPHNKGMGMGTGGVARV

SEQ ID NO: 56677 - protein, 176 aa, Glycine max
  peptide (1)..(176): Ceres Seq. ID no. 14302538
  misc_feature (7)..(136): Pfam Name: AWPM-19-like family Pfam Description: AWPM-19-like family
  misc_feature (1)..(136): Homolog of NCBI NO: 15239619 NR Description: plasma membrane associated protein -related
  misc_feature (114)..(138): Homolog of NCBI NO: 34904644 NR Description: putative ABA-induced plasma membrane protein
  misc_feature (5)..(103): Homolog of NCBI NO: 34904644 NR Description: putative ABA-induced plasma membrane protein
  misc_feature (1)..(133): Homolog of NCBI NO: 15218953 NR Description: plasma membrane associated protein -related
  misc_feature (1)..(135): Homolog of NCBI NO: 34911480 NR Description: putative plasma membrane associated protein
  misc_feature (1)..(165): Homolog of NCBI NO: 18390408 NR Description: expressed protein [Arabidopsis thaliana]
  misc_feature (1)..(170): Homolog of NCBI NO: 7488688 NR Description: maturation protein PM3 - soybean
  misc_feature (1)..(158): Homolog of NCBI NO: 4097340 NR Description: hydrophobic LEA-like protein [Oryza sativa]
  misc_feature (1)..(176): Homolog of NCBI NO: 7489659 NR Description: ABA-induced plasma membrane protein PM 19 - wheat
  misc_feature (1)..(176): Homolog of NCBI NO: 6851373 NR Description: plasma membrane associated protein [Hordeum
MVAPLLVLNLIMYLIVIGFASWNLNHFINGLTNRPGVGGNGATFYFLVFAILAGVVGAASKLAGVHHVRTWRGDSLATSASSSLVAWAITALAFGLACKEIHIGGYRGWRLRVLEAFVIILAFTQLLYVLALHSGLFGNQLGGNHAGGYPAEHAYGAGGDPHNKGMGMGTGGVARV

SEQ ID NO: 56678 - protein, 165 aa, Glycine max
  peptide (1)..(165): Ceres Seq. ID no. 14302539
  misc_feature (1)..(125): Pfam Name: AWPM-19-like family Pfam Description: AWPM-19-like family
  misc_feature (1)..(125): Homolog of NCBI NO: 15239619 NR Description: plasma membrane associated protein -related
  misc_feature (103)..(127): Homolog of NCBI NO: 34904644 NR Description: putative ABA-induced plasma membrane protein
  misc_feature (1)..(92): Homolog of NCBI NO: 34904644 NR Description: putative ABA-induced plasma membrane protein
  misc_feature (1)..(122): Homolog of NCBI NO: 15218953 NR Description: plasma membrane associated protein -related
  misc_feature (1)..(124): Homolog of NCBI NO: 34911480 NR Description: putative plasma membrane associated protein
  misc_feature (1)..(154): Homolog of NCBI NO: 18390408 NR Description: expressed protein [Arabidopsis thaliana]
  misc_feature (1)..(159): Homolog of NCBI NO: 7488688 NR Description: maturation protein PM3 - soybean
  misc_feature (1)..(147): Homolog of NCBI NO: 4097340 NR Description: hydrophobic LEA-like protein [Oryza sativa]
  misc_feature (1)..(165): Homolog of NCBI NO: 7489659 NR Description: ABA-induced plasma membrane protein PM 19 - wheat
  misc_feature (1)..(165): Homolog of NCBI NO: 6851373 NR Description: plasma membrane associated protein [Hordeum
MYLIVIGFASWNLNHFINGLTNRPGVGGNGATFYFLVFAILAGVVGAASKLAGVHHVRTWRGDSLATSASSSLVAWAITALAFGLACKEIHIGGYRGWRLRVLEAFVIILAFTQLLYVLALHSGLFGNQLGGNHAGGYPAEHAYGAGGDPHNKGMGMGTGGVARV

SEQ ID NO: 56679 - DNA, 1412 bp, Glycine max
  misc_feature (1)..(1412): Ceres Seq. ID no. 13595525
atttaaaatttgccgaagaatccaattcagcgatctccgaagagctccatttgttgcactccaattggaaaaaagaagtgaacttgcgatctgggtatccaattttcgaactctttcgatggggaatgatgcagggtcaccgcagggtccggttacgtgtgggtcgtggattcggaggcccgagaatttgaatttggtggtgttgggaaggtccagacgtggcagttcttgtccttctctcttagagattttctccttcgatcccaaaaccacttctttgtctacctctcctctgaccacttatgtgttggaagcagaggaaggtgatcctgttgccattacagttcacccaagtggggatgattttgtgtgcgctctcagcaatggtagctgcaaattgtttgagctgtatggtcgtgaaacaaacatgaagttgttggctaaggaactggctcctctacagggtattggtcctcagaaatgtatttcttttagtgttgatgggtctaaatttgctgctggcggaatggatggacatctcagaatcatggagtggcctagtatgcgtgtgattttggatgaacctagagcacacaattcagttcaggatatggattttagtctagattcagaatttctagcttcaacttctactgatggttcagcaagaatctggaagactgaagatggtgttcctttgaatactttgtctcgcaactcggatgaaaagattgaattatgtcgattttccaaggacggaaccaaaccatttttattttgctctgttcaaaaaggtgatacttctgtcactgcggtttatgatattagcacatggaataaaattgggcataagaggctgattagaaagtctgcttcagtaatgtcaattagcaatgatgggaaatacctttctctgggcagtaaagatggagacatatgtgtagttgaagtaaagaaaatgcagatataccattatagcaagagactgcacctgggtacaaatattgcatcgcttgagttctgtcccggggaaagggttgtacttacaacctcagtagaatggggagcgctggtcactaagctgactgtacctaaagattggaaagaatggcagatctatttggtgctattgggactatttttagcatcagctgttgcattttacatattctttgagaactctgattcattctggaactttcccatgggcaaagaccaaccagcaagaccaaggtttaaacctgtgttaaaagatccccagtcttatgatgatcaaaatatttgggggccagtagatatgtgatcacacagacgttcttgattttagtcttcagtgctgttttggaagctgtaactggtatcaacatttatttttattttttttattactggtatcaacatttatttaagcc

SEQ ID NO: 56680 - protein, 433 aa, Glycine max
  peptide (1)..(433): Ceres Seq. ID no. 13595526
  misc_feature (69)..(270): Homolog of NCBI NO: 17473926 NR Description: putative protein transport protein SEC12p
  misc_feature (69)..(361): Homolog of NCBI NO: 322598 NR Description: St12p protein - Arabidopsis thaliana
  misc_feature (65)..(382): Homolog of NCBI NO: 8777388 NR Description: protein transport protein SEC12p-like
  misc_feature (65)..(389): Homolog of NCBI NO: 18423177 NR Description: St12p protein [Arabidopsis thaliana]
  misc_feature (69)..(388): Homolog of NCBI NO: 15226281 NR Description: SEC12p protein / St12p protein [Arabidopsis
  misc_feature (69)..(388): Homolog of NCBI NO: 11358859 NR Description: St12p protein [imported] - Arabidopsis thaliana
  misc_feature (162)..(411): Homolog of NCBI NO: 26450470 NR Description: unknown protein [Arabidopsis thaliana]
  misc_feature (49)..(393): Homolog of NCBI NO: 34897162 NR Description: putative membrane protein
  misc_feature (45)..(428): Homolog of NCBI NO: 34394605 NR Description: transducin / WD-40 repeat protein-like
  misc_feature (43)..(411): Homolog of NCBI NO: 18409509 NR Description: transducin / WD-40 repeat protein family
FKICRRIQFSDLRRAPFVALQLEKRSELAIWVSNFRTLSMGNDAGSPQGPVTCGSWIRRPENLNLVVLGRSRRGSSCPSLLEIFSFDPKTTSLSTSPLTTYVLEAEEGDPVAITVHPSGDDFVCALSNGSCKLFELYGRETNMKLLAKELAPLQGIGPQKCISFSVDGSKFAAGGMDGHLRIMEWPSMRVILDEPRAHNSVQDMDFSLDSEFLASTSTDGSARIWKTEDGVPLNTLSRNSDEKIELCRFSKDGTKPFLFCSVQKGDTSVTAVYDISTWNKIGHKRLIRKSASVMSISNDGKYLSLGSKDGDICVVEVKKMQIYHYSKRLHLGTNIASLEFCPGERVVLTTSVEWGALVTKLTVPKDWKEWQIYLVLLGLFLASAVAFYIFFENSDSFWNFPMGKDQPARPRFKPVLKDPQSYDDQNIWGPVDM

SEQ ID NO: 56681 - protein, 394 aa, Glycine max
  peptide (1)..(394): Ceres Seq. ID no. 13595527
  misc_feature (30)..(231): Homolog of NCBI NO: 17473926 NR Description: putative protein transport protein SEC12p
  misc_feature (30)..(322): Homolog of NCBI NO: 322598 NR Description: St12p protein - Arabidopsis thaliana
  misc_feature (26)..(343): Homolog of NCBI NO: 8777388 NR Description: protein transport protein SEC12p-like
  misc_feature (26)..(350): Homolog of NCBI NO: 18423177 NR Description: St12p protein [Arabidopsis thaliana]
  misc_feature (30)..(349): Homolog of NCBI NO: 15226281 NR Description: SEC12p protein / St12p protein [Arabidopsis
  misc_feature (30)..(349): Homolog of NCBI NO: 11358859 NR Description: St12p protein [imported] - Arabidopsis thaliana
  misc_feature (123)..(372): Homolog of NCBI NO: 26450470 NR Description: unknown protein [Arabidopsis thaliana]
  misc_feature (10)..(354): Homolog of NCBI NO: 34897162 NR Description: putative membrane protein
  misc_feature (6)..(389): Homolog of NCBI NO: 34394605 NR Description: transducin / WD-40 repeat protein-like
  misc_feature (4)..(372): Homolog of NCBI NO: 18409509 NR Description: transducin / WD-40 repeat protein family
MGNDAGSPQGPVTCGSWIRRPENLNLVVLGRSRRGSSCPSLLEIFSFDPKTTSLSTSPLTTYVLEAEEGDPVAITVHPSGDDFVCALSNGSCKLFELYGRETNMKLLAKELAPLQGIGPQKCISFSVDGSKFAAGGMDGHLRIMEWPSMRVILDEPRAHNSVQDMDFSLDSEFLASTSTDGSARIWKTEDGVPLNTLSRNSDEKIELCRFSKDGTKPFLFCSVQKGDTSVTAVYDISTWNKIGHKRLIRKSASVMSISNDGKYLSLGSKDGDICVVEVKKMQIYHYSKRLHLGTNIASLEFCPGERVVLTTSVEWGALVTKLTVPKDWKEWQIYLVLLGLFLASAVAFYIFFENSDSFWNFPMGKDQPARPRFKPVLKDPQSYDDQNIWGPVDM

SEQ ID NO: 56682 - protein, 291 aa, Glycine max
  peptide (1)..(291): Ceres Seq. ID no. 13595528
  misc_feature (1)..(128): Homolog of NCBI NO: 17473926 NR Description: putative protein transport protein SEC12p
  misc_feature (1)..(219): Homolog of NCBI NO: 322598 NR Description: St12p protein - Arabidopsis thaliana
  misc_feature (1)..(240): Homolog of NCBI NO: 8777388 NR Description: protein transport protein SEC12p-like
  misc_feature (1)..(247): Homolog of NCBI NO: 18423177 NR Description: St12p protein [Arabidopsis thaliana]
  misc_feature (1)..(246): Homolog of NCBI NO: 15226281 NR Description: SEC12p protein / St12p protein [Arabidopsis
  misc_feature (1)..(246): Homolog of NCBI NO: 11358859 NR Description: St12p protein [imported] - Arabidopsis thaliana
  misc_feature (20)..(269): Homolog of NCBI NO: 26450470 NR Description: unknown protein [Arabidopsis thaliana]
  misc_feature (1)..(251): Homolog of NCBI NO: 34897162 NR Description: putative membrane protein
  misc_feature (1)..(286): Homolog of NCBI NO: 34394605 NR Description: transducin / WD-40 repeat protein-like
  misc_feature (1)..(269): Homolog of NCBI NO: 18409509 NR Description: transducin / WD-40 repeat protein family
MKLLAKELAPLQGIGPQKCISFSVDGSKFAAGGMDGHLRIMEWPSMRVILDEPRAHNSVQDMDFSLDSEFLASTSTDGSARIWKTEDGVPLNTLSRNSDEKIELCRFSKDGTKPFLFCSVQKGDTSVTAVYDISTWNKIGHKRLIRKSASVMSISNDGKYLSLGSKDGDICVVEVKKMQIYHYSKRLHLGTNIASLEFCPGERVVLTTSVEWGALVTKLTVPKDWKEWQIYLVLLGLFLASAVAFYIFFENSDSFWNFPMGKDQPARPRFKPVLKDPQSYDDQNIWGPVDM

SEQ ID NO: 56683 - DNA, 787 bp, Glycine max
  misc_feature (1)..(787): Ceres Seq. ID no. 12611578
gatcgatagcagagcaattctcttgcaacttgataagatcgagatacttccagacacacgcgcacacatagggccggagatagaagaatagttatggcttcatcggcggtgagccacagccacggcgggcagcaccagcagcacctgccggcggcggcagggagcatgatggcgcgggtggaccggctggacctggtggtggggtacctggaggagatgcgccaccacagcggcggcagcggcaggtcgtccaccaccgcgaccagcacgctgtcatcgtcatccccgaccacgcctaggtcttcccggcctcatgggtgccggccggcggaggagctgctgcgggaggccaaggccaaggggagcctggtggagcgcatagcgttcctggaggaccgggtgctccggatggaggaggagcgcatggatctgtcgtccagcatggatacggcggagcagaccacgccgacctcgtcggggaggaggacgatgaggatgatgatgagcggcagcggcggggccggggatgagcatgggagtggcgggagcgggaagaaagggaagaaggggctcaagagcttggtcaagtcatgcgtccgagcaggcgccaagctcaagaccaaggaatagtctagtctttcttttgtttctttattattagtcgtgtgtgtacgtgcatatgttcacgtgtacgtacaccatgtacagtaaacgtatgtgtaaatgtgaatgtacacgttgtaataacgaaaaagtagtaatacatgcttgctgtattatcttcgcc

SEQ ID NO: 56684 - protein, 178 aa, Glycine max
  peptide (1)..(178): Ceres Seq. ID no. 12611579
  misc_feature (1)..(116): Homolog of NCBI NO: 40737035 NR Description: hypothetical protein [Oryza sativa (japonica
MASSAVSHSHGGQHQQHLPAAAGSMMARVDRLDLVVGYLEEMRHHSGGSGRSSTTATSTLSSSSPTTPRSSRPHGCRPAEELLREAKAKGSLVERIAFLEDRVLRMEEERMDLSSSMDTAEQTTPTSSGRRTMRMMMSGSGGAGDEHGSGGSGKKGKKGLKSLVKSCVRAGAKLKTKE

SEQ ID NO: 56685 - protein, 154 aa, Glycine max
  peptide (1)..(154): Ceres Seq. ID no. 12611580
  misc_feature (1)..(92): Homolog of NCBI NO: 40737035 NR Description: hypothetical protein [Oryza sativa (japonica
MMARVDRLDLVVGYLEEMRHHSGGSGRSSTTATSTLSSSSPTTPRSSRPHGCRPAEELLREAKAKGSLVERIAFLEDRVLRMEEERMDLSSSMDTAEQTTPTSSGRRTMRMMMSGSGGAGDEHGSGGSGKKGKKGLKSLVKSCVRAGAKLKTKE

SEQ ID NO: 56686 - protein, 153 aa, Glycine max
  peptide (1)..(153): Ceres Seq. ID no. 12611581
  misc_feature (1)..(91): Homolog of NCBI NO: 40737035 NR Description: hypothetical protein [Oryza sativa (japonica
MARVDRLDLVVGYLEEMRHHSGGSGRSSTTATSTLSSSSPTTPRSSRPHGCRPAEELLREAKAKGSLVERIAFLEDRVLRMEEERMDLSSSMDTAEQTTPTSSGRRTMRMMMSGSGGAGDEHGSGGSGKKGKKGLKSLVKSCVRAGAKLKTKE

SEQ ID NO: 56687 - DNA, 1823 bp, Glycine max
  misc_feature (1)..(1823): Ceres Seq. ID no. 13595529
gtgttcacacttccaacccaatcgggctgtcaaaacgacgacgttgacagcccggttctctggagatagacagatagatataggtacattcccagtttcaggtctggaattttgattctagataaggacaagggttgctacttgttggtgttgtgctgtagtattggtttgacaagcttttgcgttgagttgagttgggttgagtttagtatctgcaatgagttcgttttctggagccattcaaagacctctggtggcggctgccgcagttgctgttgcttctttctctgctgatctctccgataaattgccatcacgtgattgttctacctccgatttggcacattctactccttgtagcaacatacaagaatcagattcatcctgggtttctcatatttcggactctaaacttgctaacctatcttttgtgacccagattccggtgcctgtgcctaatgttcaattccgggtaccgagtttgggacagaattgtgtttcaaatttgtaccattcttcggttgcttcatcaccacttcttcggaatttgtatcactctgctgacttgcctagagtctcgaggtctgctgcatattcccatggtatctccaattcaacttctgaggctgaggtcatgtataaatggcatttacccgaactgaatgctttggatgattctagttgttcattgacaaagtcaaggacagtggtggtcttgctgggatggttgggagcaaggcagaaacacttgaagaagtatgcggaatggtacactytaagggggtttcatgtggttaccttcacgtttccaatgggggaggtcctgagttatcagccgggtggaaaagcggagcaaaatgttcatttgcttgtggaccacttggctgagtggttagaaggggaaagtgataagaatcttgtctttcatactttcagcaacactggatggttaacatatggtgttattcttgaacattttcaaaaccaggatccaactatcacggaaaggattaagggatgcattgtagactctgcacctgttgcgtaccctgacccacaggtctgggcctcaggtttctctgctgcatttctcaagaagaatagtgtggctacaaaaggacgtgttttttccgatcaatctggcattaaagtatcaattggcagtgaagatgatttagggctcaaacctgctctaacagaagcagctttactactaattctaaagaaattttttgagatcattctggatcttccttcagtgaacaggaggctctctgatgttatgagcatgttatcatcaaaacaacccagctgtccacagttatacatgtatagctctgctgacagggttattcctgctgattcagtggaatcatttgtagaggctcagcgcagggctggacatgatgtgagggcatgcaattttgtctcctcaccccatgttgaccactttaggaatgacccaagattgtatacatctcagctcagtcagtttttggaggagtgtgttcttagccgttgtaaatcttactaattctttacattccttggcttactcatacaccatatagttcattcattttgatttttgaaagcagccattccattaatggatgttgccatggtggttaggactttatgaaaagtcaaccacctcaaggggattacacaattgttccctcacaggttataattgattcattgacatattgatagtgcaaatgaaagatatgttacacaattgttacctgacagcttataattgatccctcgatatattgatagtgcaaatgaaagattttgcaactttcttcggagggggg

SEQ ID NO: 56688 - protein, 438 aa, Glycine max
  peptide (1)..(438): Ceres Seq. ID no. 15221602
  misc_feature (161)..(427): Pfam Name: Eukaryotic protein of unknown function (DUF829) Pfam Description: Eukaryotic protein of unknown function (DUF829)
  misc_feature (365)..(431): Homolog of NCBI NO: 21312110 NR Description: RIKEN cDNA 1110038M16 [Mus musculus]
  misc_feature (160)..(274): Homolog of NCBI NO: 21312110 NR Description: RIKEN cDNA 1110038M16 [Mus musculus]
  misc_feature (365)..(431): Homolog of NCBI NO: 12838701 NR Description: unnamed protein product [Mus musculus]
  misc_feature (160)..(274): Homolog of NCBI NO: 12838701 NR Description: unnamed protein product [Mus musculus]
  misc_feature (368)..(429): Homolog of NCBI NO: 39595723 NR Description: Hypothetical protein CBG12665 [Caenorhabditis
  misc_feature (107)..(274): Homolog of NCBI NO: 39595723 NR Description: Hypothetical protein CBG12665 [Caenorhabditis
  misc_feature (103)..(272): Homolog of NCBI NO: 25411844 NR Description: probable integral membrane protein
  misc_feature (103)..(430): Homolog of NCBI NO: 21536700 NR Description: unknown [Arabidopsis thaliana]
  misc_feature (103)..(430): Homolog of NCBI NO: 18398681 NR Description: expressed protein [Arabidopsis thaliana]
  misc_feature (1)..(435): Homolog of NCBI NO: 18402437 NR Description: expressed protein [Arabidopsis thaliana]
  misc_feature (187)..(187): Xaa is any aa, unknown or other
MSSFSGAIQRPLVAAAAVAVASFSADLSDKLPSRDCSTSDLAHSTPCSNIQESDSSWVSHISDSKLANLSFVTQIPVPVPNVQFRVPSLGQNCVSNLYHSSVASSPLLRNLYHSADLPRVSRSAAYSHGISNSTSEAEVMYKWHLPELNALDDSSCSLTKSRTVVVLLGWLGARQKHLKKYAEWYTXRGFHVVTFTFPMGEVLSYQPGGKAEQNVHLLVDHLAEWLEGESDKNLVFHTFSNTGWLTYGVILEHFQNQDPTITERIKGCIVDSAPVAYPDPQVWASGFSAAFLKKNSVATKGRVFSDQSGIKVSIGSEDDLGLKPALTEAALLLILKKFFEIILDLPSVNRRLSDVMSMLSSKQPSCPQLYMYSSADRVIPADSVESFVEAQRRAGHDVRACNFVSSPHVDHFRNDPRLYTSQLSQFLEECVLSRCKSY

SEQ ID NO: 56689 - protein, 299 aa, Glycine max
  peptide (1)..(299): Ceres Seq. ID no. 15221603
  misc_feature (22)..(288): Pfam Name: Eukaryotic protein of unknown function (DUF829) Pfam Description: Eukaryotic protein of unknown function (DUF829)
  misc_feature (226)..(292): Homolog of NCBI NO: 21312110 NR Description: RIKEN cDNA 1110038M16 [Mus musculus]
  misc_feature (21)..(135): Homolog of NCBI NO: 21312110 NR Description: RIKEN cDNA 1110038M16 [Mus musculus]
  misc_feature (226)..(292): Homolog of NCBI NO: 12838701 NR Description: unnamed protein product [Mus musculus]
  misc_feature (21)..(135): Homolog of NCBI NO: 12838701 NR Description: unnamed protein product [Mus musculus]
  misc_feature (229)..(290): Homolog of NCBI NO: 39595723 NR Description: Hypothetical protein CBG12665 [Caenorhabditis
  misc_feature (1)..(135): Homolog of NCBI NO: 39595723 NR Description: Hypothetical protein CBG12665 [Caenorhabditis
  misc_feature (1)..(133): Homolog of NCBI NO: 25411844 NR Description: probable integral membrane protein
  misc_feature (1)..(291): Homolog of NCBI NO: 21536700 NR Description: unknown [Arabidopsis thaliana]
  misc_feature (1)..(291): Homolog of NCBI NO: 18398681 NR Description: expressed protein [Arabidopsis thaliana]
  misc_feature (1)..(296): Homolog of NCBI NO: 18402437 NR Description: expressed protein [Arabidopsis thaliana]
  misc_feature (48)..(48): Xaa is any aa, unknown or other
MYKWHLPELNALDDSSCSLTKSRTVVVLLGWLGARQKHLKKYAEWYTXRGFHVVTFTFPMGEVLSYQPGGKAEQNVHLLVDHLAEWLEGESDKNLVFHTFSNTGWLTYGVILEHFQNQDPTITERIKGCIVDSAPVAYPDPQVWASGFSAAFLKKNSVATKGRVFSDQSGIKVSIGSEDDLGLKPALTEAALLLILKKFFEIILDLPSVNRRLSDVMSMLSSKQPSCPQLYMYSSADRVIPADSVESFVEAQRRAGHDVRACNFVSSPHVDHFRNDPRLYTSQLSQFLEECVLSRCKSY

SEQ ID NO: 56690 - protein, 240 aa, Glycine max
  peptide (1)..(240): Ceres Seq. ID no. 15221604
  misc_feature (1)..(229): Pfam Name: Eukaryotic protein of unknown function (DUF829) Pfam Description: Eukaryotic protein of unknown function (DUF829)
  misc_feature (167)..(233): Homolog of NCBI NO: 21312110 NR Description: RIKEN cDNA 1110038M16 [Mus musculus]
  misc_feature (1)..(76): Homolog of NCBI NO: 21312110 NR Description: RIKEN cDNA 1110038M16 [Mus musculus]
  misc_feature (167)..(233): Homolog of NCBI NO: 12838701 NR Description: unnamed protein product [Mus musculus]
  misc_feature (1)..(76): Homolog of NCBI NO: 12838701 NR Description: unnamed protein product [Mus musculus]
  misc_feature (170)..(231): Homolog of NCBI NO: 39595723 NR Description: Hypothetical protein CBG12665 [Caenorhabditis
  misc_feature (1)..(76): Homolog of NCBI NO: 39595723 NR Description: Hypothetical protein CBG12665 [Caenorhabditis
  misc_feature (1)..(74): Homolog of NCBI NO: 25411844 NR Description: probable integral membrane protein
  misc_feature (1)..(232): Homolog of NCBI NO: 21536700 NR Description: unknown [Arabidopsis thaliana]
  misc_feature (1)..(232): Homolog of NCBI NO: 18398681 NR Description: expressed protein [Arabidopsis thaliana]
  misc_feature (1)..(237): Homolog of NCBI NO: 18402437 NR Description: expressed protein [Arabidopsis thaliana]
MGEVLSYQPGGKAEQNVHLLVDHLAEWLEGESDKNLVFHTFSNTGWLTYGVILEHFQNQDPTITERIKGCIVDSAPVAYPDPQVWASGFSAAFLKKNSVATKGRVFSDQSGIKVSIGSEDDLGLKPALTEAALLLILKKFFEIILDLPSVNRRLSDVMSMLSSKQPSCPQLYMYSSADRVIPADSVESFVEAQRRAGHDVRACNFVSSPHVDHFRNDPRLYTSQLSQFLEECVLSRCKSY

SEQ ID NO: 56691 - DNA, 1028 bp, Glycine max
  misc_feature (1)..(1028): Ceres Seq. ID no. 13639117
gatgatgtttccacggcaatgacagaacaaagatctttctttttctctctgtgtcaggaacttacctctttgaagttataataatattcaagtgaagctcgtcaaggtgaaacagagtttctctgaatcgaagtagcgactcgtgtttttgattccatggctttgacttcgtgcctaaagactggagtagttccgatgtctccgaccaccgggttgtatctttccggcagcctcttgaagtcggacagtggcttcgccgttccgacgaagttacagagtgttcgaaaaagtgatagagagaggttgagaatccaagccgtgttcagctttcctcctgcgttcctaacaagaaacggtcgagcagagaagcagaagcagctgaagcaagaccttctcgaagccattgagcctctcgaacgtggcgccaccgcctcgcctgatgaccagcttcggatcgatcagttggcgcgtaaagtggaagcagtgaatccaaccaaggagcctctgaagtctgatttgctcaatgggaaatgggagctcatttacacaacctctgcttctattctccaggctaagaaaccgaagttcttgagatcaataacaaactaccagtctatcaatgtggataccctcaaggttcaaaacatggagacttggcctttcttcaactcggtaactggagacataagacccctcaattcaaggaaggtcgctgtgcagctcaaagtgtttaaaattctcggccttattcctgtaaatgcacctgaaacagcacgtggtgaactagagattacttatgtggacgaggaactacggttgtcaaggggtgacaagggcaacttgtttatattgaagatgtttgatcccacttaccgaatccctctctgaagccaaatggttccaagcccatcatacatacatacatacccccatcgcttgttctgtctctctcttcatcatcatatgtatagaagaatgtttcttcttctacaaacataaaatcttaataagatcaaaacaagagtctc

SEQ ID NO: 56692 - protein, 243 aa, Glycine max
  peptide (1)..(243): Ceres Seq. ID no. 13639118
  misc_feature (73)..(233): Pfam Name: PAP_fibrillin Pfam Description: PAP_fibrillin
  misc_feature (76)..(197): Homolog of NCBI NO: 5020103 NR Description: fibrillin [Nostoc sp. PCC 8009]
  misc_feature (210)..(232): Homolog of NCBI NO: 16329838 NR Description: fibrillin [Synechocystis sp. PCC 6803]
  misc_feature (76)..(197): Homolog of NCBI NO: 16329838 NR Description: fibrillin [Synechocystis sp. PCC 6803]
  misc_feature (220)..(243): Homolog of NCBI NO: 9279613 NR Description: gene_id:MPE11.25~unknown protein [Arabidopsis
  misc_feature (173)..(220): Homolog of NCBI NO: 9279613 NR Description: gene_id:MPE11.25~unknown protein [Arabidopsis
  misc_feature (1)..(140): Homolog of NCBI NO: 9279613 NR Description: gene_id:MPE11.25~unknown protein [Arabidopsis
  misc_feature (220)..(243): Homolog of NCBI NO: 15230986 NR Description: plastid-lipid associated protein PAP/fibrillin
  misc_feature (1)..(220): Homolog of NCBI NO: 15230986 NR Description: plastid-lipid associated protein PAP/fibrillin
  misc_feature (27)..(243): Homolog of NCBI NO: 17065226 NR Description: Unknown protein [Arabidopsis thaliana]
  misc_feature (1)..(243): Homolog of NCBI NO: 30688146 NR Description: plastid-lipid associated protein PAP/fibrillin
MALTSCLKTGVVPMSPTTGLYLSGSLLKSDSGFAVPTKLQSVRKSDRERLRIQAVFSFPPAFLTRNGRAEKQKQLKQDLLEAIEPLERGATASPDDQLRIDQLARKVEAVNPTKEPLKSDLLNGKWELIYTTSASILQAKKPKFLRSITNYQSINVDTLKVQNMETWPFFNSVTGDIRPLNSRKVAVQLKVFKILGLIPVNAPETARGELEITYVDEELRLSRGDKGNLFILKMFDPTYRIPL

SEQ ID NO: 56693 - protein, 230 aa, Glycine max
  peptide (1)..(230): Ceres Seq. ID no. 13639119
  misc_feature (60)..(220): Pfam Name: PAP_fibrillin Pfam Description: PAP_fibrillin
  misc_feature (63)..(184): Homolog of NCBI NO: 5020103 NR Description: fibrillin [Nostoc sp. PCC 8009]
  misc_feature (197)..(219): Homolog of NCBI NO: 16329838 NR Description: fibrillin [Synechocystis sp. PCC 6803]
  misc_feature (63)..(184): Homolog of NCBI NO: 16329838 NR Description: fibrillin [Synechocystis sp. PCC 6803]
  misc_feature (207)..(230): Homolog of NCBI NO: 9279613 NR Description: gene_id:MPE11.25~unknown protein [Arabidopsis
  misc_feature (160)..(207): Homolog of NCBI NO: 9279613 NR Description: gene_id:MPE11.25~unknown protein [Arabidopsis
  misc_feature (1)..(127): Homolog of NCBI NO: 9279613 NR Description: gene_id:MPE11.25~unknown protein [Arabidopsis
  misc_feature (207)..(230): Homolog of NCBI NO: 15230986 NR Description: plastid-lipid associated protein PAP/fibrillin
  misc_feature (1)..(207): Homolog of NCBI NO: 15230986 NR Description: plastid-lipid associated protein PAP/fibrillin
  misc_feature (14)..(230): Homolog of NCBI NO: 17065226 NR Description: Unknown protein [Arabidopsis thaliana]
  misc_feature (1)..(230): Homolog of NCBI NO: 30688146 NR Description: plastid-lipid associated protein PAP/fibrillin
MSPTTGLYLSGSLLKSDSGFAVPTKLQSVRKSDRERLRIQAVFSFPPAFLTRNGRAEKQKQLKQDLLEAIEPLERGATASPDDQLRIDQLARKVEAVNPTKEPLKSDLLNGKWELIYTTSASILQAKKPKFLRSITNYQSINVDTLKVQNMETWPFFNSVTGDIRPLNSRKVAVQLKVFKILGLIPVNAPETARGELEITYVDEELRLSRGDKGNLFILKMFDPTYRIPL

SEQ ID NO: 56694 - DNA, 1605 bp, Glycine max
  misc_feature (1)..(1605): Ceres Seq. ID no. 14311136
ataaaactttgcccaaaaagaggatgttaaagctgggcctgaaataataatactactccaatattctcttctcaaacctactcttctatctttcgctctccccctctgcgtttctgacagtgttactgtgtgtgttttccgcggaaaatcaaaatgggtatcattgaaaagatcaaagaaattgaagccgagatggctcggacacagaaaaataaagccacagagtatcatcttgggcagctcaaggctaaaatagcaaaattaaggacacaattattggagcctccaaaaggttctagtggaggtggagaaggatttgaagttacaaaattcggtcatggacgtgttgcactgattggatttccaagtgtggggaagtctactcttttgacaatgttaacgggcacacattctgaagctgcatcttatgagtttactactttgacctgtattcctgggattatacactataatgatactaaaattcagttactcgatcttcctggaattattgaaggtgcatctgaaggcaagggacgtggaagacaggttattgctgttgctaaatcttcagacatagtattgatggttcttgatgcttccaaaagtgagggtcataggcaaatattgaccaaagagctcgaagctgtgggcttgcggttaaacaagagaccacctcagatatattttaaaaagaaaaagacggggggcatttcattcaacagcactttgcctttgactcatgtggatgagaagctttgttatcagattctgcacgagtacaagattcacaatgcagagatccttttccgtgaggatgctacagtggatgatctcatagatgtcattgaaggaaaccgaaaatacatgaagtgtgtatatgtctacaacaagatagatgttattggtattgatgatgtggacagattagcccgtcaaccaaattctgttgtcattagctgcaatttgaagctgaacttagacagactgcttgcaaggatgtgggatgaaatgggtctggttagagtttacacaaaaccacaaggccagcagcctgattttggtgatcctgtggttctttctgctgatagaggtggctgcactgtagaagacttctgcaaccatatacacagaagtttggtgaaggatgtgaagtatgttctggtctggggtactagtgcaaggcactacccgcagcactgtggtcttagtcacaatcttcatgacgaggatgttgttcagattgtgaagaaaaaggaaaaggaagagggaggaaggggacgatttaaatcacattccaatgctcctgccaggatatctgacagagagaagaaggcaccactgaagacataattatatgacacagcctgtgatttcatcattgatttttgcctagtggatgggaaaaatgactataggtgatgatacatccaaaggcaaaggttcttatcttgattgctcatgcaacataggattgaaaattcctcctgagcactaagtggggcacctatatttttttgtcacccaagtgttgtaacatcccctccccctcttttgaataatagtttttatcagttatgaagtgtgcatctatgatttgaagag

SEQ ID NO: 56695 - protein, 399 aa, Glycine max
  peptide (1)..(399): Ceres Seq. ID no. 14311137
  misc_feature (1)..(267): Pfam Name: GTP1/OBG family Pfam Description: GTP1/OBG family
  misc_feature (1)..(367): Homolog of NCBI NO: 17551942 NR Description: GTP-binding protein like (3J337) [Caenorhabditis
  misc_feature (1)..(367): Homolog of NCBI NO: 12653443 NR Description: developmentally regulated GTP-binding protein 2
  misc_feature (1)..(367): Homolog of NCBI NO: 4557537 NR Description: developmentally regulated GTP binding protein 2
  misc_feature (1)..(367): Homolog of NCBI NO: 34221970 NR Description: developmentally regulated GTP-binding protein
  misc_feature (1)..(398): Homolog of NCBI NO: 7441590 NR Description: GTP binding protein - garden pea
  misc_feature (1)..(398): Homolog of NCBI NO: 8778457 NR Description: F1L3.17 [Arabidopsis thaliana]
  misc_feature (1)..(398): Homolog of NCBI NO: 13877991 NR Description: putative developmentally regulated GTP-binding
  misc_feature (1)..(398): Homolog of NCBI NO: 2058456 NR Description: GTP-binding protein [Arabidopsis thaliana]
  misc_feature (1)..(398): Homolog of NCBI NO: 15220113 NR Description: developmentally regulated GTP-binding protein
  misc_feature (1)..(398): Homolog of NCBI NO: 15218561 NR Description: GTP-binding protein -related [Arabidopsis
MGIIEKIKEIEAEMARTQKNKATEYHLGQLKAKIAKLRTQLLEPPKGSSGGGEGFEVTKFGHGRVALIGFPSVGKSTLLTMLTGTHSEAASYEFTTLTCIPGIIHYNDTKIQLLDLPGIIEGASEGKGRGRQVIAVAKSSDIVLMVLDASKSEGHRQILTKELEAVGLRLNKRPPQIYFKKKKTGGISFNSTLPLTHVDEKLCYQILHEYKIHNAEILFREDATVDDLIDVIEGNRKYMKCVYVYNKIDVIGIDDVDRLARQPNSVVISCNLKLNLDRLLARMWDEMGLVRVYTKPQGQQPDFGDPVVLSADRGGCTVEDFCNHIHRSLVKDVKYVLVWGTSARHYPQHCGLSHNLHDEDVVQIVKKKEKEEGGRGRFKSHSNAPARISDREKKAPLKT

SEQ ID NO: 56696 - protein, 386 aa, Glycine max
  peptide (1)..(386): Ceres Seq. ID no. 14311138
  misc_feature (1)..(254): Pfam Name: GTP1/OBG family Pfam Description: GTP1/OBG family
  misc_feature (1)..(354): Homolog of NCBI NO: 17551942 NR Description: GTP-binding protein like (3J337) [Caenorhabditis
  misc_feature (1)..(354): Homolog of NCBI NO: 12653443 NR Description: developmentally regulated GTP-binding protein 2
  misc_feature (1)..(354): Homolog of NCBI NO: 4557537 NR Description: developmentally regulated GTP binding protein 2
  misc_feature (1)..(354): Homolog of NCBI NO: 34221970 NR Description: developmentally regulated GTP-binding protein
  misc_feature (1)..(385): Homolog of NCBI NO: 7441590 NR Description: GTP binding protein - garden pea
  misc_feature (1)..(385): Homolog of NCBI NO: 8778457 NR Description: F1L3.17 [Arabidopsis thaliana]
  misc_feature (1)..(385): Homolog of NCBI NO: 13877991 NR Description: putative developmentally regulated GTP-binding
  misc_feature (1)..(385): Homolog of NCBI NO: 2058456 NR Description: GTP-binding protein [Arabidopsis thaliana]
  misc_feature (1)..(385): Homolog of NCBI NO: 15220113 NR Description: developmentally regulated GTP-binding protein
  misc_feature (1)..(385): Homolog of NCBI NO: 15218561 NR Description: GTP-binding protein -related [Arabidopsis
MARTQKNKATEYHLGQLKAKIAKLRTQLLEPPKGSSGGGEGFEVTKFGHGRVALIGFPSVGKSTLLTMLTGTHSEAASYEFTTLTCIPGIIHYNDTKIQLLDLPGIIEGASEGKGRGRQVIAVAKSSDIVLMVLDASKSEGHRQILTKELEAVGLRLNKRPPQIYFKKKKTGGISFNSTLPLTHVDEKLCYQILHEYKIHNAEILFREDATVDDLIDVIEGNRKYMKCVYVYNKIDVIGIDDVDRLARQPNSVVISCNLKLNLDRLLARMWDEMGLVRVYTKPQGQQPDFGDPVVLSADRGGCTVEDFCNHIHRSLVKDVKYVLVWGTSARHYPQHCGLSHNLHDEDVVQIVKKKEKEEGGRGRFKSHSNAPARISDREKKAPLKT

SEQ ID NO: 56697 - protein, 319 aa, Glycine max
  peptide (1)..(319): Ceres Seq. ID no. 14311139
  misc_feature (1)..(187): Pfam Name: GTP1/OBG family Pfam Description: GTP1/OBG family
  misc_feature (1)..(287): Homolog of NCBI NO: 17551942 NR Description: GTP-binding protein like (3J337) [Caenorhabditis
  misc_feature (1)..(287): Homolog of NCBI NO: 12653443 NR Description: developmentally regulated GTP-binding protein 2
  misc_feature (1)..(287): Homolog of NCBI NO: 4557537 NR Description: developmentally regulated GTP binding protein 2
  misc_feature (1)..(287): Homolog of NCBI NO: 34221970 NR Description: developmentally regulated GTP-binding protein
  misc_feature (1)..(318): Homolog of NCBI NO: 7441590 NR Description: GTP binding protein - garden pea
  misc_feature (1)..(318): Homolog of NCBI NO: 8778457 NR Description: F1L3.17 [Arabidopsis thaliana]
  misc_feature (1)..(318): Homolog of NCBI NO: 13877991 NR Description: putative developmentally regulated GTP-binding
  misc_feature (1)..(318): Homolog of NCBI NO: 2058456 NR Description: GTP-binding protein [Arabidopsis thaliana]
  misc_feature (1)..(318): Homolog of NCBI NO: 15220113 NR Description: developmentally regulated GTP-binding protein
  misc_feature (1)..(318): Homolog of NCBI NO: 15218561 NR Description: GTP-binding protein -related [Arabidopsis
MLTGTHSEAASYEFTTLTCIPGIIHYNDTKIQLLDLPGIIEGASEGKGRGRQVIAVAKSSDIVLMVLDASKSEGHRQILTKELEAVGLRLNKRPPQIYFKKKKTGGISFNSTLPLTHVDEKLCYQILHEYKIHNAEILFREDATVDDLIDVIEGNRKYMKCVYVYNKIDVIGIDDVDRLARQPNSVVISCNLKLNLDRLLARMWDEMGLVRVYTKPQGQQPDFGDPVVLSADRGGCTVEDFCNHIHRSLVKDVKYVLVWGTSARHYPQHCGLSHNLHDEDVVQIVKKKEKEEGGRGRFKSHSNAPARISDREKKAPLKT

SEQ ID NO: 56698 - DNA, 789 bp, Glycine max
  misc_feature (1)..(789): Ceres Seq. ID no. 13595818
atcaatcaattccgctcctcccccttggatccaaacccttcccatcactctcgcttgactccttggaagcagagagaggaggaggaggaggaggaggaggagaccatgtcgtcgtccggtggcaagctcttcaccctggaggaggtcgccaagcacagctccaaggacgactgctggctcgtcatcggcggcaaggtgtacaatgtgaccaagtttcttgatgaccaccctggaggcgacgacgtcttgctgtcttcaactgccaaggacgcgaccgacgacttcgaggacgtgggacacagcacaaccgcccgggcgatgatggacgagtactacgtcggcgagatcgacgcgaccacgatacccaccaaggtcaagtacacgccgcccaagcagccgcactacaaccaggacaagacccccgagttcgtcatcaagatcctccagttcttggtccccctcgcgatactgggcctggccgtcgccgtacggatctacaccaaggcagactctgtctagcaccgtcatcttataccagtcagtcagtcattcggaagtgtccaagagctgaataagttttagtggggatttgcatattttgtaccagcgtcaccgtcctgtcatggaatctgggaactgctctcgacccgtcgttgcgttatggttctactaagacgtccgctgttgaatcgtgactcgggaaaaacggatagatacttggctatattttccatatcgctggtgaatgttcagacatacatattcttaatttgatgtgattagttgtgt

SEQ ID NO: 56699 - protein, 172 aa, Glycine max
  peptide (1)..(172): Ceres Seq. ID no. 13595819
  misc_feature (43)..(117): Pfam Name: Cytochrome b5-like Heme/Steroid binding domain Pfam Description: Cytochrome b5-like Heme/Steroid binding domain
  misc_feature (41)..(171): Homolog of NCBI NO: 12229735 NR Description: Cytochrome b5
  misc_feature (42)..(171): Homolog of NCBI NO: 2647949 NR Description: cytochrome b5 [Olea europaea]
  misc_feature (40)..(171): Homolog of NCBI NO: 1345879 NR Description: Cytochrome b5
  misc_feature (40)..(168): Homolog of NCBI NO: 1345925 NR Description: Cytochrome b5, seed isoform
  misc_feature (40)..(171): Homolog of NCBI NO: 1345882 NR Description: CYTOCHROME B5
  misc_feature (40)..(171): Homolog of NCBI NO: 1076621 NR Description: cytochrome b5 - common tobacco
  misc_feature (42)..(169): Homolog of NCBI NO: 15225731 NR Description: cytochrome b5, putative [Arabidopsis thaliana]
  misc_feature (36)..(171): Homolog of NCBI NO: 1345881 NR Description: Cytochrome b5
  misc_feature (36)..(171): Homolog of NCBI NO: 14719320 NR Description: cytochrome B5 [Oryza sativa]
  misc_feature (39)..(171): Homolog of NCBI NO: 34905998 NR Description: putative cytochrome B5 [Oryza sativa (japonica
INQFRSSPLDPNPSHHSRLTPWKQREEEEEEEEETMSSSGGKLFTLEEVAKHSSKDDCWLVIGGKVYNVTKFLDDHPGGDDVLLSSTAKDATDDFEDVGHSTTARAMMDEYYVGEIDATTIPTKVKYTPPKQPHYNQDKTPEFVIKILQFLVPLAILGLAVAVRIYTKADSV

SEQ ID NO: 56700 - protein, 137 aa, Glycine max
  peptide (1)..(137): Ceres Seq. ID no. 13595820
  misc_feature (8)..(82): Pfam Name: Cytochrome b5-like Heme/Steroid binding domain Pfam Description: Cytochrome b5-like Heme/Steroid binding domain
  misc_feature (6)..(136): Homolog of NCBI NO: 12229735 NR Description: Cytochrome b5
  misc_feature (7)..(136): Homolog of NCBI NO: 2647949 NR Description: cytochrome b5 [Olea europaea]
  misc_feature (5)..(136): Homolog of NCBI NO: 1345879 NR Description: Cytochrome b5
  misc_feature (5)..(133): Homolog of NCBI NO: 1345925 NR Description: Cytochrome b5, seed isoform
  misc_feature (5)..(136): Homolog of NCBI NO: 1345882 NR Description: CYTOCHROME B5
  misc_feature (5)..(136): Homolog of NCBI NO: 1076621 NR Description: cytochrome b5 - common tobacco
  misc_feature (7)..(134): Homolog of NCBI NO: 15225731 NR Description: cytochrome b5, putative [Arabidopsis thaliana]
  misc_feature (1)..(136): Homolog of NCBI NO: 1345881 NR Description: Cytochrome b5
  misc_feature (1)..(136): Homolog of NCBI NO: 14719320 NR Description: cytochrome B5 [Oryza sativa]
  misc_feature (4)..(136): Homolog of NCBI NO: 34905998 NR Description: putative cytochrome B5 [Oryza sativa (japonica
MSSSGGKLFTLEEVAKHSSKDDCWLVIGGKVYNVTKFLDDHPGGDDVLLSSTAKDATDDFEDVGHSTTARAMMDEYYVGEIDATTIPTKVKYTPPKQPHYNQDKTPEFVIKILQFLVPLAILGLAVAVRIYTKADSV

SEQ ID NO: 56701 - DNA, 1542 bp, Glycine max
  misc_feature (1)..(1542): Ceres Seq. ID no. 13639300
aatagcagctcagaaagaaacgcaagttttggcatgggtgtgagctctggaactccactcgtgatccaacacgatagagagagaaaaagggtcttgcctttttttctgcttttgatttgactctttacaaatacaaataaataataaaatcccatcaagaagaaataaatatcaagcccaacccagtgcagtgctgcagggactgtcactgaactcaaaaatgaactgtcttcggaatctttctcgattctctgttttgcccttcgaaacacctgttacgcgccaccgcaagaaccttcccctttccctgggtttcgtcaacaattctcgtcaatatccaactatggccctcaaggctgcctcaggttctataccaagtgcagacacaagtagtgccgataaggaggaagaaaagtctgagacatatagtcataacatgacagaagccatgggtgctgttttgacttataggcatgaattaggaatgaactataatttcatccgtccagacttgattgtgggatcatgcctacagactcctgaagatgtagacaagttgcgtagaattggagtgaaaactatattttgcttacaacaagattcagaccttgaatattttggagttgatattaatgccatacgagaatatgccaagacatgcaatgacattcaacacttgcgtgctgagataagggactttgatgcatttgatctacggaggcggcttccagctgtagttagcaaattatacaaggcaataaattccaatggaggtgtaacatatatacattgcactgctggacttggaagagctccagctgttgcgttggcttatatgttttgggttctgggttataaacttaacgaggctcatacactacttcagagcaaaaggtcgtgctttccaaaactggatgccattaaaagtgcaacagctgatattcttacaggcctcagtaagaagtctgtcactttgtcatgggaagacaaaaattgctctaccgtggaaatttcaggacttgatattggatgggggcagagaatacccctaaattttgatgacaaagagggtttgtggtttctcaagagggaattgcctgaaggactctacgagtacaagtacattgttgatggggaatggacatgcaacagcgatgagcttataacctctcccaacaaagatggccatgtcaacaattttattcaagtccttgatgatacaagcagtgttcgtgcctctcttcggaagagattgacggctgatgatcctgatctcacaacagatgaacaactcagaataaaggagtttcttgaagcttgtcctgatgaggattagtgaaccatcaattcacgtggttgttgatatgaaaaatactagatgcgcgcatacatgttacctaataagattaatctaaaccttacaatatgttgggttcctgcggtttattgagttccatagtaatcaaatgtcttggaaattatttaaatagcaccatgaccttcaaatttcaatgtaccatgaaatagaatgtggctataaaa

SEQ ID NO: 56702 - protein, 371 aa, Glycine max
  peptide (1)..(371): Ceres Seq. ID no. 13639301
  misc_feature (90)..(240): Pfam Name: Dual specificity phosphatase, catalytic domain Pfam Description: Dual specificity phosphatase, catalytic domain
  misc_feature (1)..(241): Homolog of NCBI NO: 18399058 NR Description: expressed protein [Arabidopsis thaliana]
  misc_feature (44)..(80): Homolog of NCBI NO: 34902388 NR Description: Unknown protein [Oryza sativa (japonica
  misc_feature (203)..(308): Homolog of NCBI NO: 34902388 NR Description: Unknown protein [Oryza sativa (japonica
  misc_feature (132)..(330): Homolog of NCBI NO: 11544661 NR Description: PTPKIS1 (truncated form) [Arabidopsis thaliana]
  misc_feature (274)..(371): Homolog of NCBI NO: 11288831 NR Description: hypothetical protein F4F15.290 - Arabidopsis
  misc_feature (1)..(254): Homolog of NCBI NO: 11288831 NR Description: hypothetical protein F4F15.290 - Arabidopsis
  misc_feature (1)..(371): Homolog of NCBI NO: 16612246 NR Description: AT3g52180/F4F15_290 [Arabidopsis thaliana]
  misc_feature (1)..(371): Homolog of NCBI NO: 21536905 NR Description: unknown [Arabidopsis thaliana]
  misc_feature (1)..(371): Homolog of NCBI NO: 18409505 NR Description: expressed protein [Arabidopsis thaliana]
  misc_feature (1)..(369): Homolog of NCBI NO: 14970762 NR Description: protein tyrosine phosphatase [Lycopersicon
MNCLRNLSRFSVLPFETPVTRHRKNLPLSLGFVNNSRQYPTMALKAASGSIPSADTSSADKEEEKSETYSHNMTEAMGAVLTYRHELGMNYNFIRPDLIVGSCLQTPEDVDKLRRIGVKTIFCLQQDSDLEYFGVDINAIREYAKTCNDIQHLRAEIRDFDAFDLRRRLPAVVSKLYKAINSNGGVTYIHCTAGLGRAPAVALAYMFWVLGYKLNEAHTLLQSKRSCFPKLDAIKSATADILTGLSKKSVTLSWEDKNCSTVEISGLDIGWGQRIPLNFDDKEGLWFLKRELPEGLYEYKYIVDGEWTCNSDELITSPNKDGHVNNFIQVLDDTSSVRASLRKRLTADDPDLTTDEQLRIKEFLEACPDED

SEQ ID NO: 56703 - protein, 330 aa, Glycine max
  peptide (1)..(330): Ceres Seq. ID no. 13639302
  misc_feature (49)..(199): Pfam Name: Dual specificity phosphatase, catalytic domain Pfam Description: Dual specificity phosphatase, catalytic domain
  misc_feature (1)..(200): Homolog of NCBI NO: 18399058 NR Description: expressed protein [Arabidopsis thaliana]
  misc_feature (3)..(39): Homolog of NCBI NO: 34902388 NR Description: Unknown protein [Oryza sativa (japonica
  misc_feature (162)..(267): Homolog of NCBI NO: 34902388 NR Description: Unknown protein [Oryza sativa (japonica
  misc_feature (91)..(289): Homolog of NCBI NO: 11544661 NR Description: PTPKIS1 (truncated form) [Arabidopsis thaliana]
  misc_feature (233)..(330): Homolog of NCBI NO: 11288831 NR Description: hypothetical protein F4F15.290 - Arabidopsis
  misc_feature (1)..(213): Homolog of NCBI NO: 11288831 NR Description: hypothetical protein F4F15.290 - Arabidopsis
  misc_feature (1)..(330): Homolog of NCBI NO: 16612246 NR Description: AT3g52180/F4F15_290 [Arabidopsis thaliana]
  misc_feature (1)..(330): Homolog of NCBI NO: 21536905 NR Description: unknown [Arabidopsis thaliana]
  misc_feature (1)..(330): Homolog of NCBI NO: 18409505 NR Description: expressed protein [Arabidopsis thaliana]
  misc_feature (1)..(328): Homolog of NCBI NO: 14970762 NR Description: protein tyrosine phosphatase [Lycopersicon
MALKAASGSIPSADTSSADKEEEKSETYSHNMTEAMGAVLTYRHELGMNYNFIRPDLIVGSCLQTPEDVDKLRRIGVKTIFCLQQDSDLEYFGVDINAIREYAKTCNDIQHLRAEIRDFDAFDLRRRLPAVVSKLYKAINSNGGVTYIHCTAGLGRAPAVALAYMFWVLGYKLNEAHTLLQSKRSCFPKLDAIKSATADILTGLSKKSVTLSWEDKNCSTVEISGLDIGWGQRIPLNFDDKEGLWFLKRELPEGLYEYKYIVDGEWTCNSDELITSPNKDGHVNNFIQVLDDTSSVRASLRKRLTADDPDLTTDEQLRIKEFLEACPDED

SEQ ID NO: 56704 - protein, 299 aa, Glycine max
  peptide (1)..(299): Ceres Seq. ID no. 13639303
  misc_feature (18)..(168): Pfam Name: Dual specificity phosphatase, catalytic domain Pfam Description: Dual specificity phosphatase, catalytic domain
  misc_feature (1)..(169): Homolog of NCBI NO: 21592631 NR Description: unknown [Arabidopsis thaliana]
  misc_feature (1)..(169): Homolog of NCBI NO: 18399058 NR Description: expressed protein [Arabidopsis thaliana]
  misc_feature (131)..(236): Homolog of NCBI NO: 34902388 NR Description: Unknown protein [Oryza sativa (japonica
  misc_feature (60)..(258): Homolog of NCBI NO: 11544661 NR Description: PTPKIS1 (truncated form) [Arabidopsis thaliana]
  misc_feature (202)..(299): Homolog of NCBI NO: 11288831 NR Description: hypothetical protein F4F15.290 - Arabidopsis
  misc_feature (1)..(182): Homolog of NCBI NO: 11288831 NR Description: hypothetical protein F4F15.290 - Arabidopsis
  misc_feature (1)..(299): Homolog of NCBI NO: 16612246 NR Description: AT3g52180/F4F15_290 [Arabidopsis thaliana]
  misc_feature (1)..(299): Homolog of NCBI NO: 21536905 NR Description: unknown [Arabidopsis thaliana]
  misc_feature (1)..(299): Homolog of NCBI NO: 18409505 NR Description: expressed protein [Arabidopsis thaliana]
  misc_feature (1)..(297): Homolog of NCBI NO: 14970762 NR Description: protein tyrosine phosphatase [Lycopersicon
MTEAMGAVLTYRHELGMNYNFIRPDLIVGSCLQTPEDVDKLRRIGVKTIFCLQQDSDLEYFGVDINAIREYAKTCNDIQHLRAEIRDFDAFDLRRRLPAVVSKLYKAINSNGGVTYIHCTAGLGRAPAVALAYMFWVLGYKLNEAHTLLQSKRSCFPKLDAIKSATADILTGLSKKSVTLSWEDKNCSTVEISGLDIGWGQRIPLNFDDKEGLWFLKRELPEGLYEYKYIVDGEWTCNSDELITSPNKDGHVNNFIQVLDDTSSVRASLRKRLTADDPDLTTDEQLRIKEFLEACPDED

SEQ ID NO: 56705 - DNA, 875 bp, Glycine max
  misc_feature (1)..(875): Ceres Seq. ID no. 13595532
ccacgcagtttcgaatccgcaatgaaactcaaccacgtttgaaaaccatgtcaaacatccccacaacgctctcggagatttgcctcacccagtttcggcttgccatgtccatagcagacccgtggcccttctcaagaacccacccagcaagtcccaagtagcaccctcggtcctccttttcacttccattcattccaatacacaccacaccaaacacatctctctcaattcaaattaaggcacatgtccaagaaccgcggattcaacctcaggaggcgcctcatccgggtctcgaaatggatcttcaggaagatacggacgcgggctccacgcgagtaccattgcctgggtgactctcctccgtcacccatggtgaagctccttacgtggggccgcaagctgacagcgggtgccaagtcccgcttgaaagtggcgtccggatccggttatgcccaattaggaaccgatccggacccgagtgtgccgaaggggcacctggccgtgtacgtagggcagaaggacggcgagttgcaccgtgttctggtgccggtaatatacttcaaccaccctttgtttggagaattgctgaagcaggcggaggaggagttcgggttccaccacgaagggggaatcaccatcccgtgccggttcaccgagtttgaacgggtgaagacccgaattgcatccggatctcgcagaggcacccgtccgaaaagattggcctggcgctgaggactgaggtgatgctgaattgctgcccatcctgtaactcaacaaataatattgctttttaggatttttttttttcgtgttgttaattattttttttaacctcgtttaatccgtgaggtaaattttagctttcctgtttacct

SEQ ID NO: 56706 - protein, 162 aa, Glycine max
  peptide (1)..(162): Ceres Seq. ID no. 13595533
  misc_feature (42)..(147): Pfam Name: Auxin responsive protein Pfam Description: Auxin responsive protein
  misc_feature (80)..(152): Homolog of NCBI NO: 38454072 NR Description: At5g53590 [Arabidopsis thaliana]
  misc_feature (80)..(152): Homolog of NCBI NO: 15238779 NR Description: auxin-induced (indole-3-acetic acid induced)
  misc_feature (58)..(139): Homolog of NCBI NO: 15236198 NR Description: auxin-induced (indole-3-acetic acid induced)
  misc_feature (80)..(151): Homolog of NCBI NO: 15226425 NR Description: auxin-induced (indole-3-acetic acid induced)
  misc_feature (80)..(155): Homolog of NCBI NO: 18411465 NR Description: auxin-induced (indole-3-acetic acid induced)
  misc_feature (6)..(151): Homolog of NCBI NO: 38567865 NR Description: OSJNBa0091D06.3 [Oryza sativa (japonica
  misc_feature (1)..(148): Homolog of NCBI NO: 15234550 NR Description: auxin-induced (indole-3-acetic acid induced)
  misc_feature (1)..(148): Homolog of NCBI NO: 15235723 NR Description: auxin-induced (indole-3-acetic acid induced)
  misc_feature (1)..(150): Homolog of NCBI NO: 15225432 NR Description: auxin-induced (indole-3-acetic acid induced)
  misc_feature (1)..(150): Homolog of NCBI NO: 15232400 NR Description: auxin-induced (indole-3-acetic acid induced)
MSKNRGFNLRRRLIRVSKWIFRKIRTRAPREYHCLGDSPPSPMVKLLTWGRKLTAGAKSRLKVASGSGYAQLGTDPDPSVPKGHLAVYVGQKDGELHRVLVPVIYFNHPLFGELLKQAEEEFGFHHEGGITIPCRFTEFERVKTRIASGSRRGTRPKRLAWR

SEQ ID NO: 56707 - protein, 120 aa, Glycine max
  peptide (1)..(120): Ceres Seq. ID no. 13595534
  misc_feature (1)..(105): Pfam Name: Auxin responsive protein Pfam Description: Auxin responsive protein
  misc_feature (38)..(110): Homolog of NCBI NO: 38454072 NR Description: At5g53590 [Arabidopsis thaliana]
  misc_feature (38)..(110): Homolog of NCBI NO: 15238779 NR Description: auxin-induced (indole-3-acetic acid induced)
  misc_feature (16)..(97): Homolog of NCBI NO: 15236198 NR Description: auxin-induced (indole-3-acetic acid induced)
  misc_feature (38)..(109): Homolog of NCBI NO: 15226425 NR Description: auxin-induced (indole-3-acetic acid induced)
  misc_feature (38)..(113): Homolog of NCBI NO: 18411465 NR Description: auxin-induced (indole-3-acetic acid induced)
  misc_feature (1)..(109): Homolog of NCBI NO: 38567865 NR Description: OSJNBa0091D06.3 [Oryza sativa (japonica
  misc_feature (1)..(106): Homolog of NCBI NO: 15234550 NR Description: auxin-induced (indole-3-acetic acid induced)
  misc_feature (1)..(106): Homolog of NCBI NO: 15235723 NR Description: auxin-induced (indole-3-acetic acid induced)
  misc_feature (1)..(108): Homolog of NCBI NO: 15225432 NR Description: auxin-induced (indole-3-acetic acid induced)
  misc_feature (1)..(108): Homolog of NCBI NO: 15232400 NR Description: auxin-induced (indole-3-acetic acid induced)
MVKLLTWGRKLTAGAKSRLKVASGSGYAQLGTDPDPSVPKGHLAVYVGQKDGELHRVLVPVIYFNHPLFGELLKQAEEEFGFHHEGGITIPCRFTEFERVKTRIASGSRRGTRPKRLAWR

SEQ ID NO: 56708 - DNA, 1335 bp, Glycine max
  misc_feature (1)..(1335): Ceres Seq. ID no. 13639120
aaaacataactcaaccatggcaaagttcagttccagaaaaaaatcctccatttgggtccccaacggttgcatcttcttcctcggaggagcactcacaaccctccttctcctctggggtctatcctccttcataatccccatcccaaactctgacccagaactcaaccctgtctccacaaaactcagttccctccaattccccacaaacaccgactcaccagaaacaactttttacgacgaccccgaaacgagttacaccatggacaagcccatgcacaactgggacgagaagagaaaacagtggcttttgcatcatccttcattcaccgtcacgacacatgatagcaagatcctcgtcgtgacggggtcgcagccgaagcgctgccacaaccccatcggcgatcaccttctattaaggttcttcaagaacaaggttgactactgccgcctccacaactacgacataatttacaataacgccctattgcaccccaaaatgggatcatactgggccaagtacccggtgatccgagccgccatggtggctcacccggaggccgagtgggtctggtgggtcgactcggacgcggtcttcaccgacatggagttcactctccctctcaaccgctacaaggaccacaacctcgttgtccacggttgggaaaatctcgtacgtgaaaaccgtagctggacggggcttaacgccggcgttttcctcatgagaaactgtcagtggtcgttggattttatggacgtgtgggccagcatgggcccaatgtccccggagtatgaaaaatggggggaaaccttaaaatccacgttcaaggacaaggttcttccggactcggacgatcagacggcgctggcatatctgatcgcggttgagaacaaatgggcggacaagatctttctggagagtgagtactatttccaaggctactggttggagatttcgaagacttactataacgttagcgagaggtacgatgaggtggagagaaaggttaaaggattgaggaggaggcacgcggagaaagtgagtgaaagttatggtttgatgagggaggagtatttgaacgatgtgggagagtggaagaggcctttcatcacgcatttcactgggtgccaaccctgcaatggacaccataaccctgcgtatgatgctatggattgctggaacagcatggagagggctcttaacttcgctgataatcaggtgttgcgcgtctatggttacatgcgtaaggatctcttgaataaggccatttcacctataccttttgattatcccaatgttgtgtagatttactcaggtaaataaataatgatgaaatt

SEQ ID NO: 56709 - protein, 433 aa, Glycine max
  peptide (1)..(433): Ceres Seq. ID no. 13639121
  misc_feature (116)..(384): Pfam Name: galactosyl transferase GMA12/MNN10 family Pfam Description: galactosyl transferase GMA12/MNN10 family
  misc_feature (41)..(328): Homolog of NCBI NO: 25349326 NR Description: hypothetical protein F6A14.20 - Arabidopsis
  misc_feature (41)..(328): Homolog of NCBI NO: 15221850 NR Description: transferase - related [Arabidopsis thaliana]
  misc_feature (344)..(425): Homolog of NCBI NO: 15221224 NR Description: transferase - related [Arabidopsis thaliana]
  misc_feature (53)..(328): Homolog of NCBI NO: 15221224 NR Description: transferase - related [Arabidopsis thaliana]
  misc_feature (344)..(425): Homolog of NCBI NO: 15240848 NR Description: transferase - related [Arabidopsis thaliana]
  misc_feature (33)..(328): Homolog of NCBI NO: 15240848 NR Description: transferase - related [Arabidopsis thaliana]
  misc_feature (11)..(431): Homolog of NCBI NO: 22329223 NR Description: transferase - related [Arabidopsis thaliana]
  misc_feature (3)..(431): Homolog of NCBI NO: 18400116 NR Description: transferase - related [Arabidopsis thaliana]
  misc_feature (8)..(430): Homolog of NCBI NO: 25486551 NR Description: alpha galactosyltransferase (EC 2.4.1.-)
  misc_feature (6)..(430): Homolog of NCBI NO: 32127690 NR Description: galactomannan galactosyltransferase [Lotus
KHNSTMAKFSSRKKSSIWVPNGCIFFLGGALTTLLLLWGLSSFIIPIPNSDPELNPVSTKLSSLQFPTNTDSPETTFYDDPETSYTMDKPMHNWDEKRKQWLLHHPSFTVTTHDSKILVVTGSQPKRCHNPIGDHLLLRFFKNKVDYCRLHNYDIIYNNALLHPKMGSYWAKYPVIRAAMVAHPEAEWVWWVDSDAVFTDMEFTLPLNRYKDHNLVVHGWENLVRENRSWTGLNAGVFLMRNCQWSLDFMDVWASMGPMSPEYEKWGETLKSTFKDKVLPDSDDQTALAYLIAVENKWADKIFLESEYYFQGYWLEISKTYYNVSERYDEVERKVKGLRRRHAEKVSESYGLMREEYLNDVGEWKRPFITHFTGCQPCNGHHNPAYDAMDCWNSMERALNFADNQVLRVYGYMRKDLLNKAISPIPFDYPNVV

SEQ ID NO: 56710 - protein, 428 aa, Glycine max
  peptide (1)..(428): Ceres Seq. ID no. 13639122
  misc_feature (111)..(379): Pfam Name: galactosyl transferase GMA12/MNN10 family Pfam Description: galactosyl transferase GMA12/MNN10 family
  misc_feature (36)..(323): Homolog of NCBI NO: 25349326 NR Description: hypothetical protein F6A14.20 - Arabidopsis
  misc_feature (36)..(323): Homolog of NCBI NO: 15221850 NR Description: transferase - related [Arabidopsis thaliana]
  misc_feature (339)..(420): Homolog of NCBI NO: 15221224 NR Description: transferase - related [Arabidopsis thaliana]
  misc_feature (48)..(323): Homolog of NCBI NO: 15221224 NR Description: transferase - related [Arabidopsis thaliana]
  misc_feature (339)..(420): Homolog of NCBI NO: 15240848 NR Description: transferase - related [Arabidopsis thaliana]
  misc_feature (28)..(323): Homolog of NCBI NO: 15240848 NR Description: transferase - related [Arabidopsis thaliana]
  misc_feature (6)..(426): Homolog of NCBI NO: 22329223 NR Description: transferase - related [Arabidopsis thaliana]
  misc_feature (1)..(426): Homolog of NCBI NO: 18400116 NR Description: transferase - related [Arabidopsis thaliana]
  misc_feature (3)..(425): Homolog of NCBI NO: 25486551 NR Description: alpha galactosyltransferase (EC 2.4.1.-)
  misc_feature (1)..(425): Homolog of NCBI NO: 32127690 NR Description: galactomannan galactosyltransferase [Lotus
MAKFSSRKKSSIWVPNGCIFFLGGALTTLLLLWGLSSFIIPIPNSDPELNPVSTKLSSLQFPTNTDSPETTFYDDPETSYTMDKPMHNWDEKRKQWLLHHPSFTVTTHDSKILVVTGSQPKRCHNPIGDHLLLRFFKNKVDYCRLHNYDIIYNNALLHPKMGSYWAKYPVIRAAMVAHPEAEWVWWVDSDAVFTDMEFTLPLNRYKDHNLVVHGWENLVRENRSWTGLNAGVFLMRNCQWSLDFMDVWASMGPMSPEYEKWGETLKSTFKDKVLPDSDDQTALAYLIAVENKWADKIFLESEYYFQGYWLEISKTYYNVSERYDEVERKVKGLRRRHAEKVSESYGLMREEYLNDVGEWKRPFITHFTGCQPCNGHHNPAYDAMDCWNSMERALNFADNQVLRVYGYMRKDLLNKAISPIPFDYPNVV

SEQ ID NO: 56711 - protein, 347 aa, Glycine max
  peptide (1)..(347): Ceres Seq. ID no. 13639123
  misc_feature (30)..(298): Pfam Name: galactosyl transferase GMA12/MNN10 family Pfam Description: galactosyl transferase GMA12/MNN10 family
  misc_feature (1)..(242): Homolog of NCBI NO: 25349326 NR Description: hypothetical protein F6A14.20 - Arabidopsis
  misc_feature (1)..(242): Homolog of NCBI NO: 15221850 NR Description: transferase - related [Arabidopsis thaliana]
  misc_feature (258)..(339): Homolog of NCBI NO: 15221224 NR Description: transferase - related [Arabidopsis thaliana]
  misc_feature (1)..(242): Homolog of NCBI NO: 15221224 NR Description: transferase - related [Arabidopsis thaliana]
  misc_feature (258)..(339): Homolog of NCBI NO: 15240848 NR Description: transferase - related [Arabidopsis thaliana]
  misc_feature (1)..(242): Homolog of NCBI NO: 15240848 NR Description: transferase - related [Arabidopsis thaliana]
  misc_feature (1)..(345): Homolog of NCBI NO: 22329223 NR Description: transferase - related [Arabidopsis thaliana]
  misc_feature (1)..(345): Homolog of NCBI NO: 18400116 NR Description: transferase - related [Arabidopsis thaliana]
  misc_feature (1)..(344): Homolog of NCBI NO: 25486551 NR Description: alpha galactosyltransferase (EC 2.4.1.-)
  misc_feature (1)..(344): Homolog of NCBI NO: 32127690 NR Description: galactomannan galactosyltransferase [Lotus
MDKPMHNWDEKRKQWLLHHPSFTVTTHDSKILVVTGSQPKRCHNPIGDHLLLRFFKNKVDYCRLHNYDIIYNNALLHPKMGSYWAKYPVIRAAMVAHPEAEWVWWVDSDAVFTDMEFTLPLNRYKDHNLVVHGWENLVRENRSWTGLNAGVFLMRNCQWSLDFMDVWASMGPMSPEYEKWGETLKSTFKDKVLPDSDDQTALAYLIAVENKWADKIFLESEYYFQGYWLEISKTYYNVSERYDEVERKVKGLRRRHAEKVSESYGLMREEYLNDVGEWKRPFITHFTGCQPCNGHHNPAYDAMDCWNSMERALNFADNQVLRVYGYMRKDLLNKAISPIPFDYPNVV

SEQ ID NO: 56712 - DNA, 870 bp, Glycine max
  misc_feature (1)..(870): Ceres Seq. ID no. 13595263
ttacctagaacatcctaatcgaaaaataaaaaccctaaacacaaccaccgtcctcaaccaccatggcagagcgtgaccgccgcgaacgagagagggatagagaccgtgagcgcgaccgcgatagacgccgtgacagagacgaccgtgaccgtgaccgtgggattcgaagcaagaagtcccgatctcgtactccagaccaccaccaccacgctcgccctcctcgccacgtgcgctctcccgagaggtatcgatcccggtcccgctccgctgaccgtgaccgtcatcgccaccacagcaggcgcaggactccctctccagatcccccgccgcggaaacggcctcgccatggctcagcggaagacgacaaggaaaggagtcgcaaacgagaggagactgcgacggagcaagctaagaagaaggagaataaagaaccaagcggcggcggaggaggagaagcggaaacggatgtgaatgagatagagatgatgaagatgttagggatccctactggtttcgactccacgaaagggaagcatgtcgaaggcgctgacgtcagcgggattagggctgttaccaagcgccagccgaggcagtacatgaaccgtcgcggtggctttaaccgtcctttgcctgctgagcgtaaccgctaaaggtccttgtcaatgctgtcttaaacacgaggtcagatgatgagagttcgagcttgtatttactgcaattcttccccagacgctgttctaatgtccttagagaacaaacatgtactctctggagttagaaacatcttatctctttttaggggtttagagttgtgaatgatgttatgtgtattaatttcccggctctaacttttagactatgatttagttg

SEQ ID NO: 56713 - protein, 195 aa, Glycine max
  peptide (1)..(195): Ceres Seq. ID no. 13595264
  misc_feature (4)..(193): Homolog of NCBI NO: 40738944 NR Description: hypothetical protein AN6605.2 [Aspergillus
  misc_feature (28)..(189): Homolog of NCBI NO: 27228990 NR Description: putative nucleic acid binding protein RY-1; EST
  misc_feature (28)..(189): Homolog of NCBI NO: 24307919 NR Description: putative nucleic acid binding protein RY-1 [Homo
  misc_feature (30)..(189): Homolog of NCBI NO: 7513213 NR Description: nucleic acid binding protein - human (fragment)
  misc_feature (21)..(189): Homolog of NCBI NO: 34856367 NR Description: similar to putative nucleic acid binding protein
  misc_feature (3)..(191): Homolog of NCBI NO: 23478750 NR Description: cyclophilin-RNA interacting protein [Plasmodium
  misc_feature (1)..(111): Homolog of NCBI NO: 18423973 NR Description: expressed protein [Arabidopsis thaliana]
  misc_feature (1)..(111): Homolog of NCBI NO: 21592725 NR Description: unknown [Arabidopsis thaliana]
  misc_feature (3)..(195): Homolog of NCBI NO: 21592725 NR Description: unknown [Arabidopsis thaliana]
  misc_feature (3)..(195): Homolog of NCBI NO: 18423973 NR Description: expressed protein [Arabidopsis thaliana]
MAERDRRERERDRDRERDRDRRRDRDDRDRDRGIRSKKSRSRTPDHHHHARPPRHVRSPERYRSRSRSADRDRHRHHSRRRTPSPDPPPRKRPRHGSAEDDKERSRKREETATEQAKKKENKEPSGGGGGEAETDVNEIEMMKMLGIPTGFDSTKGKHVEGADVSGIRAVTKRQPRQYMNRRGGFNRPLPAERNR

SEQ ID NO: 56714 - DNA, 913 bp, Glycine max
  misc_feature (1)..(913): Ceres Seq. ID no. 13595270
aaaaacccaaccaaacccctctccccctccgcctccccaccatggctcccggtgccctagcccgcctcatcatcggccgccgcgcagcgtccccgctcctggcgcgccccttcgccgcgaaggcccgcgcgccgcagcgggcgccggagccggagcccctgtcggaggaggacgacgacttcaccagcggcggggaggccgcccccatccccaccgagggcatcagcaagccgctcgccggcatcctcaaggagctcgggaagagggtccccgagtccctcctgaagacccgcctcgaggacaatggattcgccctcaagtacatcccatggcaccttgctaacaaaattctgaatatgcacgctccagaatggtctggggaggttcgcaacattgtctactcatctgatgggaaatctgtatctgttgtctatcgtgtgactctctatggaactgatgcagagatctatagagaggctactggaactgcttctgttgaggaaaaaggctttggagatcctgtccagaaggctgaaggaatggcttttcgccgagcttgtgcccgccttggtcttggacttcatctctatcatgaagatatgtcatagatgcttactgatcattgtttgtggtctggacttctgcttcatgtctcttagtgcgcggacacttgtcgttcagtaggctacccttttgtgctgaacatgatatggatgtgccggcatataaaactaagtattctagaatgtcgtttagttgtytaatgtaagctacaaaggtggttgatgttctgaatggtgtgcttataatgagccagcttgtttcattttttwaaaaaaaaaaaaaaaaaaaaaaaaaaaaaaaaacccaaaaaaaaaaaaaaaaaagctgtttaaacwcratammgtcgacc

SEQ ID NO: 56715 - protein, 201 aa, Glycine max
  peptide (1)..(201): Ceres Seq. ID no. 15221519
  misc_feature (137)..(199): Homolog of NCBI NO: 38505854 NR Description: slr6029 [Synechocystis sp. PCC 6803]
  misc_feature (137)..(199): Homolog of NCBI NO: 38505607 NR Description: sll5072 [Synechocystis sp. PCC 6803]
  misc_feature (28)..(155): Homolog of NCBI NO: 27573357 NR Description: hypothetical protein [Oryza sativa (japonica
  misc_feature (71)..(198): Homolog of NCBI NO: 21593360 NR Description: unknown [Arabidopsis thaliana]
  misc_feature (71)..(198): Homolog of NCBI NO: 15238827 NR Description: expressed protein [Arabidopsis thaliana]
  misc_feature (69)..(199): Homolog of NCBI NO: 15224018 NR Description: expressed protein [Arabidopsis thaliana]
  misc_feature (14)..(201): Homolog of NCBI NO: 34907336 NR Description: putative SnRK1-interacting protein 1
  misc_feature (14)..(201): Homolog of NCBI NO: 9367245 NR Description: SnRK1-interacting protein 1 [Hordeum vulgare
KPNQTPLPLRLPTMAPGALARLIIGRRAASPLLARPFAAKARAPQRAPEPEPLSEEDDDFTSGGEAAPIPTEGISKPLAGILKELGKRVPESLLKTRLEDNGFALKYIPWHLANKILNMHAPEWSGEVRNIVYSSDGKSVSVVYRVTLYGTDAEIYREATGTASVEEKGFGDPVQKAEGMAFRRACARLGLGLHLYHEDMS

SEQ ID NO: 56716 - protein, 188 aa, Glycine max
  peptide (1)..(188): Ceres Seq. ID no. 15221520
  misc_feature (124)..(186): Homolog of NCBI NO: 38505854 NR Description: slr6029 [Synechocystis sp. PCC 6803]
  misc_feature (124)..(186): Homolog of NCBI NO: 38505607 NR Description: sll5072 [Synechocystis sp. PCC 6803]
  misc_feature (15)..(142): Homolog of NCBI NO: 27573357 NR Description: hypothetical protein [Oryza sativa (japonica
  misc_feature (58)..(185): Homolog of NCBI NO: 21593360 NR Description: unknown [Arabidopsis thaliana]
  misc_feature (58)..(185): Homolog of NCBI NO: 15238827 NR Description: expressed protein [Arabidopsis thaliana]
  misc_feature (56)..(186): Homolog of NCBI NO: 15224018 NR Description: expressed protein [Arabidopsis thaliana]
  misc_feature (1)..(188): Homolog of NCBI NO: 34907336 NR Description: putative SnRK1-interacting protein 1
  misc_feature (1)..(188): Homolog of NCBI NO: 9367245 NR Description: SnRK1-interacting protein 1 [Hordeum vulgare
MAPGALARLIIGRRAASPLLARPFAAKARAPQRAPEPEPLSEEDDDFTSGGEAAPIPTEGISKPLAGILKELGKRVPESLLKTRLEDNGFALKYIPWHLANKILNMHAPEWSGEVRNIVYSSDGKSVSVVYRVTLYGTDAEIYREATGTASVEEKGFGDPVQKAEGMAFRRACARLGLGLHLYHEDMS

SEQ ID NO: 56717 - protein, 113 aa, Glycine max
  peptide (1)..(113): Ceres Seq. ID no. 15221521
KTQPNPSPPPPPHHGSRCPSPPHHRPPRSVPAPGAPLRREGPRAAAGAGAGAPVGGGRRLHQRRGGRPHPHRGHQQAARRHPQGAREEGPRVPPEDPPRGQWIRPQVHPMAPC

SEQ ID NO: 56718 - DNA, 1358 bp, Glycine max
  misc_feature (1)..(1358): Ceres Seq. ID no. 13639124
aaacaacacacgacacgaaacgaccatcacctctctagtggctactggctagtgcgaaaggaagatggcgactaagctcgcagcgctcgtcgtcttggccgcgttcctcgccgggccggcggcgtgcgacggcgccagcatttgcttcaacggctggctgaggctgcccacctacaacgcggcgctctgtcgccccaggccggacgttcagacgcggcagaggagacctgctccctcggggtcaggactcagctccggctattacaacaccaggtgccctagcgcggagaagatcgtcacggatgccgtgaagaaggccgtggatgcgaaccctggcattggtgccgggctcatccgtctcttcttccatgactgcttcgttcggggctgcgatggttccgtcctcctcaacacgaccaactcgaagaacagcgacacggagagggaaggccctcccaaccagaacagcctccgagggttcgaggtgattgacgaggccaaggcggcgatcgaggctgcctgccccgacacagtctcatgtgccgacatcgtcgcctatgctgcccgcgacgcgtcctacttcctcagcgaccgcaagatcaacatccagatgccgggcggccgctacgacggccgcgagtcattctccaacgagacagaccagctgcctgggcccttctctaacctcacggcgcttcaggggagtttcgcggccaagggactcacctccgacgagatggtcacgctctccggcgcgcacaccatcggccgcgcccgctgcttgttcttctccacccgtttctctgagatggaaccggtatttgccgccaagcttagggcccagtgcaacggcaacgacggcaccaacgtgaaccaagatgatgtgacccccaacatcctggataagcagtactaccagaacgtggtcgacaagaaagtgttgttcacctcagatgccgtgctcaactcgacggaaacgataacgcaggtgacagaaaacgcgaacatgaccggggcgtgggagaggaagttcgagaaagccatggagactatggggaaaatcggggtcaagaccataggcaaccagcaaggcgcagagatcaggaaggtatgctggagagtcaacaactaatacgggccagtagtaatgcctggtagttggccggctccatgtctggatcccgccatggaggagatctaactttgcctagctggtgccgttgttggttttctcatactaaaactctgtatgtgtgtgtgttttggtgtatcatactaaaactctgtatgtgtgtgtgttttgatatattaataaagatataataatatataagtaaccgtgtatgttcacgtacggc

SEQ ID NO: 56719 - protein, 355 aa, Glycine max
  peptide (1)..(355): Ceres Seq. ID no. 15220456
  misc_feature (78)..(313): Pfam Name: Peroxidase Pfam Description: Peroxidase
  misc_feature (55)..(354): Homolog of NCBI NO: 27261087 NR Description: putative peroxidase [Oryza sativa (japonica
  misc_feature (61)..(354): Homolog of NCBI NO: 12039354 NR Description: putative peroxidase [Oryza sativa]
  misc_feature (61)..(354): Homolog of NCBI NO: 12039335 NR Description: putative peroxidase [Oryza sativa]
  misc_feature (55)..(350): Homolog of NCBI NO: 27261097 NR Description: putative peroxidase [Oryza sativa (japonica
  misc_feature (55)..(354): Homolog of NCBI NO: 34896268 NR Description: putative peroxidase [Oryza sativa]
  misc_feature (56)..(354): Homolog of NCBI NO: 12039346 NR Description: putative peroxidase [Oryza sativa]
  misc_feature (55)..(354): Homolog of NCBI NO: 34896266 NR Description: putative peroxidase [Oryza sativa]
  misc_feature (55)..(355): Homolog of NCBI NO: 34896944 NR Description: putative peroxidase [Oryza sativa]
  misc_feature (62)..(354): Homolog of NCBI NO: 27261094 NR Description: putative peroxidase [Oryza sativa (japonica
  misc_feature (55)..(354): Homolog of NCBI NO: 27261088 NR Description: putative peroxidase [Oryza sativa (japonica
MATKLAALVVLAAFLAGPAACDGASICFNGWLRLPTYNAALCRPRPDVQTRQRRPAPSGSGLSSGYYNTRCPSAEKIVTDAVKKAVDANPGIGAGLIRLFFHDCFVRGCDGSVLLNTTNSKNSDTEREGPPNQNSLRGFEVIDEAKAAIEAACPDTVSCADIVAYAARDASYFLSDRKINIQMPGGRYDGRESFSNETDQLPGPFSNLTALQGSFAAKGLTSDEMVTLSGAHTIGRARCLFFSTRFSEMEPVFAAKLRAQCNGNDGTNVNQDDVTPNILDKQYYQNVVDKKVLFTSDAVLNSTETITQVTENANMTGAWERKFEKAMETMGKIGVKTIGNQQGAEIRKVCWRVNN

SEQ ID NO: 56720 - DNA, 1259 bp, Glycine max
  misc_feature (1)..(1259): Ceres Seq. ID no. 13639236
atcgcgacgagctctcctggcccatttccctcgctgctgctgctaatcccgacccgaccgtcaccgccggcctttgcatcaaacgccctgacagcgcgcgtcgcatcgccacaacacgacggcctcgctcccttgatcgcctccctcgctccctccctgcctacttgcgtgtctacctatctacctgcctacctataccctataccctaatacaccacgcccatcgcccgcgacctgcagcttcgtccggcatctcttcctcacattcacaatggcatcaaagtttctccgagaatacaagttggtggtagtcggcggcggtggagtcggaaagtcgtgtttgactatccagctgatccagagccacttcgtagacgagtacgacccgaccatcgaggattcgtaccgcaagcagtgtgtcattgacaatgaggtcgccctgctcgatgtgctcgatacagcgggacaggaggagtactcggccatgcgcgagcagtacatgcgcacaggagagggcttcctgctcgtctactcgataaccgacaggcagagcttcgaggagattatgacgttccagcaacaaatcctgagagtaaaggacaaggactacttccccatgatcgtcgtcggcaacaagtgcgatctcgacggcgagaggcaagtgtcgacacaagagggccagactctggcgcggaactttggctgcaaattcatcgagacttcggcgaaatcccgcatcaacgttgacaacgccttctacgacatcgtccgagaaatccgcagatacaacaaggaaatgtcctcgtacacaggcgcccctggctcaaacggcaacgggccccagaagacgacattcgacacggacgaccaggcggagaagaagggatgctgtggatgcgtggtaatgtaaggatatggaagccactgtcgttgttgtcgttgttgtcgcgcacgctgtcagagagatacctacaccgctgggttcggttacccgccctggccattggcggtgctgcttggtccagcagaagaaaacacgcgatgctgctgttgcgtactgccagtacaccttctcttcgatactgtcactttgggttcgcattacggggtaacggattcacgtctgctggatgcgcctccgaacaccctacttctactactggtatcgactccatctttcctatctggtggcgctcttcgtattcgccttcatcatctatctagaccgatttctttatggcattttgatcggtactctg

SEQ ID NO: 56721 - protein, 212 aa, Glycine max
  peptide (1)..(212): Ceres Seq. ID no. 15219417
  misc_feature (10)..(171): Pfam Name: Ras family Pfam Description: Ras family
  misc_feature (3)..(212): Homolog of NCBI NO: 13195562 NR Description: ras-like protein [Pisolithus sp. 441]
  misc_feature (3)..(212): Homolog of NCBI NO: 27752295 NR Description: small G-protein Ras1 [Ustilago maydis]
  misc_feature (5)..(212): Homolog of NCBI NO: 131888 NR Description: RAS-LIKE PROTEIN
  misc_feature (1)..(212): Homolog of NCBI NO: 6919949 NR Description: RAS-LIKE PROTEIN
  misc_feature (3)..(212): Homolog of NCBI NO: 29467612 NR Description: ras protein [Fusarium oxysporum]
  misc_feature (1)..(212): Homolog of NCBI NO: 6919951 NR Description: RAS-LIKE PROTEIN
  misc_feature (1)..(212): Homolog of NCBI NO: 40746899 NR Description: RAS_EMENI RAS-LIKE PROTEIN [Aspergillus nidulans
  misc_feature (1)..(212): Homolog of NCBI NO: 3929359 NR Description: RAS-LIKE PROTEIN
  misc_feature (1)..(212): Homolog of NCBI NO: 825440 NR Description: RAS [Aspergillus fumigatus]
  misc_feature (1)..(212): Homolog of NCBI NO: 6919950 NR Description: RAS-LIKE PROTEIN
MASKFLREYKLVVVGGGGVGKSCLTIQLIQSHFVDEYDPTIEDSYRKQCVIDNEVALLDVLDTAGQEEYSAMREQYMRTGEGFLLVYSITDRQSFEEIMTFQQQILRVKDKDYFPMIVVGNKCDLDGERQVSTQEGQTLARNFGCKFIETSAKSRINVDNAFYDIVREIRRYNKEMSSYTGAPGSNGNGPQKTTFDTDDQAEKKGCCGCVVM

SEQ ID NO: 56722 - protein, 141 aa, Glycine max
  peptide (1)..(141): Ceres Seq. ID no. 15219418
  misc_feature (1)..(100): Pfam Name: Ras family Pfam Description: Ras family
  misc_feature (1)..(141): Homolog of NCBI NO: 13195562 NR Description: ras-like protein [Pisolithus sp. 441]
  misc_feature (1)..(141): Homolog of NCBI NO: 27752295 NR Description: small G-protein Ras1 [Ustilago maydis]
  misc_feature (1)..(141): Homolog of NCBI NO: 131888 NR Description: RAS-LIKE PROTEIN
  misc_feature (1)..(141): Homolog of NCBI NO: 6919949 NR Description: RAS-LIKE PROTEIN
  misc_feature (1)..(141): Homolog of NCBI NO: 29467612 NR Description: ras protein [Fusarium oxysporum]
  misc_feature (1)..(141): Homolog of NCBI NO: 6919951 NR Description: RAS-LIKE PROTEIN
  misc_feature (1)..(141): Homolog of NCBI NO: 40746899 NR Description: RAS_EMENI RAS-LIKE PROTEIN [Aspergillus nidulans
  misc_feature (1)..(141): Homolog of NCBI NO: 3929359 NR Description: RAS-LIKE PROTEIN
  misc_feature (1)..(141): Homolog of NCBI NO: 825440 NR Description: RAS [Aspergillus fumigatus]
  misc_feature (1)..(141): Homolog of NCBI NO: 6919950 NR Description: RAS-LIKE PROTEIN
MREQYMRTGEGFLLVYSITDRQSFEEIMTFQQQILRVKDKDYFPMIVVGNKCDLDGERQVSTQEGQTLARNFGCKFIETSAKSRINVDNAFYDIVREIRRYNKEMSSYTGAPGSNGNGPQKTTFDTDDQAEKKGCCGCVVM

SEQ ID NO: 56723 - protein, 136 aa, Glycine max
  peptide (1)..(136): Ceres Seq. ID no. 15219419
  misc_feature (1)..(95): Pfam Name: Ras family Pfam Description: Ras family
  misc_feature (1)..(136): Homolog of NCBI NO: 13195562 NR Description: ras-like protein [Pisolithus sp. 441]
  misc_feature (1)..(136): Homolog of NCBI NO: 27752295 NR Description: small G-protein Ras1 [Ustilago maydis]
  misc_feature (1)..(136): Homolog of NCBI NO: 131888 NR Description: RAS-LIKE PROTEIN
  misc_feature (1)..(136): Homolog of NCBI NO: 6919949 NR Description: RAS-LIKE PROTEIN
  misc_feature (1)..(136): Homolog of NCBI NO: 29467612 NR Description: ras protein [Fusarium oxysporum]
  misc_feature (1)..(136): Homolog of NCBI NO: 6919951 NR Description: RAS-LIKE PROTEIN
  misc_feature (1)..(136): Homolog of NCBI NO: 40746899 NR Description: RAS_EMENI RAS-LIKE PROTEIN [Aspergillus nidulans
  misc_feature (1)..(136): Homolog of NCBI NO: 3929359 NR Description: RAS-LIKE PROTEIN
  misc_feature (1)..(136): Homolog of NCBI NO: 825440 NR Description: RAS [Aspergillus fumigatus]
  misc_feature (1)..(136): Homolog of NCBI NO: 6919950 NR Description: RAS-LIKE PROTEIN
MRTGEGFLLVYSITDRQSFEEIMTFQQQILRVKDKDYFPMIVVGNKCDLDGERQVSTQEGQTLARNFGCKFIETSAKSRINVDNAFYDIVREIRRYNKEMSSYTGAPGSNGNGPQKTTFDTDDQAEKKGCCGCVVM

SEQ ID NO: 56724 - DNA, 973 bp, Glycine max
  misc_feature (1)..(973): Ceres Seq. ID no. 13595535
aattagaataaatcccgtgttttttttcttcgcccctacagaacccatgtcgattaggttttctaaattgctcttccatcttcttccttagagtaggaaatgttaccagttaccaaattatcatcttaaaccctccattactctctcacacatgatctatattcaatgtgatttctggatctgaggcggtggagattcatctataaaaagatccgaaaatcagtctgaaaatgggcaaatacatgaagaaatcgaagattaccaacaacgatacggagcccaccgagccaactttcctgggagttcgcaccagggacgctaaaaccctagctctgaagcggctcaattcctccgcctctgattccgctctagctggagactcttcttgctaccttcagctccacagccgccgcctcgagaaacccccggcgctgacggagccgaaacagccaccgagaattaaggagcctggctcgaagggtcgggttagctccggtttgggttcggttcatgtagctcagagctgtaacggagatgattggtttgggaagtctgaagcttttttgtggagagaacagtcctgattttcaatcgatacaaagtgaaagtactgtggtgtggcgtcatgttcatgggacctagctaagctgttgagaagaactacgagctacctgatgggcaagtgataacaattggttctgagctgttccattgtcctgaggaccaaggttatttaccagccatctatgattcatatggagaatactggtatccatgaaacaactttaactccttaatgaagtgtgatgtagacatcagaaaggatgtgtacggtataacatcgtgaccagtggtggaagcacattttctctgagatcgctaacaatttgagctaagatatcacgtcttggtctacaagcagcatgaagatcatagttgctactcctcctgagagaaataccctgtcttgatt

SEQ ID NO: 56725 - protein, 117 aa, Glycine max
  peptide (1)..(117): Ceres Seq. ID no. 13595536
  misc_feature (1)..(105): Homolog of NCBI NO: 15239719 NR Description: Kip-related protein 3 [Arabidopsis thaliana]
MGKYMKKSKITNNDTEPTEPTFLGVRTRDAKTLALKRLNSSASDSALAGDSSCYLQLHSRRLEKPPALTEPKQPPRIKEPGSKGRVSSGLGSVHVAQSCNGDDWFGKSEAFLWREQS

SEQ ID NO: 56726 - protein, 113 aa, Glycine max
  peptide (1)..(113): Ceres Seq. ID no. 13595537
  misc_feature (1)..(101): Homolog of NCBI NO: 15239719 NR Description: Kip-related protein 3 [Arabidopsis thaliana]
MKKSKITNNDTEPTEPTFLGVRTRDAKTLALKRLNSSASDSALAGDSSCYLQLHSRRLEKPPALTEPKQPPRIKEPGSKGRVSSGLGSVHVAQSCNGDDWFGKSEAFLWREQS

SEQ ID NO: 56727 - DNA, 1875 bp, Glycine max
  misc_feature (1)..(1875): Ceres Seq. ID no. 13595556
atttgaaaatcttgcttcccccattcatattccaactattattattattcttttcttcaattccagattgaagcttttcacatcaacaataccctttagagccccaaacccattttcccactcttcattttcgcctccttcaacaggcaatgtaaacatgagtatttgcttttctactagtcagtcctcaataaatgctgttgtcctgaaaggtcgtactccgctgctgatgagcagtaacattcatggcctttggtcccaaggaatatcgacttcaatttcttccagtttgtctcctgggaagtcagagataagtcatgttggtctttctgtttgcacaaaattgtcttgctccactgttatgggccaaacaattagaggaggtttccttggatcatgctgctccaagcaaaggggcaatcctcgattctttagttctgtagtacctcggaagaggtatcatgaaatttcattggcatgccaaactataaatatgaggcttttggtacctaaacaaaatatgatgcgcaaagttaagtgtaatttgggatcagtaagttggccgcggggatgtgcttcagttggcttaatttttggattacttgtatgtaatttaagttctgaacctgctcatgctgagtcacattctgaaaatgaaaataggaaagatgactgcaacgagtatgagtcaaatgttaaagtcttgcatgggaagaaagtttatactaactattctgtaattggaataccaggggatggaagatgcttgttccgctctgttgctcgtggggcctgtttgaggtctggaaagccccctcctaatgaaagcattcagagagagctggcagatgatttacgagccagagttgctgatgagtttatcaaaagaaaggaagagaccgaatggtttgttgaaggtgattttgatacatatgtttcacaaataaggaagcctcatgtgtggggaggtgaacccgaattgttcattgcatcacatgttttgcagatgcctatcacagtatacatgtatgataaagatgctggtggtttgatatcaattgctgagtatggtcaagagtacggcaaagaaaacccaattagagttctctaccatggctttggtcattatgatgcattagagattcctagaaggaagggtcctaagccaagactgtagcatttcatatttaaaatgtggaagagattaaagcttgtattggttcccttcagtaacattcataatgtcatctataggtcaagtttcctgaaaaccttatgccttttatgtcttggaggacgtttggtccaaggcctcagtgaacagtgatattcactttattgctgtgccatgcacacggttgtttatgttggtctgaagaaagagagcctttgacttcaggtggaccttaaaggttcaaactatccactaacttctgtaagccctttctgtgaaaggtagaaataatggtatacccttctgtctctgagtccaccactatggaggggtgcatggatcttggtactgtactgcttccattgagaaaatatatgtaatggctgacaaagctgaaagttggataattatcgagagttcattaatatcaagtacatggggggtaagttgtgtttagggaattactagtgttttaggttttacttaaccaaacttntttgtttgccctattcactttttcatctcttaaanactttcatntccctcatttgcctcacagggtntcnccatttgaatatgttgtagtcaagtgtntcacatttttntgttagtaacaaggatgggtatcaaagcaaaaatatattgtagctaactgaacttaagctaattaaaacttatcaatttgttaacattggttatgg

SEQ ID NO: 56728 - protein, 391 aa, Glycine max
  peptide (1)..(391): Ceres Seq. ID no. 13595557
  misc_feature (250)..(376): Pfam Name: OTU-like cysteine protease Pfam Description: OTU-like cysteine protease
  misc_feature (247)..(289): Homolog of NCBI NO: 34907704 NR Description: P0035F12.12 [Oryza sativa (japonica
  misc_feature (243)..(364): Homolog of NCBI NO: 34902010 NR Description: unknown protein [Oryza sativa (japonica
  misc_feature (161)..(391): Homolog of NCBI NO: 11280708 NR Description: hypothetical protein T10K17.20 - Arabidopsis
  misc_feature (161)..(391): Homolog of NCBI NO: 18410816 NR Description: auxin-regulated protein [Arabidopsis thaliana]
FENLASPIHIPTIIIILFFNSRLKLFTSTIPFRAPNPFSHSSFSPPSTGNVNMSICFSTSQSSINAVVLKGRTPLLMSSNIHGLWSQGISTSISSSLSPGKSEISHVGLSVCTKLSCSTVMGQTIRGGFLGSCCSKQRGNPRFFSSVVPRKRYHEISLACQTINMRLLVPKQNMMRKVKCNLGSVSWPRGCASVGLIFGLLVCNLSSEPAHAESHSENENRKDDCNEYESNVKVLHGKKVYTNYSVIGIPGDGRCLFRSVARGACLRSGKPPPNESIQRELADDLRARVADEFIKRKEETEWFVEGDFDTYVSQIRKPHVWGGEPELFIASHVLQMPITVYMYDKDAGGLISIAEYGQEYGKENPIRVLYHGFGHYDALEIPRRKGPKPRL

SEQ ID NO: 56729 - protein, 339 aa, Glycine max
  peptide (1)..(339): Ceres Seq. ID no. 13595558
  misc_feature (198)..(324): Pfam Name: OTU-like cysteine protease Pfam Description: OTU-like cysteine protease
  misc_feature (195)..(237): Homolog of NCBI NO: 34907704 NR Description: P0035F12.12 [Oryza sativa (japonica
  misc_feature (191)..(312): Homolog of NCBI NO: 34902010 NR Description: unknown protein [Oryza sativa (japonica
  misc_feature (109)..(339): Homolog of NCBI NO: 11280708 NR Description: hypothetical protein T10K17.20 - Arabidopsis
  misc_feature (109)..(339): Homolog of NCBI NO: 18410816 NR Description: auxin-regulated protein [Arabidopsis thaliana]
MSICFSTSQSSINAVVLKGRTPLLMSSNIHGLWSQGISTSISSSLSPGKSEISHVGLSVCTKLSCSTVMGQTIRGGFLGSCCSKQRGNPRFFSSVVPRKRYHEISLACQTINMRLLVPKQNMMRKVKCNLGSVSWPRGCASVGLIFGLLVCNLSSEPAHAESHSENENRKDDCNEYESNVKVLHGKKVYTNYSVIGIPGDGRCLFRSVARGACLRSGKPPPNESIQRELADDLRARVADEFIKRKEETEWFVEGDFDTYVSQIRKPHVWGGEPELFIASHVLQMPITVYMYDKDAGGLISIAEYGQEYGKENPIRVLYHGFGHYDALEIPRRKGPKPRL

SEQ ID NO: 56730 - protein, 315 aa, Glycine max
  peptide (1)..(315): Ceres Seq. ID no. 13595559
  misc_feature (174)..(300): Pfam Name: OTU-like cysteine protease Pfam Description: OTU-like cysteine protease
  misc_feature (171)..(213): Homolog of NCBI NO: 34907704 NR Description: P0035F12.12 [Oryza sativa (japonica
  misc_feature (167)..(288): Homolog of NCBI NO: 34902010 NR Description: unknown protein [Oryza sativa (japonica
  misc_feature (85)..(315): Homolog of NCBI NO: 11280708 NR Description: hypothetical protein T10K17.20 - Arabidopsis
  misc_feature (85)..(315): Homolog of NCBI NO: 18410816 NR Description: auxin-regulated protein [Arabidopsis thaliana]
MSSNIHGLWSQGISTSISSSLSPGKSEISHVGLSVCTKLSCSTVMGQTIRGGFLGSCCSKQRGNPRFFSSVVPRKRYHEISLACQTINMRLLVPKQNMMRKVKCNLGSVSWPRGCASVGLIFGLLVCNLSSEPAHAESHSENENRKDDCNEYESNVKVLHGKKVYTNYSVIGIPGDGRCLFRSVARGACLRSGKPPPNESIQRELADDLRARVADEFIKRKEETEWFVEGDFDTYVSQIRKPHVWGGEPELFIASHVLQMPITVYMYDKDAGGLISIAEYGQEYGKENPIRVLYHGFGHYDALEIPRRKGPKPRL

SEQ ID NO: 56731 - DNA, 635 bp, Glycine max
  misc_feature (1)..(635): Ceres Seq. ID no. 13595610
gatgaagaccgaatccccgcgtcatcttcgtaaccctctgctcgtcctcctcttcctcgcagcagcagcagcagcgtcggcagcccccgtcgtccagatcgccatggcggccgagccggagcaggcgcccgcggcgcaggaggcggccgtgcacatcgtctacgtggaccgccccgaggacgccgaccccgaggagttccacatccgcacccttgcccccgtcctcggcagcgaggagaaggccaggggcgcggtcctctaccactacaagcacgccgccagcggattctccgcaaagctcaccaccgagcaggtcgaggacctcaagaagcaaccaggtgtccttcaggttgtgccgagccagacctaccagctccatggaaatgagggtggacatgccagcacaacccgcaccatgggccttatgtgaaagccccgggtaggctctgttcttctaatgtgggaatggtcgcatctcatggctgtaacctaagaataagagatgtatccacttgactttgaagggatccagttcctgaagtgtgtaaatgtaatgaattaatgcatgatggcgaacaaatgtgctgatctaatctcgtttggctacaagtttgaattaatgtgatggcaaactc

SEQ ID NO: 56732 - protein, 142 aa, Glycine max
  peptide (1)..(142): Ceres Seq. ID no. 13595611
  misc_feature (50)..(126): Pfam Name: Subtilisin N-terminal Region Pfam Description: Subtilisin N-terminal Region
  misc_feature (42)..(125): Homolog of NCBI NO: 18413351 NR Description: subtilisin-like serine protease [Arabidopsis
  misc_feature (42)..(125): Homolog of NCBI NO: 4115919 NR Description: similar to the subtilase family of serine
  misc_feature (50)..(125): Homolog of NCBI NO: 18408462 NR Description: subtilisin-like serine protease [Arabidopsis
  misc_feature (5)..(131): Homolog of NCBI NO: 34910838 NR Description: P0456A01.27 [Oryza sativa (japonica
  misc_feature (22)..(128): Homolog of NCBI NO: 34394844 NR Description: unknown protein [Oryza sativa (japonica
  misc_feature (23)..(125): Homolog of NCBI NO: 28376696 NR Description: putative Pi starvation induced protein
  misc_feature (29)..(126): Homolog of NCBI NO: 3204125 NR Description: putative Pi starvation-induced protein [Cicer
  misc_feature (47)..(126): Homolog of NCBI NO: 7489176 NR Description: pit2 protein (clone pAL141), Pi starvation
  misc_feature (1)..(131): Homolog of NCBI NO: 18409953 NR Description: expressed protein [Arabidopsis thaliana]
  misc_feature (1)..(131): Homolog of NCBI NO: 21593285 NR Description: unknown [Arabidopsis thaliana]
MKTESPRHLRNPLLVLLFLAAAAAASAAPVVQIAMAAEPEQAPAAQEAAVHIVYVDRPEDADPEEFHIRTLAPVLGSEEKARGAVLYHYKHAASGFSAKLTTEQVEDLKKQPGVLQVVPSQTYQLHGNEGGHASTTRTMGLM

SEQ ID NO: 56733 - protein, 108 aa, Glycine max
  peptide (1)..(108): Ceres Seq. ID no. 13595612
  misc_feature (16)..(92): Pfam Name: Subtilisin N-terminal Region Pfam Description: Subtilisin N-terminal Region
  misc_feature (8)..(91): Homolog of NCBI NO: 18413351 NR Description: subtilisin-like serine protease [Arabidopsis
  misc_feature (8)..(91): Homolog of NCBI NO: 4115919 NR Description: similar to the subtilase family of serine
  misc_feature (16)..(91): Homolog of NCBI NO: 18408462 NR Description: subtilisin-like serine protease [Arabidopsis
  misc_feature (1)..(97): Homolog of NCBI NO: 34910838 NR Description: P0456A01.27 [Oryza sativa (japonica
  misc_feature (1)..(94): Homolog of NCBI NO: 34394844 NR Description: unknown protein [Oryza sativa (japonica
  misc_feature (1)..(91): Homolog of NCBI NO: 28376696 NR Description: putative Pi starvation induced protein
  misc_feature (1)..(92): Homolog of NCBI NO: 3204125 NR Description: putative Pi starvation-induced protein [Cicer
  misc_feature (13)..(92): Homolog of NCBI NO: 7489176 NR Description: pit2 protein (clone pAL141), Pi starvation
  misc_feature (1)..(97): Homolog of NCBI NO: 18409953 NR Description: expressed protein [Arabidopsis thaliana]
  misc_feature (1)..(97): Homolog of NCBI NO: 21593285 NR Description: unknown [Arabidopsis thaliana]
MAAEPEQAPAAQEAAVHIVYVDRPEDADPEEFHIRTLAPVLGSEEKARGAVLYHYKHAASGFSAKLTTEQVEDLKKQPGVLQVVPSQTYQLHGNEGGHASTTRTMGLM

SEQ ID NO: 56734 - DNA, 1370 bp, Glycine max
  misc_feature (1)..(1370): Ceres Seq. ID no. 13582350
acactacaactaaacacactagctattagctatagctagaagtccctccaatccctctttgtctttgtgcttttctagttccttccaaaataccaacaaaagcaaagacaatgagttgccaagcatggcccgaacccatagttcgagtccaatccttagctgaaagtggcctaagttcaatcccttcacgctacattaggcctcactcccaaagaccctccaataccacttcttttccaactcctaaaccttttcaaactgatcatcatcatggtcatgatcagaaaacttccgatcatgaccatgatcatgatcatgttaacattcccgtcattgacctgaaacatgttttctcggaggatccgatcctccgagaacaagtgtttgggcaggtggaccaggcatgtcgggagtgggggttcttccaggtggtgaaccatggtgttagccatgagttgatgaagagttctagggaactgtggcgtgagttcttcaaccagccacttgagatgaaggaagagtatgcaaactcccccaccacttatgagggatatggtagtcgcttgggagtgcagaaaggtgccaccttggattggagtgactacttctttctccattacatgcctccttcacttaggaaccaagctaagtggcctgcatttccagaatccttgaggaaagtgattgctgaatatggtgaaggagtggttaagctaggaggaaggatactcaagatgatgtcaataaaccttggtttgaaagaagatttccttctcaatgcatttgggggagagagtgaggttggtgcatgcctaagggtgaatttctatccaaagtgccctcaacctgacctcacttttggactctcccctcactcagatcctggtggcatgaccattcttctccctgatgattttgtgtctggccttcaagtaagaagaggagatgaatggattacagttaagcctgtcccaaatgccttcatcatcaacattggtgaccaaattcaggtgctgagcaatgcaatatacaagagtgtagaacacagggtgattgtgaactcaaacaaagatcgtgtgtccttggccttgttctacaacccgaggagtgatttactcattcaacctgccaaggagcttgtgacagaggagaagccagccttgtactcaccaatgacctatgatgaatacagactttacattaggctaaatggaccttgtggaaaggcccaagttgaatcattggcctcccaaacatgagttaatagtgtgaattaatagcaagtttggtttctcaatgtgattttctatgtttcagatgtcattttaagaagttaataaaaagttaattgttataacttctatattctc

SEQ ID NO: 56735 - protein, 382 aa, Glycine max
  peptide (1)..(382): Ceres Seq. ID no. 13582351
  misc_feature (231)..(331): Pfam Name: 2OG-Fe(II) oxygenase superfamily Pfam Description: 2OG-Fe(II) oxygenase superfamily
  misc_feature (57)..(302): Homolog of NCBI NO: 34907994 NR Description: leucoanthocyanidin dioxygenase-like protein
  misc_feature (12)..(377): Homolog of NCBI NO: 15229694 NR Description: oxidoreductase, 2OG-Fe(II) oxygenase family
  misc_feature (25)..(377): Homolog of NCBI NO: 21537324 NR Description: leucoanthocyanidin dioxygenase-like protein
  misc_feature (6)..(40): Homolog of NCBI NO: 21554535 NR Description: putative anthocyanidin synthase [Arabidopsis
  misc_feature (40)..(378): Homolog of NCBI NO: 21554535 NR Description: putative anthocyanidin synthase [Arabidopsis
  misc_feature (6)..(40): Homolog of NCBI NO: 15224472 NR Description: oxidoreductase, 2OG-Fe(II) oxygenase family
  misc_feature (40)..(378): Homolog of NCBI NO: 15224472 NR Description: oxidoreductase, 2OG-Fe(II) oxygenase family
  misc_feature (11)..(377): Homolog of NCBI NO: 15239179 NR Description: oxidoreductase, 2OG-Fe(II) oxygenase family
  misc_feature (4)..(39): Homolog of NCBI NO: 15228785 NR Description: oxidoreductase, 2OG-Fe(II) oxygenase family
  misc_feature (25)..(380): Homolog of NCBI NO: 15228785 NR Description: oxidoreductase, 2OG-Fe(II) oxygenase family
MSCQAWPEPIVRVQSLAESGLSSIPSRYIRPHSQRPSNTTSFPTPKPFQTDHHHGHDQKTSDHDHDHDHVNIPVIDLKHVFSEDPILREQVFGQVDQACREWGFFQVVNHGVSHELMKSSRELWREFFNQPLEMKEEYANSPTTYEGYGSRLGVQKGATLDWSDYFFLHYMPPSLRNQAKWPAFPESLRKVIAEYGEGVVKLGGRILKMMSINLGLKEDFLLNAFGGESEVGACLRVNFYPKCPQPDLTFGLSPHSDPGGMTILLPDDFVSGLQVRRGDEWITVKPVPNAFIINIGDQIQVLSNAIYKSVEHRVIVNSNKDRVSLALFYNPRSDLLIQPAKELVTEEKPALYSPMTYDEYRLYIRLNGPCGKAQVESLASQT

SEQ ID NO: 56736 - protein, 266 aa, Glycine max
  peptide (1)..(266): Ceres Seq. ID no. 13582352
  misc_feature (115)..(215): Pfam Name: 2OG-Fe(II) oxygenase superfamily Pfam Description: 2OG-Fe(II) oxygenase superfamily
  misc_feature (1)..(244): Homolog of NCBI NO: 29423729 NR Description: anthocyanidin synthase [Brassica oleracea]
  misc_feature (1)..(244): Homolog of NCBI NO: 22266677 NR Description: leucoanthocyanidin dioxgenase [Vitis labrusca x
  misc_feature (181)..(266): Homolog of NCBI NO: 34907994 NR Description: leucoanthocyanidin dioxygenase-like protein
  misc_feature (1)..(186): Homolog of NCBI NO: 34907994 NR Description: leucoanthocyanidin dioxygenase-like protein
  misc_feature (1)..(261): Homolog of NCBI NO: 15229694 NR Description: oxidoreductase, 2OG-Fe(II) oxygenase family
  misc_feature (1)..(261): Homolog of NCBI NO: 21537324 NR Description: leucoanthocyanidin dioxygenase-like protein
  misc_feature (1)..(262): Homolog of NCBI NO: 21554535 NR Description: putative anthocyanidin synthase [Arabidopsis
  misc_feature (1)..(262): Homolog of NCBI NO: 15224472 NR Description: oxidoreductase, 2OG-Fe(II) oxygenase family
  misc_feature (1)..(261): Homolog of NCBI NO: 15239179 NR Description: oxidoreductase, 2OG-Fe(II) oxygenase family
  misc_feature (1)..(264): Homolog of NCBI NO: 15228785 NR Description: oxidoreductase, 2OG-Fe(II) oxygenase family
MKSSRELWREFFNQPLEMKEEYANSPTTYEGYGSRLGVQKGATLDWSDYFFLHYMPPSLRNQAKWPAFPESLRKVIAEYGEGVVKLGGRILKMMSINLGLKEDFLLNAFGGESEVGACLRVNFYPKCPQPDLTFGLSPHSDPGGMTILLPDDFVSGLQVRRGDEWITVKPVPNAFIINIGDQIQVLSNAIYKSVEHRVIVNSNKDRVSLALFYNPRSDLLIQPAKELVTEEKPALYSPMTYDEYRLYIRLNGPCGKAQVESLASQT

SEQ ID NO: 56737 - protein, 249 aa, Glycine max
  peptide (1)..(249): Ceres Seq. ID no. 13582353
  misc_feature (98)..(198): Pfam Name: 2OG-Fe(II) oxygenase superfamily Pfam Description: 2OG-Fe(II) oxygenase superfamily
  misc_feature (1)..(227): Homolog of NCBI NO: 29423729 NR Description: anthocyanidin synthase [Brassica oleracea]
  misc_feature (1)..(227): Homolog of NCBI NO: 22266677 NR Description: leucoanthocyanidin dioxgenase [Vitis labrusca x
  misc_feature (164)..(249): Homolog of NCBI NO: 34907994 NR Description: leucoanthocyanidin dioxygenase-like protein
  misc_feature (1)..(169): Homolog of NCBI NO: 34907994 NR Description: leucoanthocyanidin dioxygenase-like protein
  misc_feature (1)..(244): Homolog of NCBI NO: 15229694 NR Description: oxidoreductase, 2OG-Fe(II) oxygenase family
  misc_feature (1)..(244): Homolog of NCBI NO: 21537324 NR Description: leucoanthocyanidin dioxygenase-like protein
  misc_feature (1)..(245): Homolog of NCBI NO: 21554535 NR Description: putative anthocyanidin synthase [Arabidopsis
  misc_feature (1)..(245): Homolog of NCBI NO: 15224472 NR Description: oxidoreductase, 2OG-Fe(II) oxygenase family
  misc_feature (1)..(244): Homolog of NCBI NO: 15239179 NR Description: oxidoreductase, 2OG-Fe(II) oxygenase family
  misc_feature (1)..(247): Homolog of NCBI NO: 15228785 NR Description: oxidoreductase, 2OG-Fe(II) oxygenase family
MKEEYANSPTTYEGYGSRLGVQKGATLDWSDYFFLHYMPPSLRNQAKWPAFPESLRKVIAEYGEGVVKLGGRILKMMSINLGLKEDFLLNAFGGESEVGACLRVNFYPKCPQPDLTFGLSPHSDPGGMTILLPDDFVSGLQVRRGDEWITVKPVPNAFIINIGDQIQVLSNAIYKSVEHRVIVNSNKDRVSLALFYNPRSDLLIQPAKELVTEEKPALYSPMTYDEYRLYIRLNGPCGKAQVESLASQT

SEQ ID NO: 56738 - DNA, 1541 bp, Glycine max
  misc_feature (1)..(1541): Ceres Seq. ID no. 13595560
actgcctcagtgttctccataacaccataaaacactgacccaatctttctcctcctcctccctcacaatctgacacactaacacaccaaaattcaaattacattaccaaaaaaagaaaaatggtgggtacatatgcatatacatatacatatagactactatagagtgaaagtgatatacttcttgctattcaatttttatgtctgttttgaagttaattctgttcactctcctggcgcaaacacagatcaaaattcaaattgcaaagtaaaaaaaaaaaaccatgttcgtttcttcttcatcgcatgttccccgttggctccaagttctcctcacggagaagttctacaacgtttgcataattcacgaagaggcaaagaagaacgagaagaacgtttattgcttggattgttgcattagcctctgccctcactgtttgtccccccaccgctctcatagactcttgcagattagaagatatgtgtatcacgatgttataaggttggatgatgctgcaaagttaattgactgcaattccgttcaatcctacacaaccaacagcgcaaaagtggtatttttaaaccaaaggccacagacaaggaacttcagaggctccggcaatttctgcagcacctgtgacagaagcctgcaagacccataccacttctgctccctctcttgcaaggtctttcctttggtcactcccattttcgccctctcaccaacgttaccattattctttattcttattatatatattattattattactattctttttttctcttatttatgtaatgtgtgtcttctaataatgtttatgtttatgtttatttcctcaatttttttttctcgtttttgtttttgttttaaacagataaattatctcgtcagaacaacggactctctctgcggctacctcttcgagtgcaactacctgccgctactggaatctgggctcgacgatggtctaatgatgactcctgattcggttctcgaaccgtctggttcaggggggtacggaggggtggattgtaggaccaccttggcttgcactgccaccaccgagattgtgaggaagaagaggaccggcggtgccgctttccggcttccgttccggccggcgtgctcgccggtctcggaaatctcggcgtgtctcatgaaccggaggaaagggaacccccagcgggccccactccattgaagaacttgagagagagggtgagtttttttttatatgaaaagagaaaaaaaaacgtttattaaatattaatattctaaatactgttattattattatggagtttaaatctggggttggaacttactatacctttacagggagaaaaaaataacctcctagttttgtagagattatcaccctctgctttgttgctgctgtgtatctatctacccggattgttagaatttattgaggtttattactgcttctgttatagtactagtatatataatttgataatttgaaaraamaamwaaaaaaagyttatcrataccgtcsacctcsagggggggcccgg

SEQ ID NO: 56739 - protein, 306 aa, Glycine max
  peptide (1)..(306): Ceres Seq. ID no. 15221611
  misc_feature (10)..(139): Pfam Name: Protein of unknown function, DUF597 Pfam Description: Protein of unknown function, DUF597
  misc_feature (10)..(135): Homolog of NCBI NO: 25337907 NR Description: hypothetical protein F9H16.1 - Arabidopsis
  misc_feature (10)..(135): Homolog of NCBI NO: 18394936 NR Description: expressed protein [Arabidopsis thaliana]
  misc_feature (10)..(135): Homolog of NCBI NO: 21554139 NR Description: unknown [Arabidopsis thaliana]
  misc_feature (10)..(135): Homolog of NCBI NO: 18398555 NR Description: expressed protein [Arabidopsis thaliana]
  misc_feature (10)..(135): Homolog of NCBI NO: 6714272 NR Description: F6N18.8 [Arabidopsis thaliana]
  misc_feature (10)..(157): Homolog of NCBI NO: 15236696 NR Description: expressed protein [Arabidopsis thaliana]
  misc_feature (10)..(135): Homolog of NCBI NO: 38346725 NR Description: OSJNBa0086O06.23 [Oryza sativa (japonica
  misc_feature (10)..(138): Homolog of NCBI NO: 9755373 NR Description: F17F8.4 [Arabidopsis thaliana]
  misc_feature (10)..(135): Homolog of NCBI NO: 16117799 NR Description: zinc-binding protein [Pisum sativum]
  misc_feature (6)..(139): Homolog of NCBI NO: 15232396 NR Description: hypothetical protein [Arabidopsis thaliana]
MFVSSSSHVPRWLQVLLTEKFYNVCIIHEEAKKNEKNVYCLDCCISLCPHCLSPHRSHRLLQIRRYVYHDVIRLDDAAKLIDCNSVQSYTTNSAKVVFLNQRPQTRNFRGSGNFCSTCDRSLQDPYHFCSLSCKVFPLVTPIFALSPTLPLFFILIIYIIIITILFFSYLCNVCLLIMFMFMFISSIFFSRFCFCFKQINYLVRTTDSLCGYLFECNYLPLLESGLDDGLMMTPDSVLEPSGSGGYGGVDCRTTLACTATTEIVRKKRTGGAAFRLPFRPACSPVSEISACLMNRRKGNPQRAPLH

SEQ ID NO: 56740 - DNA, 2214 bp, Glycine max
  misc_feature (1)..(2214): Ceres Seq. ID no. 12611726
aaaaacatggacgaatggcgcgccaccatcaaaatggatcacagaacccaacgaacttagaaaacctaaccgagtcctccatcagtcatattcccatcgaccgttcagaatgattgatggtagcgatcatgcaacagcagcagcagcatcaacagcaacagcagaacccctctgcactggtgccacctcagctcaagaatccccaatcctccaccacaaccaccaccgccaccaccactccccttaggtcaccctccgcccagtcgccgctctccgtcgtccaacccatccggcaacccccacccccctctcatccggtggtgccggttacgacggtggagcccggtctgacggcggtgccgacgtgtccgctggtcagagtccggctctcggacattgccccctatgacggggcaccagggggaccctatctgagagcaatggaggcactgtgtgggtctctgttgcggcacaatgctgctttgatcgaattggggaacgaagacactgctctgatgcgatgcggcttggaaggtgcgaggttgttcttcagaagtagggcccaccttggttctggcaagggcagccgtggggtttacatgtacagagcaggaagggctttggaggattgggattcttctcccccttgcatggctgatattttcaggtgcatgggaaaggcatctcgatccgccttgtgtgccattgcgaggcatttgcgtcttagaagcgatgtttttaaccatttgcttgatgatgctccattgcctgctaatgaggtgtcttcgtcggttcttgttgtgacctactcacatgcttctttgcaaaatggaaggggtgccattggaggcagtaagcctaccatgaatggtgaagttgagaagggattgttgacgttgatatcttctgacactcctggtcttcaggtatgtgatcccagtggtcgatggtatctggcagacagtgggtttgggcctggagatcttttacttataacaggcaaggcacttagccatgctactgctggcctatgtcctgctgcatcatatagagcttctcctgattattttctgagtcctaatggtggaggaaggtcttctcttgcatataggctcatgccacagggcaatgctatattagattgttccccaattgcagcagctggccatgttattccccaaagctatgttcgaatatctgtaagccaatttatggatgaccttgctgccgaagaactgataggcagcagatgtgataatgctgatgctgctgctcaacacaatgtgaataaggagccatcattaagaagtgttctatcagatcctttatctggcacattccttgaagatgccatgcttgtctcatgtggacattcttttggtggtctcatgctgaggagagtcattgaaacgtcaaaatgtactctctgcaatgtggaaattgaaactggttctttgatccctaatcatgctcttagagctgcagcagctgctgtcaagcatgaggatgatcggaggttatttcgtaatgccgctctccgaaagcggcggaaagaaatgggtgaccaaatggattcaatgagaagagtgaatggggaaaatggagattttactgctgccgatggacttcagcggggagtacaatatccatttttggtaaatgagaaagttgttattaagggcaacaggagaacaccagaaaaatttgttgggaaagaagctgtgattacatctcagtgtctcaatggctggtatttgctcaagattattgaaactggagagaatgtccgcctgcagtaccgttctcttaggaagctcttaaactcaccagcggaccagtgcccctcccagccaattcaaaatagcagctcttaaaatagatttattgtaggttttccttctttcttttttcctccaccagaaaaaggaaacttttgtagtcttgatcctttgaagcaaagaattgactcatctagtcttgatctatgattgtaaagaattacattgactggtccggctccttatagcatgtgatagaggtttataatgtatcaacgaggttatttgtgtagatgccaatgctaggtcggcttataattattgtaaagaagaaagcaggcaaagataaattagatagcatgtaaattgtagcttgcacttactgaaatggatcatatgtttaattttatttattttgcaactattcagtttttgt

SEQ ID NO: 56741 - protein, 585 aa, Glycine max
  peptide (1)..(585): Ceres Seq. ID no. 12611727
  misc_feature (86)..(181): Homolog of NCBI NO: 34901828 NR Description: contains EST AU068498(C30372)~similar to
  misc_feature (176)..(374): Homolog of NCBI NO: 34901828 NR Description: contains EST AU068498(C30372)~similar to
  misc_feature (86)..(181): Homolog of NCBI NO: 33146537 NR Description: unknown protein [Oryza sativa (japonica
  misc_feature (176)..(374): Homolog of NCBI NO: 33146537 NR Description: unknown protein [Oryza sativa (japonica
  misc_feature (86)..(181): Homolog of NCBI NO: 33146538 NR Description: unknown protein [Oryza sativa (japonica
  misc_feature (176)..(374): Homolog of NCBI NO: 33146538 NR Description: unknown protein [Oryza sativa (japonica
  misc_feature (396)..(566): Homolog of NCBI NO: 28876015 NR Description: hypothetical protein [Oryza sativa (japonica
  misc_feature (41)..(489): Homolog of NCBI NO: 20453175 NR Description: At3g19895 [Arabidopsis thaliana]
  misc_feature (41)..(584): Homolog of NCBI NO: 11994201 NR Description: gb|AAF35943.1~gene_id:MPN9.14~similar to unknown
  misc_feature (41)..(584): Homolog of NCBI NO: 30685540 NR Description: expressed protein [Arabidopsis thaliana]
MVAIMQQQQQHQQQQQNPSALVPPQLKNPQSSTTTTTATTTPLRSPSAQSPLSVVQPIRQPPPPSHPVVPVTTVEPGLTAVPTCPLVRVRLSDIAPYDGAPGGPYLRAMEALCGSLLRHNAALIELGNEDTALMRCGLEGARLFFRSRAHLGSGKGSRGVYMYRAGRALEDWDSSPPCMADIFRCMGKASRSALCAIARHLRLRSDVFNHLLDDAPLPANEVSSSVLVVTYSHASLQNGRGAIGGSKPTMNGEVEKGLLTLISSDTPGLQVCDPSGRWYLADSGFGPGDLLLITGKALSHATAGLCPAASYRASPDYFLSPNGGGRSSLAYRLMPQGNAILDCSPIAAAGHVIPQSYVRISVSQFMDDLAAEELIGSRCDNADAAAQHNVNKEPSLRSVLSDPLSGTFLEDAMLVSCGHSFGGLMLRRVIETSKCTLCNVEIETGSLIPNHALRAAAAAVKHEDDRRLFRNAALRKRRKEMGDQMDSMRRVNGENGDFTAADGLQRGVQYPFLVNEKVVIKGNRRTPEKFVGKEAVITSQCLNGWYLLKIIETGENVRLQYRSLRKLLNSPADQCPSQPIQNSSS

SEQ ID NO: 56742 - protein, 581 aa, Glycine max
  peptide (1)..(581): Ceres Seq. ID no. 12611728
  misc_feature (82)..(177): Homolog of NCBI NO: 34901828 NR Description: contains EST AU068498(C30372)~similar to
  misc_feature (172)..(370): Homolog of NCBI NO: 34901828 NR Description: contains EST AU068498(C30372)~similar to
  misc_feature (82)..(177): Homolog of NCBI NO: 33146537 NR Description: unknown protein [Oryza sativa (japonica
  misc_feature (172)..(370): Homolog of NCBI NO: 33146537 NR Description: unknown protein [Oryza sativa (japonica
  misc_feature (82)..(177): Homolog of NCBI NO: 33146538 NR Description: unknown protein [Oryza sativa (japonica
  misc_feature (172)..(370): Homolog of NCBI NO: 33146538 NR Description: unknown protein [Oryza sativa (japonica
  misc_feature (392)..(562): Homolog of NCBI NO: 28876015 NR Description: hypothetical protein [Oryza sativa (japonica
  misc_feature (37)..(485): Homolog of NCBI NO: 20453175 NR Description: At3g19895 [Arabidopsis thaliana]
  misc_feature (37)..(580): Homolog of NCBI NO: 11994201 NR Description: gb|AAF35943.1~gene_id:MPN9.14~similar to unknown
  misc_feature (37)..(580): Homolog of NCBI NO: 30685540 NR Description: expressed protein [Arabidopsis thaliana]
MQQQQQHQQQQQNPSALVPPQLKNPQSSTTTTTATTTPLRSPSAQSPLSVVQPIRQPPPPSHPVVPVTTVEPGLTAVPTCPLVRVRLSDIAPYDGAPGGPYLRAMEALCGSLLRHNAALIELGNEDTALMRCGLEGARLFFRSRAHLGSGKGSRGVYMYRAGRALEDWDSSPPCMADIFRCMGKASRSALCAIARHLRLRSDVFNHLLDDAPLPANEVSSSVLVVTYSHASLQNGRGAIGGSKPTMNGEVEKGLLTLISSDTPGLQVCDPSGRWYLADSGFGPGDLLLITGKALSHATAGLCPAASYRASPDYFLSPNGGGRSSLAYRLMPQGNAILDCSPIAAAGHVIPQSYVRISVSQFMDDLAAEELIGSRCDNADAAAQHNVNKEPSLRSVLSDPLSGTFLEDAMLVSCGHSFGGLMLRRVIETSKCTLCNVEIETGSLIPNHALRAAAAAVKHEDDRRLFRNAALRKRRKEMGDQMDSMRRVNGENGDFTAADGLQRGVQYPFLVNEKVVIKGNRRTPEKFVGKEAVITSQCLNGWYLLKIIETGENVRLQYRSLRKLLNSPADQCPSQPIQNSSS

SEQ ID NO: 56743 - protein, 477 aa, Glycine max
  peptide (1)..(477): Ceres Seq. ID no. 12611729
  misc_feature (1)..(73): Homolog of NCBI NO: 34901828 NR Description: contains EST AU068498(C30372)~similar to
  misc_feature (68)..(266): Homolog of NCBI NO: 34901828 NR Description: contains EST AU068498(C30372)~similar to
  misc_feature (1)..(73): Homolog of NCBI NO: 33146537 NR Description: unknown protein [Oryza sativa (japonica
  misc_feature (68)..(266): Homolog of NCBI NO: 33146537 NR Description: unknown protein [Oryza sativa (japonica
  misc_feature (1)..(73): Homolog of NCBI NO: 33146538 NR Description: unknown protein [Oryza sativa (japonica
  misc_feature (68)..(266): Homolog of NCBI NO: 33146538 NR Description: unknown protein [Oryza sativa (japonica
  misc_feature (288)..(458): Homolog of NCBI NO: 28876015 NR Description: hypothetical protein [Oryza sativa (japonica
  misc_feature (1)..(381): Homolog of NCBI NO: 20453175 NR Description: At3g19895 [Arabidopsis thaliana]
  misc_feature (1)..(476): Homolog of NCBI NO: 11994201 NR Description: gb|AAF35943.1~gene_id:MPN9.14~similar to unknown
  misc_feature (1)..(476): Homolog of NCBI NO: 30685540 NR Description: expressed protein [Arabidopsis thaliana]
MEALCGSLLRHNAALIELGNEDTALMRCGLEGARLFFRSRAHLGSGKGSRGVYMYRAGRALEDWDSSPPCMADIFRCMGKASRSALCAIARHLRLRSDVFNHLLDDAPLPANEVSSSVLVVTYSHASLQNGRGAIGGSKPTMNGEVEKGLLTLISSDTPGLQVCDPSGRWYLADSGFGPGDLLLITGKALSHATAGLCPAASYRASPDYFLSPNGGGRSSLAYRLMPQGNAILDCSPIAAAGHVIPQSYVRISVSQFMDDLAAEELIGSRCDNADAAAQHNVNKEPSLRSVLSDPLSGTFLEDAMLVSCGHSFGGLMLRRVIETSKCTLCNVEIETGSLIPNHALRAAAAAVKHEDDRRLFRNAALRKRRKEMGDQMDSMRRVNGENGDFTAADGLQRGVQYPFLVNEKVVIKGNRRTPEKFVGKEAVITSQCLNGWYLLKIIETGENVRLQYRSLRKLLNSPADQCPSQPIQNSSS

SEQ ID NO: 56744 - DNA, 520 bp, Glycine max
  misc_feature (1)..(520): Ceres Seq. ID no. 12611730
atctcaaaagcattgcccgagagagagaagaatcaaaaacgtagaatcaaatcaattattaagcaatggcatcgatgagcatgacagccacattcgtcccggccgttgcaaaggtcccgtcaaccaccggcggacgaaggctctcagtgatcagagcttcaacgagcgacaacacaaccagcttacaagtcaaggagacacagaacagcaccacgatgaggagggatctcatgttcacagctgcagctgcggcagttttttccttggccaaggcagccatggcagacgaggaggagcccaaacgagggacagatgcagcgaagaagaagtacgctcaagtttgtgtcacaatgccaacagccaagatctgtcgctactgattcaacaatccatctttcatgtctctctccctctatctttctaatatttcggtaaaattttctcaaactttgtttgtaatcatatactaaatcaatttcatattttgctactagattttcgaatataaactaaacttgac

SEQ ID NO: 56745 - protein, 140 aa, Glycine max
  peptide (1)..(140): Ceres Seq. ID no. 12611731
SQKHCPRERRIKNVESNQLLSNGIDEHDSHIRPGRCKGPVNHRRTKALSDQSFNERQHNQLTSQGDTEQHHDEEGSHVHSCSCGSFFLGQGSHGRRGGAQTRDRCSEEEVRSSLCHNANSQDLSLLIQQSIFHVSLPLSF

SEQ ID NO: 56746 - protein, 104 aa, Glycine max
  peptide (1)..(104): Ceres Seq. ID no. 12611732
  misc_feature (1)..(103): Homolog of NCBI NO: 400198 NR Description: Photosystem II 5 kDa protein, chloroplast
  misc_feature (1)..(104): Homolog of NCBI NO: 2129671 NR Description: photosystem II protein psbT - Arabidopsis thaliana
  misc_feature (1)..(103): Homolog of NCBI NO: 18403499 NR Description: photosystem II 5 KD protein
  misc_feature (1)..(103): Homolog of NCBI NO: 21537121 NR Description: photosystem II [Arabidopsis thaliana]
  misc_feature (1)..(104): Homolog of NCBI NO: 1465366 NR Description: photosystem II [Arabidopsis thaliana]
  misc_feature (1)..(104): Homolog of NCBI NO: 18402859 NR Description: Expressed protein
MASMSMTATFVPAVAKVPSTTGGRRLSVIRASTSDNTTSLQVKETQNSTTMRRDLMFTAAAAAVFSLAKAAMADEEEPKRGTDAAKKKYAQVCVTMPTAKICRY

SEQ ID NO: 56747 - protein, 101 aa, Glycine max
  peptide (1)..(101): Ceres Seq. ID no. 12611733
  misc_feature (1)..(100): Homolog of NCBI NO: 400198 NR Description: Photosystem II 5 kDa protein, chloroplast
  misc_feature (1)..(101): Homolog of NCBI NO: 2129671 NR Description: photosystem II protein psbT - Arabidopsis thaliana
  misc_feature (1)..(100): Homolog of NCBI NO: 18403499 NR Description: photosystem II 5 KD protein
  misc_feature (1)..(100): Homolog of NCBI NO: 21537121 NR Description: photosystem II [Arabidopsis thaliana]
  misc_feature (1)..(101): Homolog of NCBI NO: 1465366 NR Description: photosystem II [Arabidopsis thaliana]
  misc_feature (1)..(101): Homolog of NCBI NO: 18402859 NR Description: Expressed protein
MSMTATFVPAVAKVPSTTGGRRLSVIRASTSDNTTSLQVKETQNSTTMRRDLMFTAAAAAVFSLAKAAMADEEEPKRGTDAAKKKYAQVCVTMPTAKICRY

SEQ ID NO: 56748 - DNA, 793 bp, Glycine max
  misc_feature (1)..(793): Ceres Seq. ID no. 15226360
cttgatcgacatgcactctctctctcccaaaacgccatgagaaaaagacgaaaaagaagccacaagacccacactcgtctctgctgaagaacaaaatactaggagaagaagctgtaccaaaaaggaaatttcgagtacaaaaccccacaccttcatcttcaaatttcagaaaatgtgctacgtggggaaagcaacaaagatcttcatcttcattgtgacggtgctcgttgttctgggtctagttttgggattggggctccttcgccgccgccaccaccacaacactgcaaataaatgctcagacgaatcttgcattccttcaccaaccacatttccaaaccccaatttcaacacaccaaccccaccttctccaattgacaacaaccccactaccccacaaactcctcagcttccaaatccaattcctccacctccttactccaataacccatctttgccgccgccgccgccgattctgcagtctccgccgccgccggaggaaacaacccctccgactcctcctagtgtggcggcgccgcctatgaacactcccacaccagggtcggcgctgttgaccccaggtcctgtgcatgctatggcctaatgagctatctatctgagtggttcttcttttttactttctttcatatttttactgatggggttatttaatttgtgaatgttttaattgatgagagagagagagagtattgagataattagagcatttgtaaggtgggatagtgaatttacagagccgtccctggcatctatattgattttcaaggatgac

SEQ ID NO: 56749 - protein, 143 aa, Glycine max
  peptide (1)..(143): Ceres Seq. ID no. 15226361
  misc_feature (49)..(129): Pfam Name: Extensin-like region Pfam Description: Extensin-like region
  misc_feature (48)..(138): Homolog of NCBI NO: 30685319 NR Description: late embryogenesis abundant protein -related
  misc_feature (13)..(138): Homolog of NCBI NO: 30387315 NR Description: unknown [Choristoneura fumiferana MNPV]
  misc_feature (11)..(138): Homolog of NCBI NO: 23577891 NR Description: unknown [Rachiplusia ou multiple
  misc_feature (49)..(138): Homolog of NCBI NO: 81286 NR Description: extensin - Volvox carteri (fragment)
  misc_feature (10)..(138): Homolog of NCBI NO: 15320736 NR Description: unknown [Epiphyas postvittana
  misc_feature (49)..(141): Homolog of NCBI NO: 21592647 NR Description: unknown [Arabidopsis thaliana]
  misc_feature (1)..(129): Homolog of NCBI NO: 33354213 NR Description: extensin-like protein [Oryza sativa (japonica
  misc_feature (1)..(141): Homolog of NCBI NO: 18403249 NR Description: proline-rich protein family [Arabidopsis
  misc_feature (1)..(136): Homolog of NCBI NO: 21592647 NR Description: unknown [Arabidopsis thaliana]
  misc_feature (1)..(141): Homolog of NCBI NO: 26450091 NR Description: unknown protein [Arabidopsis thaliana]
MCYVGKATKIFIFIVTVLVVLGLVLGLGLLRRRHHHNTANKCSDESCIPSPTTFPNPNFNTPTPPSPIDNNPTTPQTPQLPNPIPPPPYSNNPSLPPPPPILQSPPPPEETTPPTPPSVAAPPMNTPTPGSALLTPGPVHAMA

SEQ ID NO: 56750 - DNA, 1242 bp, Glycine max
  misc_feature (1)..(1242): Ceres Seq. ID no. 13595660
aagaatgaatgaaaggcattagaaatcagtgaccggcgtgagagagcaaagatggtggttcttggcaccacctcaccttcaatttcctgcttgccgtcttcaactcaaaccgactacaaggcgcgtcgatactgttcttttccgcaacgcccacgcccacgcccacgcgcttcacgtttcttttgcggattccctttcgctccaaatgccatccattctccttctctgtctgtgacgaatgaagcactgaatgttatgatttctggggctcctgcttctggtaaaggaacccagtgccacctcatcaccaacaagtacggtttggttcatattgctgctggagatttacttagggcagaaattgccactggaagtgataatggaaagcgagccaaacagtatatggagaagggacagttggtccctgacgaaattgttgtgatgatggttaaggagcgtctcttgaaaccagattcgaaagagaatggttggcttttggatggatatcccatgagcttatcacaggccactgcacttgaggctcttggctttcggcctcatatttttcttcttcttgaggtttctgaagatgttcttgtggagagagtagttggacggagattagatcctgttaccggcaagatatatcacttgaagtattctcctccagagacacaagaaatagccgcaaggcttacccaacgctttgatgatacagaagaaaaggtgaaattgcgattgaatacccatcatcaaaatgtggagtcagtcctttccatgtacaaagacataactgttaagattaacggaaatgtctcaaaggaggaagtatttgctcaaattgatagtgcactgacaagtcttatagaggaaaggaaggctgcttcaggatctgtggcagcatagaagacccatcttttgacattttgatctagcatggtgcgttgctggtggtagtggattttaaatgatttatttatagagttaaacaaaagagtcttcactcaaactaagctgcattttctcgtgaagattgtctcacggcttatatcctcccatttggaaagcaatgtgatgattggcttggaccatgcatgaggacctgtgatagtgtagtgcgcagtatattttacaaatttattttttatgagaaaatgattaccttaaattaaaatcgtttttatgtaatgactagcttgtaaatgcaggattttgtgaattatcgtttgttggtttcctgtt

SEQ ID NO: 56751 - protein, 284 aa, Glycine max
  peptide (1)..(284): Ceres Seq. ID no. 13595661
  misc_feature (70)..(249): Pfam Name: Adenylate kinase Pfam Description: Adenylate kinase
  misc_feature (65)..(268): Homolog of NCBI NO: 24111857 NR Description: adenylate kinase [Shigella flexneri 2a str. 301]
  misc_feature (49)..(268): Homolog of NCBI NO: 26246489 NR Description: Adenylate kinase [Escherichia coli CFT073]
  misc_feature (49)..(268): Homolog of NCBI NO: 1773156 NR Description: adenylate kinase [Escherichia coli]
  misc_feature (118)..(273): Homolog of NCBI NO: 38175634 NR Description: putative Adenylate kinase, chloroplast
  misc_feature (68)..(278): Homolog of NCBI NO: 7687936 NR Description: possible adenylate kinase [Leishmania major]
  misc_feature (68)..(276): Homolog of NCBI NO: 37727511 NR Description: adenylate kinase [Trypanosoma cruzi]
  misc_feature (69)..(254): Homolog of NCBI NO: 10176815 NR Description: adenylate kinase-like [Arabidopsis thaliana]
  misc_feature (1)..(271): Homolog of NCBI NO: 22327339 NR Description: adenylate kinase -related protein [Arabidopsis
  misc_feature (64)..(275): Homolog of NCBI NO: 1170606 NR Description: ADENYLATE KINASE, CHLOROPLAST (ATP-AMP
  misc_feature (63)..(282): Homolog of NCBI NO: 15238822 NR Description: expressed protein [Arabidopsis thaliana]
MVVLGTTSPSISCLPSSTQTDYKARRYCSFPQRPRPRPRASRFFCGFPFAPNAIHSPSLSVTNEALNVMISGAPASGKGTQCHLITNKYGLVHIAAGDLLRAEIATGSDNGKRAKQYMEKGQLVPDEIVVMMVKERLLKPDSKENGWLLDGYPMSLSQATALEALGFRPHIFLLLEVSEDVLVERVVGRRLDPVTGKIYHLKYSPPETQEIAARLTQRFDDTEEKVKLRLNTHHQNVESVLSMYKDITVKINGNVSKEEVFAQIDSALTSLIEERKAASGSVAA

SEQ ID NO: 56752 - protein, 216 aa, Glycine max
  peptide (1)..(216): Ceres Seq. ID no. 13595662
  misc_feature (2)..(181): Pfam Name: Adenylate kinase Pfam Description: Adenylate kinase
  misc_feature (1)..(200): Homolog of NCBI NO: 24111857 NR Description: adenylate kinase [Shigella flexneri 2a str. 301]
  misc_feature (1)..(200): Homolog of NCBI NO: 26246489 NR Description: Adenylate kinase [Escherichia coli CFT073]
  misc_feature (1)..(200): Homolog of NCBI NO: 1773156 NR Description: adenylate kinase [Escherichia coli]
  misc_feature (50)..(205): Homolog of NCBI NO: 38175634 NR Description: putative Adenylate kinase, chloroplast
  misc_feature (1)..(210): Homolog of NCBI NO: 7687936 NR Description: possible adenylate kinase [Leishmania major]
  misc_feature (1)..(208): Homolog of NCBI NO: 37727511 NR Description: adenylate kinase [Trypanosoma cruzi]
  misc_feature (1)..(186): Homolog of NCBI NO: 10176815 NR Description: adenylate kinase-like [Arabidopsis thaliana]
  misc_feature (1)..(203): Homolog of NCBI NO: 22327339 NR Description: adenylate kinase -related protein [Arabidopsis
  misc_feature (1)..(207): Homolog of NCBI NO: 1170606 NR Description: ADENYLATE KINASE, CHLOROPLAST (ATP-AMP
  misc_feature (1)..(214): Homolog of NCBI NO: 15238822 NR Description: expressed protein [Arabidopsis thaliana]
MISGAPASGKGTQCHLITNKYGLVHIAAGDLLRAEIATGSDNGKRAKQYMEKGQLVPDEIVVMMVKERLLKPDSKENGWLLDGYPMSLSQATALEALGFRPHIFLLLEVSEDVLVERVVGRRLDPVTGKIYHLKYSPPETQEIAARLTQRFDDTEEKVKLRLNTHHQNVESVLSMYKDITVKINGNVSKEEVFAQIDSALTSLIEERKAASGSVAA

SEQ ID NO: 56753 - protein, 167 aa, Glycine max
  peptide (1)..(167): Ceres Seq. ID no. 13595663
  misc_feature (1)..(132): Pfam Name: Adenylate kinase Pfam Description: Adenylate kinase
  misc_feature (1)..(151): Homolog of NCBI NO: 24111857 NR Description: adenylate kinase [Shigella flexneri 2a str. 301]
  misc_feature (1)..(151): Homolog of NCBI NO: 26246489 NR Description: Adenylate kinase [Escherichia coli CFT073]
  misc_feature (1)..(151): Homolog of NCBI NO: 1773156 NR Description: adenylate kinase [Escherichia coli]
  misc_feature (1)..(156): Homolog of NCBI NO: 38175634 NR Description: putative Adenylate kinase, chloroplast
  misc_feature (1)..(161): Homolog of NCBI NO: 7687936 NR Description: possible adenylate kinase [Leishmania major]
  misc_feature (1)..(159): Homolog of NCBI NO: 37727511 NR Description: adenylate kinase [Trypanosoma cruzi]
  misc_feature (1)..(137): Homolog of NCBI NO: 10176815 NR Description: adenylate kinase-like [Arabidopsis thaliana]
  misc_feature (1)..(154): Homolog of NCBI NO: 22327339 NR Description: adenylate kinase -related protein [Arabidopsis
  misc_feature (1)..(158): Homolog of NCBI NO: 1170606 NR Description: ADENYLATE KINASE, CHLOROPLAST (ATP-AMP
  misc_feature (1)..(165): Homolog of NCBI NO: 15238822 NR Description: expressed protein [Arabidopsis thaliana]
MEKGQLVPDEIVVMMVKERLLKPDSKENGWLLDGYPMSLSQATALEALGFRPHIFLLLEVSEDVLVERVVGRRLDPVTGKIYHLKYSPPETQEIAARLTQRFDDTEEKVKLRLNTHHQNVESVLSMYKDITVKINGNVSKEEVFAQIDSALTSLIEERKAASGSVAA

SEQ ID NO: 56754 - DNA, 740 bp, Glycine max
  misc_feature (1)..(740): Ceres Seq. ID no. 12611816
catttgttcttctttggctgggcggcaatggcggaggagcaaaagacgactaaggttgacgtagaatctccggcggtttcagctccggagaaggaaccagctcctgctccggtggaagcttctacagaggttgcggaggagaaagttcatgatccaccacctcccgtcgagtccaaagctcttgccgttgttgaaaaacccattgaggagcctacaccaaagaaaagttcatctggttcgatcgacagagatgtgaaacttgcagacttggaaaaagagaagaaaacatcattcatcaaagcatgggaagagagtgagaagtcaaaggcagagaacaaggcacaaaagaaggtatctgatgtgctcgcttgggagaacagccagaaagcagccgttgaagcccagctcaggaagattgaagaaaaattagagaagaaaaaggcagagtacggtgagaaaatgaagaacaaagtggctgcgattcacaaggaagcagaagagaagagagcaatggttgaagctaaaagaggagaggagcttcttaaagctgaagaaatggctgccaagtacagagccactggtatagtacccaaggcaacttgtggatgtttctaagctgttctcagctcattgtatttatccatctctcttttttgtgtgattcggttactttttctttgtttgttgtcatgtttatatattggtgactttgtgtttaaaagaagatcagtttcacttcg

SEQ ID NO: 56755 - protein, 204 aa, Glycine max
  peptide (1)..(204): Ceres Seq. ID no. 12611817
  misc_feature (92)..(201): Pfam Name: Remorin, C-terminal region Pfam Description: Remorin, C-terminal region
  misc_feature (46)..(204): Homolog of NCBI NO: 15229057 NR Description: remorin -like protein; protein id: At3g48940.1
  misc_feature (39)..(203): Homolog of NCBI NO: 4883530 NR Description: remorin 2 [Lycopersicon esculentum]
  misc_feature (10)..(203): Homolog of NCBI NO: 21555669 NR Description: remorin [Arabidopsis thaliana]
  misc_feature (10)..(203): Homolog of NCBI NO: 15237822 NR Description: putative protein
  misc_feature (13)..(204): Homolog of NCBI NO: 4731573 NR Description: remorin 1 [Lycopersicon esculentum]
  misc_feature (13)..(204): Homolog of NCBI NO: 34925093 NR Description: Remorin (pp34)
  misc_feature (10)..(204): Homolog of NCBI NO: 32489830 NR Description: OSJNBb0039L24.13 [Oryza sativa (japonica
  misc_feature (16)..(204): Homolog of NCBI NO: 15233068 NR Description: putative DNA-binding protein
  misc_feature (10)..(204): Homolog of NCBI NO: 601843 NR Description: DNA-binding protein
  misc_feature (10)..(204): Homolog of NCBI NO: 15225899 NR Description: remorin
HLFFFGWAAMAEEQKTTKVDVESPAVSAPEKEPAPAPVEASTEVAEEKVHDPPPPVESKALAVVEKPIEEPTPKKSSSGSIDRDVKLADLEKEKKTSFIKAWEESEKSKAENKAQKKVSDVLAWENSQKAAVEAQLRKIEEKLEKKKAEYGEKMKNKVAAIHKEAEEKRAMVEAKRGEELLKAEEMAAKYRATGIVPKATCGCF

SEQ ID NO: 56756 - protein, 195 aa, Glycine max
  peptide (1)..(195): Ceres Seq. ID no. 12611818
  misc_feature (83)..(192): Pfam Name: Remorin, C-terminal region Pfam Description: Remorin, C-terminal region
  misc_feature (37)..(195): Homolog of NCBI NO: 15229057 NR Description: remorin -like protein; protein id: At3g48940.1
  misc_feature (30)..(194): Homolog of NCBI NO: 4883530 NR Description: remorin 2 [Lycopersicon esculentum]
  misc_feature (1)..(194): Homolog of NCBI NO: 21555669 NR Description: remorin [Arabidopsis thaliana]
  misc_feature (1)..(194): Homolog of NCBI NO: 15237822 NR Description: putative protein
  misc_feature (4)..(195): Homolog of NCBI NO: 4731573 NR Description: remorin 1 [Lycopersicon esculentum]
  misc_feature (4)..(195): Homolog of NCBI NO: 34925093 NR Description: Remorin (pp34)
  misc_feature (1)..(195): Homolog of NCBI NO: 32489830 NR Description: OSJNBb0039L24.13 [Oryza sativa (japonica
  misc_feature (7)..(195): Homolog of NCBI NO: 15233068 NR Description: putative DNA-binding protein
  misc_feature (1)..(195): Homolog of NCBI NO: 601843 NR Description: DNA-binding protein
  misc_feature (1)..(195): Homolog of NCBI NO: 15225899 NR Description: remorin
MAEEQKTTKVDVESPAVSAPEKEPAPAPVEASTEVAEEKVHDPPPPVESKALAVVEKPIEEPTPKKSSSGSIDRDVKLADLEKEKKTSFIKAWEESEKSKAENKAQKKVSDVLAWENSQKAAVEAQLRKIEEKLEKKKAEYGEKMKNKVAAIHKEAEEKRAMVEAKRGEELLKAEEMAAKYRATGIVPKATCGCF

SEQ ID NO: 56757 - DNA, 1250 bp, Glycine max
  misc_feature (1)..(1250): Ceres Seq. ID no. 13595652
attgttattattattattagcagaactcaatgggtgtttgttggtttcattggtgggagtggaagctccaatccaatggcaatttttgtctgtgactgtgatgcacagtgaaataatcaaccctattcatcaatctccagtgttgcactgccatcaatgtccaccaccatttcttcccttcccttctctctcccccttcgccaaaactctagggttacccttttcaatccaccctcttctcctaatccatcccaatcatcagtcacctttcctaaaaaaaaatggagacttttgtggtttaggcatggaaacacttcatcaaaaactgatggttctgagctcaatgaagataaattgtcagaagatttggtgaagctcgaaggtgtccagtccaaagacctgaagaaagactggcttgcaaccatccttacgcactccctaaactactggcttcgaggcaccagcaacctcctaaggagaagaagacacagagaagaagaggtcataactgtcattcgtggtgtggaaccctggacagttccttggacagcaaagaccattgttcaggtaatgctcctgtggattgcctcattttggtttgtaggatcttggatagttccatttttagcatacacagcagggtttagaaaggaatctcttacatacagagggcaagcattgtgcagcctcttgactgatgttgctgaaggcgtggttggaatagcaattcttcgccattgtcttgcaaagtttcaacctctttcatctgattggttcaaatttgaagtcaaggggaagtggcagtttgatgttggtttaggctgcctcatgttcccccttatcaatcagctatcacaaatgaacctaaatttgctgcctgttcttcaatatactccagttaccatctcaagtgtagagcaatccattgttgcgcgagaccctgtggcaatggccctctatgcagtggtagtctcggtttgtgccccaatatgggaggagattgttttccgtggtttccttcttccatctttaaccaagtacatgcctgtatggagtgcaatattagttagctcaatagcttttgccttggcacattttaacattcagagaatgctaccacttgtatttcttggcatggtgatgggtactgtctttgtacggtctaggaacctctttccatcaatgttgttgcatagtttgtggaatgcttttgtatttctggatctcatgaaataaattaaaagtttttg

SEQ ID NO: 56758 - protein, 359 aa, Glycine max
  peptide (1)..(359): Ceres Seq. ID no. 13595653
  misc_feature (267)..(357): Pfam Name: CAAX amino terminal protease family Pfam Description: CAAX amino terminal protease family
  misc_feature (121)..(358): Homolog of NCBI NO: 33863519 NR Description: Possible membrane associated protease
  misc_feature (123)..(355): Homolog of NCBI NO: 21593106 NR Description: unknown [Arabidopsis thaliana]
  misc_feature (108)..(358): Homolog of NCBI NO: 22299433 NR Description: ORF_ID:tlr1890~hypothetical protein
  misc_feature (126)..(357): Homolog of NCBI NO: 37522744 NR Description: hypothetical protein gll3175 [Gloeobacter
  misc_feature (260)..(357): Homolog of NCBI NO: 23043203 NR Description: hypothetical protein [Trichodesmium erythraeum
  misc_feature (114)..(357): Homolog of NCBI NO: 16331018 NR Description: unknown protein [Synechocystis sp. PCC 6803]
  misc_feature (105)..(357): Homolog of NCBI NO: 17231277 NR Description: hypothetical protein [Nostoc sp. PCC 7120]
  misc_feature (125)..(357): Homolog of NCBI NO: 23130090 NR Description: hypothetical protein [Nostoc punctiforme]
  misc_feature (126)..(359): Homolog of NCBI NO: 18424393 NR Description: CAAX amino terminal protease family [Arabidopsis
  misc_feature (126)..(359): Homolog of NCBI NO: 9759339 NR Description: gene_id:MUP24.17~pir||S76167~similar to unknown
MSTTISSLPFSLPLRQNSRVTLFNPPSSPNPSQSSVTFPKKKWRLLWFRHGNTSSKTDGSELNEDKLSEDLVKLEGVQSKDLKKDWLATILTHSLNYWLRGTSNLLRRRRHREEEVITVIRGVEPWTVPWTAKTIVQVMLLWIASFWFVGSWIVPFLAYTAGFRKESLTYRGQALCSLLTDVAEGVVGIAILRHCLAKFQPLSSDWFKFEVKGKWQFDVGLGCLMFPLINQLSQMNLNLLPVLQYTPVTISSVEQSIVARDPVAMALYAVVVSVCAPIWEEIVFRGFLLPSLTKYMPVWSAILVSSIAFALAHFNIQRMLPLVFLGMVMGTVFVRSRNLFPSMLLHSLWNAFVFLDLMK

SEQ ID NO: 56759 - protein, 221 aa, Glycine max
  peptide (1)..(221): Ceres Seq. ID no. 13595654
  misc_feature (129)..(219): Pfam Name: CAAX amino terminal protease family Pfam Description: CAAX amino terminal protease family
  misc_feature (1)..(220): Homolog of NCBI NO: 33863519 NR Description: Possible membrane associated protease
  misc_feature (1)..(217): Homolog of NCBI NO: 21593106 NR Description: unknown [Arabidopsis thaliana]
  misc_feature (1)..(220): Homolog of NCBI NO: 22299433 NR Description: ORF_ID:tlr1890~hypothetical protein
  misc_feature (1)..(219): Homolog of NCBI NO: 37522744 NR Description: hypothetical protein gll3175 [Gloeobacter
  misc_feature (122)..(219): Homolog of NCBI NO: 23043203 NR Description: hypothetical protein [Trichodesmium erythraeum
  misc_feature (1)..(219): Homolog of NCBI NO: 16331018 NR Description: unknown protein [Synechocystis sp. PCC 6803]
  misc_feature (1)..(219): Homolog of NCBI NO: 17231277 NR Description: hypothetical protein [Nostoc sp. PCC 7120]
  misc_feature (1)..(219): Homolog of NCBI NO: 23130090 NR Description: hypothetical protein [Nostoc punctiforme]
  misc_feature (1)..(221): Homolog of NCBI NO: 18424393 NR Description: CAAX amino terminal protease family [Arabidopsis
  misc_feature (1)..(221): Homolog of NCBI NO: 9759339 NR Description: gene_id:MUP24.17~pir||S76167~similar to unknown
MLLWIASFWFVGSWIVPFLAYTAGFRKESLTYRGQALCSLLTDVAEGVVGIAILRHCLAKFQPLSSDWFKFEVKGKWQFDVGLGCLMFPLINQLSQMNLNLLPVLQYTPVTISSVEQSIVARDPVAMALYAVVVSVCAPIWEEIVFRGFLLPSLTKYMPVWSAILVSSIAFALAHFNIQRMLPLVFLGMVMGTVFVRSRNLFPSMLLHSLWNAFVFLDLMK

SEQ ID NO: 56760 - DNA, 1317 bp, Glycine max
  misc_feature (1)..(1317): Ceres Seq. ID no. 13595567
gaacatcctaatcgaaaacttattattagaccctttctcttagagccaagaggtttaagttatagtaacattacttgaggagattaccacttgctagaaaaatatgaagttccatttggtgctatttgttataatagccgccatttttggagttgggcttgaagggtgccaatgcaaggttgtgcagttcatttttggagactctctctctgatgttggaaataacaattacctttctaagagccttgctcaggcaagtttaccttggtatggtattgatttgggcaatggactccctaatggcaggttctcaaatggtcgcacggttgctgatataataggtgataatatgggccttcctaggcctccagcattccttgacccatctttatctgaagatgttatattggaaaatggagtgaattatgcttctgggggtggaggcatcttgaatgaaacaggcagttattttattcaaaggttttctctctacaagcaaatggagctgtttcaggggacacaagaactgattagaagcagaattgggaaagaggaggcagagaagtttttccagggagctcattatgttgttgctttaggcagcaatgacttcatcaacaactacttgatgcctgtttacagtgattcatggacatataatgatcaaaccttcatggattacttgataggaactctaggagaacaattaaagctactgcatggtctaggagcaaggcagttgatggtgtttgggctgggcccaatgggctgcattccacttcaaagggtgcttagtacatctggggaatgtcaaagtagaacaaataatctggctattagctttaataaggctacaagcaagttagttgttgacttgggaaagcaacttcccaattcaagctacagatttggagatgcatatgacgttgttaatgatgtgattaccaacccgaacaaatatgggttccaaaactctgattcaccctgttgctcctttgggaatattcgaccagctcttacatgtatacctgcatcaaaactgtgcaaagatagaagcaagtacgttttttgggatgagtaccatccttcagacagagctaatgagctaattgccaatgaactcatcaagaaatttgggtttgtgcgtgttgatcaaacaaaacctccttcaccatcacccgctcttgctccgtcttcagacgattaatcgtgcatgtgaaggttttattactaaatgctcttaaattgcttttgttaaatttgtaatcaaagttggttctctttaattacaagtcggttacactaatttattgatgc

SEQ ID NO: 56761 - protein, 367 aa, Glycine max
  peptide (1)..(367): Ceres Seq. ID no. 15221618
  misc_feature (1)..(337): Homolog of NCBI NO: 15224005 NR Description: GDSL-motif lipase/hydrolase protein [Arabidopsis
  misc_feature (29)..(337): Homolog of NCBI NO: 15241626 NR Description: GDSL-motif lipase/hydrolase protein [Arabidopsis
  misc_feature (29)..(343): Homolog of NCBI NO: 11280578 NR Description: hypothetical protein F14F8_100 - Arabidopsis
  misc_feature (29)..(343): Homolog of NCBI NO: 18417760 NR Description: GDSL-motif lipase/hydrolase protein [Arabidopsis
  misc_feature (29)..(349): Homolog of NCBI NO: 15227849 NR Description: GDSL-motif lipase/hydrolase protein [Arabidopsis
  misc_feature (5)..(341): Homolog of NCBI NO: 15229742 NR Description: GDSL-motif lipase/hydrolase protein [Arabidopsis
  misc_feature (1)..(359): Homolog of NCBI NO: 30693137 NR Description: lipase family [Arabidopsis thaliana]
  misc_feature (1)..(359): Homolog of NCBI NO: 21537293 NR Description: GDSL-motif lipase/hydrolase-like protein
  misc_feature (96)..(367): Homolog of NCBI NO: 27808542 NR Description: At1g74460 [Arabidopsis thaliana]
  misc_feature (1)..(367): Homolog of NCBI NO: 15221260 NR Description: GDSL-motif lipase/hydrolase protein [Arabidopsis
MKFHLVLFVIIAAIFGVGLEGCQCKVVQFIFGDSLSDVGNNNYLSKSLAQASLPWYGIDLGNGLPNGRFSNGRTVADIIGDNMGLPRPPAFLDPSLSEDVILENGVNYASGGGGILNETGSYFIQRFSLYKQMELFQGTQELIRSRIGKEEAEKFFQGAHYVVALGSNDFINNYLMPVYSDSWTYNDQTFMDYLIGTLGEQLKLLHGLGARQLMVFGLGPMGCIPLQRVLSTSGECQSRTNNLAISFNKATSKLVVDLGKQLPNSSYRFGDAYDVVNDVITNPNKYGFQNSDSPCCSFGNIRPALTCIPASKLCKDRSKYVFWDEYHPSDRANELIANELIKKFGFVRVDQTKPPSPSPALAPSSDD

SEQ ID NO: 56762 - protein, 285 aa, Glycine max
  peptide (1)..(285): Ceres Seq. ID no. 15221619
  misc_feature (1)..(255): Homolog of NCBI NO: 15224005 NR Description: GDSL-motif lipase/hydrolase protein [Arabidopsis
  misc_feature (1)..(255): Homolog of NCBI NO: 15241626 NR Description: GDSL-motif lipase/hydrolase protein [Arabidopsis
  misc_feature (1)..(261): Homolog of NCBI NO: 11280578 NR Description: hypothetical protein F14F8_100 - Arabidopsis
  misc_feature (1)..(261): Homolog of NCBI NO: 18417760 NR Description: GDSL-motif lipase/hydrolase protein [Arabidopsis
  misc_feature (1)..(267): Homolog of NCBI NO: 15227849 NR Description: GDSL-motif lipase/hydrolase protein [Arabidopsis
  misc_feature (1)..(259): Homolog of NCBI NO: 15229742 NR Description: GDSL-motif lipase/hydrolase protein [Arabidopsis
  misc_feature (1)..(277): Homolog of NCBI NO: 30693137 NR Description: lipase family [Arabidopsis thaliana]
  misc_feature (1)..(277): Homolog of NCBI NO: 21537293 NR Description: GDSL-motif lipase/hydrolase-like protein
  misc_feature (14)..(285): Homolog of NCBI NO: 27808542 NR Description: At1g74460 [Arabidopsis thaliana]
  misc_feature (1)..(285): Homolog of NCBI NO: 15221260 NR Description: GDSL-motif lipase/hydrolase protein [Arabidopsis
MGLPRPPAFLDPSLSEDVILENGVNYASGGGGILNETGSYFIQRFSLYKQMELFQGTQELIRSRIGKEEAEKFFQGAHYVVALGSNDFINNYLMPVYSDSWTYNDQTFMDYLIGTLGEQLKLLHGLGARQLMVFGLGPMGCIPLQRVLSTSGECQSRTNNLAISFNKATSKLVVDLGKQLPNSSYRFGDAYDVVNDVITNPNKYGFQNSDSPCCSFGNIRPALTCIPASKLCKDRSKYVFWDEYHPSDRANELIANELIKKFGFVRVDQTKPPSPSPALAPSSDD

SEQ ID NO: 56763 - protein, 235 aa, Glycine max
  peptide (1)..(235): Ceres Seq. ID no. 15221620
  misc_feature (1)..(205): Homolog of NCBI NO: 15224005 NR Description: GDSL-motif lipase/hydrolase protein [Arabidopsis
  misc_feature (1)..(205): Homolog of NCBI NO: 15241626 NR Description: GDSL-motif lipase/hydrolase protein [Arabidopsis
  misc_feature (1)..(211): Homolog of NCBI NO: 11280578 NR Description: hypothetical protein F14F8_100 - Arabidopsis
  misc_feature (1)..(211): Homolog of NCBI NO: 18417760 NR Description: GDSL-motif lipase/hydrolase protein [Arabidopsis
  misc_feature (1)..(217): Homolog of NCBI NO: 15227849 NR Description: GDSL-motif lipase/hydrolase protein [Arabidopsis
  misc_feature (1)..(209): Homolog of NCBI NO: 15229742 NR Description: GDSL-motif lipase/hydrolase protein [Arabidopsis
  misc_feature (1)..(227): Homolog of NCBI NO: 30693137 NR Description: lipase family [Arabidopsis thaliana]
  misc_feature (1)..(227): Homolog of NCBI NO: 21537293 NR Description: GDSL-motif lipase/hydrolase-like protein
  misc_feature (1)..(235): Homolog of NCBI NO: 27808542 NR Description: At1g74460 [Arabidopsis thaliana]
  misc_feature (1)..(235): Homolog of NCBI NO: 15221260 NR Description: GDSL-motif lipase/hydrolase protein [Arabidopsis
MELFQGTQELIRSRIGKEEAEKFFQGAHYVVALGSNDFINNYLMPVYSDSWTYNDQTFMDYLIGTLGEQLKLLHGLGARQLMVFGLGPMGCIPLQRVLSTSGECQSRTNNLAISFNKATSKLVVDLGKQLPNSSYRFGDAYDVVNDVITNPNKYGFQNSDSPCCSFGNIRPALTCIPASKLCKDRSKYVFWDEYHPSDRANELIANELIKKFGFVRVDQTKPPSPSPALAPSSDD

SEQ ID NO: 56764 - DNA, 995 bp, Glycine max
  misc_feature (1)..(995): Ceres Seq. ID no. 13595568
gaaataatctcgatttggacaaaagacagagaacgatggagtcttgccagcaaaaggttatggagaagctgcttcacggccatgggtgtgccaaccagctcaagctaatcatggaccaccacgccgagtcagattcgtccgttgaaagggaggatctggccaagtccgtcctccattgtttctcggatgctctctccattttgatcgatacgaatgatcataacaaagatgatgataaatccaataactcatctccccaagactcttcacatgttcttgagagcagcaggaaaccttttcacaagaggggaagaaagacatcaatggcggagagctcagattaccgcagacacgaatccccaaacccgatctaccacgacggctttctttggaggaaatacggacaaaagcaaatcaaagaatcggaccaccaaaggagttactacaagtgtgcgtacacaaacgaccagaaatgcgaagcaaagaagcaggttcaaatgatccaaaacaaccctccattgtactcaaccacttacttcggccgccacacatgtcagcttcatcaagcctttgaaacttttcccattgacacctcagatccccaagattcacgcatgatccgatttgataacccagattcctctacccatcaacatcaaaatcagataattcatctcaaagctgaacaaatgatgccctctgagaaagcagaagagtggtcgtccccatctgagtatatgtcctccgaggttgcctacgctgtggaggctttcgggtttaaccctgctcgcacatcaagtgacttatcatgaccatatatgcccttcccgtcgctatcatcagacatctaaagcaactttagttatttgtttcctcataatatcctatagtatacctcctgttactttttttttgtgttttgcatctcatgtatttgcctacctctactttgaacttttgttttgagtttaatattaatcagctttaataacgcg

SEQ ID NO: 56765 - protein, 269 aa, Glycine max
  peptide (1)..(269): Ceres Seq. ID no. 15221621
  misc_feature (82)..(209): Homolog of NCBI NO: 15220174 NR Description: WRKY family transcription factor [Arabidopsis
  misc_feature (12)..(234): Homolog of NCBI NO: 25404630 NR Description: probable wrky-type DNA binding protein F28G11.3
  misc_feature (18)..(268): Homolog of NCBI NO: 15219706 NR Description: expressed protein [Arabidopsis thaliana]
  misc_feature (17)..(230): Homolog of NCBI NO: 15219685 NR Description: WRKY family transcription factor [Arabidopsis
  misc_feature (12)..(234): Homolog of NCBI NO: 18408541 NR Description: WRKY family transcription factor [Arabidopsis
  misc_feature (12)..(236): Homolog of NCBI NO: 30688540 NR Description: WRKY family transcription factor [Arabidopsis
  misc_feature (12)..(236): Homolog of NCBI NO: 9758663 NR Description: contains similarity to DNA-binding
  misc_feature (20)..(269): Homolog of NCBI NO: 11358138 NR Description: hypothetical protein T20L15.170 - Arabidopsis
  misc_feature (12)..(269): Homolog of NCBI NO: 30679452 NR Description: WRKY family transcription factor [Arabidopsis
  misc_feature (7)..(269): Homolog of NCBI NO: 13506735 NR Description: WRKY DNA-binding protein 62 [Arabidopsis thaliana]
NNLDLDKRQRTMESCQQKVMEKLLHGHGCANQLKLIMDHHAESDSSVEREDLAKSVLHCFSDALSILIDTNDHNKDDDKSNNSSPQDSSHVLESSRKPFHKRGRKTSMAESSDYRRHESPNPIYHDGFLWRKYGQKQIKESDHQRSYYKCAYTNDQKCEAKKQVQMIQNNPPLYSTTYFGRHTCQLHQAFETFPIDTSDPQDSRMIRFDNPDSSTHQHQNQIIHLKAEQMMPSEKAEEWSSPSEYMSSEVAYAVEAFGFNPARTSSDLS

SEQ ID NO: 56766 - protein, 258 aa, Glycine max
  peptide (1)..(258): Ceres Seq. ID no. 15221622
  misc_feature (71)..(198): Homolog of NCBI NO: 15220174 NR Description: WRKY family transcription factor [Arabidopsis
  misc_feature (1)..(223): Homolog of NCBI NO: 25404630 NR Description: probable wrky-type DNA binding protein F28G11.3
  misc_feature (7)..(257): Homolog of NCBI NO: 15219706 NR Description: expressed protein [Arabidopsis thaliana]
  misc_feature (6)..(219): Homolog of NCBI NO: 15219685 NR Description: WRKY family transcription factor [Arabidopsis
  misc_feature (1)..(223): Homolog of NCBI NO: 18408541 NR Description: WRKY family transcription factor [Arabidopsis
  misc_feature (1)..(225): Homolog of NCBI NO: 30688540 NR Description: WRKY family transcription factor [Arabidopsis
  misc_feature (1)..(225): Homolog of NCBI NO: 9758663 NR Description: contains similarity to DNA-binding
  misc_feature (9)..(258): Homolog of NCBI NO: 11358138 NR Description: hypothetical protein T20L15.170 - Arabidopsis
  misc_feature (1)..(258): Homolog of NCBI NO: 30679452 NR Description: WRKY family transcription factor [Arabidopsis
  misc_feature (1)..(258): Homolog of NCBI NO: 13506735 NR Description: WRKY DNA-binding protein 62 [Arabidopsis thaliana]
MESCQQKVMEKLLHGHGCANQLKLIMDHHAESDSSVEREDLAKSVLHCFSDALSILIDTNDHNKDDDKSNNSSPQDSSHVLESSRKPFHKRGRKTSMAESSDYRRHESPNPIYHDGFLWRKYGQKQIKESDHQRSYYKCAYTNDQKCEAKKQVQMIQNNPPLYSTTYFGRHTCQLHQAFETFPIDTSDPQDSRMIRFDNPDSSTHQHQNQIIHLKAEQMMPSEKAEEWSSPSEYMSSEVAYAVEAFGFNPARTSSDLS

SEQ ID NO: 56767 - protein, 250 aa, Glycine max
  peptide (1)..(250): Ceres Seq. ID no. 15221623
  misc_feature (63)..(190): Homolog of NCBI NO: 15220174 NR Description: WRKY family transcription factor [Arabidopsis
  misc_feature (1)..(215): Homolog of NCBI NO: 25404630 NR Description: probable wrky-type DNA binding protein F28G11.3
  misc_feature (1)..(249): Homolog of NCBI NO: 15219706 NR Description: expressed protein [Arabidopsis thaliana]
  misc_feature (1)..(211): Homolog of NCBI NO: 15219685 NR Description: WRKY family transcription factor [Arabidopsis
  misc_feature (1)..(215): Homolog of NCBI NO: 18408541 NR Description: WRKY family transcription factor [Arabidopsis
  misc_feature (1)..(217): Homolog of NCBI NO: 30688540 NR Description: WRKY family transcription factor [Arabidopsis
  misc_feature (1)..(217): Homolog of NCBI NO: 9758663 NR Description: contains similarity to DNA-binding
  misc_feature (1)..(250): Homolog of NCBI NO: 11358138 NR Description: hypothetical protein T20L15.170 - Arabidopsis
  misc_feature (1)..(250): Homolog of NCBI NO: 30679452 NR Description: WRKY family transcription factor [Arabidopsis
  misc_feature (1)..(250): Homolog of NCBI NO: 13506735 NR Description: WRKY DNA-binding protein 62 [Arabidopsis thaliana]
MEKLLHGHGCANQLKLIMDHHAESDSSVEREDLAKSVLHCFSDALSILIDTNDHNKDDDKSNNSSPQDSSHVLESSRKPFHKRGRKTSMAESSDYRRHESPNPIYHDGFLWRKYGQKQIKESDHQRSYYKCAYTNDQKCEAKKQVQMIQNNPPLYSTTYFGRHTCQLHQAFETFPIDTSDPQDSRMIRFDNPDSSTHQHQNQIIHLKAEQMMPSEKAEEWSSPSEYMSSEVAYAVEAFGFNPARTSSDLS

SEQ ID NO: 56768 - DNA, 1157 bp, Glycine max
  misc_feature (1)..(1157): Ceres Seq. ID no. 13595655
atcgaaatactgttgtagaaagctttgtgttgtattgtggctgagccaccacaattctgattcctttctcttctcggcagtttgcttcctccgtagcagatcgtaaggaacttttgccttgtaagtgtaactattggtaccatggtgtaaacctaaagcattggaagaactgaaacattgccttatgaagactgtgggagtaggctctagtaaagtgacattgtctctaagataaaattctcaactcagaaagatggtcatattctcaataagtaatgccagatatacttatgtgcatgatcagaaatatccctctaaagatgttgacatacaccatatagtttcaaggaggagtaatgctaaatatctcgtgtatgccacagcacttcttgtattagcatgtgccttgtatctgtatgttcttaagggaaaatcaattagttttgtgtattacagcttgctttttgacatatttcttgtcaagttgttacttgggaagcctgttaagaaagagtctgttgtgattatgccagcttttggagtacagcttgagactcattatgtgagtggaaaagtcatccgatactttgttcccattgacaatattctgaaacctgttctaatagaatgtgtgactccagtgacttgctattggactctatcgttgattattcgtggtgaatcagaaatggtgttagttttcaagaacttacgcccaccagtgaaaatgttggtccatgtctggaaggccctgtgtgctgcaactgatagtaaagaagagacctgtactcatgcagaatgaataattgacagttatggcttatgtactgtttctgtactggtgtgtactccccatcattttacgctgttctgtcacattgaacaccaatcctatgtaagagtaggattggatttcaacatacattggaaagtgaattttttgataaaccacactcttctccagttgatagtttgggacgtgcgttcactatcagcactccaaggcattgaatttagaggccaattggctctaccttttgaaactgcatactaagtagcttatttataactaggtagaaattttgtatcatgacctaggactgatagaactagtatgtttccgtgagtcttttgtaactaaaatagagcacaggttc

SEQ ID NO: 56769 - protein, 182 aa, Glycine max
  peptide (1)..(182): Ceres Seq. ID no. 13595656
  misc_feature (1)..(182): Homolog of NCBI NO: 7486656 NR Description: hypothetical protein F8D20.40 - Arabidopsis
  misc_feature (1)..(182): Homolog of NCBI NO: 22329188 NR Description: expressed protein [Arabidopsis thaliana]
MVIFSISNARYTYVHDQKYPSKDVDIHHIVSRRSNAKYLVYATALLVLACALYLYVLKGKSISFVYYSLLFDIFLVKLLLGKPVKKESVVIMPAFGVQLETHYVSGKVIRYFVPIDNILKPVLIECVTPVTCYWTLSLIIRGESEMVLVFKNLRPPVKMLVHVWKALCAATDSKEETCTHAE

SEQ ID NO: 56770 - protein, 91 aa, Glycine max
  peptide (1)..(91): Ceres Seq. ID no. 13595657
  misc_feature (1)..(91): Homolog of NCBI NO: 7486656 NR Description: hypothetical protein F8D20.40 - Arabidopsis
  misc_feature (1)..(91): Homolog of NCBI NO: 22329188 NR Description: expressed protein [Arabidopsis thaliana]
MPAFGVQLETHYVSGKVIRYFVPIDNILKPVLIECVTPVTCYWTLSLIIRGESEMVLVFKNLRPPVKMLVHVWKALCAATDSKEETCTHAE

SEQ ID NO: 56771 - DNA, 1211 bp, Glycine max
  misc_feature (1)..(1211): Ceres Seq. ID no. 12611829
atccctctccctttccttcccctctctctctcgctcgtcttccttgccccctcgcgcaacagcagcgccacaacgcagtgagtggcacttccgtgatttcgccgccgcgggggcggggggaggaggaggaggaggaggaggagggaggccatgggcaacgccagcggcagggaggaggacgccgccgcgcccggggaggccgacgccgccgacgtcgacgttgaggacggaggcgacgactcctcggcccgcggcttccctccctacggcggaggcgccaaccacgtgcgccgtgcgtgctcggtgggcgtcgtgggggccagcggcgggcccggatcgccgcccgggagccccggccgctccctctcgccgcggatgttcgtgccccagacacctgtacctccattgcaaagacctgctgatgtaactccagtgttcaatgaaatactgatgaatgaacaagaagaagaatttgatggccctcctcaaaaggaaatacctgctttggttgtttggactctcggaggaaagaatgtatctgttgaaggatcctgggataactggaaatcaaggaaaccaatgcagaaatctggaaaagatcattctcttctgttgatccttccttctggagtttatcgttatagatttgttgtagatggagagagaagatgttttcctgaccttccatgtgaaactgacgccatgggcaatgctgttaaccttcttgatgttcatgattttgttcctgaaagtgttgaaagtgtatcagaatttgaggctcctccatctccagaatctagctacagtttcctggcacccgaggaaaaggactttgcgaaggagccacctgctcttccgtctcagcttcacctcggcgttcttaactcacagaactcagaggaaatatgtgcacggccccagcacatcgtcctcaaccaccttttcattgagaagggttggggtgcccatccgctggtggctcttggtgtaacccacagatttgagtccaaatatgtaacggtcgtcttgtacaagcccatagaacgatagcatagcaaccgcatgaaagttgaagctaatgcttgacaactcaccgcgaaagcagcaacgaacagcaacatcgtggcctctccccctgtaaaagcacttcaggtacaggaatattttcgataacttgcaggagcttctagtcgtgatattgctccccttcg

SEQ ID NO: 56772 - protein, 299 aa, Glycine max
  peptide (1)..(299): Ceres Seq. ID no. 12611830
  misc_feature (211)..(297): Pfam Name: 5'-AMP-activated protein kinase, beta subunit, Pfam Description: 5'-AMP-activated protein kinase, beta subunit,
  misc_feature (63)..(257): Homolog of NCBI NO: 29725558 NR Description: SNF1 kinase complex anchoring protein
  misc_feature (63)..(299): Homolog of NCBI NO: 15234895 NR Description: kinase like protein; protein id: At4g16360.1
  misc_feature (76)..(299): Homolog of NCBI NO: 11935162 NR Description: SNF1-related kinase complex anchoring protein
  misc_feature (1)..(299): Homolog of NCBI NO: 6686784 NR Description: AKIN beta2 [Arabidopsis thaliana]
  misc_feature (1)..(299): Homolog of NCBI NO: 32364488 NR Description: AKIN beta2 [Medicago truncatula]
  misc_feature (63)..(299): Homolog of NCBI NO: 32364486 NR Description: AKIN beta1 [Medicago truncatula]
  misc_feature (1)..(299): Homolog of NCBI NO: 5702015 NR Description: GAL83 protein [Solanum tuberosum]
  misc_feature (1)..(299): Homolog of NCBI NO: 15242175 NR Description: AKIN beta1; protein id: At5g21170.1, supported by
  misc_feature (1)..(299): Homolog of NCBI NO: 6686782 NR Description: AKIN gamma [Arabidopsis thaliana]
  misc_feature (1)..(299): Homolog of NCBI NO: 22324436 NR Description: AKIN beta1-like protein [Oryza sativa (japonica
MGNASGREEDAAAPGEADAADVDVEDGGDDSSARGFPPYGGGANHVRRACSVGVVGASGGPGSPPGSPGRSLSPRMFVPQTPVPPLQRPADVTPVFNEILMNEQEEEFDGPPQKEIPALVVWTLGGKNVSVEGSWDNWKSRKPMQKSGKDHSLLLILPSGVYRYRFVVDGERRCFPDLPCETDAMGNAVNLLDVHDFVPESVESVSEFEAPPSPESSYSFLAPEEKDFAKEPPALPSQLHLGVLNSQNSEEICARPQHIVLNHLFIEKGWGAHPLVALGVTHRFESKYVTVVLYKPIER

SEQ ID NO: 56773 - protein, 224 aa, Glycine max
  peptide (1)..(224): Ceres Seq. ID no. 12611831
  misc_feature (136)..(222): Pfam Name: 5'-AMP-activated protein kinase, beta subunit, Pfam Description: 5'-AMP-activated protein kinase, beta subunit,
  misc_feature (1)..(182): Homolog of NCBI NO: 29725558 NR Description: SNF1 kinase complex anchoring protein
  misc_feature (1)..(224): Homolog of NCBI NO: 15234895 NR Description: kinase like protein; protein id: At4g16360.1
  misc_feature (1)..(224): Homolog of NCBI NO: 11935162 NR Description: SNF1-related kinase complex anchoring protein
  misc_feature (1)..(224): Homolog of NCBI NO: 6686784 NR Description: AKIN beta2 [Arabidopsis thaliana]
  misc_feature (1)..(224): Homolog of NCBI NO: 32364488 NR Description: AKIN beta2 [Medicago truncatula]
  misc_feature (1)..(224): Homolog of NCBI NO: 32364486 NR Description: AKIN beta1 [Medicago truncatula]
  misc_feature (1)..(224): Homolog of NCBI NO: 5702015 NR Description: GAL83 protein [Solanum tuberosum]
  misc_feature (1)..(224): Homolog of NCBI NO: 15242175 NR Description: AKIN beta1; protein id: At5g21170.1, supported by
  misc_feature (1)..(224): Homolog of NCBI NO: 6686782 NR Description: AKIN gamma [Arabidopsis thaliana]
  misc_feature (1)..(224): Homolog of NCBI NO: 22324436 NR Description: AKIN beta1-like protein [Oryza sativa (japonica
MFVPQTPVPPLQRPADVTPVFNEILMNEQEEEFDGPPQKEIPALVVWTLGGKNVSVEGSWDNWKSRKPMQKSGKDHSLLLILPSGVYRYRFVVDGERRCFPDLPCETDAMGNAVNLLDVHDFVPESVESVSEFEAPPSPESSYSFLAPEEKDFAKEPPALPSQLHLGVLNSQNSEEICARPQHIVLNHLFIEKGWGAHPLVALGVTHRFESKYVTVVLYKPIER

SEQ ID NO: 56774 - protein, 199 aa, Glycine max
  peptide (1)..(199): Ceres Seq. ID no. 12611832
  misc_feature (111)..(197): Pfam Name: 5'-AMP-activated protein kinase, beta subunit, Pfam Description: 5'-AMP-activated protein kinase, beta subunit,
  misc_feature (1)..(157): Homolog of NCBI NO: 29725558 NR Description: SNF1 kinase complex anchoring protein
  misc_feature (1)..(199): Homolog of NCBI NO: 15234895 NR Description: kinase like protein; protein id: At4g16360.1
  misc_feature (1)..(199): Homolog of NCBI NO: 11935162 NR Description: SNF1-related kinase complex anchoring protein
  misc_feature (1)..(199): Homolog of NCBI NO: 6686784 NR Description: AKIN beta2 [Arabidopsis thaliana]
  misc_feature (1)..(199): Homolog of NCBI NO: 32364488 NR Description: AKIN beta2 [Medicago truncatula]
  misc_feature (1)..(199): Homolog of NCBI NO: 32364486 NR Description: AKIN beta1 [Medicago truncatula]
  misc_feature (1)..(199): Homolog of NCBI NO: 5702015 NR Description: GAL83 protein [Solanum tuberosum]
  misc_feature (1)..(199): Homolog of NCBI NO: 15242175 NR Description: AKIN beta1; protein id: At5g21170.1, supported by
  misc_feature (1)..(199): Homolog of NCBI NO: 6686782 NR Description: AKIN gamma [Arabidopsis thaliana]
  misc_feature (1)..(199): Homolog of NCBI NO: 22324436 NR Description: AKIN beta1-like protein [Oryza sativa (japonica
MNEQEEEFDGPPQKEIPALVVWTLGGKNVSVEGSWDNWKSRKPMQKSGKDHSLLLILPSGVYRYRFVVDGERRCFPDLPCETDAMGNAVNLLDVHDFVPESVESVSEFEAPPSPESSYSFLAPEEKDFAKEPPALPSQLHLGVLNSQNSEEICARPQHIVLNHLFIEKGWGAHPLVALGVTHRFESKYVTVVLYKPIER

SEQ ID NO: 56775 - DNA, 1169 bp, Glycine max
  misc_feature (1)..(1169): Ceres Seq. ID no. 13595423
atttagaagttgaatcggtgctacggggtatggaggcgaagacacatggcgaggatgaatccgcataactcaaccgccgatcttctttcggaatctctccaagctgctaacgagccgtctgatgtagccagcaagaaccttagttgcggtcaaatcaccaacgaggaagatgaatctcttgacaagcaaaacaagtgttgtagtgacattgtctctgacagttgtaaagatgattcaaattacaagacaggactcaattgccatcaggaggaccagcggaggacgagtctagtagcatcgattgtggagacatctcacgacgctcccactaggagaaccattgatcttggtcatggaagtgacctcatctacatccagaggtttcttccctttcaaaagtcttggactttatttgattatctcgacaagcatattccttggaccaggcccaccatccgcgtctttggtcgttcttgcctccagccaagagatacatgttacgttgcaagtagcggattgactccgctaatgtacagtggataccgacctgatgcctattcttgggatgactttccacctctcaaggacatccttgatgctatttgcgtagcgtttcctggaagcagattcaacagcttgcttttgaataggtacaacggcgccaacgactacgttggttggcatgctgatgatgaaaagctttacggccccactcctgaaattgcttccctctcttttggatgcaaacgtgactttgtgctcaagaaaaagaaacttcaagactcttcccgtgagaaaagaggagagggtggaccagcgaagaagaggttgaagaaaagcagcagcggagaggaggatcagcatagtttcgcattgaagcatggatcgttgctggtgatgaggggatacactcaaagggactggattcattctgtgccaaagcgtgcaaaggcggagggcactcgtatcaacctcaccttcaggcttgttttgtaaaccatgcatcattcatcattcatcatcatcatcaacaagcttagcttgatctcaagtcacattgattgactaggcttttctcatcttagttcttcgacatgagatataacatataagttggtgtagacattttgaaaaatcttaattactaattaacgtgaagattattaagg

SEQ ID NO: 56776 - protein, 316 aa, Glycine max
  peptide (1)..(316): Ceres Seq. ID no. 13595424
  misc_feature (194)..(316): Pfam Name: 2OG-Fe(II) oxygenase superfamily Pfam Description: 2OG-Fe(II) oxygenase superfamily
  misc_feature (256)..(316): Homolog of NCBI NO: 15601714 NR Description: hypothetical protein [Vibrio cholerae]
  misc_feature (107)..(243): Homolog of NCBI NO: 15601714 NR Description: hypothetical protein [Vibrio cholerae]
  misc_feature (270)..(313): Homolog of NCBI NO: 33865381 NR Description: possible alkylated DNA repair protein
  misc_feature (104)..(242): Homolog of NCBI NO: 33865381 NR Description: possible alkylated DNA repair protein
  misc_feature (272)..(316): Homolog of NCBI NO: 28900052 NR Description: hypothetical protein [Vibrio parahaemolyticus
  misc_feature (107)..(255): Homolog of NCBI NO: 28900052 NR Description: hypothetical protein [Vibrio parahaemolyticus
  misc_feature (270)..(316): Homolog of NCBI NO: 27367984 NR Description: Alkylated DNA repair protein [Vibrio vulnificus
  misc_feature (92)..(240): Homolog of NCBI NO: 27367984 NR Description: Alkylated DNA repair protein [Vibrio vulnificus
  misc_feature (5)..(316): Homolog of NCBI NO: 25412094 NR Description: hypothetical protein At2g22260 [imported] -
  misc_feature (5)..(316): Homolog of NCBI NO: 18399917 NR Description: oxidoreductase, 2OG-Fe(II) oxygenase family
MARMNPHNSTADLLSESLQAANEPSDVASKNLSCGQITNEEDESLDKQNKCCSDIVSDSCKDDSNYKTGLNCHQEDQRRTSLVASIVETSHDAPTRRTIDLGHGSDLIYIQRFLPFQKSWTLFDYLDKHIPWTRPTIRVFGRSCLQPRDTCYVASSGLTPLMYSGYRPDAYSWDDFPPLKDILDAICVAFPGSRFNSLLLNRYNGANDYVGWHADDEKLYGPTPEIASLSFGCKRDFVLKKKKLQDSSREKRGEGGPAKKRLKKSSSGEEDQHSFALKHGSLLVMRGYTQRDWIHSVPKRAKAEGTRINLTFRLVL

SEQ ID NO: 56777 - protein, 313 aa, Glycine max
  peptide (1)..(313): Ceres Seq. ID no. 13595425
  misc_feature (191)..(313): Pfam Name: 2OG-Fe(II) oxygenase superfamily Pfam Description: 2OG-Fe(II) oxygenase superfamily
  misc_feature (253)..(313): Homolog of NCBI NO: 15601714 NR Description: hypothetical protein [Vibrio cholerae]
  misc_feature (104)..(240): Homolog of NCBI NO: 15601714 NR Description: hypothetical protein [Vibrio cholerae]
  misc_feature (267)..(310): Homolog of NCBI NO: 33865381 NR Description: possible alkylated DNA repair protein
  misc_feature (101)..(239): Homolog of NCBI NO: 33865381 NR Description: possible alkylated DNA repair protein
  misc_feature (269)..(313): Homolog of NCBI NO: 28900052 NR Description: hypothetical protein [Vibrio parahaemolyticus
  misc_feature (104)..(252): Homolog of NCBI NO: 28900052 NR Description: hypothetical protein [Vibrio parahaemolyticus
  misc_feature (267)..(313): Homolog of NCBI NO: 27367984 NR Description: Alkylated DNA repair protein [Vibrio vulnificus
  misc_feature (89)..(237): Homolog of NCBI NO: 27367984 NR Description: Alkylated DNA repair protein [Vibrio vulnificus
  misc_feature (2)..(313): Homolog of NCBI NO: 25412094 NR Description: hypothetical protein At2g22260 [imported] -
  misc_feature (2)..(313): Homolog of NCBI NO: 18399917 NR Description: oxidoreductase, 2OG-Fe(II) oxygenase family
MNPHNSTADLLSESLQAANEPSDVASKNLSCGQITNEEDESLDKQNKCCSDIVSDSCKDDSNYKTGLNCHQEDQRRTSLVASIVETSHDAPTRRTIDLGHGSDLIYIQRFLPFQKSWTLFDYLDKHIPWTRPTIRVFGRSCLQPRDTCYVASSGLTPLMYSGYRPDAYSWDDFPPLKDILDAICVAFPGSRFNSLLLNRYNGANDYVGWHADDEKLYGPTPEIASLSFGCKRDFVLKKKKLQDSSREKRGEGGPAKKRLKKSSSGEEDQHSFALKHGSLLVMRGYTQRDWIHSVPKRAKAEGTRINLTFRLVL

SEQ ID NO: 56778 - DNA, 1119 bp, Glycine max
  misc_feature (1)..(1119): Ceres Seq. ID no. 13595569
aattcctaagatgctgatcataattgtaataacaaagaccaatattttgtgtgtgccagtgagctagttaggtgttaaatatttgattgcaatattaatatgaaggcacagtgtgagtagtgagaaggggcattagtaaagaggatgggtagacgaccctgctgccccaaagagatcaacaaaggtgcttggtctcgagaagaagatgaaaccctctccaaatatgtttccatccatggagaaggaaaatggcagaaggttgcccaaaatgcagggttaaagcgatgtggaaagagttgcagacaaagatggttgaattatctcaagcccggtataaaaagaggccacatctctgtggatgaagaggatatgattataagacttcatcgtcttcttggtaacagataggcattgattgcaaagaggctacctggacgaacagacaatgaaatcaagaactattggaacacaaatctgtcaaagaagttacaaaaacatccaacatcatcagtttcttcacttcaacacaaacgtcatgaaaaagaaaaaaccatacaaatgcatgtatcacccgaagcaccacggcctaggagagttaatgcagttgaatacagtaaaaatttggagaatggtgggtgtggaaatagacctagtacaactcccagtccctcaaataaagtagagggtagtagtgaagaagcttcttttagtgatttcctcatccacgacattgatcaaaaccaatttttgattgctgatgattcaaactcaaaggtgccacaaatggaagaagatcaccaccacaacaacaaggtggaattaataaccaacaacagtcctagctcttcatcaccttctgatcattgtcaccatctcttgccagagaaatttgacccttttgagacccttttggatgtggagctggcttcctttcttggatttgaaaatgattgatcaagagattttatttattattattgcatgcagtgagatgaatgaaaaaaggtcaagtacttagggagtgttatagataatatcccatctatatatggaatgcctaactaattatgcatctagctatagctagatgtaatatacaaatccagggtttctttttcg

SEQ ID NO: 56779 - protein, 131 aa, Glycine max
  peptide (1)..(131): Ceres Seq. ID no. 13595570
  misc_feature (1)..(78): Homolog of NCBI NO: 282963 NR Description: myb-related protein Ph2 - garden petunia
  misc_feature (1)..(48): Homolog of NCBI NO: 15226609 NR Description: myb family transcription factor [Arabidopsis
  misc_feature (1)..(48): Homolog of NCBI NO: 11358528 NR Description: myb-related transcription factor MYB12
  misc_feature (1)..(19): Homolog of NCBI NO: 15233968 NR Description: transcription factor (MYB4) -related [Arabidopsis
  misc_feature (1)..(17): Homolog of NCBI NO: 7438344 NR Description: myb-related protein 1 - rice
  misc_feature (1)..(26): Homolog of NCBI NO: 30687964 NR Description: myb family transcription factor [Arabidopsis
  misc_feature (1)..(23): Homolog of NCBI NO: 15236236 NR Description: myb family transcription factor [Arabidopsis
  misc_feature (1)..(23): Homolog of NCBI NO: 6467223 NR Description: DNA-binding protein [Arabidopsis thaliana]
  misc_feature (1)..(60): Homolog of NCBI NO: 15238535 NR Description: myb family transcription factor [Arabidopsis
  misc_feature (1)..(106): Homolog of NCBI NO: 13346192 NR Description: GHMYB38 [Gossypium hirsutum]
MHVSPEAPRPRRVNAVEYSKNLENGGCGNRPSTTPSPSNKVEGSSEEASFSDFLIHDIDQNQFLIADDSNSKVPQMEEDHHHNNKVELITNNSPSSSSPSDHCHHLLPEKFDPFETLLDVELASFLGFEND

SEQ ID NO: 56780 - protein, 87 aa, Glycine max
  peptide (1)..(87): Ceres Seq. ID no. 13595571
  misc_feature (1)..(87): Homolog of NCBI NO: 13346190 NR Description: GHMYB36 [Gossypium hirsutum]
  misc_feature (1)..(87): Homolog of NCBI NO: 7438350 NR Description: anthocyanin biosynthesis regulatory protein Pl -
  misc_feature (1)..(87): Homolog of NCBI NO: 25989608 NR Description: PL transcription factor [Zea mays]
  misc_feature (1)..(87): Homolog of NCBI NO: 7438351 NR Description: anthocyanin biosynthesis regulatory protein -
  misc_feature (1)..(87): Homolog of NCBI NO: 7438349 NR Description: anthocyanin biosynthesis regulatory protein Pl-Bh
  misc_feature (1)..(87): Homolog of NCBI NO: 7438347 NR Description: anthocyanin biosynthesis regulatory protein Pl -
  misc_feature (1)..(87): Homolog of NCBI NO: 7446179 NR Description: myb-related protein 3 - rice
  misc_feature (1)..(87): Homolog of NCBI NO: 13346186 NR Description: GHMYB10 [Gossypium hirsutum]
  misc_feature (1)..(87): Homolog of NCBI NO: 1101770 NR Description: MYB-like transcriptional factor MBF1
  misc_feature (1)..(87): Homolog of NCBI NO: 13346192 NR Description: GHMYB38 [Gossypium hirsutum]
MGRRPCCPKEINKGAWSREEDETLSKYVSIHGEGKWQKVAQNAGLKRCGKSCRQRWLNYLKPGIKRGHISVDEEDMIIRLHRLLGNR

SEQ ID NO: 56781 - protein, 78 aa, Glycine max
  peptide (1)..(78): Ceres Seq. ID no. 13595572
MKSRTIGTQICQRSYKNIQHHQFLHFNTNVMKKKKPYKCMYHPKHHGLGELMQLNTVKIWRMVGVEIDLVQLPVPQIK

SEQ ID NO: 56782 - DNA, 1609 bp, Glycine max
  misc_feature (1)..(1609): Ceres Seq. ID no. 13582380
actgcattaaggccaagtcaccactctcctcttccattggtggatctttttttttctctcttttaatagggaaaccattggtgtgtgtttcagctttgctgacccttctgttgtttctgccaatctctgttagtatttagacccttttgatatacgaagccttcaattacaatgctttacttcctcatatctttcgtctcctttctcatcctttccaagtctttcaccagcaggcctttctcatcaggggagagagggatcaaaccagggtcaattgggttttgggggagtctttcaagttggttagtttctaggctcaagaaaggaagcacaacaggcaccaccccttttagttttttttcagttttctcttggcatgttattgaaaaagaatagtttagtgtctaaggtggagaatgaggaggaggaggggaatgtttctctcttggatttgcctgatttgccattggaatgcatccttgagcacctttcaccagctgaattatgcagggtggcaacagtgtgcacatctctgagggatagatgtaggagtgatcatttatggaagaaacacatggagaggaaatggggtaaggtgtttggtgatgctgcttataggcaatggaaatggcatgtagcttccaagaacagagaaaaaatctcctccaaccagcacaatcagaaaggaatatttgctttccttcgtggtggttttctccccttcatatggatcaaagcaaaatcagaaaagggcacagagtcaagtagctcattaccagaagattcaatagcagctttatatctttctcttgaaagtggcaaattttggttccctgctcaagtctataaccgtgagaatggtcatgctgggttcatgctctcatgttatgatgcccaactatgctatgattctcgatccgacacttttctggcaaggtactcgcctcatgggagatggacaactgaggaaaacatacaatgggaccggctaagagtgccaccaattgctacttctccacatgctcttcacatctctgactgtttggatgacttgagacctggagatcacattgagattcagtggagaagaaacaaagaatttccttatggttggtggtatggtgtcattggtcatttggaacaatgtcaaggacatgggaaccattgccattgtcactataatgatatagtgattttggagttcacacagtacactgctgggtccagatggagacaaaccgtgataaacagaaagcatcatatagaaaaaggcaatgaaatagatggtttttatggaggaatcaggaagctgcatagcaaggaagaaattgcaaggtggaagaacctctggccaactaaaattgtgatacatgattgacttgattagaatttttgtaaattaagcagtcacccttcctaaaatgtgaaggattacttttgtcacagaacgatgtcattcctaacaataggtataaacttggaaagagtttatggaagaattttcagaggctgtaacatctgtagcacgacataacaaatagtggatatgttgcagctttcttatacgtgtctatatataattttatagaagaacattggtgcatagtgc

SEQ ID NO: 56783 - protein, 333 aa, Glycine max
  peptide (1)..(333): Ceres Seq. ID no. 13582381
  misc_feature (13)..(244): Homolog of NCBI NO: 34909060 NR Description: P0702B09.33 [Oryza sativa (japonica
  misc_feature (21)..(245): Homolog of NCBI NO: 7487431 NR Description: hypothetical protein At2g32560 [imported] -
  misc_feature (272)..(312): Homolog of NCBI NO: 7459607 NR Description: hypothetical protein At2g41170 [imported] -
  misc_feature (21)..(62): Homolog of NCBI NO: 7459607 NR Description: hypothetical protein At2g41170 [imported] -
  misc_feature (124)..(266): Homolog of NCBI NO: 7459607 NR Description: hypothetical protein At2g41170 [imported] -
  misc_feature (270)..(330): Homolog of NCBI NO: 15225802 NR Description: F-box protein family [Arabidopsis thaliana]
  misc_feature (19)..(244): Homolog of NCBI NO: 15225802 NR Description: F-box protein family [Arabidopsis thaliana]
  misc_feature (11)..(328): Homolog of NCBI NO: 30688559 NR Description: F-box protein family [Arabidopsis thaliana]
  misc_feature (15)..(330): Homolog of NCBI NO: 34903372 NR Description: unnamed protein product [Oryza sativa (japonica
  misc_feature (21)..(330): Homolog of NCBI NO: 30685347 NR Description: F-box protein family [Arabidopsis thaliana]
MLLKKNSLVSKVENEEEEGNVSLLDLPDLPLECILEHLSPAELCRVATVCTSLRDRCRSDHLWKKHMERKWGKVFGDAAYRQWKWHVASKNREKISSNQHNQKGIFAFLRGGFLPFIWIKAKSEKGTESSSSLPEDSIAALYLSLESGKFWFPAQVYNRENGHAGFMLSCYDAQLCYDSRSDTFLARYSPHGRWTTEENIQWDRLRVPPIATSPHALHISDCLDDLRPGDHIEIQWRRNKEFPYGWWYGVIGHLEQCQGHGNHCHCHYNDIVILEFTQYTAGSRWRQTVINRKHHIEKGNEIDGFYGGIRKLHSKEEIARWKNLWPTKIVIHD

SEQ ID NO: 56784 - protein, 267 aa, Glycine max
  peptide (1)..(267): Ceres Seq. ID no. 13582382
  misc_feature (168)..(264): Homolog of NCBI NO: 34909060 NR Description: P0702B09.33 [Oryza sativa (japonica
  misc_feature (1)..(178): Homolog of NCBI NO: 34909060 NR Description: P0702B09.33 [Oryza sativa (japonica
  misc_feature (1)..(179): Homolog of NCBI NO: 7487431 NR Description: hypothetical protein At2g32560 [imported] -
  misc_feature (206)..(246): Homolog of NCBI NO: 7459607 NR Description: hypothetical protein At2g41170 [imported] -
  misc_feature (58)..(200): Homolog of NCBI NO: 7459607 NR Description: hypothetical protein At2g41170 [imported] -
  misc_feature (204)..(264): Homolog of NCBI NO: 15225802 NR Description: F-box protein family [Arabidopsis thaliana]
  misc_feature (1)..(178): Homolog of NCBI NO: 15225802 NR Description: F-box protein family [Arabidopsis thaliana]
  misc_feature (1)..(262): Homolog of NCBI NO: 30688559 NR Description: F-box protein family [Arabidopsis thaliana]
  misc_feature (1)..(264): Homolog of NCBI NO: 34903372 NR Description: unnamed protein product [Oryza sativa (japonica
  misc_feature (1)..(264): Homolog of NCBI NO: 30685347 NR Description: F-box protein family [Arabidopsis thaliana]
MERKWGKVFGDAAYRQWKWHVASKNREKISSNQHNQKGIFAFLRGGFLPFIWIKAKSEKGTESSSSLPEDSIAALYLSLESGKFWFPAQVYNRENGHAGFMLSCYDAQLCYDSRSDTFLARYSPHGRWTTEENIQWDRLRVPPIATSPHALHISDCLDDLRPGDHIEIQWRRNKEFPYGWWYGVIGHLEQCQGHGNHCHCHYNDIVILEFTQYTAGSRWRQTVINRKHHIEKGNEIDGFYGGIRKLHSKEEIARWKNLWPTKIVIHD

SEQ ID NO: 56785 - protein, 167 aa, Glycine max
  peptide (1)..(167): Ceres Seq. ID no. 13582383
  misc_feature (68)..(164): Homolog of NCBI NO: 34909060 NR Description: P0702B09.33 [Oryza sativa (japonica
  misc_feature (1)..(78): Homolog of NCBI NO: 34909060 NR Description: P0702B09.33 [Oryza sativa (japonica
  misc_feature (1)..(79): Homolog of NCBI NO: 7487431 NR Description: hypothetical protein At2g32560 [imported] -
  misc_feature (106)..(146): Homolog of NCBI NO: 7459607 NR Description: hypothetical protein At2g41170 [imported] -
  misc_feature (1)..(100): Homolog of NCBI NO: 7459607 NR Description: hypothetical protein At2g41170 [imported] -
  misc_feature (104)..(164): Homolog of NCBI NO: 15225802 NR Description: F-box protein family [Arabidopsis thaliana]
  misc_feature (1)..(78): Homolog of NCBI NO: 15225802 NR Description: F-box protein family [Arabidopsis thaliana]
  misc_feature (1)..(162): Homolog of NCBI NO: 30688559 NR Description: F-box protein family [Arabidopsis thaliana]
  misc_feature (1)..(164): Homolog of NCBI NO: 34903372 NR Description: unnamed protein product [Oryza sativa (japonica
  misc_feature (1)..(164): Homolog of NCBI NO: 30685347 NR Description: F-box protein family [Arabidopsis thaliana]
MLSCYDAQLCYDSRSDTFLARYSPHGRWTTEENIQWDRLRVPPIATSPHALHISDCLDDLRPGDHIEIQWRRNKEFPYGWWYGVIGHLEQCQGHGNHCHCHYNDIVILEFTQYTAGSRWRQTVINRKHHIEKGNEIDGFYGGIRKLHSKEEIARWKNLWPTKIVIHD

SEQ ID NO: 56786 - DNA, 1051 bp, Glycine max
  misc_feature (1)..(1051): Ceres Seq. ID no. 13595667
ctctaggtttccaccgccgccgcctcccctctactcctcgctatcggccacgctccgcctcctttcctctgccccgcaactccgccgtcctccgcgccgccgcctcgccggacctccgccgccccgacctcccctcctcctcctccggagctacatagaggtttgattgagcgagatggggttgagggacaagaagaggaaccagaggcgcgtgctctcgcgccgctcggctggtcccaagaccggcgagggcaaggatttcctgccgctggaggggaaagagcagagggtccgggagaagaagcagcccgaggagccggagagcacggccaccgtcctctacatcggccatatcccccacggtttctacgaggaccagatgcaaggtttctttcagcagtttggggctgttaagagggtcagggttgcccggaaccgcaagacagggaagtctaagcattatggattcattgagttcgagaaccctgaggtggcgaagattgtggctgatgagatgaataactacctgttgtttgagcacactctgcagattgcgcctgtcccgccggagaaagttcatgccaaattatggaaaggtgtgcgtaagggatttataccagttgaccgatgtttaaacrcaataaagtntgaactggaggsggsttagtaaggataaaacagtggaagagcacaagaagatgctcgaaggaattgtaaagcgggatgagaagcgccgcaaaagaatcaaggctgctggtatcgattacgagtgtccagcccttatcggaagcgttcagccttcagctaagaagatcaagtttgatgaggattagctatagagaaggcagatggatctttctttatcgggtaggagtgacgggactctgctgagttaacctggctggtccattttagctggggatgagatggcgatttcgtactttggctttgtatctgtgtttggtcgatgttatgtaagttgaatgactggtttatgttggtgaagaagcataaagctgtggtggaaaattaatgaacttgctttctttcc

SEQ ID NO: 56787 - protein, 163 aa, Glycine max
  peptide (1)..(163): Ceres Seq. ID no. 15221635
  misc_feature (55)..(126): Pfam Name: RNA recognition motif. (a.k.a. RRM, RBD, or RNP domain) Pfam Description: RNA recognition motif. (a.k.a. RRM, RBD, or RNP
  misc_feature (37)..(140): Homolog of NCBI NO: 13699902 NR Description: nucleolar phosphoprotein Nopp34 [Homo sapiens]
  misc_feature (33)..(161): Homolog of NCBI NO: 6324219 NR Description: Nucleolar protein 15; Nop15p [Saccharomyces
  misc_feature (32)..(133): Homolog of NCBI NO: 24649072 NR Description: CG6937-PA [Drosophila melanogaster]
  misc_feature (32)..(133): Homolog of NCBI NO: 17945733 NR Description: RE32504p [Drosophila melanogaster]
  misc_feature (33)..(141): Homolog of NCBI NO: 19076051 NR Description: putative RNA-binding protein [Schizosaccharomyces
  misc_feature (28)..(157): Homolog of NCBI NO: 20302745 NR Description: unknown [Branchiostoma floridae]
  misc_feature (27)..(146): Homolog of NCBI NO: 27545352 NR Description: mki67 (FHA domain) interacting nucleolar
  misc_feature (41)..(146): Homolog of NCBI NO: 40741317 NR Description: hypothetical protein AN4346.2 [Aspergillus
  misc_feature (1)..(150): Homolog of NCBI NO: 15238220 NR Description: RNA recognition motif (RRM)-containing protein
  misc_feature (1)..(150): Homolog of NCBI NO: 18652180 NR Description: RNA binding protein [Elaeis oleifera]
  misc_feature (155)..(155): Xaa is any aa, unknown or other
  misc_feature (158)..(158): Xaa is any aa, unknown or other
  misc_feature (162)..(162): Xaa is any aa, unknown or other
  misc_feature (163)..(163): Xaa is any aa, unknown or other
MGLRDKKRNQRRVLSRRSAGPKTGEGKDFLPLEGKEQRVREKKQPEEPESTATVLYIGHIPHGFYEDQMQGFFQQFGAVKRVRVARNRKTGKSKHYGFIEFENPEVAKIVADEMNNYLLFEHTLQIAPVPPEKVHAKLWKGVRKGFIPVDRCLNXIKXELEXX

SEQ ID NO: 56788 - protein, 95 aa, Glycine max
  peptide (1)..(95): Ceres Seq. ID no. 15221636
  misc_feature (1)..(58): Pfam Name: RNA recognition motif. (a.k.a. RRM, RBD, or RNP domain) Pfam Description: RNA recognition motif. (a.k.a. RRM, RBD, or RNP
  misc_feature (1)..(72): Homolog of NCBI NO: 13699902 NR Description: nucleolar phosphoprotein Nopp34 [Homo sapiens]
  misc_feature (1)..(93): Homolog of NCBI NO: 6324219 NR Description: Nucleolar protein 15; Nop15p [Saccharomyces
  misc_feature (1)..(65): Homolog of NCBI NO: 24649072 NR Description: CG6937-PA [Drosophila melanogaster]
  misc_feature (1)..(65): Homolog of NCBI NO: 17945733 NR Description: RE32504p [Drosophila melanogaster]
  misc_feature (1)..(73): Homolog of NCBI NO: 19076051 NR Description: putative RNA-binding protein [Schizosaccharomyces
  misc_feature (1)..(89): Homolog of NCBI NO: 20302745 NR Description: unknown [Branchiostoma floridae]
  misc_feature (1)..(78): Homolog of NCBI NO: 27545352 NR Description: mki67 (FHA domain) interacting nucleolar
  misc_feature (1)..(78): Homolog of NCBI NO: 40741317 NR Description: hypothetical protein AN4346.2 [Aspergillus
  misc_feature (1)..(82): Homolog of NCBI NO: 15238220 NR Description: RNA recognition motif (RRM)-containing protein
  misc_feature (1)..(82): Homolog of NCBI NO: 18652180 NR Description: RNA binding protein [Elaeis oleifera]
  misc_feature (87)..(87): Xaa is any aa, unknown or other
  misc_feature (90)..(90): Xaa is any aa, unknown or other
  misc_feature (94)..(94): Xaa is any aa, unknown or other
  misc_feature (95)..(95): Xaa is any aa, unknown or other
MQGFFQQFGAVKRVRVARNRKTGKSKHYGFIEFENPEVAKIVADEMNNYLLFEHTLQIAPVPPEKVHAKLWKGVRKGFIPVDRCLNXIKXELEXX

SEQ ID NO: 56789 - DNA, 1514 bp, Glycine max
  misc_feature (1)..(1514): Ceres Seq. ID no. 12612425
acccttgagcctttaagcagagaaagcaaaagaaggcaagaagctgagagttttgagttttgagatttgactcacgagaggagagtaatgtgtgggaagtagaagtagaagtagaaggagagaagcaccactacgtcagcgattcctttgcctttttcttctttcttagactcgaagacaagtttgatcctattttgagaatcgcattcagatggaaagcgcatcagagcttgtggaattcccgttgttgctgacaccaatcgattccaactacagagcttgcaccattccttacagattcccctccgataaccctcgcaagcccactcccaccgaaatctcttggattgatctcttcctcaactcaatcccctctttcaagaagcgtgcagagagtgatacttctgttcctgatgctgcagctaaagctgaaaaatttgctcaaagatatgctgatatacttgaagatttgaagaaagatcctgaaagtcatggtgggcctcctgattgcattcttctctgcagacttcgtgaacttgtgcttagagaattgggattcagagatatcttcaaaaaagtcaaggatgaagaaaatgcaaaagccatctcactgtttgagaatgttgttcatcttaatgatgccattgaagatgaaggcaagcgacttgagaatctagttagaggaatttttgctggaaacatatttgatcttggttctgcacagcttgcagaggttttctctaaggatggaatgtcctttttggctagttgtcaaaatctcgttcctcgaccttgggtcattgatgatcttgacactttcaaattgaaatggagcaagaacccatggaagaaggttatcatatttgttgataactctggtgcagatatcattttgggtattatgccatttgcaagagaactacttcggcgtgggagtcaggttgtattggctgctaatgacttaccatccatcaatgatgtgacttgttctgagctagttgaaattatatcaaagttaaaggatgaagatggacagcttgtgggtgtcagtacttcaaatctcttaattgcgaactctggcaatgatttacctgtcattgatcttacaagagtgtcacaggagcttgcttaccttgccagcgatgcagatcttgtcatcttagaagggatgggtcgtggaatagaaacaaatctctatgctcaatttaaatgtgattctcttaagattggaatggtgaaacatcccgaggtagcacaatttctcggtggacgtttgtatgactgtgtattcaaatacaatgaagtttcaagttagctatgaagttatattcttttcctactaatgctgcagacctgcaatttttctactgttaatccttcatcttgatacaccattacatgcctgtagtttggatactctttaaaatgtcattttagtattataaaggtgataaaaccaaaacatcttacttgtaataagaagttattctacatacatgacttggtctctctct

SEQ ID NO: 56790 - protein, 367 aa, Glycine max
  peptide (1)..(367): Ceres Seq. ID no. 12612426
  misc_feature (37)..(362): Pfam Name: Protein of unknown function DUF89 Pfam Description: Protein of unknown function DUF89
  misc_feature (7)..(171): Homolog of NCBI NO: 7486028 NR Description: hypothetical protein F23E12.80 - Arabidopsis
  misc_feature (243)..(367): Homolog of NCBI NO: 25370535 NR Description: hypothetical protein At2g17340 [imported] -
  misc_feature (1)..(167): Homolog of NCBI NO: 25370535 NR Description: hypothetical protein At2g17340 [imported] -
  misc_feature (164)..(215): Homolog of NCBI NO: 15227811 NR Description: unknown protein; protein id: At2g17320.1
  misc_feature (264)..(367): Homolog of NCBI NO: 15227811 NR Description: unknown protein; protein id: At2g17320.1
  misc_feature (7)..(173): Homolog of NCBI NO: 15227811 NR Description: unknown protein; protein id: At2g17320.1
  misc_feature (1)..(367): Homolog of NCBI NO: 21554574 NR Description: unknown [Arabidopsis thaliana]
  misc_feature (1)..(367): Homolog of NCBI NO: 18398388 NR Description: expressed protein
  misc_feature (1)..(365): Homolog of NCBI NO: 18418688 NR Description: putative protein
  misc_feature (1)..(365): Homolog of NCBI NO: 21554145 NR Description: unknown [Arabidopsis thaliana]
MESASELVEFPLLLTPIDSNYRACTIPYRFPSDNPRKPTPTEISWIDLFLNSIPSFKKRAESDTSVPDAAAKAEKFAQRYADILEDLKKDPESHGGPPDCILLCRLRELVLRELGFRDIFKKVKDEENAKAISLFENVVHLNDAIEDEGKRLENLVRGIFAGNIFDLGSAQLAEVFSKDGMSFLASCQNLVPRPWVIDDLDTFKLKWSKNPWKKVIIFVDNSGADIILGIMPFARELLRRGSQVVLAANDLPSINDVTCSELVEIISKLKDEDGQLVGVSTSNLLIANSGNDLPVIDLTRVSQELAYLASDADLVILEGMGRGIETNLYAQFKCDSLKIGMVKHPEVAQFLGGRLYDCVFKYNEVSS

SEQ ID NO: 56791 - protein, 187 aa, Glycine max
  peptide (1)..(187): Ceres Seq. ID no. 12612427
  misc_feature (1)..(182): Pfam Name: Protein of unknown function DUF89 Pfam Description: Protein of unknown function DUF89
  misc_feature (1)..(87): Homolog of NCBI NO: 33112586 NR Description: Probable pantothenate kinase 1 (Pantothenic acid
  misc_feature (1)..(182): Homolog of NCBI NO: 8922665 NR Description: pantothenate kinase 4; pantothenic acid kinase
  misc_feature (1)..(158): Homolog of NCBI NO: 7486028 NR Description: hypothetical protein F23E12.80 - Arabidopsis
  misc_feature (63)..(187): Homolog of NCBI NO: 25370535 NR Description: hypothetical protein At2g17340 [imported] -
  misc_feature (1)..(35): Homolog of NCBI NO: 15227811 NR Description: unknown protein; protein id: At2g17320.1
  misc_feature (84)..(187): Homolog of NCBI NO: 15227811 NR Description: unknown protein; protein id: At2g17320.1
  misc_feature (1)..(187): Homolog of NCBI NO: 21554574 NR Description: unknown [Arabidopsis thaliana]
  misc_feature (1)..(187): Homolog of NCBI NO: 18398388 NR Description: expressed protein
  misc_feature (1)..(185): Homolog of NCBI NO: 18418688 NR Description: putative protein
  misc_feature (1)..(185): Homolog of NCBI NO: 21554145 NR Description: unknown [Arabidopsis thaliana]
MSFLASCQNLVPRPWVIDDLDTFKLKWSKNPWKKVIIFVDNSGADIILGIMPFARELLRRGSQVVLAANDLPSINDVTCSELVEIISKLKDEDGQLVGVSTSNLLIANSGNDLPVIDLTRVSQELAYLASDADLVILEGMGRGIETNLYAQFKCDSLKIGMVKHPEVAQFLGGRLYDCVFKYNEVSS

SEQ ID NO: 56792 - DNA, 1076 bp, Glycine max
  misc_feature (1)..(1076): Ceres Seq. ID no. 13595668
atctctcccccacgttttccacccaccagacactcccacggctgccggcaatggcggcggcggcggagcaggactactggggcctgttccgggaggagacgggctggtacaacgagatcttcctcagcgccgtcgtgccgggcggcggcggctggtggcgggcgctgccgcacccgctccgctcctggctgcgcaactgcatcggcggctacctcctctacttcgccaccggcttcctctggtgcttcgtcatctactactggaagcgcaacgcctacatccccaaagatgctgtccctacagtagaagctatgaagaagcaaataattgttgcatcaaaggctatgccgttctactgtgctcttccgtccatatctgagcacatgattgagagtggatggacacggtgtttttttcatatcagtgaagttggttggcctatgtacattgtctatgtgtctctatatctcatctttgtggagttcggaatttactggatgcacagagagttgcatgacataaagccactatacaagcacctacatgcaacccaccacatttacaacaaggagaataccctatcaccatttgctggactagcattccatccattggacgggatactgcaagccatatcgcacgtgattgctctgttccttctgccgatgcacttcaggacgcacattgctctgttattcatagaggcggtgtggacggccaacatccatgactgcatccacggcaagatctggccagtgatgggtgccggctaccacaccatccaccacacgacgtaccggcacaactatggccactacaccgtgtggatggactggctgtttggcaccctccgcgagccggaggatctcctcaagaaggactgagctcgtgtgagcgcggtctttcctgtctctgtagcaatgtgaagtgtagtagaagtgttaaggcttaaccctccatctgttctcttattctgctgaaagatgtttgttgtggtgtttacgacagttagcggtgtgctgtttcagtctccgtccggtaggtggaaataataaggttgttcatttaccagacat

SEQ ID NO: 56793 - protein, 293 aa, Glycine max
  peptide (1)..(293): Ceres Seq. ID no. 13595669
  misc_feature (67)..(286): Homolog of NCBI NO: 25742651 NR Description: sterol-C5-desaturase (fungal ERG3,
  misc_feature (19)..(293): Homolog of NCBI NO: 15232937 NR Description: delta 7-sterol-C5-desaturase, putative
  misc_feature (20)..(293): Homolog of NCBI NO: 2129741 NR Description: C-5 sterol desaturase (EC 1.-.-.-) - Arabidopsis
  misc_feature (20)..(293): Homolog of NCBI NO: 21594971 NR Description: sterol-C5-desaturase [Arabidopsis thaliana]
  misc_feature (20)..(293): Homolog of NCBI NO: 15232935 NR Description: delta 7-sterol-C5-desaturase (STE1) [Arabidopsis
  misc_feature (20)..(293): Homolog of NCBI NO: 5031219 NR Description: delta7 sterol C-5 desaturase [Arabidopsis
  misc_feature (23)..(292): Homolog of NCBI NO: 33301670 NR Description: Delta-7-sterol-C5(6)-desaturase (Delta-7-C-5
  misc_feature (24)..(292): Homolog of NCBI NO: 4426627 NR Description: sterol-C5(6)-desaturase homolog [Nicotiana
  misc_feature (232)..(293): Homolog of NCBI NO: 34895618 NR Description: putative sterol-C5(6)-desaturase
  misc_feature (24)..(197): Homolog of NCBI NO: 34895618 NR Description: putative sterol-C5(6)-desaturase
LSPTFSTHQTLPRLPAMAAAAEQDYWGLFREETGWYNEIFLSAVVPGGGGWWRALPHPLRSWLRNCIGGYLLYFATGFLWCFVIYYWKRNAYIPKDAVPTVEAMKKQIIVASKAMPFYCALPSISEHMIESGWTRCFFHISEVGWPMYIVYVSLYLIFVEFGIYWMHRELHDIKPLYKHLHATHHIYNKENTLSPFAGLAFHPLDGILQAISHVIALFLLPMHFRTHIALLFIEAVWTANIHDCIHGKIWPVMGAGYHTIHHTTYRHNYGHYTVWMDWLFGTLREPEDLLKKD

SEQ ID NO: 56794 - protein, 277 aa, Glycine max
  peptide (1)..(277): Ceres Seq. ID no. 13595670
  misc_feature (51)..(270): Homolog of NCBI NO: 25742651 NR Description: sterol-C5-desaturase (fungal ERG3,
  misc_feature (3)..(277): Homolog of NCBI NO: 15232937 NR Description: delta 7-sterol-C5-desaturase, putative
  misc_feature (4)..(277): Homolog of NCBI NO: 2129741 NR Description: C-5 sterol desaturase (EC 1.-.-.-) - Arabidopsis
  misc_feature (4)..(277): Homolog of NCBI NO: 21594971 NR Description: sterol-C5-desaturase [Arabidopsis thaliana]
  misc_feature (4)..(277): Homolog of NCBI NO: 15232935 NR Description: delta 7-sterol-C5-desaturase (STE1) [Arabidopsis
  misc_feature (4)..(277): Homolog of NCBI NO: 5031219 NR Description: delta7 sterol C-5 desaturase [Arabidopsis
  misc_feature (7)..(276): Homolog of NCBI NO: 33301670 NR Description: Delta-7-sterol-C5(6)-desaturase (Delta-7-C-5
  misc_feature (8)..(276): Homolog of NCBI NO: 4426627 NR Description: sterol-C5(6)-desaturase homolog [Nicotiana
  misc_feature (216)..(277): Homolog of NCBI NO: 34895618 NR Description: putative sterol-C5(6)-desaturase
  misc_feature (8)..(181): Homolog of NCBI NO: 34895618 NR Description: putative sterol-C5(6)-desaturase
MAAAAEQDYWGLFREETGWYNEIFLSAVVPGGGGWWRALPHPLRSWLRNCIGGYLLYFATGFLWCFVIYYWKRNAYIPKDAVPTVEAMKKQIIVASKAMPFYCALPSISEHMIESGWTRCFFHISEVGWPMYIVYVSLYLIFVEFGIYWMHRELHDIKPLYKHLHATHHIYNKENTLSPFAGLAFHPLDGILQAISHVIALFLLPMHFRTHIALLFIEAVWTANIHDCIHGKIWPVMGAGYHTIHHTTYRHNYGHYTVWMDWLFGTLREPEDLLKKD

SEQ ID NO: 56795 - protein, 190 aa, Glycine max
  peptide (1)..(190): Ceres Seq. ID no. 13595671
  misc_feature (1)..(183): Homolog of NCBI NO: 25742651 NR Description: sterol-C5-desaturase (fungal ERG3,
  misc_feature (1)..(190): Homolog of NCBI NO: 15232937 NR Description: delta 7-sterol-C5-desaturase, putative
  misc_feature (1)..(190): Homolog of NCBI NO: 2129741 NR Description: C-5 sterol desaturase (EC 1.-.-.-) - Arabidopsis
  misc_feature (1)..(190): Homolog of NCBI NO: 21594971 NR Description: sterol-C5-desaturase [Arabidopsis thaliana]
  misc_feature (1)..(190): Homolog of NCBI NO: 15232935 NR Description: delta 7-sterol-C5-desaturase (STE1) [Arabidopsis
  misc_feature (1)..(190): Homolog of NCBI NO: 5031219 NR Description: delta7 sterol C-5 desaturase [Arabidopsis
  misc_feature (1)..(189): Homolog of NCBI NO: 33301670 NR Description: Delta-7-sterol-C5(6)-desaturase (Delta-7-C-5
  misc_feature (1)..(189): Homolog of NCBI NO: 4426627 NR Description: sterol-C5(6)-desaturase homolog [Nicotiana
  misc_feature (129)..(190): Homolog of NCBI NO: 34895618 NR Description: putative sterol-C5(6)-desaturase
  misc_feature (1)..(94): Homolog of NCBI NO: 34895618 NR Description: putative sterol-C5(6)-desaturase
MKKQIIVASKAMPFYCALPSISEHMIESGWTRCFFHISEVGWPMYIVYVSLYLIFVEFGIYWMHRELHDIKPLYKHLHATHHIYNKENTLSPFAGLAFHPLDGILQAISHVIALFLLPMHFRTHIALLFIEAVWTANIHDCIHGKIWPVMGAGYHTIHHTTYRHNYGHYTVWMDWLFGTLREPEDLLKKD

SEQ ID NO: 56796 - DNA, 1193 bp, Glycine max
  misc_feature (1)..(1193): Ceres Seq. ID no. 13582317
aactcttgccactgcttttatctatcttctccatcggcaacaccttgcggaagataaaaaggatcgattcttcaatcaagaccagaaaaaaaaaagagcacgtacgtcacgttagactctgtatatcctgtgctgtgtcccattcggtacgcaagcctcaaaatatacatactccttcattttttcttcttctctttatggcggaaatccccaagttggatttgtcatcttcttgttttgacaatggagagcctttggattcggaacagaagagccagaaaatttttgtttcggatcacataaacgcatttcaatacgcagacgagaaagccgatagctttgtgattgacatggatgccttctcttccggccacaacaaagatgccaccaatgctaattcgagaattacgttgcagaggagtctttccaggaagggatctcagcgtctgggtgactggaagctgaataacaatgctacactttatgataaggataccgttcccgccatatgctctccaaaaggtacacttgttgggcctttcacgcccgaaaagccagcggggatggcagtagggcccatgggtcattccatgaacccacacgtccataatctaacagccgacaacatccccacagagagcaaatgtagtataactcggagaaatagttttagacgaccttcttcatgggccattgatcctaaaagggttctccttttctttgccaccttgtcaagcatgggaacaatgttgctgatatacttcactctgacaatcagtaagcaaagtgcagaagaatatggagggtgattggaagcattgactgaaggttttggattatgataacaaaaaaagaaaagaaaaaggacatgcattaattctggagcaaaacttacaagttaattagaagaagacaaccctgcagcaggagtagcaaagcaaaagctaaccaaatttccgccagcctgatgtcaaaatcagttaaaatcatctctttggcaactgcaagaggtaaatacaaagacacaatgtagtactatgacagagatcaggaagaaatcttccattatgtttttttttttttcatgtaaatggaagaaaaacaaacgatcacatggaggacattgccctttagtttatatgttgcgtgatcgcagggtttagtggaggatggatcataaatcaccttttgcc

SEQ ID NO: 56797 - protein, 268 aa, Glycine max
  peptide (1)..(268): Ceres Seq. ID no. 13582318
  misc_feature (224)..(268): Homolog of NCBI NO: 27261034 NR Description: P0681F05.22 [Oryza sativa (japonica
  misc_feature (108)..(264): Homolog of NCBI NO: 38345628 NR Description: OSJNBb0004A17.8 [Oryza sativa (japonica
LLPLLLSIFSIGNTLRKIKRIDSSIKTRKKKEHVRHVRLCISCAVSHSVRKPQNIHTPSFFLLLFMAEIPKLDLSSSCFDNGEPLDSEQKSQKIFVSDHINAFQYADEKADSFVIDMDAFSSGHNKDATNANSRITLQRSLSRKGSQRLGDWKLNNNATLYDKDTVPAICSPKGTLVGPFTPEKPAGMAVGPMGHSMNPHVHNLTADNIPTESKCSITRRNSFRRPSSWAIDPKRVLLFFATLSSMGTMLLIYFTLTISKQSAEEYGG

SEQ ID NO: 56798 - protein, 203 aa, Glycine max
  peptide (1)..(203): Ceres Seq. ID no. 13582319
  misc_feature (159)..(203): Homolog of NCBI NO: 27261034 NR Description: P0681F05.22 [Oryza sativa (japonica
  misc_feature (43)..(199): Homolog of NCBI NO: 38345628 NR Description: OSJNBb0004A17.8 [Oryza sativa (japonica
MAEIPKLDLSSSCFDNGEPLDSEQKSQKIFVSDHINAFQYADEKADSFVIDMDAFSSGHNKDATNANSRITLQRSLSRKGSQRLGDWKLNNNATLYDKDTVPAICSPKGTLVGPFTPEKPAGMAVGPMGHSMNPHVHNLTADNIPTESKCSITRRNSFRRPSSWAIDPKRVLLFFATLSSMGTMLLIYFTLTISKQSAEEYGG

SEQ ID NO: 56799 - protein, 152 aa, Glycine max
  peptide (1)..(152): Ceres Seq. ID no. 13582320
  misc_feature (108)..(152): Homolog of NCBI NO: 27261034 NR Description: P0681F05.22 [Oryza sativa (japonica
  misc_feature (1)..(148): Homolog of NCBI NO: 38345628 NR Description: OSJNBb0004A17.8 [Oryza sativa (japonica
MDAFSSGHNKDATNANSRITLQRSLSRKGSQRLGDWKLNNNATLYDKDTVPAICSPKGTLVGPFTPEKPAGMAVGPMGHSMNPHVHNLTADNIPTESKCSITRRNSFRRPSSWAIDPKRVLLFFATLSSMGTMLLIYFTLTISKQSAEEYGG

SEQ ID NO: 56800 - DNA, 752 bp, Glycine max
  misc_feature (1)..(752): Ceres Seq. ID no. 12611671
aatccaccaactgcattggaacacccttttctccttcaatggaaggtgaggaggggaaacagtcttcccaaaaaaacccttacgttgaactagaagaagttgactttgattttattctagcaatgagcatgcaagaacaagagagagagttcacaatgctttcaactattgaaagtgaaagtgatgaatatctaagtgactcctctatagataatgatgatgatggtgatcctgactttatagcgagtcaagagtttgaaaccgaccttcggtttcttgaaggtgaaggaagcgacgatgatgatgaagacatggaaatggaagaagatgagattgatccagacgaattatcttatgaagaattgatggagttggaagagtttataggagaagaaacaagagggttatcagcaaatgaaatctctttgtgcttgtacccttatacctgccaatgtgctgaaagcaaaagtggcattgatcgttgtgtgatttgtcaggttgaatatgaagaaggtgaagcactagtggcacttcaatgtgagcacccttatcattcagattgcataagaaagtggcttcaaattaagaaggtttgtccaatttgtggaaatgaagtttcaactcccaacttggcttcgaacccttagttatttagtttggattgaaaaattaatgtgtgtacactaattattgtaatctggatttgcatgaaactgtagttgagaaaataaacaaagcatggaagcttaacc

SEQ ID NO: 56801 - protein, 214 aa, Glycine max
  peptide (1)..(214): Ceres Seq. ID no. 12611672
  misc_feature (161)..(201): Pfam Name: Zinc finger, C3HC4 type (RING finger) Pfam Description: Zinc finger, C3HC4 type (RING finger)
  misc_feature (95)..(201): Homolog of NCBI NO: 11358785 NR Description: RING-H2 finger protein RHG1a
  misc_feature (97)..(208): Homolog of NCBI NO: 15226553 NR Description: putative RING zinc finger protein; protein id:
  misc_feature (96)..(201): Homolog of NCBI NO: 40253261 NR Description: DNA binding zinc finger protein-like
  misc_feature (45)..(209): Homolog of NCBI NO: 34898016 NR Description: ESTs C26000(C11448),AU082130(C11448) correspond a region of the predicted gene.~Similar to mRNA for zinc-finger
  misc_feature (108)..(205): Homolog of NCBI NO: 38567912 NR Description: OSJNBa0088I22.8 [Oryza sativa (japonica
  misc_feature (99)..(205): Homolog of NCBI NO: 22331928 NR Description: putative protein; protein id: At3g63530.1
  misc_feature (95)..(207): Homolog of NCBI NO: 18402411 NR Description: expressed protein
  misc_feature (95)..(207): Homolog of NCBI NO: 21536693 NR Description: unknown [Arabidopsis thaliana]
  misc_feature (88)..(213): Homolog of NCBI NO: 10334499 NR Description: hypothetical protein [Cicer arietinum]
  misc_feature (16)..(206): Homolog of NCBI NO: 15232746 NR Description: zinc-finger protein-like protein; protein id:
STNCIGTPFSPSMEGEEGKQSSQKNPYVELEEVDFDFILAMSMQEQEREFTMLSTIESESDEYLSDSSIDNDDDGDPDFIASQEFETDLRFLEGEGSDDDDEDMEMEEDEIDPDELSYEELMELEEFIGEETRGLSANEISLCLYPYTCQCAESKSGIDRCVICQVEYEEGEALVALQCEHPYHSDCIRKWLQIKKVCPICGNEVSTPNLASNP

SEQ ID NO: 56802 - protein, 202 aa, Glycine max
  peptide (1)..(202): Ceres Seq. ID no. 12611673
  misc_feature (149)..(189): Pfam Name: Zinc finger, C3HC4 type (RING finger) Pfam Description: Zinc finger, C3HC4 type (RING finger)
  misc_feature (83)..(189): Homolog of NCBI NO: 11358785 NR Description: RING-H2 finger protein RHG1a
  misc_feature (85)..(196): Homolog of NCBI NO: 15226553 NR Description: putative RING zinc finger protein; protein id:
  misc_feature (84)..(189): Homolog of NCBI NO: 40253261 NR Description: DNA binding zinc finger protein-like
  misc_feature (33)..(197): Homolog of NCBI NO: 34898016 NR Description: ESTs C26000(C11448),AU082130(C11448) correspond a region of the predicted gene.~Similar to mRNA for zinc-finger
  misc_feature (96)..(193): Homolog of NCBI NO: 38567912 NR Description: OSJNBa0088I22.8 [Oryza sativa (japonica
  misc_feature (87)..(193): Homolog of NCBI NO: 22331928 NR Description: putative protein; protein id: At3g63530.1
  misc_feature (83)..(195): Homolog of NCBI NO: 18402411 NR Description: expressed protein
  misc_feature (83)..(195): Homolog of NCBI NO: 21536693 NR Description: unknown [Arabidopsis thaliana]
  misc_feature (76)..(201): Homolog of NCBI NO: 10334499 NR Description: hypothetical protein [Cicer arietinum]
  misc_feature (4)..(194): Homolog of NCBI NO: 15232746 NR Description: zinc-finger protein-like protein; protein id:
MEGEEGKQSSQKNPYVELEEVDFDFILAMSMQEQEREFTMLSTIESESDEYLSDSSIDNDDDGDPDFIASQEFETDLRFLEGEGSDDDDEDMEMEEDEIDPDELSYEELMELEEFIGEETRGLSANEISLCLYPYTCQCAESKSGIDRCVICQVEYEEGEALVALQCEHPYHSDCIRKWLQIKKVCPICGNEVSTPNLASNP

SEQ ID NO: 56803 - protein, 174 aa, Glycine max
  peptide (1)..(174): Ceres Seq. ID no. 12611674
  misc_feature (121)..(161): Pfam Name: Zinc finger, C3HC4 type (RING finger) Pfam Description: Zinc finger, C3HC4 type (RING finger)
  misc_feature (55)..(161): Homolog of NCBI NO: 11358785 NR Description: RING-H2 finger protein RHG1a
  misc_feature (57)..(168): Homolog of NCBI NO: 15226553 NR Description: putative RING zinc finger protein; protein id:
  misc_feature (56)..(161): Homolog of NCBI NO: 40253261 NR Description: DNA binding zinc finger protein-like
  misc_feature (5)..(169): Homolog of NCBI NO: 34898016 NR Description: ESTs C26000(C11448),AU082130(C11448) correspond a region of the predicted gene.~Similar to mRNA for zinc-finger
  misc_feature (68)..(165): Homolog of NCBI NO: 38567912 NR Description: OSJNBa0088I22.8 [Oryza sativa (japonica
  misc_feature (59)..(165): Homolog of NCBI NO: 22331928 NR Description: putative protein; protein id: At3g63530.1
  misc_feature (55)..(167): Homolog of NCBI NO: 18402411 NR Description: expressed protein
  misc_feature (55)..(167): Homolog of NCBI NO: 21536693 NR Description: unknown [Arabidopsis thaliana]
  misc_feature (48)..(173): Homolog of NCBI NO: 10334499 NR Description: hypothetical protein [Cicer arietinum]
  misc_feature (1)..(166): Homolog of NCBI NO: 15232746 NR Description: zinc-finger protein-like protein; protein id:
MSMQEQEREFTMLSTIESESDEYLSDSSIDNDDDGDPDFIASQEFETDLRFLEGEGSDDDDEDMEMEEDEIDPDELSYEELMELEEFIGEETRGLSANEISLCLYPYTCQCAESKSGIDRCVICQVEYEEGEALVALQCEHPYHSDCIRKWLQIKKVCPICGNEVSTPNLASNP

SEQ ID NO: 56804 - DNA, 1378 bp, Glycine max
  misc_feature (1)..(1378): Ceres Seq. ID no. 13595651
agaacatcctaatcgaaaaaaaaagatttgtgatatctctctctcagtgacacccaaactcaaaacacactcaaacaatctctgttcactttaacaatggcggttttgttgcctccaacattctccccacttctactaaacaccaagacagattttgggtcaccaccatttcctcttctcaccctctcctcctcctcacccacctcctcacccctcttcgtctcttacaccaaatccggaaatgggttggccagtgaggacaaaaaaatcttgcttgagaagtatggctacgatattgatgctgatgagtacttttcacagtcatcttctaagtccaagaggagaaaggagcaaccaaggagaagaggagggaagcaagtgcaggacccaccagaggaccctaagcctcctcgtgtaacccataaattgcttcaggttcttggaggaacagctcgaagagtgaagctactttcaccaaagggcatggatgtgcgccccatgatggaagtggtgaaaggtgcagcctttgatatattacaggcagctggtggctgtcctgcagcattgagacctggtcgctggttagacttgtatagcggtacaggttctgttggaattgaagcacttagccgaggatgttctcaggtgcattttgttgagatggatccgtgggttgtatcagatgttttacgtccaaacctggaggaaactggattcctagatgcttcagtcatacatactgtccgtgtagaaaaattctttgagcgtgcagagcaatttgtaggaaacagtggcccatttgattacattagtgtcacccctccatatacacaagttgactatggggtgctgatgaggcagatatcagaatcatccttgattggagagaacacgtttattgtagttgagtatcctttaaaaactgacatgctggattcttgtggaagtcttgtaaagataaccgacagacggtttggacggacactcttggcaatttatggaccaacatggtcccagaagaagaggagatgacacattcaaatgcctaagttgcagtaaaggctgaaaaacatgctggtgcaatatttatctgttacagtggtcaacaggaattagtttttggcacctacctcacttcttcaaaagctgttatacacagtctaatgttggtccctgcaacaggtcatgtcttgtaatgttaatcataaaatcttgcattctttgttataatgtgacccatcttcagctgaaaattgattattaaatctagattaaggtttcattaccaacagtgttgatcacagtagaagtggattgtgattgtaggtgaactttatctaccatattagtgaaatcatcactctaatcattctatttc

SEQ ID NO: 56805 - protein, 311 aa, Glycine max
  peptide (1)..(311): Ceres Seq. ID no. 15221630
  misc_feature (112)..(302): Pfam Name: Conserved hypothetical protein 95 Pfam Description: Conserved hypothetical protein 95
  misc_feature (112)..(301): Homolog of NCBI NO: 18310712 NR Description: conserved hypothetical protein [Clostridium
  misc_feature (135)..(301): Homolog of NCBI NO: 22973536 NR Description: hypothetical protein [Chloroflexus aurantiacus]
  misc_feature (112)..(301): Homolog of NCBI NO: 19704664 NR Description: Methyltransferase
  misc_feature (112)..(301): Homolog of NCBI NO: 34763572 NR Description: METHYLTRANSFERASE
  misc_feature (112)..(301): Homolog of NCBI NO: 15895014 NR Description: N6-adenine-specific methylase [Clostridium
  misc_feature (112)..(301): Homolog of NCBI NO: 28210920 NR Description: methyltransferase [Clostridium tetani E88]
  misc_feature (110)..(301): Homolog of NCBI NO: 20807931 NR Description: N6-adenine-specific methylase [Thermoanaerobacter
  misc_feature (112)..(301): Homolog of NCBI NO: 39996346 NR Description: methyltransferase, putative [Geobacter
  misc_feature (22)..(311): Homolog of NCBI NO: 29788862 NR Description: hypothetical protein [Oryza sativa (japonica
  misc_feature (1)..(311): Homolog of NCBI NO: 22331389 NR Description: expressed protein [Arabidopsis thaliana]
MAVLLPPTFSPLLLNTKTDFGSPPFPLLTLSSSSPTSSPLFVSYTKSGNGLASEDKKILLEKYGYDIDADEYFSQSSSKSKRRKEQPRRRGGKQVQDPPEDPKPPRVTHKLLQVLGGTARRVKLLSPKGMDVRPMMEVVKGAAFDILQAAGGCPAALRPGRWLDLYSGTGSVGIEALSRGCSQVHFVEMDPWVVSDVLRPNLEETGFLDASVIHTVRVEKFFERAEQFVGNSGPFDYISVTPPYTQVDYGVLMRQISESSLIGENTFIVVEYPLKTDMLDSCGSLVKITDRRFGRTLLAIYGPTWSQKKRR

SEQ ID NO: 56806 - protein, 182 aa, Glycine max
  peptide (1)..(182): Ceres Seq. ID no. 15221631
  misc_feature (1)..(173): Pfam Name: Conserved hypothetical protein 95 Pfam Description: Conserved hypothetical protein 95
  misc_feature (1)..(172): Homolog of NCBI NO: 18310712 NR Description: conserved hypothetical protein [Clostridium
  misc_feature (6)..(172): Homolog of NCBI NO: 22973536 NR Description: hypothetical protein [Chloroflexus aurantiacus]
  misc_feature (1)..(172): Homolog of NCBI NO: 19704664 NR Description: Methyltransferase
  misc_feature (1)..(172): Homolog of NCBI NO: 34763572 NR Description: METHYLTRANSFERASE
  misc_feature (1)..(172): Homolog of NCBI NO: 15895014 NR Description: N6-adenine-specific methylase [Clostridium
  misc_feature (1)..(172): Homolog of NCBI NO: 28210920 NR Description: methyltransferase [Clostridium tetani E88]
  misc_feature (1)..(172): Homolog of NCBI NO: 20807931 NR Description: N6-adenine-specific methylase [Thermoanaerobacter
  misc_feature (1)..(172): Homolog of NCBI NO: 39996346 NR Description: methyltransferase, putative [Geobacter
  misc_feature (1)..(182): Homolog of NCBI NO: 29788862 NR Description: hypothetical protein [Oryza sativa (japonica
  misc_feature (1)..(182): Homolog of NCBI NO: 22331389 NR Description: expressed protein [Arabidopsis thaliana]
MDVRPMMEVVKGAAFDILQAAGGCPAALRPGRWLDLYSGTGSVGIEALSRGCSQVHFVEMDPWVVSDVLRPNLEETGFLDASVIHTVRVEKFFERAEQFVGNSGPFDYISVTPPYTQVDYGVLMRQISESSLIGENTFIVVEYPLKTDMLDSCGSLVKITDRRFGRTLLAIYGPTWSQKKRR

SEQ ID NO: 56807 - protein, 177 aa, Glycine max
  peptide (1)..(177): Ceres Seq. ID no. 15221632
  misc_feature (1)..(168): Pfam Name: Conserved hypothetical protein 95 Pfam Description: Conserved hypothetical protein 95
  misc_feature (1)..(167): Homolog of NCBI NO: 18310712 NR Description: conserved hypothetical protein [Clostridium
  misc_feature (1)..(167): Homolog of NCBI NO: 22973536 NR Description: hypothetical protein [Chloroflexus aurantiacus]
  misc_feature (1)..(167): Homolog of NCBI NO: 19704664 NR Description: Methyltransferase
  misc_feature (1)..(167): Homolog of NCBI NO: 34763572 NR Description: METHYLTRANSFERASE
  misc_feature (1)..(167): Homolog of NCBI NO: 15895014 NR Description: N6-adenine-specific methylase [Clostridium
  misc_feature (1)..(167): Homolog of NCBI NO: 28210920 NR Description: methyltransferase [Clostridium tetani E88]
  misc_feature (1)..(167): Homolog of NCBI NO: 20807931 NR Description: N6-adenine-specific methylase [Thermoanaerobacter
  misc_feature (1)..(167): Homolog of NCBI NO: 39996346 NR Description: methyltransferase, putative [Geobacter
  misc_feature (1)..(177): Homolog of NCBI NO: 29788862 NR Description: hypothetical protein [Oryza sativa (japonica
  misc_feature (1)..(177): Homolog of NCBI NO: 22331389 NR Description: expressed protein [Arabidopsis thaliana]
MMEVVKGAAFDILQAAGGCPAALRPGRWLDLYSGTGSVGIEALSRGCSQVHFVEMDPWVVSDVLRPNLEETGFLDASVIHTVRVEKFFERAEQFVGNSGPFDYISVTPPYTQVDYGVLMRQISESSLIGENTFIVVEYPLKTDMLDSCGSLVKITDRRFGRTLLAIYGPTWSQKKRR

SEQ ID NO: 56808 - DNA, 1370 bp, Glycine max
  misc_feature (1)..(1370): Ceres Seq. ID no. 15226004
aattatgagactaatccacatgagggtgtttaatcttaaattgggttagctaggttaaagccaagggcccatgggctcatgctaatgatttgcaagtgttgctttcaagggaaaaacagagctttttggttggttggcccttttagcagattggtgttttgagaggctttgcaatttgcaacaaagtccactggtctgtttgatgtgattttctggattctagagattaattagtttggacattgagtattttgggaggttgaacaagttcaagtgttttcaatgtgatttgaggacaaagatgaaatccttgagtagtgtaggtcttggtctcagtattatttttggttgcctcttgttggctctggtagctgaggtatactatttgctatggtggaagaagaggataaccaacagagagattgagaataattatggcaaccctgtgaaggagttattctacatgttttgttggaaaaggccatcatcatcttctttgaggcaaacaagtttcactcctcctgagctttgctcttccatgagaattggtgacacccttgttcataacccagaacaagttcagtctcaaagtggcaaggactttgttttcaaaccctttggggaagatggcatggatgcagaatacatgagccagcaggacctcttaggtcctccaagattcttgttcaccatagtagaagaatcaaaggaagatttagaatctgatgatggcaaattcaaatgtgacaagagtggaaaaggttcaaggggtagaagcttgggtgatttgctagttgtggagacaccatatatgacacctactacttctccacctttctttactcctcctttcactactcctatcagtccctataaccagcgtggattcaatcctctatttgaaacagcaactgatgctgagttcaacagattaaagtcctcacctcctccaaaattcaagttcttacaggaagcagaagagaagcttagaagaaaactacaacaggatgaaaataagggaaatggagatgaggttgatggttctttcatcacaatagttgttgacaagaaaacagaaagagaggttaatcaccagcctcgtccaccacagtaccattcaggtacttcacaggtacttcccttagcatcttgacacaattcaccaaaatcagaagaaagaaaccagctaacaccaaagttctgtcaagtcaattaagagtttatttcttaattaatctttctaattacatgttgaagaattccactttttttttgtaatgatgggaatttgttcccccagacccccccccccccccgagttgttgtttaggggatgcagcactatggtttaatctaccaagccagttgtg

SEQ ID NO: 56809 - protein, 283 aa, Glycine max
  peptide (1)..(283): Ceres Seq. ID no. 15226005
  misc_feature (1)..(75): Homolog of NCBI NO: 15225496 NR Description: expressed protein [Arabidopsis thaliana]
  misc_feature (1)..(250): Homolog of NCBI NO: 21553514 NR Description: unknown [Arabidopsis thaliana]
  misc_feature (1)..(250): Homolog of NCBI NO: 15238384 NR Description: expressed protein [Arabidopsis thaliana]
MKSLSSVGLGLSIIFGCLLLALVAEVYYLLWWKKRITNREIENNYGNPVKELFYMFCWKRPSSSSLRQTSFTPPELCSSMRIGDTLVHNPEQVQSQSGKDFVFKPFGEDGMDAEYMSQQDLLGPPRFLFTIVEESKEDLESDDGKFKCDKSGKGSRGRSLGDLLVVETPYMTPTTSPPFFTPPFTTPISPYNQRGFNPLFETATDAEFNRLKSSPPPKFKFLQEAEEKLRRKLQQDENKGNGDEVDGSFITIVVDKKTEREVNHQPRPPQYHSGTSQVLPLAS

SEQ ID NO: 56810 - protein, 229 aa, Glycine max
  peptide (1)..(229): Ceres Seq. ID no. 15226006
  misc_feature (1)..(21): Homolog of NCBI NO: 15225496 NR Description: expressed protein [Arabidopsis thaliana]
  misc_feature (1)..(196): Homolog of NCBI NO: 21553514 NR Description: unknown [Arabidopsis thaliana]
  misc_feature (1)..(196): Homolog of NCBI NO: 15238384 NR Description: expressed protein [Arabidopsis thaliana]
MFCWKRPSSSSLRQTSFTPPELCSSMRIGDTLVHNPEQVQSQSGKDFVFKPFGEDGMDAEYMSQQDLLGPPRFLFTIVEESKEDLESDDGKFKCDKSGKGSRGRSLGDLLVVETPYMTPTTSPPFFTPPFTTPISPYNQRGFNPLFETATDAEFNRLKSSPPPKFKFLQEAEEKLRRKLQQDENKGNGDEVDGSFITIVVDKKTEREVNHQPRPPQYHSGTSQVLPLAS

SEQ ID NO: 56811 - protein, 204 aa, Glycine max
  peptide (1)..(204): Ceres Seq. ID no. 15226007
  misc_feature (1)..(171): Homolog of NCBI NO: 21553514 NR Description: unknown [Arabidopsis thaliana]
  misc_feature (1)..(171): Homolog of NCBI NO: 15238384 NR Description: expressed protein [Arabidopsis thaliana]
MRIGDTLVHNPEQVQSQSGKDFVFKPFGEDGMDAEYMSQQDLLGPPRFLFTIVEESKEDLESDDGKFKCDKSGKGSRGRSLGDLLVVETPYMTPTTSPPFFTPPFTTPISPYNQRGFNPLFETATDAEFNRLKSSPPPKFKFLQEAEEKLRRKLQQDENKGNGDEVDGSFITIVVDKKTEREVNHQPRPPQYHSGTSQVLPLAS

SEQ ID NO: 56812 - DNA, 1406 bp, Glycine max
  misc_feature (1)..(1406): Ceres Seq. ID no. 13582388
aagttcttcattttttctcattctgtctgtctgtctgtctctctctcactcactctttaagcactgagtaatttgtaatattattctgttcttgcttttgaggtcactgttctttctgcagttgctgcattagcattttgggaccattttgttctttaccactactttttctctgtgatgccattgttgtattgtactcttccttgtgctagatctgaagctgtgaggccagactctctcatttcatttccatcccgtgtttaaattggaagctggaacctagtttatgccctgcttgatttggttgctcttaacccttttcagaaatcaaaagcacttgtactatgctggtgttccctatagggaaagatgaaattgaagtctaagaaaggatggaaatctattgtaccacttcatttgaaaggaaaatcagcaagccgtttttctttatttcgcaaagtcaattctgctggctatggacctggcaaaacaccagtttatctgaatgtgtatgacttgacacccatgaatggttatgtgtattgggctggtcttggtatctatcactctggtgtagaagttcatggtgtagaatacgcgtttggagctcatgactacccaacaagtggtgttttcgaggttgaacctcgccaatgccctggcttcaagttcaggaagtcaatattcataggaatcacatctttggattctactcaggttagggagttcatggaacgccagtcagcaagatacaacggtgacacatatcacttaattgtcaagaactgcaaccacttctgcaaagacatctgttacaagctgacggggaaatcgattccaacatgggtaaatcgactggccagactaggttcaatttgcaattgcattcttcctgaagcactaaggatttctgctgtggcgcatgatcctaattatcagcctcatgatagtgaaaagagaaggcttcgaagtggcttcaattgcttgtcctcaatctcaatgcgtcaaaaacacctttccacatcttcactgtttctacagtcacccataagaggctgcttgtcgtcgtcatggccctcctcggaattgagaaaatccattaaccgttccttgaaagaaagataaccgaactttgagaaggtaggaaatgaatgattgtaagaatcttgtttatgtaagtaggatttggtttcatcacataacctcattttcttttatttttctttccttgtcttttgcagttaaacctgccctgttttattatttttttattgtggtgactaagaatgatcctttccaagcttagaagaaactttataaatgagcatcaccaccatctgctgtgtattattttaatttttgtacatacattagcatgtaaaatgatgcaccaacaacttcaatct

SEQ ID NO: 56813 - protein, 251 aa, Glycine max
  peptide (1)..(251): Ceres Seq. ID no. 13582389
  misc_feature (42)..(164): Pfam Name: Eukaryotic protein of unknown function (DUF862) Pfam Description: Eukaryotic protein of unknown function (DUF862)
  misc_feature (35)..(225): Homolog of NCBI NO: 38346173 NR Description: OSJNBa0079A21.20 [Oryza sativa (japonica
  misc_feature (27)..(229): Homolog of NCBI NO: 25354458 NR Description: hypothetical protein F23A5.4 [imported] -
  misc_feature (27)..(229): Homolog of NCBI NO: 18412886 NR Description: expressed protein [Arabidopsis thaliana]
  misc_feature (39)..(251): Homolog of NCBI NO: 18400749 NR Description: expressed protein [Arabidopsis thaliana]
  misc_feature (15)..(185): Homolog of NCBI NO: 15238059 NR Description: expressed protein [Arabidopsis thaliana]
  misc_feature (21)..(228): Homolog of NCBI NO: 30684058 NR Description: expressed protein [Arabidopsis thaliana]
  misc_feature (38)..(201): Homolog of NCBI NO: 18420889 NR Description: expressed protein [Arabidopsis thaliana]
  misc_feature (1)..(251): Homolog of NCBI NO: 9802596 NR Description: T2E6.19 [Arabidopsis thaliana]
  misc_feature (1)..(251): Homolog of NCBI NO: 21593644 NR Description: unknown [Arabidopsis thaliana]
  misc_feature (1)..(251): Homolog of NCBI NO: 18401869 NR Description: expressed protein [Arabidopsis thaliana]
MKLKSKKGWKSIVPLHLKGKSASRFSLFRKVNSAGYGPGKTPVYLNVYDLTPMNGYVYWAGLGIYHSGVEVHGVEYAFGAHDYPTSGVFEVEPRQCPGFKFRKSIFIGITSLDSTQVREFMERQSARYNGDTYHLIVKNCNHFCKDICYKLTGKSIPTWVNRLARLGSICNCILPEALRISAVAHDPNYQPHDSEKRRLRSGFNCLSSISMRQKHLSTSSLFLQSPIRGCLSSSWPSSELRKSINRSLKER

SEQ ID NO: 56814 - protein, 199 aa, Glycine max
  peptide (1)..(199): Ceres Seq. ID no. 13582390
  misc_feature (1)..(112): Pfam Name: Eukaryotic protein of unknown function (DUF862) Pfam Description: Eukaryotic protein of unknown function (DUF862)
  misc_feature (1)..(173): Homolog of NCBI NO: 38346173 NR Description: OSJNBa0079A21.20 [Oryza sativa (japonica
  misc_feature (1)..(177): Homolog of NCBI NO: 25354458 NR Description: hypothetical protein F23A5.4 [imported] -
  misc_feature (1)..(177): Homolog of NCBI NO: 18412886 NR Description: expressed protein [Arabidopsis thaliana]
  misc_feature (1)..(199): Homolog of NCBI NO: 18400749 NR Description: expressed protein [Arabidopsis thaliana]
  misc_feature (1)..(133): Homolog of NCBI NO: 15238059 NR Description: expressed protein [Arabidopsis thaliana]
  misc_feature (1)..(176): Homolog of NCBI NO: 30684058 NR Description: expressed protein [Arabidopsis thaliana]
  misc_feature (1)..(149): Homolog of NCBI NO: 18420889 NR Description: expressed protein [Arabidopsis thaliana]
  misc_feature (1)..(199): Homolog of NCBI NO: 9802596 NR Description: T2E6.19 [Arabidopsis thaliana]
  misc_feature (1)..(199): Homolog of NCBI NO: 21593644 NR Description: unknown [Arabidopsis thaliana]
  misc_feature (1)..(199): Homolog of NCBI NO: 18401869 NR Description: expressed protein [Arabidopsis thaliana]
MNGYVYWAGLGIYHSGVEVHGVEYAFGAHDYPTSGVFEVEPRQCPGFKFRKSIFIGITSLDSTQVREFMERQSARYNGDTYHLIVKNCNHFCKDICYKLTGKSIPTWVNRLARLGSICNCILPEALRISAVAHDPNYQPHDSEKRRLRSGFNCLSSISMRQKHLSTSSLFLQSPIRGCLSSSWPSSELRKSINRSLKER

SEQ ID NO: 56815 - protein, 131 aa, Glycine max
  peptide (1)..(131): Ceres Seq. ID no. 13582391
  misc_feature (1)..(105): Homolog of NCBI NO: 38346173 NR Description: OSJNBa0079A21.20 [Oryza sativa (japonica
  misc_feature (1)..(109): Homolog of NCBI NO: 25354458 NR Description: hypothetical protein F23A5.4 [imported] -
  misc_feature (1)..(109): Homolog of NCBI NO: 18412886 NR Description: expressed protein [Arabidopsis thaliana]
  misc_feature (1)..(131): Homolog of NCBI NO: 18400749 NR Description: expressed protein [Arabidopsis thaliana]
  misc_feature (1)..(65): Homolog of NCBI NO: 15238059 NR Description: expressed protein [Arabidopsis thaliana]
  misc_feature (1)..(108): Homolog of NCBI NO: 30684058 NR Description: expressed protein [Arabidopsis thaliana]
  misc_feature (1)..(81): Homolog of NCBI NO: 18420889 NR Description: expressed protein [Arabidopsis thaliana]
  misc_feature (1)..(131): Homolog of NCBI NO: 9802596 NR Description: T2E6.19 [Arabidopsis thaliana]
  misc_feature (1)..(131): Homolog of NCBI NO: 21593644 NR Description: unknown [Arabidopsis thaliana]
  misc_feature (1)..(131): Homolog of NCBI NO: 18401869 NR Description: expressed protein [Arabidopsis thaliana]
MERQSARYNGDTYHLIVKNCNHFCKDICYKLTGKSIPTWVNRLARLGSICNCILPEALRISAVAHDPNYQPHDSEKRRLRSGFNCLSSISMRQKHLSTSSLFLQSPIRGCLSSSWPSSELRKSINRSLKER

SEQ ID NO: 56816 - DNA, 1137 bp, Glycine max
  misc_feature (1)..(1137): Ceres Seq. ID no. 12583413
acacaaacatctctctctctctctctctctctctctctctctaagacacacaaacacaacaaacacatcacaatctcacactgttctcaagtttcaacactttctagttctaccatggcggtaggactctccgccgccataaccatgaagtccctcctccgtttccaccaacctcacctgaacctccccaaatcaatcccaacaacactccctttctcccccatgagaattttccaccacacagcatcaccaagaacccaaaaagtttcaactttcaccgtttgtgtcctcatgcaggacccaaaacaaggcacccacatggaaattgagccacaagaacaatctcctcctcctcctcctcctcccgctcaacaagttctgtcaccaaagttggctgagaaattggccagaaaagagtctgagaggttcacttaccttgttgctgcggtcatgtctagcttcggcatcacatccatggcagtgttcgctgtttattgcagattctcgtggcaaatggagggtggagaagtgccttggtctgaaatgtttggcacatttgctctatcagtgggagctgctgtgggtatggaattttgggctagatgggctcatagggctctctggcatgcttcgctgtggcacatgcatgagtcccaccatcgaccaagagaaggacccttcgagcttaacgatgtatttgcaataatcaacgctgtccctgccatcgctctcctttcctatggtttctttaacaagggactggtccctggcctttgctttggtgcgggtcttggaattacggtctttgggatggcctacatgtttgtacacgatggattggttcataagagattcccggtgggccccattgcaaacgtgccctatctcagaagggtggcctctgctcaccaacttcaccattcggaaaaattcaatggagtgccatatgggctgtttttgggacccaaggaaattgaagaggtgggagggctagaagagctggagaaagagataagtaggagagcaagatcatacaaaatagctaatgagaacaactaatacaaatccagaatgtttcgaagaattatcagtgtaaatcagaaatatgaaataaaatgatccaaaaattttgcttgc

SEQ ID NO: 56817 - protein, 352 aa, Glycine max
  peptide (1)..(352): Ceres Seq. ID no. 12583414
  misc_feature (183)..(341): Pfam Name: Carotene hydroxylase Pfam Description: Carotene hydroxylase
  misc_feature (39)..(344): Homolog of NCBI NO: 21734857 NR Description: beta-carotene hydroxylase [Vitis vinifera]
  misc_feature (39)..(345): Homolog of NCBI NO: 15237204 NR Description: beta-carotene hydroxylase, putative
  misc_feature (63)..(345): Homolog of NCBI NO: 9971820 NR Description: beta hydroxylase [Tagetes erecta]
  misc_feature (83)..(349): Homolog of NCBI NO: 1575296 NR Description: beta-carotene hydroxylase [Arabidopsis thaliana]
  misc_feature (43)..(346): Homolog of NCBI NO: 5870600 NR Description: beta-carotene hydroxylase [Lycopersicon
  misc_feature (39)..(349): Homolog of NCBI NO: 15235959 NR Description: beta-carotene hydroxylase
  misc_feature (40)..(346): Homolog of NCBI NO: 5870598 NR Description: beta-carotene hydroxylase [Lycopersicon
  misc_feature (43)..(346): Homolog of NCBI NO: 2956717 NR Description: beta-carotene hydroxylase 2 [Capsicum annuum]
  misc_feature (39)..(345): Homolog of NCBI NO: 11245486 NR Description: beta-carotene hydroxylase [Citrus unshiu]
  misc_feature (39)..(345): Homolog of NCBI NO: 9988836 NR Description: beta-carotene hydroxylase [Citrus unshiu]
TQTSLSLSLSLSLSKTHKHNKHITISHCSQVSTLSSSTMAVGLSAAITMKSLLRFHQPHLNLPKSIPTTLPFSPMRIFHHTASPRTQKVSTFTVCVLMQDPKQGTHMEIEPQEQSPPPPPPPAQQVLSPKLAEKLARKESERFTYLVAAVMSSFGITSMAVFAVYCRFSWQMEGGEVPWSEMFGTFALSVGAAVGMEFWARWAHRALWHASLWHMHESHHRPREGPFELNDVFAIINAVPAIALLSYGFFNKGLVPGLCFGAGLGITVFGMAYMFVHDGLVHKRFPVGPIANVPYLRRVASAHQLHHSEKFNGVPYGLFLGPKEIEEVGGLEELEKEISRRARSYKIANENN

SEQ ID NO: 56818 - protein, 314 aa, Glycine max
  peptide (1)..(314): Ceres Seq. ID no. 12583415
  misc_feature (145)..(303): Pfam Name: Carotene hydroxylase Pfam Description: Carotene hydroxylase
  misc_feature (1)..(306): Homolog of NCBI NO: 21734857 NR Description: beta-carotene hydroxylase [Vitis vinifera]
  misc_feature (1)..(307): Homolog of NCBI NO: 15237204 NR Description: beta-carotene hydroxylase, putative
  misc_feature (25)..(307): Homolog of NCBI NO: 9971820 NR Description: beta hydroxylase [Tagetes erecta]
  misc_feature (45)..(311): Homolog of NCBI NO: 1575296 NR Description: beta-carotene hydroxylase [Arabidopsis thaliana]
  misc_feature (5)..(308): Homolog of NCBI NO: 5870600 NR Description: beta-carotene hydroxylase [Lycopersicon
  misc_feature (1)..(311): Homolog of NCBI NO: 15235959 NR Description: beta-carotene hydroxylase
  misc_feature (2)..(308): Homolog of NCBI NO: 5870598 NR Description: beta-carotene hydroxylase [Lycopersicon
  misc_feature (5)..(308): Homolog of NCBI NO: 2956717 NR Description: beta-carotene hydroxylase 2 [Capsicum annuum]
  misc_feature (1)..(307): Homolog of NCBI NO: 11245486 NR Description: beta-carotene hydroxylase [Citrus unshiu]
  misc_feature (1)..(307): Homolog of NCBI NO: 9988836 NR Description: beta-carotene hydroxylase [Citrus unshiu]
MAVGLSAAITMKSLLRFHQPHLNLPKSIPTTLPFSPMRIFHHTASPRTQKVSTFTVCVLMQDPKQGTHMEIEPQEQSPPPPPPPAQQVLSPKLAEKLARKESERFTYLVAAVMSSFGITSMAVFAVYCRFSWQMEGGEVPWSEMFGTFALSVGAAVGMEFWARWAHRALWHASLWHMHESHHRPREGPFELNDVFAIINAVPAIALLSYGFFNKGLVPGLCFGAGLGITVFGMAYMFVHDGLVHKRFPVGPIANVPYLRRVASAHQLHHSEKFNGVPYGLFLGPKEIEEVGGLEELEKEISRRARSYKIANENN

SEQ ID NO: 56819 - protein, 304 aa, Glycine max
  peptide (1)..(304): Ceres Seq. ID no. 12583416
  misc_feature (135)..(293): Pfam Name: Carotene hydroxylase Pfam Description: Carotene hydroxylase
  misc_feature (1)..(296): Homolog of NCBI NO: 21734857 NR Description: beta-carotene hydroxylase [Vitis vinifera]
  misc_feature (1)..(297): Homolog of NCBI NO: 15237204 NR Description: beta-carotene hydroxylase, putative
  misc_feature (15)..(297): Homolog of NCBI NO: 9971820 NR Description: beta hydroxylase [Tagetes erecta]
  misc_feature (35)..(301): Homolog of NCBI NO: 1575296 NR Description: beta-carotene hydroxylase [Arabidopsis thaliana]
  misc_feature (1)..(298): Homolog of NCBI NO: 5870600 NR Description: beta-carotene hydroxylase [Lycopersicon
  misc_feature (1)..(301): Homolog of NCBI NO: 15235959 NR Description: beta-carotene hydroxylase
  misc_feature (1)..(298): Homolog of NCBI NO: 5870598 NR Description: beta-carotene hydroxylase [Lycopersicon
  misc_feature (1)..(298): Homolog of NCBI NO: 2956717 NR Description: beta-carotene hydroxylase 2 [Capsicum annuum]
  misc_feature (1)..(297): Homolog of NCBI NO: 11245486 NR Description: beta-carotene hydroxylase [Citrus unshiu]
  misc_feature (1)..(297): Homolog of NCBI NO: 9988836 NR Description: beta-carotene hydroxylase [Citrus unshiu]
MKSLLRFHQPHLNLPKSIPTTLPFSPMRIFHHTASPRTQKVSTFTVCVLMQDPKQGTHMEIEPQEQSPPPPPPPAQQVLSPKLAEKLARKESERFTYLVAAVMSSFGITSMAVFAVYCRFSWQMEGGEVPWSEMFGTFALSVGAAVGMEFWARWAHRALWHASLWHMHESHHRPREGPFELNDVFAIINAVPAIALLSYGFFNKGLVPGLCFGAGLGITVFGMAYMFVHDGLVHKRFPVGPIANVPYLRRVASAHQLHHSEKFNGVPYGLFLGPKEIEEVGGLEELEKEISRRARSYKIANENN

SEQ ID NO: 56820 - DNA, 1543 bp, Glycine max
  misc_feature (1)..(1543): Ceres Seq. ID no. 13639243
agaacaccctaatcgaaaaatttgctagggtcttcccactagcttactcactctcactcgattctcttgttccatctttgtcctcttgttgaactcgtctagtcaacaaggcttgaaaccgatcaagcaagcagtgttttcgtgtgactcggttttatattccggaaatggcgagtttgaacccgttcgatctcttaggagatgacgctgaggatccaagccagattgttttgagtttaccgaagaaggtcgagaaagcagctcctgttcagcctgctaaggccgctaagttcccaaccaagccgtctcctccttctcaagctgtgagggagtcaaggaatggtccttcaggaggtcatggtggtggtggtggacgtgggcctcctcgtggttcgtttaaccccggtggaaacagacctcatgatccaaaggatggagaaaggaacggtgggttccgcggataccgtgaaagtggtggtcgtggaggccacattggtggttttgctaatggtaaaactggtgatgttgaacgtccgaggagggtctatgaccgccgtagtggaactggtcgtagtaatgacgtgaaacgtgagggtggtggtcgtggaaactggggtactcctgaagatgatattcaaccagtaaccgaggaacctacaacggaggttgagaagagccctgttgctgagaaggaaggcggtgaggatgccaccactgatgcaaagaaagaagctcctgaagttgagcaagagcctgaggacaaggagatgacgctggaagagtatgagaagattctggaggagaagaagaaagctctgcaagccacaaaggtggaggaaaggaaagttgacaccaaagtgttcgagtctatgcaacagctctctaacaagaagaccaatgatgaggagatcttcatcaagctgggatccgacaaggacaaacgcaaagatgctgctgagaaagaagagaaggccaagaagtcgttgagcataaacgagtttttgaagccggctaatggagagacctacaacccaagaggtggataccgtggaagaggaggacgcagtggtggtcgtggacagagggatggaaaagtcaacggaggaggaaaccaaaggaatggaggagcctctgctcctgctccagctatcggagacagtgctcagttcccatcgttgggcaactaaagacaccctttctggtccttcaagcatctacctatctatctccactctcttttagtttaattttgttgtcttagttctccatcattttttgttacactttcactacaaaacatgtttggtagctgactttatgatggaaaaacaaaattataatatccttttgtctcmaaatwttwtattcttttbcttttcrarrgaaraaaaaaaaaaaaaaaaaaaaaaaaaaaaaaaaaaaaaaaaaaaaaaaaaaaaattaaaaaaaaaaaaaaaaaggtttatcsaaacccgccamccccgagggggggcccggamcccawtycccccaaaagggggccgaataacgcgggccccggggc

SEQ ID NO: 56821 - protein, 339 aa, Glycine max
  peptide (1)..(339): Ceres Seq. ID no. 15219423
  misc_feature (110)..(276): Pfam Name: Hyaluronan / mRNA binding family Pfam Description: Hyaluronan / mRNA binding family
  misc_feature (33)..(338): Homolog of NCBI NO: 7488863 NR Description: probable transcription factor - fava bean
  misc_feature (26)..(338): Homolog of NCBI NO: 6492266 NR Description: nuclear RNA binding protein A [Spinacia oleracea]
  misc_feature (59)..(338): Homolog of NCBI NO: 39725278 NR Description: salt tolerance protein 2 [Beta vulgaris]
  misc_feature (5)..(338): Homolog of NCBI NO: 39725276 NR Description: salt tolerance protein 1 [Beta vulgaris]
  misc_feature (13)..(338): Homolog of NCBI NO: 15235894 NR Description: nuclear RNA binding protein [Arabidopsis
  misc_feature (13)..(338): Homolog of NCBI NO: 21537052 NR Description: nuclear antigen homolog [Arabidopsis thaliana]
  misc_feature (33)..(338): Homolog of NCBI NO: 21553991 NR Description: nuclear RNA binding protein A-like protein
  misc_feature (33)..(338): Homolog of NCBI NO: 15238039 NR Description: nuclear RNA binding protein, putative
  misc_feature (1)..(338): Homolog of NCBI NO: 15236552 NR Description: nuclear RNA binding protein, putative
  misc_feature (1)..(338): Homolog of NCBI NO: 21593013 NR Description: nuclear RNA binding protein A-like protein
MASLNPFDLLGDDAEDPSQIVLSLPKKVEKAAPVQPAKAAKFPTKPSPPSQAVRESRNGPSGGHGGGGGRGPPRGSFNPGGNRPHDPKDGERNGGFRGYRESGGRGGHIGGFANGKTGDVERPRRVYDRRSGTGRSNDVKREGGGRGNWGTPEDDIQPVTEEPTTEVEKSPVAEKEGGEDATTDAKKEAPEVEQEPEDKEMTLEEYEKILEEKKKALQATKVEERKVDTKVFESMQQLSNKKTNDEEIFIKLGSDKDKRKDAAEKEEKAKKSLSINEFLKPANGETYNPRGGYRGRGGRSGGRGQRDGKVNGGGNQRNGGASAPAPAIGDSAQFPSLGN

SEQ ID NO: 56822 - DNA, 1175 bp, Glycine max
  misc_feature (1)..(1175): Ceres Seq. ID no. 13595598
ataagtggtatagtctaggccaattcatttcactatcttctttttctccctcttctgtttccatttgagtctcctactagcacacagattattgagatccaaagatcttaactatatggtggcaagaagaatctaaagagaaacaaccaaagcttaagcaaacagtcttgtctactgttgaaaaacaggagaaaatgtcttgtaataatggaatgtcttttttcccttcaaatttcatgatccaaacctcttacgaagatctacctccttctctttcacctctccttccttcttgctctatacctcaagatcttcatgggtttgcttcgtttctaggtaagcgatctccagtagaagggttagaagctgggaacattatgaacggagaagaggattattcagatgatgggtctcaaatgggagagaagaagaggagattgaacatggagcaagtgaagacattagagaagaacttcgagcttggaaacaagcttgacccagagaggaaaatgcagttggctcgtgccttgggtttacagccaagacagatagcgatttggtttcagaacagaagagctcgctggaaaacaaagcagcttgagaaagattatgatacacttaaacgacagtttgattcccttaaagctgaaaacgatcatcttcaaactcacaaccagaaactccaagctgagataatgagttcaaggaacagagaacaaacagaatcaataaatctgaacaaagaaacagaaggatcttgcagtaacagaagcgacaacagttccgataatttcaggctggacatctcgacggctgtgccatcagtagacagcacaataacaggcggccatccaccagcgccacagactgttggtcgacacttctttccaccagcgaccgcgacgaccaccacaacgactatgcaattctttcaaaactcgtcttctggtcagagtatggttaaagaagaaaacagtatcagtaacatgttctgtgcaatggatgaccactcaggtttttggccatggcttgatcagcaacagtacaactgaaactggtcgacctgtttttatttctttcaaagtttttatatattttgttttgtttttttgttttgatatcagaaagaacatgcatgtttcaaaaacttggaatctatcattcacttttgagtt

SEQ ID NO: 56823 - protein, 285 aa, Glycine max
  peptide (1)..(285): Ceres Seq. ID no. 13595599
  misc_feature (78)..(132): Pfam Name: Homeobox domain Pfam Description: Homeobox domain
  misc_feature (7)..(280): Homolog of NCBI NO: 15232066 NR Description: Homeobox-leucine zipper protein/HD-Zip
  misc_feature (78)..(273): Homolog of NCBI NO: 6175248 NR Description: jasmonic acid 1 [Lycopersicon esculentum]
  misc_feature (37)..(283): Homolog of NCBI NO: 7446243 NR Description: homeotic protein - carrot
  misc_feature (24)..(219): Homolog of NCBI NO: 19071644 NR Description: putative DNA-binding protein
  misc_feature (43)..(231): Homolog of NCBI NO: 25386233 NR Description: hypothetical protein T2P11.15 - Arabidopsis
  misc_feature (47)..(285): Homolog of NCBI NO: 1435022 NR Description: DNA-binding protein [Daucus carota]
  misc_feature (1)..(231): Homolog of NCBI NO: 18396130 NR Description: homeobox-leucine zipper protein. putative
  misc_feature (1)..(285): Homolog of NCBI NO: 7446247 NR Description: homeotic protein - common sunflower
  misc_feature (7)..(285): Homolog of NCBI NO: 21555784 NR Description: homeobox gene 13 protein [Arabidopsis thaliana]
  misc_feature (1)..(285): Homolog of NCBI NO: 15222452 NR Description: homeobox-leucine zipper protein ATHB-13 (HD-Zip
MSCNNGMSFFPSNFMIQTSYEDLPPSLSPLLPSCSIPQDLHGFASFLGKRSPVEGLEAGNIMNGEEDYSDDGSQMGEKKRRLNMEQVKTLEKNFELGNKLDPERKMQLARALGLQPRQIAIWFQNRRARWKTKQLEKDYDTLKRQFDSLKAENDHLQTHNQKLQAEIMSSRNREQTESINLNKETEGSCSNRSDNSSDNFRLDISTAVPSVDSTITGGHPPAPQTVGRHFFPPATATTTTTTMQFFQNSSSGQSMVKEENSISNMFCAMDDHSGFWPWLDQQQYN

SEQ ID NO: 56824 - protein, 279 aa, Glycine max
  peptide (1)..(279): Ceres Seq. ID no. 13595600
  misc_feature (72)..(126): Pfam Name: Homeobox domain Pfam Description: Homeobox domain
  misc_feature (1)..(274): Homolog of NCBI NO: 15232066 NR Description: Homeobox-leucine zipper protein/HD-Zip
  misc_feature (72)..(267): Homolog of NCBI NO: 6175248 NR Description: jasmonic acid 1 [Lycopersicon esculentum]
  misc_feature (31)..(277): Homolog of NCBI NO: 7446243 NR Description: homeotic protein - carrot
  misc_feature (18)..(213): Homolog of NCBI NO: 19071644 NR Description: putative DNA-binding protein
  misc_feature (37)..(225): Homolog of NCBI NO: 25386233 NR Description: hypothetical protein T2P11.15 - Arabidopsis
  misc_feature (41)..(279): Homolog of NCBI NO: 1435022 NR Description: DNA-binding protein [Daucus carota]
  misc_feature (1)..(225): Homolog of NCBI NO: 18396130 NR Description: homeobox-leucine zipper protein. putative
  misc_feature (1)..(279): Homolog of NCBI NO: 7446247 NR Description: homeotic protein - common sunflower
  misc_feature (1)..(279): Homolog of NCBI NO: 21555784 NR Description: homeobox gene 13 protein [Arabidopsis thaliana]
  misc_feature (1)..(279): Homolog of NCBI NO: 15222452 NR Description: homeobox-leucine zipper protein ATHB-13 (HD-Zip
MSFFPSNFMIQTSYEDLPPSLSPLLPSCSIPQDLHGFASFLGKRSPVEGLEAGNIMNGEEDYSDDGSQMGEKKRRLNMEQVKTLEKNFELGNKLDPERKMQLARALGLQPRQIAIWFQNRRARWKTKQLEKDYDTLKRQFDSLKAENDHLQTHNQKLQAEIMSSRNREQTESINLNKETEGSCSNRSDNSSDNFRLDISTAVPSVDSTITGGHPPAPQTVGRHFFPPATATTTTTTMQFFQNSSSGQSMVKEENSISNMFCAMDDHSGFWPWLDQQQYN

SEQ ID NO: 56825 - protein, 271 aa, Glycine max
  peptide (1)..(271): Ceres Seq. ID no. 13595601
  misc_feature (64)..(118): Pfam Name: Homeobox domain Pfam Description: Homeobox domain
  misc_feature (1)..(266): Homolog of NCBI NO: 15232066 NR Description: Homeobox-leucine zipper protein/HD-Zip
  misc_feature (64)..(259): Homolog of NCBI NO: 6175248 NR Description: jasmonic acid 1 [Lycopersicon esculentum]
  misc_feature (23)..(269): Homolog of NCBI NO: 7446243 NR Description: homeotic protein - carrot
  misc_feature (10)..(205): Homolog of NCBI NO: 19071644 NR Description: putative DNA-binding protein
  misc_feature (29)..(217): Homolog of NCBI NO: 25386233 NR Description: hypothetical protein T2P11.15 - Arabidopsis
  misc_feature (33)..(271): Homolog of NCBI NO: 1435022 NR Description: DNA-binding protein [Daucus carota]
  misc_feature (1)..(217): Homolog of NCBI NO: 18396130 NR Description: homeobox-leucine zipper protein. putative
  misc_feature (1)..(271): Homolog of NCBI NO: 7446247 NR Description: homeotic protein - common sunflower
  misc_feature (1)..(271): Homolog of NCBI NO: 21555784 NR Description: homeobox gene 13 protein [Arabidopsis thaliana]
  misc_feature (1)..(271): Homolog of NCBI NO: 15222452 NR Description: homeobox-leucine zipper protein ATHB-13 (HD-Zip
MIQTSYEDLPPSLSPLLPSCSIPQDLHGFASFLGKRSPVEGLEAGNIMNGEEDYSDDGSQMGEKKRRLNMEQVKTLEKNFELGNKLDPERKMQLARALGLQPRQIAIWFQNRRARWKTKQLEKDYDTLKRQFDSLKAENDHLQTHNQKLQAEIMSSRNREQTESINLNKETEGSCSNRSDNSSDNFRLDISTAVPSVDSTITGGHPPAPQTVGRHFFPPATATTTTTTMQFFQNSSSGQSMVKEENSISNMFCAMDDHSGFWPWLDQQQYN

SEQ ID NO: 56826 - DNA, 1454 bp, Glycine max
  misc_feature (1)..(1454): Ceres Seq. ID no. 12611392
atatactgttattagttacatacatagagatatagtcaatggcaattgcagcggcaaactcatcacccaccatgagcctcagccatagccagagccaagaggatgccaccaccaacgacaacaagcccgtcgtcgtcgacgatgatcacgagcacgacatggtcatgcccggctttcgcttccacccaactgaagaagagctcgtggagttctaccttcgccgtaaggtggagggaaagcgtttcaacgttgagcttattactttcctcgatctttatcgctatgacccttgggagcttcccgccttggcagctattggtgagaaggagtggtacttctatgtgcccagagataggaagtatcgcaacggtgatcgtcccaatcgcgttactacctctgggtattggaaggcaacaggagctgataggatgatccgaaccgagaattttcgctctatcggcctcaagaaaaccctagttttctattctgggaaagctcctaaaggcattcgaaccagttggattatgaacgagtatcgcttgccgcaacatgaaactgaacgatatcaaaaggctgagatatcgctttgccgtgtgtacaagagagctggagtcgaagaccatccttccctccctcgctgcctcccacgaggccatcctcatcatcaagggcttcttctgatcacatcaataataataagtcgacgaagcacaatgaaatggttcaacaccacaacatcaacatgggattcatgggacaatcaaagccgccaacaactgaacacatagttgacaaaattaatgaatcggaagcaagcagtgatgtcaacacaactcttggactttctaaatacaatgcttaccgtgctgccaccatggcgcttccagttgttccaatggatgaggaagccttgatgatgatgcagcaatctaagcaagctgctgctgcagcagcacatgttccaacaatcttctctgctgggccttctagttccaacaacagtggagtagtgaatatggatgatctgaataggctaatgagttatcaacatcagtactacaatgttcaaagccaaagccatcccaatcagttctctactttgctgatgcaaccttcaccaatagtgtctctcagctcgctaccaaatccacttccacccaccttctctgaccgactctgggactggaatccaatccctgagtcaccaagtcaagagtacagcaacatatccttcaagtaatatgactcatcaattatatctgtgaactgcacatacacacatatatatacatatatattatagatagagacatttatctgtgctaatttctactatcaattttatgtaggttgtacgttttcgttactctctaattaatctggtatcttattttatatttcaataagataattgtatgacttactttgatcaatgatcaatatgtatttgtcgg

SEQ ID NO: 56827 - protein, 249 aa, Glycine max
  peptide (1)..(249): Ceres Seq. ID no. 12611393
  misc_feature (42)..(169): Pfam Name: No apical meristem (NAM) protein Pfam Description: No apical meristem (NAM) protein
  misc_feature (31)..(169): Homolog of NCBI NO: 10177980 NR Description: NAM (no apical meristem)-like protein
  misc_feature (35)..(189): Homolog of NCBI NO: 25518578 NR Description: hypothetical protein T2P11.6 - Arabidopsis
  misc_feature (35)..(189): Homolog of NCBI NO: 15223376 NR Description: putative NAM protein; protein id: At1g26870.1
  misc_feature (40)..(190): Homolog of NCBI NO: 25411775 NR Description: NAM (no apical meristem)-like protein
  misc_feature (34)..(242): Homolog of NCBI NO: 15224202 NR Description: NAM (no apical meristem)-like protein; protein
  misc_feature (79)..(209): Homolog of NCBI NO: 21450867 NR Description: putative NAM protein [Arabidopsis thaliana]
  misc_feature (28)..(181): Homolog of NCBI NO: 34907482 NR Description: OsNAC6-like protein [Oryza sativa (japonica
  misc_feature (16)..(178): Homolog of NCBI NO: 25410986 NR Description: NAM (no apical meristem)-like protein
  misc_feature (16)..(209): Homolog of NCBI NO: 30678002 NR Description: No apical meristem (NAM) protein family
  misc_feature (16)..(209): Homolog of NCBI NO: 30678000 NR Description: No apical meristem (NAM) protein family
MAIAAANSSPTMSLSHSQSQEDATTNDNKPVVVDDDHEHDMVMPGFRFHPTEEELVEFYLRRKVEGKRFNVELITFLDLYRYDPWELPALAAIGEKEWYFYVPRDRKYRNGDRPNRVTTSGYWKATGADRMIRTENFRSIGLKKTLVFYSGKAPKGIRTSWIMNEYRLPQHETERYQKAEISLCRVYKRAGVEDHPSLPRCLPRGHPHHQGLLLITSIIISRRSTMKWFNTTTSTWDSWDNQSRQQLNT

SEQ ID NO: 56828 - protein, 238 aa, Glycine max
  peptide (1)..(238): Ceres Seq. ID no. 12611394
  misc_feature (31)..(158): Pfam Name: No apical meristem (NAM) protein Pfam Description: No apical meristem (NAM) protein
  misc_feature (20)..(158): Homolog of NCBI NO: 10177980 NR Description: NAM (no apical meristem)-like protein
  misc_feature (24)..(178): Homolog of NCBI NO: 25518578 NR Description: hypothetical protein T2P11.6 - Arabidopsis
  misc_feature (24)..(178): Homolog of NCBI NO: 15223376 NR Description: putative NAM protein; protein id: At1g26870.1
  misc_feature (29)..(179): Homolog of NCBI NO: 25411775 NR Description: NAM (no apical meristem)-like protein
  misc_feature (23)..(231): Homolog of NCBI NO: 15224202 NR Description: NAM (no apical meristem)-like protein; protein
  misc_feature (68)..(198): Homolog of NCBI NO: 21450867 NR Description: putative NAM protein [Arabidopsis thaliana]
  misc_feature (17)..(170): Homolog of NCBI NO: 34907482 NR Description: OsNAC6-like protein [Oryza sativa (japonica
  misc_feature (5)..(167): Homolog of NCBI NO: 25410986 NR Description: NAM (no apical meristem)-like protein
  misc_feature (5)..(198): Homolog of NCBI NO: 30678002 NR Description: No apical meristem (NAM) protein family
  misc_feature (5)..(198): Homolog of NCBI NO: 30678000 NR Description: No apical meristem (NAM) protein family
MSLSHSQSQEDATTNDNKPVVVDDDHEHDMVMPGFRFHPTEEELVEFYLRRKVEGKRFNVELITFLDLYRYDPWELPALAAIGEKEWYFYVPRDRKYRNGDRPNRVTTSGYWKATGADRMIRTENFRSIGLKKTLVFYSGKAPKGIRTSWIMNEYRLPQHETERYQKAEISLCRVYKRAGVEDHPSLPRCLPRGHPHHQGLLLITSIIISRRSTMKWFNTTTSTWDSWDNQSRQQLNT

SEQ ID NO: 56829 - protein, 209 aa, Glycine max
  peptide (1)..(209): Ceres Seq. ID no. 12611395
  misc_feature (2)..(129): Pfam Name: No apical meristem (NAM) protein Pfam Description: No apical meristem (NAM) protein
  misc_feature (1)..(129): Homolog of NCBI NO: 10177980 NR Description: NAM (no apical meristem)-like protein
  misc_feature (1)..(149): Homolog of NCBI NO: 25518578 NR Description: hypothetical protein T2P11.6 - Arabidopsis
  misc_feature (1)..(149): Homolog of NCBI NO: 15223376 NR Description: putative NAM protein; protein id: At1g26870.1
  misc_feature (1)..(150): Homolog of NCBI NO: 25411775 NR Description: NAM (no apical meristem)-like protein
  misc_feature (1)..(202): Homolog of NCBI NO: 15224202 NR Description: NAM (no apical meristem)-like protein; protein
  misc_feature (39)..(169): Homolog of NCBI NO: 21450867 NR Description: putative NAM protein [Arabidopsis thaliana]
  misc_feature (1)..(141): Homolog of NCBI NO: 34907482 NR Description: OsNAC6-like protein [Oryza sativa (japonica
  misc_feature (1)..(138): Homolog of NCBI NO: 25410986 NR Description: NAM (no apical meristem)-like protein
  misc_feature (1)..(169): Homolog of NCBI NO: 30678002 NR Description: No apical meristem (NAM) protein family
  misc_feature (1)..(169): Homolog of NCBI NO: 30678000 NR Description: No apical meristem (NAM) protein family
MVMPGFRFHPTEEELVEFYLRRKVEGKRFNVELITFLDLYRYDPWELPALAAIGEKEWYFYVPRDRKYRNGDRPNRVTTSGYWKATGADRMIRTENFRSIGLKKTLVFYSGKAPKGIRTSWIMNEYRLPQHETERYQKAEISLCRVYKRAGVEDHPSLPRCLPRGHPHHQGLLLITSIIISRRSTMKWFNTTTSTWDSWDNQSRQQLNT

SEQ ID NO: 56830 - DNA, 1539 bp, Glycine max
  misc_feature (1)..(1539): Ceres Seq. ID no. 14314782
aacaacaaaggtgtttcagcaaaataattatttatgtcataaagttgttccaactgaagatgcgaaggctttttctctctctctaaaagcagtggccatcatgttctcttcctaaaccctttcaatcatcatttagctctgaaaaaaataatagaaattaaaacgaaaaatgtcctggctcttcaagtccaaccaccctgacccagaatcttctaatctccacaaccgcaccgttatccactcgtcttcgccgccgcatcccgccgccgatcgccacggcgtcaaggacgacatatcgcatattttccgcggcgtcgccaacttcctcgctccgccgccgccgtcttcctcttcctcttcttcttcttcttcttcttcctcctccgccggcgattcctcctcctcgcaagctctgtcaggaatccggaacgatctcgtggagatcggcggaagcttcaaaaactctctctcgcgcatttcctcgaacaaagccgtcaccggaatctccaagctcgcttcgcagttgttgcagttggagcctgatcaacaacggagcaacgatgacgacgcggtgcctggaacgacggaagatgttgttcgtttcgtgaaggagatttctgcgcggcctcagtgttggactgaattccccttgccactccataacgattttagcatgtccaattctcagagagaacatgcattggctatagagcaactggtacccgaattcattgcactaagactgaatctttgcagttacatgaatgtggaaaagttttggatgatctattttttgttaatacttccaagactaaatcagcatgattttgagcgcctatcaactcccaagaaactaggagagaggaaaaatttgcaagctggagaacctgaaaacccaaggactgtggatacatatcaagagggtagggaggaccgtggaacagaaagtatctcatttgagcaaaatcagatattgactgaggttacaaacgcagtagagggtttagaagttgatgacacggttagcactgaaaaatggttggaagatacagacattgatgctagttcattggcttcctgtacaaaacttcaacaggaagaggacgtctcattcagtgacctagaggatgataggagttatagctccgataaattatctggctacagggaggcgcatgacataaggggttcatcacctgaaggtgctactagtgactgggttcggctgcgtgaaagttctgagagagatggcaggaagaaggttatccgtttgaagggtaaggattcagaagatgagtcaaatgattggctcactgttgatgatttcaattagatagtcttttcttgattcaccaagttgtaaaggttcgatatttacccccttccccgtggttctgtatttagggagtacaaaattatataaatcaaagtatttcttttcttattcacacgtacatatttcttgtttgtacaaggcattgggtagacaacattcaatttttgaaagtgtacaacgcaaataaaatcaaggatttcaag

SEQ ID NO: 56831 - protein, 387 aa, Glycine max
  peptide (1)..(387): Ceres Seq. ID no. 14314783
  misc_feature (166)..(211): Pfam Name: BSD domain Pfam Description: BSD domain
  misc_feature (1)..(166): Homolog of NCBI NO: 7486518 NR Description: hypothetical protein F6H11.10 - Arabidopsis
  misc_feature (165)..(387): Homolog of NCBI NO: 7486518 NR Description: hypothetical protein F6H11.10 - Arabidopsis
  misc_feature (37)..(387): Homolog of NCBI NO: 18425006 NR Description: expressed protein [Arabidopsis thaliana]
  misc_feature (13)..(264): Homolog of NCBI NO: 15229611 NR Description: expressed protein [Arabidopsis thaliana]
  misc_feature (10)..(137): Homolog of NCBI NO: 28273391 NR Description: putative BSD domain containing protein
  misc_feature (114)..(362): Homolog of NCBI NO: 28273391 NR Description: putative BSD domain containing protein
  misc_feature (1)..(381): Homolog of NCBI NO: 34909848 NR Description: OSJNBb0053G03.5 [Oryza sativa (japonica
  misc_feature (29)..(289): Homolog of NCBI NO: 25411374 NR Description: hypothetical protein At2g10950 [imported] -
  misc_feature (29)..(356): Homolog of NCBI NO: 21592796 NR Description: unknown [Arabidopsis thaliana]
  misc_feature (29)..(356): Homolog of NCBI NO: 18396945 NR Description: expressed protein [Arabidopsis thaliana]
MSWLFKSNHPDPESSNLHNRTVIHSSSPPHPAADRHGVKDDISHIFRGVANFLAPPPPSSSSSSSSSSSSSSAGDSSSSQALSGIRNDLVEIGGSFKNSLSRISSNKAVTGISKLASQLLQLEPDQQRSNDDDAVPGTTEDVVRFVKEISARPQCWTEFPLPLHNDFSMSNSQREHALAIEQLVPEFIALRLNLCSYMNVEKFWMIYFLLILPRLNQHDFERLSTPKKLGERKNLQAGEPENPRTVDTYQEGREDRGTESISFEQNQILTEVTNAVEGLEVDDTVSTEKWLEDTDIDASSLASCTKLQQEEDVSFSDLEDDRSYSSDKLSGYREAHDIRGSSPEGATSDWVRLRESSERDGRKKVIRLKGKDSEDESNDWLTVDDFN

SEQ ID NO: 56832 - protein, 219 aa, Glycine max
  peptide (1)..(219): Ceres Seq. ID no. 14314784
  misc_feature (1)..(43): Pfam Name: BSD domain Pfam Description: BSD domain
  misc_feature (1)..(74): Homolog of NCBI NO: 18391195 NR Description: expressed protein [Arabidopsis thaliana]
  misc_feature (1)..(74): Homolog of NCBI NO: 21555533 NR Description: unknown [Arabidopsis thaliana]
  misc_feature (1)..(219): Homolog of NCBI NO: 7486518 NR Description: hypothetical protein F6H11.10 - Arabidopsis
  misc_feature (1)..(219): Homolog of NCBI NO: 18425006 NR Description: expressed protein [Arabidopsis thaliana]
  misc_feature (1)..(96): Homolog of NCBI NO: 15229611 NR Description: expressed protein [Arabidopsis thaliana]
  misc_feature (1)..(194): Homolog of NCBI NO: 28273391 NR Description: putative BSD domain containing protein
  misc_feature (1)..(213): Homolog of NCBI NO: 34909848 NR Description: OSJNBb0053G03.5 [Oryza sativa (japonica
  misc_feature (1)..(121): Homolog of NCBI NO: 25411374 NR Description: hypothetical protein At2g10950 [imported] -
  misc_feature (1)..(188): Homolog of NCBI NO: 21592796 NR Description: unknown [Arabidopsis thaliana]
  misc_feature (1)..(188): Homolog of NCBI NO: 18396945 NR Description: expressed protein [Arabidopsis thaliana]
MSNSQREHALAIEQLVPEFIALRLNLCSYMNVEKFWMIYFLLILPRLNQHDFERLSTPKKLGERKNLQAGEPENPRTVDTYQEGREDRGTESISFEQNQILTEVTNAVEGLEVDDTVSTEKWLEDTDIDASSLASCTKLQQEEDVSFSDLEDDRSYSSDKLSGYREAHDIRGSSPEGATSDWVRLRESSERDGRKKVIRLKGKDSEDESNDWLTVDDFN

SEQ ID NO: 56833 - DNA, 922 bp, Glycine max
  misc_feature (1)..(922): Ceres Seq. ID no. 14306325
aatcgtctccaccttgctttcttctccaatgtccgattctctcaccgatcttgcgccaaatacaaattcgttacatcctaacccagggttccgacgagcatggtggacggtccgacgagtccaggcaatggtagccatgagagtggcgagcatagccctcgctctaacgtgcgcgagtaggacaggtacctccccatcgctaacataagccccatcatgaagaaggcactacctacgaatggtaaaatcgccaaggacgccaaagagactgttcaggaatgcttatccgagtttttaagatcaacctttcagacacatgtattgagatggatggattacattcagcacaagcaagaatttgtaggtttatttgagaaaatattgttgcagaagcctggatttgagcccccggtaacacatcctgttggagttgtggaagctgatttaaaatcaaacaacactgagcaaagcgtaaagaatgtcagcaagtccgaagtagactcaagcaaggataaaaacaaagttgaggattgacggaaaagaaacagccggataagattacaccggtattttctttgcactcgttaactttgcatttttaaaattcataactcatgttttgtttaagggtgaagatttaacattcaacatgagtctaaaggtggggaacatgagtttagtggttgcattggagcagtatatcagcttctttcagagataaagttcctggatggatgaaagatactttttttgtgagtttgtattgttaaggcatagtattttgttatcttttgaagatcaattcttattatagtttaactagtaaatttttattcttttcttttagcctattcttatttttttctcttgttaaaaatcatagtaatgttatatggtgcaatttatggttttaggagtgcac

SEQ ID NO: 56834 - protein, 105 aa, Glycine max
  peptide (1)..(105): Ceres Seq. ID no. 14306326
  misc_feature (1)..(27): Homolog of NCBI NO: 30409459 NR Description: NF-YB [Oryza sativa (japonica cultivar-group)]
  misc_feature (1)..(27): Homolog of NCBI NO: 30687688 NR Description: CCAAT-binding transcription factor subunit
  misc_feature (1)..(27): Homolog of NCBI NO: 25299604 NR Description: hypothetical protein At2g38880 [imported] -
  misc_feature (1)..(27): Homolog of NCBI NO: 18404885 NR Description: CCAAT-binding transcription factor subunit
  misc_feature (1)..(27): Homolog of NCBI NO: 25408527 NR Description: probable CCAAT-box binding trancription factor
  misc_feature (1)..(27): Homolog of NCBI NO: 30687025 NR Description: CCAAT-box binding trancription factor -related
  misc_feature (1)..(27): Homolog of NCBI NO: 17979253 NR Description: At2g37060/T2N18.18 [Arabidopsis thaliana]
  misc_feature (1)..(27): Homolog of NCBI NO: 15231796 NR Description: transcription factor NF-Y, CCAAT-binding - like
  misc_feature (1)..(27): Homolog of NCBI NO: 115840 NR Description: CCAAT-BINDING TRANSCRIPTION FACTOR SUBUNIT A (NF-Y PROTEIN CHAIN B) (NF-YB) (CAAT-BOX DNA BINDING PROTEIN
  misc_feature (1)..(27): Homolog of NCBI NO: 22380 NR Description: CAAT-box DNA binding protein subunit B (NF-YB)
MKKALPTNGKIAKDAKETVQECLSEFLRSTFQTHVLRWMDYIQHKQEFVGLFEKILLQKPGFEPPVTHPVGVVEADLKSNNTEQSVKNVSKSEVDSSKDKNKVED

SEQ ID NO: 56835 - protein, 68 aa, Glycine max
  peptide (1)..(68): Ceres Seq. ID no. 14306327
IVSTLLSSPMSDSLTDLAPNTNSLHPNPGFRRAWWTVRRVQAMVAMRVASIALALTCASRTGTSPSLT

SEQ ID NO: 56836 - protein, 67 aa, Glycine max
  peptide (1)..(67): Ceres Seq. ID no. 14306328
  misc_feature (1)..(62): Homolog of NCBI NO: 19114551 NR Description: php3 transcriptional activator
  misc_feature (1)..(25): Homolog of NCBI NO: 15219151 NR Description: CCAAT-box binding factor HAP3 homolog
  misc_feature (1)..(25): Homolog of NCBI NO: 3282674 NR Description: CCAAT-box binding factor HAP3 homolog
  misc_feature (1)..(45): Homolog of NCBI NO: 22536010 NR Description: LEC1-like protein [Phaseolus coccineus]
  misc_feature (1)..(34): Homolog of NCBI NO: 30349365 NR Description: leafy cotyledon 1 [Oryza sativa (indica
  misc_feature (1)..(60): Homolog of NCBI NO: 6319450 NR Description: Regulates respiratory functions
MDYIQHKQEFVGLFEKILLQKPGFEPPVTHPVGVVEADLKSNNTEQSVKNVSKSEVDSSKDKNKVED

SEQ ID NO: 56837 - DNA, 1583 bp, Glycine max
  misc_feature (1)..(1583): Ceres Seq. ID no. 14314792
cctttattctccgtttctggtccgccccttcccttctcttcccatctcatctaaatctcaatctctgtctctgtctctgtccgcctcagctttcactccaaaccctaaccaaccgatctctttcgccgatcccggaaaccttccgaatcgtttaattgacgctacgccgtggaatctgggcggaacaaatccacgatggcggcctccaccaccagccaggtctacatccaggtaatcgacgatgtcatgaacaaggtccgcgacgagttcgtcaacaacggtggtcccggcgacgaagttctcaaggagcttcaatctatatgggaatcgaagatgatgcaagctggtgccattgttggtcccatagaaaggtccggggcgcctaagccaacgcccggtggtccaattactccggttcatgatcttaacatgccttatgaggggactgaggagtatgaaactcccacagcggaaatgcttttcccccctacgccattgcaaactcctcttcaaacccctttaccaggaactgtggataactcaatgtataacattcccactggacctagtgactacccgtctgctggaaatgagcctggtgcaaataacgagataaaaggtggaaggcctggtccatacatgcaacctcctccttcaacgtggacgaaccagaaccagaaccaaagggctccacttgacgtcaatgttgcttacgtggaagggcgggatgaggcggaaagaggagcttcaaatcaacctctgacacaggacttcttcatgtcctcggggaagcggaaacgtgatgaaattgcttctcaatataatgctggtggatatatacctcagcaagatggagctggagatgctgcttctcaaatttttgaaattgaagtgtatggagggggcatgtccattgatgcaggtcactctacttctaaaggaaaaatgccagcacaatcagacaggccagcttctcagattcctcaacttgatggaccaattccctacgatgatgatgtgctttctactccaaatatatacaattatggagtgttcaatgaagactacaacattgcaaatacaccagctccttccgaagtaccagcaagtacccctgctcccattgctcaaaatgaggttgatgaagaagatgatgatgatgagccccccctaaatgaaaatgatgatgatgatttggatgatttggatcagggagaggatcaaaatacacatcatcttgttttggcccagtttgacaaggtgacacgtaccaagagtagatggaagtgcaccctaaaggatggtatcatgcatataaataataaggacattctcttcaataaggcaactggagaatttgacttctgattttgtcagggattggtcttgccatttttgtggcagtgctttggtgaattacaggtactctgaggcatttcctgaagtttgccatttgtcaagtgggatatgtatgtctattagctctgcatacttggacagtttaaactgcagtgactctcgtggttagttttttagccgtcataaagaacaacgataatgtcaagtttgcttttcttggttcc

SEQ ID NO: 56838 - protein, 390 aa, Glycine max
  peptide (1)..(390): Ceres Seq. ID no. 14314793
  misc_feature (4)..(390): Pfam Name: Transcription factor IIA, alpha/beta subunit Pfam Description: Transcription factor IIA, alpha/beta subunit
  misc_feature (312)..(390): Homolog of NCBI NO: 34099900 NR Description: transcription factor IIA large subunit-1 [Xenopus
  misc_feature (1)..(66): Homolog of NCBI NO: 15237841 NR Description: hypothetical protein [Arabidopsis thaliana]
  misc_feature (311)..(390): Homolog of NCBI NO: 15237841 NR Description: hypothetical protein [Arabidopsis thaliana]
  misc_feature (171)..(390): Homolog of NCBI NO: 17065294 NR Description: similar to TFIIA [Arabidopsis thaliana]
  misc_feature (241)..(390): Homolog of NCBI NO: 1429226 NR Description: TFIIA [Arabidopsis thaliana]
  misc_feature (4)..(182): Homolog of NCBI NO: 1429226 NR Description: TFIIA [Arabidopsis thaliana]
  misc_feature (4)..(389): Homolog of NCBI NO: 25406976 NR Description: protein F22G5.18 [imported] - Arabidopsis
  misc_feature (4)..(383): Homolog of NCBI NO: 25406978 NR Description: protein F22G5.14 [imported] - Arabidopsis
  misc_feature (4)..(390): Homolog of NCBI NO: 18390773 NR Description: transcription factor IIA large subunit
  misc_feature (4)..(390): Homolog of NCBI NO: 30680148 NR Description: transcription factor IIA large subunit
MAASTTSQVYIQVIDDVMNKVRDEFVNNGGPGDEVLKELQSIWESKMMQAGAIVGPIERSGAPKPTPGGPITPVHDLNMPYEGTEEYETPTAEMLFPPTPLQTPLQTPLPGTVDNSMYNIPTGPSDYPSAGNEPGANNEIKGGRPGPYMQPPPSTWTNQNQNQRAPLDVNVAYVEGRDEAERGASNQPLTQDFFMSSGKRKRDEIASQYNAGGYIPQQDGAGDAASQIFEIEVYGGGMSIDAGHSTSKGKMPAQSDRPASQIPQLDGPIPYDDDVLSTPNIYNYGVFNEDYNIANTPAPSEVPASTPAPIAQNEVDEEDDDDEPPLNENDDDDLDDLDQGEDQNTHHLVLAQFDKVTRTKSRWKCTLKDGIMHINNKDILFNKATGEFDF

SEQ ID NO: 56839 - protein, 373 aa, Glycine max
  peptide (1)..(373): Ceres Seq. ID no. 14314794
  misc_feature (1)..(373): Pfam Name: Transcription factor IIA, alpha/beta subunit Pfam Description: Transcription factor IIA, alpha/beta subunit
  misc_feature (295)..(373): Homolog of NCBI NO: 34099900 NR Description: transcription factor IIA large subunit-1 [Xenopus
  misc_feature (1)..(49): Homolog of NCBI NO: 15237841 NR Description: hypothetical protein [Arabidopsis thaliana]
  misc_feature (294)..(373): Homolog of NCBI NO: 15237841 NR Description: hypothetical protein [Arabidopsis thaliana]
  misc_feature (154)..(373): Homolog of NCBI NO: 17065294 NR Description: similar to TFIIA [Arabidopsis thaliana]
  misc_feature (224)..(373): Homolog of NCBI NO: 1429226 NR Description: TFIIA [Arabidopsis thaliana]
  misc_feature (1)..(165): Homolog of NCBI NO: 1429226 NR Description: TFIIA [Arabidopsis thaliana]
  misc_feature (1)..(372): Homolog of NCBI NO: 25406976 NR Description: protein F22G5.18 [imported] - Arabidopsis
  misc_feature (1)..(366): Homolog of NCBI NO: 25406978 NR Description: protein F22G5.14 [imported] - Arabidopsis
  misc_feature (1)..(373): Homolog of NCBI NO: 18390773 NR Description: transcription factor IIA large subunit
  misc_feature (1)..(373): Homolog of NCBI NO: 30680148 NR Description: transcription factor IIA large subunit
MNKVRDEFVNNGGPGDEVLKELQSIWESKMMQAGAIVGPIERSGAPKPTPGGPITPVHDLNMPYEGTEEYETPTAEMLFPPTPLQTPLQTPLPGTVDNSMYNIPTGPSDYPSAGNEPGANNEIKGGRPGPYMQPPPSTWTNQNQNQRAPLDVNVAYVEGRDEAERGASNQPLTQDFFMSSGKRKRDEIASQYNAGGYIPQQDGAGDAASQIFEIEVYGGGMSIDAGHSTSKGKMPAQSDRPASQIPQLDGPIPYDDDVLSTPNIYNYGVFNEDYNIANTPAPSEVPASTPAPIAQNEVDEEDDDDEPPLNENDDDDLDDLDQGEDQNTHHLVLAQFDKVTRTKSRWKCTLKDGIMHINNKDILFNKATGEFDF

SEQ ID NO: 56840 - protein, 344 aa, Glycine max
  peptide (1)..(344): Ceres Seq. ID no. 14314795
  misc_feature (1)..(344): Pfam Name: Transcription factor IIA, alpha/beta subunit Pfam Description: Transcription factor IIA, alpha/beta subunit
  misc_feature (266)..(344): Homolog of NCBI NO: 34099900 NR Description: transcription factor IIA large subunit-1 [Xenopus
  misc_feature (1)..(20): Homolog of NCBI NO: 15237841 NR Description: hypothetical protein [Arabidopsis thaliana]
  misc_feature (265)..(344): Homolog of NCBI NO: 15237841 NR Description: hypothetical protein [Arabidopsis thaliana]
  misc_feature (125)..(344): Homolog of NCBI NO: 17065294 NR Description: similar to TFIIA [Arabidopsis thaliana]
  misc_feature (195)..(344): Homolog of NCBI NO: 1429226 NR Description: TFIIA [Arabidopsis thaliana]
  misc_feature (1)..(136): Homolog of NCBI NO: 1429226 NR Description: TFIIA [Arabidopsis thaliana]
  misc_feature (1)..(343): Homolog of NCBI NO: 25406976 NR Description: protein F22G5.18 [imported] - Arabidopsis
  misc_feature (1)..(337): Homolog of NCBI NO: 25406978 NR Description: protein F22G5.14 [imported] - Arabidopsis
  misc_feature (1)..(344): Homolog of NCBI NO: 18390773 NR Description: transcription factor IIA large subunit
  misc_feature (1)..(344): Homolog of NCBI NO: 30680148 NR Description: transcription factor IIA large subunit
MMQAGAIVGPIERSGAPKPTPGGPITPVHDLNMPYEGTEEYETPTAEMLFPPTPLQTPLQTPLPGTVDNSMYNIPTGPSDYPSAGNEPGANNEIKGGRPGPYMQPPPSTWTNQNQNQRAPLDVNVAYVEGRDEAERGASNQPLTQDFFMSSGKRKRDEIASQYNAGGYIPQQDGAGDAASQIFEIEVYGGGMSIDAGHSTSKGKMPAQSDRPASQIPQLDGPIPYDDDVLSTPNIYNYGVFNEDYNIANTPAPSEVPASTPAPIAQNEVDEEDDDDEPPLNENDDDDLDDLDQGEDQNTHHLVLAQFDKVTRTKSRWKCTLKDGIMHINNKDILFNKATGEFDF

SEQ ID NO: 56841 - DNA, 952 bp, Glycine max
  misc_feature (1)..(952): Ceres Seq. ID no. 14306198
attgctcctcgcgcttaaacactttcgggcgagtgtgtgtgtagcagtttctggttctgtttttggtttcgtttcagcaaaacctctcttcttcttctgattgattccacctcgcgatttttcgattttcgtttgttttcttctttttcggtttctgatctgaactcgattcgattcgctattgccggaaaatgagtcctccggcaagtgtccggtgatgatcgctccctcgagaggttgttgaggttatcgttgttgttcttcgaagtcatggtttcgatctgaggttttggcgctctcgagttcgttttgtactgttttacgtgtgacatgtgaattggaatgcttattccagcttatacaaaacagagacggatctcttcctattgttctcgctttgtttcttttgcagtagcatcatcatcatcaccataccttgttcagattctgctcactttcaccacaacggctttactatttaccgcgtttcgttttcgtgtcaccgcaaataatgaaaggaggtgttccctgtatccactcctcgtcagggaagatctgaagcagtgctagctgctcacgtcctgtaatggacgcatactcctccggcgaagaagtggttgttaagactagaaaaccatatacaatcactaagcaaagggaacgatggacagaggaggagcataataggtttctagaagctttgaaactacacgggcgagcatggcagcgcatagaagagcatataggaacaaagactgccgtgcaaataaggagtcatgcacagaagttctttacaaaggtcaatgggtaccttctcaccttggtttatatgtttaaaatttccttccttttgtttttaacttatgctttaaaagacttgctgtcgatttatgtatcagttccgtatctcttttgattcactttgatgaataaaaatcccttctaactgccc

SEQ ID NO: 56842 - protein, 109 aa, Glycine max
  peptide (1)..(109): Ceres Seq. ID no. 14306199
  misc_feature (24)..(69): Pfam Name: Myb-like DNA-binding domain Pfam Description: Myb-like DNA-binding domain
  misc_feature (2)..(72): Homolog of NCBI NO: 10177075 NR Description: gene_id:MKP11.15~unknown protein [Arabidopsis
  misc_feature (5)..(72): Homolog of NCBI NO: 15240172 NR Description: myb family transcription factor [Arabidopsis
  misc_feature (1)..(71): Homolog of NCBI NO: 6715647 NR Description: T25K16.6 [Arabidopsis thaliana]
  misc_feature (1)..(72): Homolog of NCBI NO: 15223290 NR Description: myb family transcription factor [Arabidopsis
  misc_feature (1)..(72): Homolog of NCBI NO: 3281846 NR Description: late elongated hypocotyl [Arabidopsis thaliana]
  misc_feature (1)..(72): Homolog of NCBI NO: 30690518 NR Description: MYB-related transcription factor (CCA1)
  misc_feature (1)..(72): Homolog of NCBI NO: 38455772 NR Description: circadian oscillator component
  misc_feature (1)..(72): Homolog of NCBI NO: 37805865 NR Description: putative LHY protein [Oryza sativa (japonica
  misc_feature (1)..(72): Homolog of NCBI NO: 34499877 NR Description: circadian clock associated1 [Mesembryanthemum
  misc_feature (1)..(72): Homolog of NCBI NO: 21213868 NR Description: LHY protein [Phaseolus vulgaris]
MDAYSSGEEVVVKTRKPYTITKQRERWTEEEHNRFLEALKLHGRAWQRIEEHIGTKTAVQIRSHAQKFFTKVNGYLLTLVYMFKISFLLFLTYALKDLLSIYVSVPYLF

SEQ ID NO: 56843 - protein, 75 aa, Glycine max
  peptide (1)..(75): Ceres Seq. ID no. 14306200
MLIPAYTKQRRISSYCSRFVSFAVASSSSPYLVQILLTFTTTALLFTAFRFRVTANNERRCSLYPLLVREDLKQC

SEQ ID NO: 56844 - DNA, 1640 bp, Glycine max
  misc_feature (1)..(1640): Ceres Seq. ID no. 14314775
actgaacccaaaacaatcgctagagagagaaaccaagagagagaaagatacaactctcgctttcgctattactattatttcctccctcaaaaaaccgccatggacagtgcagacgcgtggcgcgtggccgcgtgtggcaactccaacgtcaacaaaataatgctccgcttccgcccgatcgcgccgaagccggtcaccggaatttccgccgccgaagctggctccgccgtcggagaagttactcagaacaaccacgtgtcagtcctggggaagagaccgaagaggaagtacgttaggattcggaggaacagtggatacgtgagaaagaataacggagacagtaacggaaaaagtaacggtaacggtaacgatgagtcttccgacgtggcggttgtgacgttgcagttgatgcctgagaaggacgcgccgggaggagacgtcacgctcgccggagattcgtggtgtaagaacgttgatcttgacctaaccgtggagaagattcagatcgtggagaatcggagtgctccaccgccgcgcgcggcggcggagaaaggcgagggaggtaagcgttcagatcttgttgcggcggcgaaggtggcggagtcttgggtgacagtggagagcgtgacaggcacgtgcatgggggagggagacggagagggagggcgagggttattagattgtacggacgcggagaaggtgaagagcctagaagctgacacgtgtcctgcttttgtctgtgacggaagccttagggtgcggtgggtgaatgacgcgtacaagaggatgatgctggaggggcgtgagggtgagggtgagaatatcgtggtgtggttgaaagtgaaggatagtgccatcgcttcgtggtggtgctactctcacccggcgttcacctgcggtgtgaggctgcagtacacgtggcggaacgagaagtgcacgaagatggtgccgtgtgatgtttggagattggactgtggcgggtttgcatggaggctagacgtgaaagctgcgctcagtttgggtctctgaaaaaaaaaaaagaaaaaaaaatcagagacacaaacgcgaccttaaacaaatagatcttttatatatatctatatctctctctctatatatatactcacacctttacataaattgctagctctagttccgtggattgaggtcaagctccctctctgcacaaggacgtgtttggttaggtattatattccagtcagagtttttactactgctactgtttaaagaaaatttaaaaattaggcaaaaaaagaaaagtttatctgatatgcaactacattacatactcagatatgagaaagtaagtgagtaatagaggatagaaaaaaatgatgcttgggaatgagattgggatggtgcttcttattactctatggttagtcttcccttgggagttgggagggaagagaaaaaagtagaaacgtgtgggagttaaacatgcaaagtgctactgaaaaaagtgctttgctttgtggtgctatctatggtcttgtagaactaaagctatattaggtgaagtgtgtgtgtaagtgtgtaactatattattgtcgctccaagactttgcgacaatgaaaaaccgtggtaaatatttgcatatatatatatatagtttagc

SEQ ID NO: 56845 - protein, 342 aa, Glycine max
  peptide (1)..(342): Ceres Seq. ID no. 14314776
  misc_feature (51)..(101): Homolog of NCBI NO: 34901112 NR Description: hypothetical protein~predicted by FGENESH etc.
  misc_feature (231)..(331): Homolog of NCBI NO: 34901112 NR Description: hypothetical protein~predicted by FGENESH etc.
  misc_feature (156)..(340): Homolog of NCBI NO: 21537225 NR Description: unknown [Arabidopsis thaliana]
  misc_feature (156)..(340): Homolog of NCBI NO: 18408645 NR Description: expressed protein [Arabidopsis thaliana]
  misc_feature (72)..(341): Homolog of NCBI NO: 15240662 NR Description: expressed protein [Arabidopsis thaliana]
  misc_feature (184)..(342): Homolog of NCBI NO: 15237495 NR Description: hypothetical protein [Arabidopsis thaliana]
  misc_feature (46)..(340): Homolog of NCBI NO: 15242729 NR Description: expressed protein [Arabidopsis thaliana]
  misc_feature (50)..(342): Homolog of NCBI NO: 15237494 NR Description: hypothetical protein [Arabidopsis thaliana]
  misc_feature (201)..(342): Homolog of NCBI NO: 15232126 NR Description: expressed protein [Arabidopsis thaliana]
  misc_feature (49)..(215): Homolog of NCBI NO: 15232126 NR Description: expressed protein [Arabidopsis thaliana]
TEPKTIARERNQERERYNSRFRYYYYFLPQKTAMDSADAWRVAACGNSNVNKIMLRFRPIAPKPVTGISAAEAGSAVGEVTQNNHVSVLGKRPKRKYVRIRRNSGYVRKNNGDSNGKSNGNGNDESSDVAVVTLQLMPEKDAPGGDVTLAGDSWCKNVDLDLTVEKIQIVENRSAPPPRAAAEKGEGGKRSDLVAAAKVAESWVTVESVTGTCMGEGDGEGGRGLLDCTDAEKVKSLEADTCPAFVCDGSLRVRWVNDAYKRMMLEGREGEGENIVVWLKVKDSAIASWWCYSHPAFTCGVRLQYTWRNEKCTKMVPCDVWRLDCGGFAWRLDVKAALSLGL

SEQ ID NO: 56846 - protein, 309 aa, Glycine max
  peptide (1)..(309): Ceres Seq. ID no. 14314777
  misc_feature (18)..(68): Homolog of NCBI NO: 34901112 NR Description: hypothetical protein~predicted by FGENESH etc.
  misc_feature (198)..(298): Homolog of NCBI NO: 34901112 NR Description: hypothetical protein~predicted by FGENESH etc.
  misc_feature (123)..(307): Homolog of NCBI NO: 21537225 NR Description: unknown [Arabidopsis thaliana]
  misc_feature (123)..(307): Homolog of NCBI NO: 18408645 NR Description: expressed protein [Arabidopsis thaliana]
  misc_feature (39)..(308): Homolog of NCBI NO: 15240662 NR Description: expressed protein [Arabidopsis thaliana]
  misc_feature (151)..(309): Homolog of NCBI NO: 15237495 NR Description: hypothetical protein [Arabidopsis thaliana]
  misc_feature (13)..(307): Homolog of NCBI NO: 15242729 NR Description: expressed protein [Arabidopsis thaliana]
  misc_feature (17)..(309): Homolog of NCBI NO: 15237494 NR Description: hypothetical protein [Arabidopsis thaliana]
  misc_feature (168)..(309): Homolog of NCBI NO: 15232126 NR Description: expressed protein [Arabidopsis thaliana]
  misc_feature (16)..(182): Homolog of NCBI NO: 15232126 NR Description: expressed protein [Arabidopsis thaliana]
MDSADAWRVAACGNSNVNKIMLRFRPIAPKPVTGISAAEAGSAVGEVTQNNHVSVLGKRPKRKYVRIRRNSGYVRKNNGDSNGKSNGNGNDESSDVAVVTLQLMPEKDAPGGDVTLAGDSWCKNVDLDLTVEKIQIVENRSAPPPRAAAEKGEGGKRSDLVAAAKVAESWVTVESVTGTCMGEGDGEGGRGLLDCTDAEKVKSLEADTCPAFVCDGSLRVRWVNDAYKRMMLEGREGEGENIVVWLKVKDSAIASWWCYSHPAFTCGVRLQYTWRNEKCTKMVPCDVWRLDCGGFAWRLDVKAALSLGL

SEQ ID NO: 56847 - protein, 289 aa, Glycine max
  peptide (1)..(289): Ceres Seq. ID no. 14314778
  misc_feature (1)..(48): Homolog of NCBI NO: 34901112 NR Description: hypothetical protein~predicted by FGENESH etc.
  misc_feature (178)..(278): Homolog of NCBI NO: 34901112 NR Description: hypothetical protein~predicted by FGENESH etc.
  misc_feature (103)..(287): Homolog of NCBI NO: 21537225 NR Description: unknown [Arabidopsis thaliana]
  misc_feature (103)..(287): Homolog of NCBI NO: 18408645 NR Description: expressed protein [Arabidopsis thaliana]
  misc_feature (19)..(288): Homolog of NCBI NO: 15240662 NR Description: expressed protein [Arabidopsis thaliana]
  misc_feature (131)..(289): Homolog of NCBI NO: 15237495 NR Description: hypothetical protein [Arabidopsis thaliana]
  misc_feature (1)..(287): Homolog of NCBI NO: 15242729 NR Description: expressed protein [Arabidopsis thaliana]
  misc_feature (1)..(289): Homolog of NCBI NO: 15237494 NR Description: hypothetical protein [Arabidopsis thaliana]
  misc_feature (148)..(289): Homolog of NCBI NO: 15232126 NR Description: expressed protein [Arabidopsis thaliana]
  misc_feature (1)..(162): Homolog of NCBI NO: 15232126 NR Description: expressed protein [Arabidopsis thaliana]
MLRFRPIAPKPVTGISAAEAGSAVGEVTQNNHVSVLGKRPKRKYVRIRRNSGYVRKNNGDSNGKSNGNGNDESSDVAVVTLQLMPEKDAPGGDVTLAGDSWCKNVDLDLTVEKIQIVENRSAPPPRAAAEKGEGGKRSDLVAAAKVAESWVTVESVTGTCMGEGDGEGGRGLLDCTDAEKVKSLEADTCPAFVCDGSLRVRWVNDAYKRMMLEGREGEGENIVVWLKVKDSAIASWWCYSHPAFTCGVRLQYTWRNEKCTKMVPCDVWRLDCGGFAWRLDVKAALSLGL

SEQ ID NO: 56848 - DNA, 1605 bp, Glycine max
  misc_feature (1)..(1605): Ceres Seq. ID no. 15171181
attttcatatctcccaacccccaaatggcttcttcttctcgccactcccctcaattcacccccattctagaggagcgtgaatttgacgacttgagtggccatgacattataagccactccagaagctcccaccctccaacccccattgtccacaagcacactaaatccaatcacaacaaccacaagaaaaagagatcagattccgaggaagatggctccgtctcttgcaacaagtgcagacctcactcccgcgacaaaatcttcatccttcccttggatcactcctccaccaacaactctcacaaaccctcttccttactcgccagccccaacgatattttcaggtcccttgtttccaagctcacccgcaagagtcccatgtcttcttcttcatcccaagaccctctcccaccctccagagaggaacaatggaaaatggcagtcgccgaactctctcacaagctgctccacgccaccagaaaaagagacgaggctcttctagaagcttctagactcatgcactccatgagcgagttggagaagaagctcaacaagctcgaactctattgccacaccttgaaatctggcctcgaacaatgcaccaacaacaacattactacttcccctacttcccttttcaaatctcaaaccctcgaacaggacaccgtgattcaacacttcttggtctcggtgtcggaagcaagatcaagtgtgaggcttttgtctcgttccttaaccatgcaactgaggcacatgggaagcaaggtgtacgagaaagtctccttccttctccaaccatacgacataaaaatatccttctccaagagtccaacaagaagcttacttttctacctagaagcactcttgaacagaaccttctacgaggacttcgaaacaatagggttccagaagaacgcgtgcaacatgatactgaacccaaaggagcgatgcgaggcgagttacgagtcattcaacatggttcacgggctgacgtgggaggaggtgctgagcaaaggaacgaggcacttcagcgaggagttcagcaggttttgcgacaggaagatgagcgagatagtggcgatgttgggctggaaccgggcctggcccgaggcactcttgcaggccttctttggggcctcaaagagcgtgtggaaggtgcacttgttggccaactcgctgcacccgagtctgccgatatttagagtggagaaaggagtaaggtttgattcggtttacatggaggatatgggtggtggtggtggtgacaaggccacttccaacttggtccctgctctggtcagaataatgcttgcgccaggcttttatgtctatggcagtgcagtcaagtgtaaggtcctttgcaggtacttgagtactagtagtaacaaggaagacaaacccttaaccccaaccccttcttgactttggatgaatcactttctttctggttttgtttttttatgtcagctaatattgttcatgatgttgtatattattattatttagtattaagcaatgttggtgctgctgcatgcttgggttgggatggttccatggtggtggtactactatatcgagattttgggtcaaagtaaacaatttggc

SEQ ID NO: 56849 - protein, 473 aa, Glycine max
  peptide (1)..(473): Ceres Seq. ID no. 15171182
  misc_feature (117)..(458): Homolog of NCBI NO: 15239939 NR Description: expressed protein [Arabidopsis thaliana]
  misc_feature (51)..(465): Homolog of NCBI NO: 22329507 NR Description: expressed protein [Arabidopsis thaliana]
IFISPNPQMASSSRHSPQFTPILEEREFDDLSGHDIISHSRSSHPPTPIVHKHTKSNHNNHKKKRSDSEEDGSVSCNKCRPHSRDKIFILPLDHSSTNNSHKPSSLLASPNDIFRSLVSKLTRKSPMSSSSSQDPLPPSREEQWKMAVAELSHKLLHATRKRDEALLEASRLMHSMSELEKKLNKLELYCHTLKSGLEQCTNNNITTSPTSLFKSQTLEQDTVIQHFLVSVSEARSSVRLLSRSLTMQLRHMGSKVYEKVSFLLQPYDIKISFSKSPTRSLLFYLEALLNRTFYEDFETIGFQKNACNMILNPKERCEASYESFNMVHGLTWEEVLSKGTRHFSEEFSRFCDRKMSEIVAMLGWNRAWPEALLQAFFGASKSVWKVHLLANSLHPSLPIFRVEKGVRFDSVYMEDMGGGGGDKATSNLVPALVRIMLAPGFYVYGSAVKCKVLCRYLSTSSNKEDKPLTPTPS

SEQ ID NO: 56850 - protein, 465 aa, Glycine max
  peptide (1)..(465): Ceres Seq. ID no. 15171183
  misc_feature (109)..(450): Homolog of NCBI NO: 15239939 NR Description: expressed protein [Arabidopsis thaliana]
  misc_feature (43)..(457): Homolog of NCBI NO: 22329507 NR Description: expressed protein [Arabidopsis thaliana]
MASSSRHSPQFTPILEEREFDDLSGHDIISHSRSSHPPTPIVHKHTKSNHNNHKKKRSDSEEDGSVSCNKCRPHSRDKIFILPLDHSSTNNSHKPSSLLASPNDIFRSLVSKLTRKSPMSSSSSQDPLPPSREEQWKMAVAELSHKLLHATRKRDEALLEASRLMHSMSELEKKLNKLELYCHTLKSGLEQCTNNNITTSPTSLFKSQTLEQDTVIQHFLVSVSEARSSVRLLSRSLTMQLRHMGSKVYEKVSFLLQPYDIKISFSKSPTRSLLFYLEALLNRTFYEDFETIGFQKNACNMILNPKERCEASYESFNMVHGLTWEEVLSKGTRHFSEEFSRFCDRKMSEIVAMLGWNRAWPEALLQAFFGASKSVWKVHLLANSLHPSLPIFRVEKGVRFDSVYMEDMGGGGGDKATSNLVPALVRIMLAPGFYVYGSAVKCKVLCRYLSTSSNKEDKPLTPTPS

SEQ ID NO: 56851 - protein, 347 aa, Glycine max
  peptide (1)..(347): Ceres Seq. ID no. 15171184
  misc_feature (1)..(332): Homolog of NCBI NO: 15239939 NR Description: expressed protein [Arabidopsis thaliana]
  misc_feature (1)..(339): Homolog of NCBI NO: 22329507 NR Description: expressed protein [Arabidopsis thaliana]
MSSSSSQDPLPPSREEQWKMAVAELSHKLLHATRKRDEALLEASRLMHSMSELEKKLNKLELYCHTLKSGLEQCTNNNITTSPTSLFKSQTLEQDTVIQHFLVSVSEARSSVRLLSRSLTMQLRHMGSKVYEKVSFLLQPYDIKISFSKSPTRSLLFYLEALLNRTFYEDFETIGFQKNACNMILNPKERCEASYESFNMVHGLTWEEVLSKGTRHFSEEFSRFCDRKMSEIVAMLGWNRAWPEALLQAFFGASKSVWKVHLLANSLHPSLPIFRVEKGVRFDSVYMEDMGGGGGDKATSNLVPALVRIMLAPGFYVYGSAVKCKVLCRYLSTSSNKEDKPLTPTPS

SEQ ID NO: 56852 - DNA, 1415 bp, Glycine max
  misc_feature (1)..(1415): Ceres Seq. ID no. 14314737
attgagttgtggtcaacagagagaaagtaggagagaaaaaaaaaaagcctcaccgacttcggcgaaatggatctgccgccggcaccgatccggtggcgcgcaaccgcaatcccattctttgtggcggttctctttgtatccaccatctccccttcgcgcgcaatctactgcgacgaagatgattgctacgatctacttggggtttctcaaagtgccaatgcttccgaaattaaaaaagcttactacaagctctccttgaagtatcacccagataaaaaccctgatccggaatcgcgaaagctgtttgtaaaagtcgccaatgcttatgagattttgaaggatgaggccacgcgagaacaatatgattatgcaattgcacatccggaggaggtgttttataatactgcacgctactatcgggcttactatggtcacaagacggatccccgtgctgtgttggttggccttcttcttattctttcaggttttcaatatctaaatcaatcaacaaggtataatcaggctgtagctatggtcaagaagacacctgcatataaaaataaactaagggcattggaacttgaacgcagtggaggggttacaaacaagaagaagagtcagaagaatatggacaagaaaacagaggaagaccttagtaaagaactcgatctgcagataaccggagctgaaatggcctctgtatggaaacttcttggcgtccgctttgttctattaccatataccttaggcaagctgctgttgtggactgcctgttggttttggagatacaaagtgaaaaagtacccttattcttgggaagatgcttcttatctgacacaaagatccctcagtattcctctcgataggtggagaaatatagatgaagcaacaaaggaagatcttgtgctcagacgcttgtgggagaaatcgaatctggagagctatgtagcagagatgcggaaagaatcgaagcgcagaagatagttgcattagtcgcctctgctgcttttaaagtactaaattttgttgcaaattgattttcggggtggccgtgatagaagcagaatcattcgtgtcaaccacaaaatcgtagaatcatatacaaagtttatttagtttacacatgctattgttgctctctaacagcctgtaaacaatgaacaccaaagaatactgctttagatattgcttttattctttcaatgaatcgggtacctgagcctcaatcttgctacaatcgcatgtttggtagtaattttgagtgcctctctagttcaataattttaaggataaagatgtatggataccctaatgttatttgacaccttgagagagatagaagagaaatataggtatgataagtgatgacttgaatgcagatgtacttgaaatatatatccttcgacttttcgtgt

SEQ ID NO: 56853 - protein, 305 aa, Glycine max
  peptide (1)..(305): Ceres Seq. ID no. 14314738
  misc_feature (39)..(103): Pfam Name: DnaJ domain Pfam Description: DnaJ domain
  misc_feature (12)..(296): Homolog of NCBI NO: 17538212 NR Description: DNaJ domain (prokaryotic heat shock protein)
  misc_feature (12)..(296): Homolog of NCBI NO: 39593758 NR Description: Hypothetical protein CBG06069 [Caenorhabditis
  misc_feature (10)..(304): Homolog of NCBI NO: 34868434 NR Description: similar to bA16L21.2.1 (novel DnaJ domain protein to Drosophila, C. elegans and Arabidopsis predicted proteins
  misc_feature (33)..(304): Homolog of NCBI NO: 38078426 NR Description: RIKEN cDNA 2010203O07 [Mus musculus]
  misc_feature (9)..(304): Homolog of NCBI NO: 12313893 NR Description: bA16L21.2.1 (novel DnaJ domain protein similar to
  misc_feature (34)..(304): Homolog of NCBI NO: 31219417 NR Description: ENSANGP00000010358 [Anopheles gambiae]
  misc_feature (19)..(304): Homolog of NCBI NO: 18859921 NR Description: CG7872-PA [Drosophila melanogaster]
  misc_feature (107)..(305): Homolog of NCBI NO: 19347731 NR Description: unknown protein [Arabidopsis thaliana]
  misc_feature (4)..(271): Homolog of NCBI NO: 25404348 NR Description: hypothetical protein T13M11.13 [imported] -
  misc_feature (4)..(305): Homolog of NCBI NO: 30696610 NR Description: DnaJ protein family [Arabidopsis thaliana]
MDLPPAPIRWRATAIPFFVAVLFVSTISPSRAIYCDEDDCYDLLGVSQSANASEIKKAYYKLSLKYHPDKNPDPESRKLFVKVANAYEILKDEATREQYDYAIAHPEEVFYNTARYYRAYYGHKTDPRAVLVGLLLILSGFQYLNQSTRYNQAVAMVKKTPAYKNKLRALELERSGGVTNKKKSQKNMDKKTEEDLSKELDLQITGAEMASVWKLLGVRFVLLPYTLGKLLLWTACWFWRYKVKKYPYSWEDASYLTQRSLSIPLDRWRNIDEATKEDLVLRRLWEKSNLESYVAEMRKESKRRR

SEQ ID NO: 56854 - DNA, 1073 bp, Glycine max
  misc_feature (1)..(1073): Ceres Seq. ID no. 14314743
gaactctgtctaaaagacactttcttttctgataacatctctactaaaaagttactaaaaatggaaggaagatctatcaccacctccgccgcggagtcatcggagatccaataccatccaccgaaccccccgaaccagatcttcatcctctccggacaaagcaacatggccggacgcggcggcgtcgtcaaggaccaccaccaaaaccgttgggtatgggacaaaatcgttccgtcggaatgctcgccggactcgtcgatcctccgcctgagagcagatctccgatgggaggaagcgcgtgagccgctccacgccgacatcgacaccggcaaagtgtgcggcgtaggtccggggatggcgttcgcgaacgcggtgaggaaacgatccgactcggattccgacgtgatcgggctggttccgtgcgccgtcggtgggacggcgataaaagagtgggagcgtgggagccgtttgtacgagacgatggttaagagagcggaggagagtaggaggtacggtggagagatcaaggcgatgctttggtaccaaggagagagtgacgtgtcggacatccacgacgccgagagttacgggaggaatatgactcgtttggttaagaaccttcgtcatgatcttaaccttccttctcttcccattattcaggtggcgataacatcgggaggagggtatatagataaggtgagggaagcacagttgggtttgaaactttctaatgtggtctgtgtagatgctaaaggattgcagctaaagccggataatcttcacttgaccactgaggctcaagttcagcttggtctctcattagcacaagcttacctttccaacctctgctagactatcaagttattccttgttgagaaatgtgatcgatggtattttaaactctgcgaatgtttgtctacatttctcagaatgagatatgcagtttgagcgatggtactgttgtagagactatgtaatcttttcacctttagagcacacattattattccacgttgttacgttgcaacaatttgctgctctttgtagaatattttgaataaaatgggtttcat

SEQ ID NO: 56855 - protein, 283 aa, Glycine max
  peptide (1)..(283): Ceres Seq. ID no. 14314744
  misc_feature (34)..(276): Homolog of NCBI NO: 29349588 NR Description: acetyl xylan esterase A [Bacteroides
  misc_feature (56)..(221): Homolog of NCBI NO: 11357879 NR Description: hypothetical protein F8J2.180 - Arabidopsis
  misc_feature (47)..(221): Homolog of NCBI NO: 30693749 NR Description: expressed protein [Arabidopsis thaliana]
  misc_feature (44)..(279): Homolog of NCBI NO: 38345580 NR Description: OSJNBa0027H06.16 [Oryza sativa (japonica
  misc_feature (44)..(282): Homolog of NCBI NO: 30102977 NR Description: hypothetical protein [Oryza sativa (japonica
  misc_feature (43)..(280): Homolog of NCBI NO: 30102980 NR Description: unknown protein [Oryza sativa (japonica
  misc_feature (46)..(281): Homolog of NCBI NO: 38347110 NR Description: OSJNBa0009K15.7 [Oryza sativa (japonica
  misc_feature (9)..(224): Homolog of NCBI NO: 7488258 NR Description: protein kinase homolog F28A23.20 - Arabidopsis
  misc_feature (21)..(283): Homolog of NCBI NO: 18418402 NR Description: expressed protein [Arabidopsis thaliana]
  misc_feature (21)..(283): Homolog of NCBI NO: 21594009 NR Description: unknown [Arabidopsis thaliana]
ELCLKDTFFSDNISTKKLLKMEGRSITTSAAESSEIQYHPPNPPNQIFILSGQSNMAGRGGVVKDHHQNRWVWDKIVPSECSPDSSILRLRADLRWEEAREPLHADIDTGKVCGVGPGMAFANAVRKRSDSDSDVIGLVPCAVGGTAIKEWERGSRLYETMVKRAEESRRYGGEIKAMLWYQGESDVSDIHDAESYGRNMTRLVKNLRHDLNLPSLPIIQVAITSGGGYIDKVREAQLGLKLSNVVCVDAKGLQLKPDNLHLTTEAQVQLGLSLAQAYLSNLC

SEQ ID NO: 56856 - protein, 263 aa, Glycine max
  peptide (1)..(263): Ceres Seq. ID no. 14314745
  misc_feature (14)..(256): Homolog of NCBI NO: 29349588 NR Description: acetyl xylan esterase A [Bacteroides
  misc_feature (36)..(201): Homolog of NCBI NO: 11357879 NR Description: hypothetical protein F8J2.180 - Arabidopsis
  misc_feature (27)..(201): Homolog of NCBI NO: 30693749 NR Description: expressed protein [Arabidopsis thaliana]
  misc_feature (24)..(259): Homolog of NCBI NO: 38345580 NR Description: OSJNBa0027H06.16 [Oryza sativa (japonica
  misc_feature (24)..(262): Homolog of NCBI NO: 30102977 NR Description: hypothetical protein [Oryza sativa (japonica
  misc_feature (23)..(260): Homolog of NCBI NO: 30102980 NR Description: unknown protein [Oryza sativa (japonica
  misc_feature (26)..(261): Homolog of NCBI NO: 38347110 NR Description: OSJNBa0009K15.7 [Oryza sativa (japonica
  misc_feature (1)..(204): Homolog of NCBI NO: 7488258 NR Description: protein kinase homolog F28A23.20 - Arabidopsis
  misc_feature (1)..(263): Homolog of NCBI NO: 18418402 NR Description: expressed protein [Arabidopsis thaliana]
  misc_feature (1)..(263): Homolog of NCBI NO: 21594009 NR Description: unknown [Arabidopsis thaliana]
MEGRSITTSAAESSEIQYHPPNPPNQIFILSGQSNMAGRGGVVKDHHQNRWVWDKIVPSECSPDSSILRLRADLRWEEAREPLHADIDTGKVCGVGPGMAFANAVRKRSDSDSDVIGLVPCAVGGTAIKEWERGSRLYETMVKRAEESRRYGGEIKAMLWYQGESDVSDIHDAESYGRNMTRLVKNLRHDLNLPSLPIIQVAITSGGGYIDKVREAQLGLKLSNVVCVDAKGLQLKPDNLHLTTEAQVQLGLSLAQAYLSNLC

SEQ ID NO: 56857 - protein, 228 aa, Glycine max
  peptide (1)..(228): Ceres Seq. ID no. 14314746
  misc_feature (1)..(221): Homolog of NCBI NO: 29349588 NR Description: acetyl xylan esterase A [Bacteroides
  misc_feature (1)..(166): Homolog of NCBI NO: 11357879 NR Description: hypothetical protein F8J2.180 - Arabidopsis
  misc_feature (1)..(166): Homolog of NCBI NO: 30693749 NR Description: expressed protein [Arabidopsis thaliana]
  misc_feature (1)..(224): Homolog of NCBI NO: 38345580 NR Description: OSJNBa0027H06.16 [Oryza sativa (japonica
  misc_feature (1)..(227): Homolog of NCBI NO: 30102977 NR Description: hypothetical protein [Oryza sativa (japonica
  misc_feature (1)..(225): Homolog of NCBI NO: 30102980 NR Description: unknown protein [Oryza sativa (japonica
  misc_feature (1)..(226): Homolog of NCBI NO: 38347110 NR Description: OSJNBa0009K15.7 [Oryza sativa (japonica
  misc_feature (1)..(169): Homolog of NCBI NO: 7488258 NR Description: protein kinase homolog F28A23.20 - Arabidopsis
  misc_feature (1)..(228): Homolog of NCBI NO: 18418402 NR Description: expressed protein [Arabidopsis thaliana]
  misc_feature (1)..(228): Homolog of NCBI NO: 21594009 NR Description: unknown [Arabidopsis thaliana]
MAGRGGVVKDHHQNRWVWDKIVPSECSPDSSILRLRADLRWEEAREPLHADIDTGKVCGVGPGMAFANAVRKRSDSDSDVIGLVPCAVGGTAIKEWERGSRLYETMVKRAEESRRYGGEIKAMLWYQGESDVSDIHDAESYGRNMTRLVKNLRHDLNLPSLPIIQVAITSGGGYIDKVREAQLGLKLSNVVCVDAKGLQLKPDNLHLTTEAQVQLGLSLAQAYLSNLC

SEQ ID NO: 56858 - DNA, 1508 bp, Glycine max
  misc_feature (1)..(1508): Ceres Seq. ID no. 15177652
attcgcactcacactagcacgcaacctgtttgttcgtaaattcggccactccaaagtatatgcaccacaaacaacaacaccatcttaatcttctccacccaaagcgcaacttgcaaaaattacataaattcctagcccaaaaacttgatcagtaaacaaacatgggaagttccgtgcgtgtaaaagaagcatctgtggttacaccttctgagcccactccatcgagtgtgttggctctatcagctcttgattcgcaactcttccttcgtttcaccatagagtatctcttggtctacaacccttgccctggcctggaccaggctgccaccacggcccgtttaaaagcagcattagcccaagcactggttccctactaccccttcgcgggccgggtcaggaccagacccgatggaccgggcctggaggtggtttgcggagcccaaggcgcggtgttcatagaagcctccgctgaccgttacaatgttaacgacttcgagaaagcgcctaaagcagttgcgcactggaggtcgctcttgtcgctccacgtggcagacgttctcaaaggatcgccgccgctggtcgttcagctgacgtggctcggcgacggcgccgccgcaatcggcgtggggatcaaccactgcatctgcgacgggattgggagcgcggagtttctaaaccacttcgccgagttagccaacgagaaacgcgagttgttattattagctcagaggcccaaacataaacctatttgggagcgtcaccttctgaagccaacgcgtgggaagcagacgcgggtagactcggagagtcaccccgagttcaaccgagtcccggatttatgcaacttcatgaacaaagtctcgacggggcttaaaccgacctcggtgaccttcgacaagaggagactaaacgagatgaagagactcgcgagtagcacgagtgaaccaggcgagacggtgtgttacacgtcgttcgaggtgctggcggcgcacgtgtggagaagctgggcgagagcaataaggtttccgccgaatcagaagttgaagctggtgttcagtataaacgtgaggaacagggttaaaccgggtttaccagaggggtattatgggaatgcgtttgttttggggtgtgcggagacgagagcgaaggagctggaggaaagagggatagggttcgggtcgggtttggtgaagcgggcgaaggagagggttgggaatgagcacgtgaggggcgtgatggggatggtgtgggagagaaaagcgtgccctgacccggttggggtgctcatagtgtcgcagtggtccaggctgggtttggagaacattgacctgggtatgggcaagcttcttcacgtcggacccgtgtgctgcgataggtactgcttgtttttgccggtcagagatcagtgtctcagtgtcaaggtcatgctggctgttcccactcacgcccttcacaattaccagctttttatgcgtaataattgatatataaattatcttactcatttt

SEQ ID NO: 56859 - protein, 440 aa, Glycine max
  peptide (1)..(440): Ceres Seq. ID no. 15177653
  misc_feature (3)..(434): Pfam Name: Transferase family Pfam Description: Transferase family
  misc_feature (4)..(400): Homolog of NCBI NO: 37535814 NR Description: putative hypersensitivity-related (hsr)protein
  misc_feature (4)..(400): Homolog of NCBI NO: 34900746 NR Description: putative benzoyl coenzyme A: benzyl alcohol
  misc_feature (8)..(438): Homolog of NCBI NO: 15229017 NR Description: transferase family [Arabidopsis thaliana]
  misc_feature (1)..(440): Homolog of NCBI NO: 15218793 NR Description: transferase family [Arabidopsis thaliana]
  misc_feature (1)..(434): Homolog of NCBI NO: 30693725 NR Description: transferase family [Arabidopsis thaliana]
  misc_feature (1)..(434): Homolog of NCBI NO: 30693723 NR Description: transferase family [Arabidopsis thaliana]
  misc_feature (12)..(434): Homolog of NCBI NO: 34914932 NR Description: B1096D03.33 [Oryza sativa (japonica
  misc_feature (9)..(434): Homolog of NCBI NO: 34894074 NR Description: putative benzoyltransferase
  misc_feature (9)..(437): Homolog of NCBI NO: 15217644 NR Description: transferase family [Arabidopsis thaliana]
  misc_feature (1)..(434): Homolog of NCBI NO: 15225663 NR Description: transferase family [Arabidopsis thaliana]
MGSSVRVKEASVVTPSEPTPSSVLALSALDSQLFLRFTIEYLLVYNPCPGLDQAATTARLKAALAQALVPYYPFAGRVRTRPDGPGLEVVCGAQGAVFIEASADRYNVNDFEKAPKAVAHWRSLLSLHVADVLKGSPPLVVQLTWLGDGAAAIGVGINHCICDGIGSAEFLNHFAELANEKRELLLLAQRPKHKPIWERHLLKPTRGKQTRVDSESHPEFNRVPDLCNFMNKVSTGLKPTSVTFDKRRLNEMKRLASSTSEPGETVCYTSFEVLAAHVWRSWARAIRFPPNQKLKLVFSINVRNRVKPGLPEGYYGNAFVLGCAETRAKELEERGIGFGSGLVKRAKERVGNEHVRGVMGMVWERKACPDPVGVLIVSQWSRLGLENIDLGMGKLLHVGPVCCDRYCLFLPVRDQCLSVKVMLAVPTHALHNYQLFMRNN

SEQ ID NO: 56860 - DNA, 941 bp, Glycine max
  misc_feature (1)..(941): Ceres Seq. ID no. 14306279
atccttttctctgggaattatagtttgtagagaacacatacatacattttcattttcagaggaatgatcatggaagaatcctcggtacacgagatcaaaacccctctcctgtcatctaacaatgaggaagatgaagttggaagcagtactagccataggcagcaaaatgaagagaactcgcccataaaacaagtggccctaacggtgccaaccaccgatgacccatctcttccagttctgacgttccgaatgtgggtgttgggaactctatcatgcgtgctgctgtcgttcctgaaccagttcttctggtaccgcatccagcctctcaccatcaccgcgatctccgcccagatcgcggtggtgccgctcggccaactcatggccgcaacgatcactaagcgcgtgttcttcagaggaacacgctgggaattcactctcaatccgggacccttcaacgtcaaggagcacgttctcatcaccatcttcgccaactccggcgccggcaccgtctacgccatccacgttgttaccgctgtcaaaatcttttaccacaaacacatctccttctttgtctccttgcttgtggtcatcaccacacaggtattgggtttcggatgggctggcatatttagaagatacctggtagagccagcggcaatgtggtggccagcaaatttagttcaagtttcactcttcaggtaataattataatactacagcattaacattttattattctaatttatatggtcaatatgaagagtaaatgtattgaatactatgctctagctagtaacttgacacactacgtaagaattagttagttcgccgacaatatcgtaataagatacaaaagtatccatacctaccaataacatcaatgtaatatatttacgattttttagtttacctatatgtcatcactcactcttgcgtggtgt

SEQ ID NO: 56861 - protein, 212 aa, Glycine max
  peptide (1)..(212): Ceres Seq. ID no. 14306280
  misc_feature (58)..(212): Pfam Name: OPT oligopeptide transporter protein Pfam Description: OPT oligopeptide transporter protein
  misc_feature (21)..(212): Homolog of NCBI NO: 38347072 NR Description: OSJNBa0006A01.13 [Oryza sativa (japonica
  misc_feature (33)..(212): Homolog of NCBI NO: 15236800 NR Description: isp4 like protein [Arabidopsis thaliana]
  misc_feature (35)..(211): Homolog of NCBI NO: 15234254 NR Description: expressed protein [Arabidopsis thaliana]
  misc_feature (34)..(211): Homolog of NCBI NO: 15238761 NR Description: isp4 protein [Arabidopsis thaliana]
  misc_feature (30)..(212): Homolog of NCBI NO: 15238763 NR Description: isp4 protein [Arabidopsis thaliana]
  misc_feature (4)..(211): Homolog of NCBI NO: 34898012 NR Description: ESTs D25093(R3139),AU082160(R3139) correspond to region of the predicted gene.~Similar to Arabidopsis thaliana BAC
  misc_feature (36)..(212): Homolog of NCBI NO: 34898034 NR Description: Similar to Arabidopsis thaliana BAC T12H20
  misc_feature (4)..(212): Homolog of NCBI NO: 25553564 NR Description: putative isp4 protein [Oryza sativa (japonica
  misc_feature (27)..(212): Homolog of NCBI NO: 34898010 NR Description: EST D25093(R3139) corresponds to a region of the
  misc_feature (28)..(212): Homolog of NCBI NO: 15236912 NR Description: oligopeptide transporter -related [Arabidopsis
MIMEESSVHEIKTPLLSSNNEEDEVGSSTSHRQQNEENSPIKQVALTVPTTDDPSLPVLTFRMWVLGTLSCVLLSFLNQFFWYRIQPLTITAISAQIAVVPLGQLMAATITKRVFFRGTRWEFTLNPGPFNVKEHVLITIFANSGAGTVYAIHVVTAVKIFYHKHISFFVSLLVVITTQVLGFGWAGIFRRYLVEPAAMWWPANLVQVSLFR

SEQ ID NO: 56862 - protein, 210 aa, Glycine max
  peptide (1)..(210): Ceres Seq. ID no. 14306281
  misc_feature (56)..(210): Pfam Name: OPT oligopeptide transporter protein Pfam Description: OPT oligopeptide transporter protein
  misc_feature (19)..(210): Homolog of NCBI NO: 38347072 NR Description: OSJNBa0006A01.13 [Oryza sativa (japonica
  misc_feature (31)..(210): Homolog of NCBI NO: 15236800 NR Description: isp4 like protein [Arabidopsis thaliana]
  misc_feature (33)..(209): Homolog of NCBI NO: 15234254 NR Description: expressed protein [Arabidopsis thaliana]
  misc_feature (32)..(209): Homolog of NCBI NO: 15238761 NR Description: isp4 protein [Arabidopsis thaliana]
  misc_feature (28)..(210): Homolog of NCBI NO: 15238763 NR Description: isp4 protein [Arabidopsis thaliana]
  misc_feature (2)..(209): Homolog of NCBI NO: 34898012 NR Description: ESTs D25093(R3139),AU082160(R3139) correspond to region of the predicted gene.~Similar to Arabidopsis thaliana BAC
  misc_feature (34)..(210): Homolog of NCBI NO: 34898034 NR Description: Similar to Arabidopsis thaliana BAC T12H20
  misc_feature (2)..(210): Homolog of NCBI NO: 25553564 NR Description: putative isp4 protein [Oryza sativa (japonica
  misc_feature (25)..(210): Homolog of NCBI NO: 34898010 NR Description: EST D25093(R3139) corresponds to a region of the
  misc_feature (26)..(210): Homolog of NCBI NO: 15236912 NR Description: oligopeptide transporter -related [Arabidopsis
MEESSVHEIKTPLLSSNNEEDEVGSSTSHRQQNEENSPIKQVALTVPTTDDPSLPVLTFRMWVLGTLSCVLLSFLNQFFWYRIQPLTITAISAQIAVVPLGQLMAATITKRVFFRGTRWEFTLNPGPFNVKEHVLITIFANSGAGTVYAIHVVTAVKIFYHKHISFFVSLLVVITTQVLGFGWAGIFRRYLVEPAAMWWPANLVQVSLFR

SEQ ID NO: 56863 - protein, 150 aa, Glycine max
  peptide (1)..(150): Ceres Seq. ID no. 14306282
  misc_feature (1)..(150): Pfam Name: OPT oligopeptide transporter protein Pfam Description: OPT oligopeptide transporter protein
  misc_feature (1)..(150): Homolog of NCBI NO: 38347072 NR Description: OSJNBa0006A01.13 [Oryza sativa (japonica
  misc_feature (1)..(150): Homolog of NCBI NO: 15236800 NR Description: isp4 like protein [Arabidopsis thaliana]
  misc_feature (1)..(149): Homolog of NCBI NO: 15234254 NR Description: expressed protein [Arabidopsis thaliana]
  misc_feature (1)..(149): Homolog of NCBI NO: 15238761 NR Description: isp4 protein [Arabidopsis thaliana]
  misc_feature (1)..(150): Homolog of NCBI NO: 15238763 NR Description: isp4 protein [Arabidopsis thaliana]
  misc_feature (1)..(149): Homolog of NCBI NO: 34898012 NR Description: ESTs D25093(R3139),AU082160(R3139) correspond to region of the predicted gene.~Similar to Arabidopsis thaliana BAC
  misc_feature (1)..(150): Homolog of NCBI NO: 34898034 NR Description: Similar to Arabidopsis thaliana BAC T12H20
  misc_feature (1)..(150): Homolog of NCBI NO: 25553564 NR Description: putative isp4 protein [Oryza sativa (japonica
  misc_feature (1)..(150): Homolog of NCBI NO: 34898010 NR Description: EST D25093(R3139) corresponds to a region of the
  misc_feature (1)..(150): Homolog of NCBI NO: 15236912 NR Description: oligopeptide transporter -related [Arabidopsis
MWVLGTLSCVLLSFLNQFFWYRIQPLTITAISAQIAVVPLGQLMAATITKRVFFRGTRWEFTLNPGPFNVKEHVLITIFANSGAGTVYAIHVVTAVKIFYHKHISFFVSLLVVITTQVLGFGWAGIFRRYLVEPAAMWWPANLVQVSLFR

SEQ ID NO: 56864 - DNA, 1484 bp, Glycine max
  misc_feature (1)..(1484): Ceres Seq. ID no. 14314655
aatcatataaataaataaacatagtataattaattgatcgtcgatggtagtagtatgttgagggggctgtttgtgtttggtggcacgtgctgcaggagattgacgttggcacgacagtccacgcagaaacagaaacagtggtgggatcatcttcatcatcatcttcgctccaaaaaccttcattgggcaggtctcatggagagtaatgggaactcggtgaaggatgctgagaaacaaatcacccgtgttttgttttgtggaccccgtttccctgcttctcatgaatatacaattgagtatttgcaaaatcattcacatatcaaggttgatgttctccctttagaagatgtgccaaaggatattgccaactatcatgtctgcatagtaaaaaacatgaggctagattcagaaataatttctcgtgcagttcagatgcagcttataatgcagtatggtgttgggctggaaggtgttgatattgatgctgcaacaaagcatggaatcaaagttgctaggataccaggtgatgtttcgggaaattcagcttcatgtgctgaaatggccatatatctaatgctgggtctcctccgtaagcaaaatgaactgcaagtttccatacaacaaaagaagcttggagagccaattaccgaaactttacttgggaaaactatattcattttgggctttgggaacattggaatggatttagcaaagcgattgcaaccctttggtgtaaaagttattgctataaagcggagctgggcttcatatgcacaacatgctagcaaattaagcagaaatgatgctgaagatcttgttgatgtgaagggtagtcatgaagatatatatgagtttgcaaggaaggctgacattgttgtttgctgcctaacattaaacagagaaacggttggtataataaacaataagtttatatcttctatgaaaaagggtggccttctggtgaatgttgctagaggtggtcttgtagactatgaggctgtgatcaaccaccttgaatcaggtcatttaggagggttaggcactgatgttgcttggactgagccatttaaccctgatgatcagatatttaaatttaagaatgttatcatgactcctcatgttgcaggcgttacagagcattcttatagatccatggctaaggctgttggtgatgtcgttcttcaacttcatgccgggcttcctttgacagggatagagttagttaactgaattagtgccaacaattcattccagtatcttcaactaaatgacttttataattcaagatgaattttctgaggtgcaaaaacacttaatattttgtaaagaaaatttagatgaggcaatgcttatgtgttgcccatttgttattctatggttgtggtgaaccaattgttctttagtagcgggttgtgttacagtatgcgattttatgaattttctagttctattttgccactatttatatacacggacaaatatat

SEQ ID NO: 56865 - protein, 391 aa, Glycine max
  peptide (1)..(391): Ceres Seq. ID no. 14314656
  misc_feature (166)..(355): Pfam Name: D-isomer specific 2-hydroxyacid dehydrogenase, Pfam Description: D-isomer specific 2-hydroxyacid dehydrogenase,
  misc_feature (116)..(381): Homolog of NCBI NO: 19552504 NR Description: phosphoglycerate dehydrogenase
  misc_feature (115)..(381): Homolog of NCBI NO: 13516509 NR Description: glyoxylate reductase [Thermococcus litoralis]
  misc_feature (250)..(371): Homolog of NCBI NO: 34901040 NR Description: putative phosphoglycerate dehydrogenase
  misc_feature (77)..(391): Homolog of NCBI NO: 14521645 NR Description: GLYCERATE DEHYDROGENASE [Pyrococcus abyssi]
  misc_feature (102)..(385): Homolog of NCBI NO: 15614165 NR Description: D-3-phosphoglycerate dehydrogenase [Bacillus
  misc_feature (73)..(384): Homolog of NCBI NO: 11498419 NR Description: phosphoglycerate dehydrogenase (serA)
  misc_feature (89)..(290): Homolog of NCBI NO: 34901040 NR Description: putative phosphoglycerate dehydrogenase
  misc_feature (65)..(391): Homolog of NCBI NO: 34901058 NR Description: putative phosphoglycerate dehydrogenase
  misc_feature (55)..(391): Homolog of NCBI NO: 30698851 NR Description: oxidoreductase family [Arabidopsis thaliana]
  misc_feature (55)..(391): Homolog of NCBI NO: 25406154 NR Description: hypothetical protein T9N14.9 [imported] -
MLRGLFVFGGTCCRRLTLARQSTQKQKQWWDHLHHHLRSKNLHWAGLMESNGNSVKDAEKQITRVLFCGPRFPASHEYTIEYLQNHSHIKVDVLPLEDVPKDIANYHVCIVKNMRLDSEIISRAVQMQLIMQYGVGLEGVDIDAATKHGIKVARIPGDVSGNSASCAEMAIYLMLGLLRKQNELQVSIQQKKLGEPITETLLGKTIFILGFGNIGMDLAKRLQPFGVKVIAIKRSWASYAQHASKLSRNDAEDLVDVKGSHEDIYEFARKADIVVCCLTLNRETVGIINNKFISSMKKGGLLVNVARGGLVDYEAVINHLESGHLGGLGTDVAWTEPFNPDDQIFKFKNVIMTPHVAGVTEHSYRSMAKAVGDVVLQLHAGLPLTGIELVN

SEQ ID NO: 56866 - protein, 344 aa, Glycine max
  peptide (1)..(344): Ceres Seq. ID no. 14314657
  misc_feature (119)..(308): Pfam Name: D-isomer specific 2-hydroxyacid dehydrogenase, Pfam Description: D-isomer specific 2-hydroxyacid dehydrogenase,
  misc_feature (69)..(334): Homolog of NCBI NO: 19552504 NR Description: phosphoglycerate dehydrogenase
  misc_feature (68)..(334): Homolog of NCBI NO: 13516509 NR Description: glyoxylate reductase [Thermococcus litoralis]
  misc_feature (203)..(324): Homolog of NCBI NO: 34901040 NR Description: putative phosphoglycerate dehydrogenase
  misc_feature (30)..(344): Homolog of NCBI NO: 14521645 NR Description: GLYCERATE DEHYDROGENASE [Pyrococcus abyssi]
  misc_feature (55)..(338): Homolog of NCBI NO: 15614165 NR Description: D-3-phosphoglycerate dehydrogenase [Bacillus
  misc_feature (26)..(337): Homolog of NCBI NO: 11498419 NR Description: phosphoglycerate dehydrogenase (serA)
  misc_feature (42)..(243): Homolog of NCBI NO: 34901040 NR Description: putative phosphoglycerate dehydrogenase
  misc_feature (18)..(344): Homolog of NCBI NO: 34901058 NR Description: putative phosphoglycerate dehydrogenase
  misc_feature (8)..(344): Homolog of NCBI NO: 30698851 NR Description: oxidoreductase family [Arabidopsis thaliana]
  misc_feature (8)..(344): Homolog of NCBI NO: 25406154 NR Description: hypothetical protein T9N14.9 [imported] -
MESNGNSVKDAEKQITRVLFCGPRFPASHEYTIEYLQNHSHIKVDVLPLEDVPKDIANYHVCIVKNMRLDSEIISRAVQMQLIMQYGVGLEGVDIDAATKHGIKVARIPGDVSGNSASCAEMAIYLMLGLLRKQNELQVSIQQKKLGEPITETLLGKTIFILGFGNIGMDLAKRLQPFGVKVIAIKRSWASYAQHASKLSRNDAEDLVDVKGSHEDIYEFARKADIVVCCLTLNRETVGIINNKFISSMKKGGLLVNVARGGLVDYEAVINHLESGHLGGLGTDVAWTEPFNPDDQIFKFKNVIMTPHVAGVTEHSYRSMAKAVGDVVLQLHAGLPLTGIELVN

SEQ ID NO: 56867 - protein, 278 aa, Glycine max
  peptide (1)..(278): Ceres Seq. ID no. 14314658
  misc_feature (53)..(242): Pfam Name: D-isomer specific 2-hydroxyacid dehydrogenase, Pfam Description: D-isomer specific 2-hydroxyacid dehydrogenase,
  misc_feature (3)..(268): Homolog of NCBI NO: 19552504 NR Description: phosphoglycerate dehydrogenase
  misc_feature (2)..(268): Homolog of NCBI NO: 13516509 NR Description: glyoxylate reductase [Thermococcus litoralis]
  misc_feature (137)..(258): Homolog of NCBI NO: 34901040 NR Description: putative phosphoglycerate dehydrogenase
  misc_feature (1)..(278): Homolog of NCBI NO: 14521645 NR Description: GLYCERATE DEHYDROGENASE [Pyrococcus abyssi]
  misc_feature (1)..(272): Homolog of NCBI NO: 15614165 NR Description: D-3-phosphoglycerate dehydrogenase [Bacillus
  misc_feature (1)..(271): Homolog of NCBI NO: 11498419 NR Description: phosphoglycerate dehydrogenase (serA)
  misc_feature (1)..(177): Homolog of NCBI NO: 34901040 NR Description: putative phosphoglycerate dehydrogenase
  misc_feature (1)..(278): Homolog of NCBI NO: 34901058 NR Description: putative phosphoglycerate dehydrogenase
  misc_feature (1)..(278): Homolog of NCBI NO: 30698851 NR Description: oxidoreductase family [Arabidopsis thaliana]
  misc_feature (1)..(278): Homolog of NCBI NO: 25406154 NR Description: hypothetical protein T9N14.9 [imported] -
MRLDSEIISRAVQMQLIMQYGVGLEGVDIDAATKHGIKVARIPGDVSGNSASCAEMAIYLMLGLLRKQNELQVSIQQKKLGEPITETLLGKTIFILGFGNIGMDLAKRLQPFGVKVIAIKRSWASYAQHASKLSRNDAEDLVDVKGSHEDIYEFARKADIVVCCLTLNRETVGIINNKFISSMKKGGLLVNVARGGLVDYEAVINHLESGHLGGLGTDVAWTEPFNPDDQIFKFKNVIMTPHVAGVTEHSYRSMAKAVGDVVLQLHAGLPLTGIELVN

SEQ ID NO: 56868 - DNA, 1983 bp, Glycine max
  misc_feature (1)..(1983): Ceres Seq. ID no. 14314659
aagcgcccgccattgccaaagagaagagtgcgaaacaagaagaagaaaatttctcatttctcgttctgaaaatcggagttcaacgctattattatatttgtgatatcttctatctgattcagcatcatggttcagctaatgaggtctgatacggataatcactgtctgaaaaaggtgaagttggaggttcaagatgaaatcccccctcttcacactcacaagcgacccaaattggaatctccccctaagtgtggtgcaagcgatgaatccatttcaatcccaccagcttcatacaatcccttggatgagccaagccctttgggtttgcgtctcaggaagagtccctcccttttggatttgattcagatgaggctctcgcaacaagaggaatccaaaaagaaagatcaaaaggcttcttcttcttcttctgctgctgctgctgctgctgctgctgattctaaacttaaggcctccaattttcctggaaccattttgaaaattgggaattgggagtataagtctagatatgaaggagacttggtggcgaagtgttactttgcgaagcataagctggtatgggaagtccttgatggttgtcttaagaataagattgaaatcccatggtctgatatcatggctatcaaggctaactaccctgatgatggaccaggtacgctcgaagtagtgcttgcaagaagacccttgttttttagggagatcaatccacagccaaggaagcataccttatggcaggcaacatcggactttactggtggacaagccggcataaacaggcgacattttctgcagtgtccacaaggattgctaggcaagcattttgagaagctcattcagtgtgatccccgtctcaactatctaagccagcaggcggatttggtgttggattctccgtattttgaacctggaacaacttcaattcacgaccacattgaatctagtgatggctttgatagaaaaagcgaagagcgatctggtatttttggattgcaggatgtggagtcaggatctgcagttcaatcatcttcctcaaaaagtgaacataaccttggtaaagctgttgaaaatgtttcccaagaaattacctcacctagctcagtgatgaacatccatgcaatgaaagatttcaggagtagaggagctgaaacattgaagtttcttagtaatttggaccagatcaaattgcctggacttcacccttctatgtcaatggacgatttggttagccacattggacattgcatttcagaacagatgggatctgacaatccaaatttcgctggtgacaaccagtatagcagatctattctggaagaatttactcagtacttgttcaatgactctcaacatgcaactacctccgatgaacagcgtgtcatgtcaaaggtaaactcactctactgccttctgcagaaggatccttctacagcagaagacatgaccaaaaatggcaatagtctgggagatgcaaatgccttgtcaagggtgaactcactatactcccttctgcagaatgcagaagacgcaatggccagaaatggcaatggtctgagagatgcagatgtgatgtcaagggtgaactcgctgtactgtcttctgcagaaggatccttatacagcagaagacacaaacacaatgacaagaaatggcaatggtcttgatgcagatgagggtggaaaagttggtgtgagtaactccactgaattgtcacaaccatgcaaaactaaagtgtctgatttggaagttcaagcggatgatgcttctggctgcaagcagggggggactggtatgtccaggaaggaatcagctggcgatttgcttcttaatcttccaagggtggcatctctgcttcagtttttgtttaacatgtccgaggattctgttaataaagttagatagatagtaaccatctttcaaaacttgcaagaaacacaaaagctatattatcaacaatgtgaatattgt

SEQ ID NO: 56869 - protein, 596 aa, Glycine max
  peptide (1)..(596): Ceres Seq. ID no. 14314660
  misc_feature (111)..(279): Homolog of NCBI NO: 28828403 NR Description: similar to Dictyostelium discoideum (Slime mold).
  misc_feature (65)..(267): Homolog of NCBI NO: 25405713 NR Description: hypothetical protein F20D21.12 [imported] -
  misc_feature (59)..(267): Homolog of NCBI NO: 15230043 NR Description: hypothetical protein [Arabidopsis thaliana]
  misc_feature (103)..(278): Homolog of NCBI NO: 20218825 NR Description: hypothetical protein [Pinus pinaster]
  misc_feature (519)..(590): Homolog of NCBI NO: 18400458 NR Description: expressed protein [Arabidopsis thaliana]
  misc_feature (17)..(340): Homolog of NCBI NO: 18400458 NR Description: expressed protein [Arabidopsis thaliana]
  misc_feature (519)..(590): Homolog of NCBI NO: 25371341 NR Description: hypothetical protein At2g24100 [imported] -
  misc_feature (1)..(340): Homolog of NCBI NO: 25371341 NR Description: hypothetical protein At2g24100 [imported] -
  misc_feature (483)..(590): Homolog of NCBI NO: 15234853 NR Description: expressed protein [Arabidopsis thaliana]
  misc_feature (17)..(423): Homolog of NCBI NO: 15234853 NR Description: expressed protein [Arabidopsis thaliana]
MVQLMRSDTDNHCLKKVKLEVQDEIPPLHTHKRPKLESPPKCGASDESISIPPASYNPLDEPSPLGLRLRKSPSLLDLIQMRLSQQEESKKKDQKASSSSSAAAAAAAADSKLKASNFPGTILKIGNWEYKSRYEGDLVAKCYFAKHKLVWEVLDGCLKNKIEIPWSDIMAIKANYPDDGPGTLEVVLARRPLFFREINPQPRKHTLWQATSDFTGGQAGINRRHFLQCPQGLLGKHFEKLIQCDPRLNYLSQQADLVLDSPYFEPGTTSIHDHIESSDGFDRKSEERSGIFGLQDVESGSAVQSSSSKSEHNLGKAVENVSQEITSPSSVMNIHAMKDFRSRGAETLKFLSNLDQIKLPGLHPSMSMDDLVSHIGHCISEQMGSDNPNFAGDNQYSRSILEEFTQYLFNDSQHATTSDEQRVMSKVNSLYCLLQKDPSTAEDMTKNGNSLGDANALSRVNSLYSLLQNAEDAMARNGNGLRDADVMSRVNSLYCLLQKDPYTAEDTNTMTRNGNGLDADEGGKVGVSNSTELSQPCKTKVSDLEVQADDASGCKQGGTGMSRKESAGDLLLNLPRVASLLQFLFNMSEDSVNKVR

SEQ ID NO: 56870 - protein, 592 aa, Glycine max
  peptide (1)..(592): Ceres Seq. ID no. 14314661
  misc_feature (107)..(275): Homolog of NCBI NO: 28828403 NR Description: similar to Dictyostelium discoideum (Slime mold).
  misc_feature (61)..(263): Homolog of NCBI NO: 25405713 NR Description: hypothetical protein F20D21.12 [imported] -
  misc_feature (55)..(263): Homolog of NCBI NO: 15230043 NR Description: hypothetical protein [Arabidopsis thaliana]
  misc_feature (99)..(274): Homolog of NCBI NO: 20218825 NR Description: hypothetical protein [Pinus pinaster]
  misc_feature (515)..(586): Homolog of NCBI NO: 18400458 NR Description: expressed protein [Arabidopsis thaliana]
  misc_feature (13)..(336): Homolog of NCBI NO: 18400458 NR Description: expressed protein [Arabidopsis thaliana]
  misc_feature (515)..(586): Homolog of NCBI NO: 25371341 NR Description: hypothetical protein At2g24100 [imported] -
  misc_feature (1)..(336): Homolog of NCBI NO: 25371341 NR Description: hypothetical protein At2g24100 [imported] -
  misc_feature (479)..(586): Homolog of NCBI NO: 15234853 NR Description: expressed protein [Arabidopsis thaliana]
  misc_feature (13)..(419): Homolog of NCBI NO: 15234853 NR Description: expressed protein [Arabidopsis thaliana]
MRSDTDNHCLKKVKLEVQDEIPPLHTHKRPKLESPPKCGASDESISIPPASYNPLDEPSPLGLRLRKSPSLLDLIQMRLSQQEESKKKDQKASSSSSAAAAAAAADSKLKASNFPGTILKIGNWEYKSRYEGDLVAKCYFAKHKLVWEVLDGCLKNKIEIPWSDIMAIKANYPDDGPGTLEVVLARRPLFFREINPQPRKHTLWQATSDFTGGQAGINRRHFLQCPQGLLGKHFEKLIQCDPRLNYLSQQADLVLDSPYFEPGTTSIHDHIESSDGFDRKSEERSGIFGLQDVESGSAVQSSSSKSEHNLGKAVENVSQEITSPSSVMNIHAMKDFRSRGAETLKFLSNLDQIKLPGLHPSMSMDDLVSHIGHCISEQMGSDNPNFAGDNQYSRSILEEFTQYLFNDSQHATTSDEQRVMSKVNSLYCLLQKDPSTAEDMTKNGNSLGDANALSRVNSLYSLLQNAEDAMARNGNGLRDADVMSRVNSLYCLLQKDPYTAEDTNTMTRNGNGLDADEGGKVGVSNSTELSQPCKTKVSDLEVQADDASGCKQGGTGMSRKESAGDLLLNLPRVASLLQFLFNMSEDSVNKVR

SEQ ID NO: 56871 - protein, 516 aa, Glycine max
  peptide (1)..(516): Ceres Seq. ID no. 14314662
  misc_feature (31)..(199): Homolog of NCBI NO: 28828403 NR Description: similar to Dictyostelium discoideum (Slime mold).
  misc_feature (1)..(187): Homolog of NCBI NO: 25405713 NR Description: hypothetical protein F20D21.12 [imported] -
  misc_feature (1)..(187): Homolog of NCBI NO: 15230043 NR Description: hypothetical protein [Arabidopsis thaliana]
  misc_feature (23)..(198): Homolog of NCBI NO: 20218825 NR Description: hypothetical protein [Pinus pinaster]
  misc_feature (439)..(510): Homolog of NCBI NO: 18400458 NR Description: expressed protein [Arabidopsis thaliana]
  misc_feature (1)..(260): Homolog of NCBI NO: 18400458 NR Description: expressed protein [Arabidopsis thaliana]
  misc_feature (439)..(510): Homolog of NCBI NO: 25371341 NR Description: hypothetical protein At2g24100 [imported] -
  misc_feature (1)..(260): Homolog of NCBI NO: 25371341 NR Description: hypothetical protein At2g24100 [imported] -
  misc_feature (403)..(510): Homolog of NCBI NO: 15234853 NR Description: expressed protein [Arabidopsis thaliana]
  misc_feature (1)..(343): Homolog of NCBI NO: 15234853 NR Description: expressed protein [Arabidopsis thaliana]
MRLSQQEESKKKDQKASSSSSAAAAAAAADSKLKASNFPGTILKIGNWEYKSRYEGDLVAKCYFAKHKLVWEVLDGCLKNKIEIPWSDIMAIKANYPDDGPGTLEVVLARRPLFFREINPQPRKHTLWQATSDFTGGQAGINRRHFLQCPQGLLGKHFEKLIQCDPRLNYLSQQADLVLDSPYFEPGTTSIHDHIESSDGFDRKSEERSGIFGLQDVESGSAVQSSSSKSEHNLGKAVENVSQEITSPSSVMNIHAMKDFRSRGAETLKFLSNLDQIKLPGLHPSMSMDDLVSHIGHCISEQMGSDNPNFAGDNQYSRSILEEFTQYLFNDSQHATTSDEQRVMSKVNSLYCLLQKDPSTAEDMTKNGNSLGDANALSRVNSLYSLLQNAEDAMARNGNGLRDADVMSRVNSLYCLLQKDPYTAEDTNTMTRNGNGLDADEGGKVGVSNSTELSQPCKTKVSDLEVQADDASGCKQGGTGMSRKESAGDLLLNLPRVASLLQFLFNMSEDSVNKVR

SEQ ID NO: 56872 - DNA, 1731 bp, Glycine max
  misc_feature (1)..(1731): Ceres Seq. ID no. 14314620
gacaaagatctcactcaattcaaccgcctccactctcacgcaaaccatttttcttttctttctctccctctgagcctttcatcgctgcctcggagagatggcagtgtcggaaggatcaccaacccctcagacggttggcaatgcttttgttgagcagtattactccatactgcatcaaaagccagaccaagttcacagattttaccacgagtctagcatcctaagccgacctgaagaagatggtaccatgactatggtgactactactttggaaattaataaaaagatactctctctggattacacaagctttagggtggaaattctgagtgctgatgcacagccttcttacaaggatggggtaattgttgtagtgactggctgcttaactggaagtgacaatctgaaaaggaagtttactcagtcctttttcctagctccccaggacaaaggctactttgttttgaatgatgttttcagatatgttgatgagtataagtcagttgatattgagtctgtgcctgcaaacgatgctgctgatgaaagtgctccaacagatgcttttgtccccgagcctgaggccattcatgttgctgaagatgttcccgctagtcaaactgatgttgttgatgctgacattggtgtcagtaaagaagtgagtcaaccactagagaatggaaatttatcagttactgaaaaggtggtgcctgttgatcatgttaaagaatgcagtcatcaggaacatcattcacacgctgagaaagctgcttctaataattcactggaggatactccaaagaagtcttttgcatccattgtgaatgcactaaaagaaaatgctgctcccttccatgtgagggtttcccctgtgaaacttcttgaacaaccacgtgtttctagtatacctgcaccagaagcaccagctcctagcactgacagtccaccagaaaagaataatgagattggaggtaaggcttatgcaatatttgttgcaaatttgcccatgaatgcaacagttgaacagctggaacgtgttttccagaaattttgggcccattaaacgggatggctttcaggttagaagtaacaagcaacaacaatccttgttttggttttggggaaatttgaatctgctacttcaatgcaaagtgcacttgaggcttctcctcctgttaccttggatggacgtagactttcaattgaagagcgacgagcaaataatgatagggggaggcattcatcaggaaggggcagttaccggaatgacagaaacgataacttcaggggccgtggcaacttcggtggtggccatggtggcggttatggaaacaggaaatgatagtttcgagaagcgaagcgagttctctggccggcctcgtggtggcaacaatggtgggcgtagcaatggagaagctgttccaaggagttatcagaatggaggagcaaaagtcactgtcaaccagtgaaagttcagtaaagtgattcattttgttgggaattgagtgacaacggcatttttcttatagatagcggcatctagggattctggtttgcaactgcattaagagttttttttctctattcctttatagctgtcatgatccttttgcttcagagtttttttggttaaatcacatcattccctatattcctttaaatcacattttgtatctaatattccggaataattgttttggaactgcccacaattatgccatttttttagaagcc

SEQ ID NO: 56873 - protein, 320 aa, Glycine max
  peptide (1)..(320): Ceres Seq. ID no. 14314621
  misc_feature (13)..(129): Pfam Name: Nuclear transport factor 2 (NTF2) domain Pfam Description: Nuclear transport factor 2 (NTF2) domain
  misc_feature (7)..(281): Homolog of NCBI NO: 25411027 NR Description: hypothetical protein At2g03640 [imported] -
  misc_feature (1)..(272): Homolog of NCBI NO: 18394029 NR Description: NTF2-containing RNA-binding protein, putative
  misc_feature (1)..(320): Homolog of NCBI NO: 15222258 NR Description: NTF2-containing RNA-binding protein, putative
  misc_feature (2)..(287): Homolog of NCBI NO: 21742151 NR Description: OSJNBa0069D17.2 [Oryza sativa (japonica
  misc_feature (1)..(320): Homolog of NCBI NO: 31126693 NR Description: putative GAP SH3 binding protein
  misc_feature (13)..(320): Homolog of NCBI NO: 9294171 NR Description: RNA-binding protein-like [Arabidopsis thaliana]
  misc_feature (1)..(320): Homolog of NCBI NO: 21553535 NR Description: ras-GTPase-activating protein SH3-domain binding
  misc_feature (1)..(320): Homolog of NCBI NO: 30687772 NR Description: NTF2-containing RNA-binding protein, putative
  misc_feature (1)..(320): Homolog of NCBI NO: 30697452 NR Description: NTF2-containing RNA-binding protein, putative
  misc_feature (1)..(320): Homolog of NCBI NO: 30697455 NR Description: NTF2-containing RNA-binding protein, putative
MAVSEGSPTPQTVGNAFVEQYYSILHQKPDQVHRFYHESSILSRPEEDGTMTMVTTTLEINKKILSLDYTSFRVEILSADAQPSYKDGVIVVVTGCLTGSDNLKRKFTQSFFLAPQDKGYFVLNDVFRYVDEYKSVDIESVPANDAADESAPTDAFVPEPEAIHVAEDVPASQTDVVDADIGVSKEVSQPLENGNLSVTEKVVPVDHVKECSHQEHHSHAEKAASNNSLEDTPKKSFASIVNALKENAAPFHVRVSPVKLLEQPRVSSIPAPEAPAPSTDSPPEKNNEIGGKAYAIFVANLPMNATVEQLERVFQKFWAH

SEQ ID NO: 56874 - protein, 270 aa, Glycine max
  peptide (1)..(270): Ceres Seq. ID no. 14314622
  misc_feature (1)..(79): Pfam Name: Nuclear transport factor 2 (NTF2) domain Pfam Description: Nuclear transport factor 2 (NTF2) domain
  misc_feature (1)..(231): Homolog of NCBI NO: 25411027 NR Description: hypothetical protein At2g03640 [imported] -
  misc_feature (1)..(222): Homolog of NCBI NO: 18394029 NR Description: NTF2-containing RNA-binding protein, putative
  misc_feature (1)..(270): Homolog of NCBI NO: 15222258 NR Description: NTF2-containing RNA-binding protein, putative
  misc_feature (1)..(237): Homolog of NCBI NO: 21742151 NR Description: OSJNBa0069D17.2 [Oryza sativa (japonica
  misc_feature (1)..(270): Homolog of NCBI NO: 31126693 NR Description: putative GAP SH3 binding protein
  misc_feature (1)..(270): Homolog of NCBI NO: 9294171 NR Description: RNA-binding protein-like [Arabidopsis thaliana]
  misc_feature (1)..(270): Homolog of NCBI NO: 21553535 NR Description: ras-GTPase-activating protein SH3-domain binding
  misc_feature (1)..(270): Homolog of NCBI NO: 30687772 NR Description: NTF2-containing RNA-binding protein, putative
  misc_feature (1)..(270): Homolog of NCBI NO: 30697452 NR Description: NTF2-containing RNA-binding protein, putative
  misc_feature (1)..(270): Homolog of NCBI NO: 30697455 NR Description: NTF2-containing RNA-binding protein, putative
MTMVTTTLEINKKILSLDYTSFRVEILSADAQPSYKDGVIVVVTGCLTGSDNLKRKFTQSFFLAPQDKGYFVLNDVFRYVDEYKSVDIESVPANDAADESAPTDAFVPEPEAIHVAEDVPASQTDVVDADIGVSKEVSQPLENGNLSVTEKVVPVDHVKECSHQEHHSHAEKAASNNSLEDTPKKSFASIVNALKENAAPFHVRVSPVKLLEQPRVSSIPAPEAPAPSTDSPPEKNNEIGGKAYAIFVANLPMNATVEQLERVFQKFWAH

SEQ ID NO: 56875 - protein, 268 aa, Glycine max
  peptide (1)..(268): Ceres Seq. ID no. 14314623
  misc_feature (1)..(77): Pfam Name: Nuclear transport factor 2 (NTF2) domain Pfam Description: Nuclear transport factor 2 (NTF2) domain
  misc_feature (1)..(229): Homolog of NCBI NO: 25411027 NR Description: hypothetical protein At2g03640 [imported] -
  misc_feature (1)..(220): Homolog of NCBI NO: 18394029 NR Description: NTF2-containing RNA-binding protein, putative
  misc_feature (1)..(268): Homolog of NCBI NO: 15222258 NR Description: NTF2-containing RNA-binding protein, putative
  misc_feature (1)..(235): Homolog of NCBI NO: 21742151 NR Description: OSJNBa0069D17.2 [Oryza sativa (japonica
  misc_feature (1)..(268): Homolog of NCBI NO: 31126693 NR Description: putative GAP SH3 binding protein
  misc_feature (1)..(268): Homolog of NCBI NO: 9294171 NR Description: RNA-binding protein-like [Arabidopsis thaliana]
  misc_feature (1)..(268): Homolog of NCBI NO: 21553535 NR Description: ras-GTPase-activating protein SH3-domain binding
  misc_feature (1)..(268): Homolog of NCBI NO: 30687772 NR Description: NTF2-containing RNA-binding protein, putative
  misc_feature (1)..(268): Homolog of NCBI NO: 30697452 NR Description: NTF2-containing RNA-binding protein, putative
  misc_feature (1)..(268): Homolog of NCBI NO: 30697455 NR Description: NTF2-containing RNA-binding protein, putative
MVTTTLEINKKILSLDYTSFRVEILSADAQPSYKDGVIVVVTGCLTGSDNLKRKFTQSFFLAPQDKGYFVLNDVFRYVDEYKSVDIESVPANDAADESAPTDAFVPEPEAIHVAEDVPASQTDVVDADIGVSKEVSQPLENGNLSVTEKVVPVDHVKECSHQEHHSHAEKAASNNSLEDTPKKSFASIVNALKENAAPFHVRVSPVKLLEQPRVSSIPAPEAPAPSTDSPPEKNNEIGGKAYAIFVANLPMNATVEQLERVFQKFWAH

SEQ ID NO: 56876 - DNA, 910 bp, Glycine max
  misc_feature (1)..(910): Ceres Seq. ID no. 14306315
atagttgaatttttaacttgtctgttcttatcttcatcctacgccaatagcccaaaaccttgttctctttttgtggttcatttctctcttccagatgccacttgccgttcttcaccctcacgattttctcaggaaaaacccatctaaccagtaccagaccataatccctcactctcccaacatgaatcctaataagtctcatcggacttcccgaaaccgtaagaagcggcccgatccaagcccacaaggcgttgtcagcccagcccggctcacattatccccgaaaccccaagtcaaaaacaagccgcagcagcaactcgtcatgggtcaggtcaaaatactcaaacgcggccaacttttgacccaaacgacgccggatccaccgccgcagacggaaatcgtcgatcagaagttaactccgcagacggaaaccgtcgaaaaaaaggacttaacttcaatcgtagatggtttatatgcaggctattcgatgttggtgatgtctccacctcctagctccgttccgttaccggctttcatcactaagaagattgcggttgttagtgacgccacgagcgacttgcggaaaatgttacggcttgattttccctaatcctgtggcggtttgtgaatgaacgaggatttgaacggaggttgttggtgattagggcattgtagtgctcgatcttctcttattttttcagcgggaaggtcgtgtcacgaatgcaagtctcttattgtttagaactttcttcagattgccgtacatacatgttactactgggattagtcttcgtactttttagattaattactttgtgatactaattattagttttaaggaataggcttctgtatatctgtgtaatgctttgtaagtatttaggatatagaagcattttcttcctctctc

SEQ ID NO: 56877 - protein, 171 aa, Glycine max
  peptide (1)..(171): Ceres Seq. ID no. 14306316
  misc_feature (1)..(169): Homolog of NCBI NO: 14326506 NR Description: AT4g32020/F10N7_170 [Arabidopsis thaliana]
  misc_feature (1)..(169): Homolog of NCBI NO: 15236646 NR Description: expressed protein [Arabidopsis thaliana]
MPLAVLHPHDFLRKNPSNQYQTIIPHSPNMNPNKSHRTSRNRKKRPDPSPQGVVSPARLTLSPKPQVKNKPQQQLVMGQVKILKRGQLLTQTTPDPPPQTEIVDQKLTPQTETVEKKDLTSIVDGLYAGYSMLVMSPPPSSVPLPAFITKKIAVVSDATSDLRKMLRLDFP

SEQ ID NO: 56878 - protein, 142 aa, Glycine max
  peptide (1)..(142): Ceres Seq. ID no. 14306317
  misc_feature (1)..(140): Homolog of NCBI NO: 14326506 NR Description: AT4g32020/F10N7_170 [Arabidopsis thaliana]
  misc_feature (1)..(140): Homolog of NCBI NO: 15236646 NR Description: expressed protein [Arabidopsis thaliana]
MNPNKSHRTSRNRKKRPDPSPQGVVSPARLTLSPKPQVKNKPQQQLVMGQVKILKRGQLLTQTTPDPPPQTEIVDQKLTPQTETVEKKDLTSIVDGLYAGYSMLVMSPPPSSVPLPAFITKKIAVVSDATSDLRKMLRLDFP

SEQ ID NO: 56879 - protein, 95 aa, Glycine max
  peptide (1)..(95): Ceres Seq. ID no. 14306318
  misc_feature (1)..(93): Homolog of NCBI NO: 14326506 NR Description: AT4g32020/F10N7_170 [Arabidopsis thaliana]
  misc_feature (1)..(93): Homolog of NCBI NO: 15236646 NR Description: expressed protein [Arabidopsis thaliana]
MGQVKILKRGQLLTQTTPDPPPQTEIVDQKLTPQTETVEKKDLTSIVDGLYAGYSMLVMSPPPSSVPLPAFITKKIAVVSDATSDLRKMLRLDFP

SEQ ID NO: 56880 - DNA, 1329 bp, Glycine max
  misc_feature (1)..(1329): Ceres Seq. ID no. 14315035
accacaccaccctactacattcccacctttagtcttgttcttagagatggcttgtgaaaccaagtcatggttggttatgtttcttgttttcttggttgctaattgcatgcaacattgtgtccacggggtgtctcaagtgccttgcctttttatctttggggactctatgtctgatagtggaaacaacaatgaacttccaaccacttcaaaatctaatttcagaccatatgggatcgactttccattaggaccaactgggagatataccaatggccgaacagaaattgacataatcactcaatttctgggatttgagaaatttatcccaccctttgcaaacactagtggttcagacatacttaaaggtgttaactatgcatcaggtggatctggtatacgcaacgaaactggctggcattatggtgctgctatcggcttgggattacagttagcaaatcacagagtcatagtatctgaaattgctaccaaacttggaagtcctgacttagctcgacaataccttgaaaaatgcttgtattatgtgaacataggcagcaatgattacatgggcaattacttccttcccccgttctacccaacaagcaccatttataccattgaggagtttacacaagttctgattgaagagttatctctgaatttacaggctttacatgacattggagcaagaaagtatgccttggctgggttgggccttataggatgcaccccaggtatggtgagtgctcatgggacaaatggatcatgtgctgaagagcaaaatctcgctgcattcaatttcaataacaagcttaaagctcgagtggatcaattcaacaatgatttctattatgctaattccaaattcatctttataaacactcaagcattggccattgagcttcgcgataaatatggttttccggttccggaaactccttgctgcctaccgggattaacaggggagtgtgttcctgatcaagagccgtgctataataggaatgactatgtgttttttgatgctttccatcccaccgagcaatggaacctactcaatgcattgacatcttataattctaccactaattcagccttcacttatccaatggatatcaagcaccttgttgatcatgaaattaagacggaattggagctcacaaatgagtccacttcacaacttagtgccactgaataagttctggttatcatgtagtcgttcatatggagttgaaataattgtgagttgaatatgtattaagtaatggcctgccactgaattgaacgacaaagtggaatgaatcaagtgaataaattggctatcctgcctcg

SEQ ID NO: 56881 - protein, 397 aa, Glycine max
  peptide (1)..(397): Ceres Seq. ID no. 14315036
  misc_feature (50)..(356): Pfam Name: GDSL-like Lipase/Acylhydrolase Pfam Description: GDSL-like Lipase/Acylhydrolase
  misc_feature (44)..(376): Homolog of NCBI NO: 18398991 NR Description: GDSL-motif lipase/hydrolase protein [Arabidopsis
  misc_feature (25)..(374): Homolog of NCBI NO: 21618199 NR Description: GDSL-motif lipase/hydrolase-like protein
  misc_feature (21)..(374): Homolog of NCBI NO: 21594055 NR Description: lipase/hydrolase, putative [Arabidopsis thaliana]
  misc_feature (21)..(374): Homolog of NCBI NO: 15220512 NR Description: GDSL-motif lipase/hydrolase protein [Arabidopsis
  misc_feature (25)..(374): Homolog of NCBI NO: 18415211 NR Description: GDSL-motif lipase/hydrolase protein [Arabidopsis
  misc_feature (25)..(374): Homolog of NCBI NO: 7485419 NR Description: hypothetical protein F13C5.140 - Arabidopsis
  misc_feature (25)..(374): Homolog of NCBI NO: 21553940 NR Description: GDSL-motif lipase/hydrolase-like protein
  misc_feature (25)..(374): Homolog of NCBI NO: 15242458 NR Description: GDSL-motif lipase/hydrolase protein [Arabidopsis
  misc_feature (21)..(374): Homolog of NCBI NO: 21592417 NR Description: lipase/hydrolase, putative [Arabidopsis thaliana]
  misc_feature (21)..(374): Homolog of NCBI NO: 15220514 NR Description: GDSL-motif lipase/hydrolase protein [Arabidopsis
PHHPTTFPPLVLFLEMACETKSWLVMFLVFLVANCMQHCVHGVSQVPCLFIFGDSMSDSGNNNELPTTSKSNFRPYGIDFPLGPTGRYTNGRTEIDIITQFLGFEKFIPPFANTSGSDILKGVNYASGGSGIRNETGWHYGAAIGLGLQLANHRVIVSEIATKLGSPDLARQYLEKCLYYVNIGSNDYMGNYFLPPFYPTSTIYTIEEFTQVLIEELSLNLQALHDIGARKYALAGLGLIGCTPGMVSAHGTNGSCAEEQNLAAFNFNNKLKARVDQFNNDFYYANSKFIFINTQALAIELRDKYGFPVPETPCCLPGLTGECVPDQEPCYNRNDYVFFDAFHPTEQWNLLNALTSYNSTTNSAFTYPMDIKHLVDHEIKTELELTNESTSQLSATE

SEQ ID NO: 56882 - protein, 382 aa, Glycine max
  peptide (1)..(382): Ceres Seq. ID no. 14315037
  misc_feature (35)..(341): Pfam Name: GDSL-like Lipase/Acylhydrolase Pfam Description: GDSL-like Lipase/Acylhydrolase
  misc_feature (29)..(361): Homolog of NCBI NO: 18398991 NR Description: GDSL-motif lipase/hydrolase protein [Arabidopsis
  misc_feature (10)..(359): Homolog of NCBI NO: 21618199 NR Description: GDSL-motif lipase/hydrolase-like protein
  misc_feature (6)..(359): Homolog of NCBI NO: 21594055 NR Description: lipase/hydrolase, putative [Arabidopsis thaliana]
  misc_feature (6)..(359): Homolog of NCBI NO: 15220512 NR Description: GDSL-motif lipase/hydrolase protein [Arabidopsis
  misc_feature (10)..(359): Homolog of NCBI NO: 18415211 NR Description: GDSL-motif lipase/hydrolase protein [Arabidopsis
  misc_feature (10)..(359): Homolog of NCBI NO: 7485419 NR Description: hypothetical protein F13C5.140 - Arabidopsis
  misc_feature (10)..(359): Homolog of NCBI NO: 21553940 NR Description: GDSL-motif lipase/hydrolase-like protein
  misc_feature (10)..(359): Homolog of NCBI NO: 15242458 NR Description: GDSL-motif lipase/hydrolase protein [Arabidopsis
  misc_feature (6)..(359): Homolog of NCBI NO: 21592417 NR Description: lipase/hydrolase, putative [Arabidopsis thaliana]
  misc_feature (6)..(359): Homolog of NCBI NO: 15220514 NR Description: GDSL-motif lipase/hydrolase protein [Arabidopsis
MACETKSWLVMFLVFLVANCMQHCVHGVSQVPCLFIFGDSMSDSGNNNELPTTSKSNFRPYGIDFPLGPTGRYTNGRTEIDIITQFLGFEKFIPPFANTSGSDILKGVNYASGGSGIRNETGWHYGAAIGLGLQLANHRVIVSEIATKLGSPDLARQYLEKCLYYVNIGSNDYMGNYFLPPFYPTSTIYTIEEFTQVLIEELSLNLQALHDIGARKYALAGLGLIGCTPGMVSAHGTNGSCAEEQNLAAFNFNNKLKARVDQFNNDFYYANSKFIFINTQALAIELRDKYGFPVPETPCCLPGLTGECVPDQEPCYNRNDYVFFDAFHPTEQWNLLNALTSYNSTTNSAFTYPMDIKHLVDHEIKTELELTNESTSQLSATE

SEQ ID NO: 56883 - protein, 372 aa, Glycine max
  peptide (1)..(372): Ceres Seq. ID no. 14315038
  misc_feature (25)..(331): Pfam Name: GDSL-like Lipase/Acylhydrolase Pfam Description: GDSL-like Lipase/Acylhydrolase
  misc_feature (19)..(351): Homolog of NCBI NO: 18398991 NR Description: GDSL-motif lipase/hydrolase protein [Arabidopsis
  misc_feature (1)..(349): Homolog of NCBI NO: 21618199 NR Description: GDSL-motif lipase/hydrolase-like protein
  misc_feature (1)..(349): Homolog of NCBI NO: 21594055 NR Description: lipase/hydrolase, putative [Arabidopsis thaliana]
  misc_feature (1)..(349): Homolog of NCBI NO: 15220512 NR Description: GDSL-motif lipase/hydrolase protein [Arabidopsis
  misc_feature (1)..(349): Homolog of NCBI NO: 18415211 NR Description: GDSL-motif lipase/hydrolase protein [Arabidopsis
  misc_feature (1)..(349): Homolog of NCBI NO: 7485419 NR Description: hypothetical protein F13C5.140 - Arabidopsis
  misc_feature (1)..(349): Homolog of NCBI NO: 21553940 NR Description: GDSL-motif lipase/hydrolase-like protein
  misc_feature (1)..(349): Homolog of NCBI NO: 15242458 NR Description: GDSL-motif lipase/hydrolase protein [Arabidopsis
  misc_feature (1)..(349): Homolog of NCBI NO: 21592417 NR Description: lipase/hydrolase, putative [Arabidopsis thaliana]
  misc_feature (1)..(349): Homolog of NCBI NO: 15220514 NR Description: GDSL-motif lipase/hydrolase protein [Arabidopsis
MFLVFLVANCMQHCVHGVSQVPCLFIFGDSMSDSGNNNELPTTSKSNFRPYGIDFPLGPTGRYTNGRTEIDIITQFLGFEKFIPPFANTSGSDILKGVNYASGGSGIRNETGWHYGAAIGLGLQLANHRVIVSEIATKLGSPDLARQYLEKCLYYVNIGSNDYMGNYFLPPFYPTSTIYTIEEFTQVLIEELSLNLQALHDIGARKYALAGLGLIGCTPGMVSAHGTNGSCAEEQNLAAFNFNNKLKARVDQFNNDFYYANSKFIFINTQALAIELRDKYGFPVPETPCCLPGLTGECVPDQEPCYNRNDYVFFDAFHPTEQWNLLNALTSYNSTTNSAFTYPMDIKHLVDHEIKTELELTNESTSQLSATE

SEQ ID NO: 56884 - DNA, 832 bp, Glycine max
  misc_feature (1)..(832): Ceres Seq. ID no. 14306303
aaccttacgcattagatcaatattaaagctaaccactcgtttgcattgtatggtatatcattccaagaatctcagctgcagtaaacaacgaccatgaaactaatgacagcaacaacaacgtttgatgtctctgccacatgcttccgtgcccctcctccttcgtgctcaatgaatccatgccacaccagtttttcagttataaactccctgaatcctcacaagggacgacggataagcgttgctgttccacccaagtttccaaacttccggagggaagcatctctgcaggggaatttggaggctattagagtcccaacttcggtgcctgtgcgtgtagcatacgagcttcttctagctggtcatcgatatttggatgtaaggaccccggaagagttcgatgctggacacgctcctggcgcaattaacattccttatatgttcagagttggatcagggatgacaaagaacagcaactttattagagaggtgtcttcacagtttaggaaagatgatgaaattattgtcgggtgtgagcttggtaaaagatctatgatggccgcaagtgacttgctagctgctgggttcactggactcacagacatggctggtggttatgctgcatggacacaaaatggacttccaacagagctatgaagtgtttctgttggaactgtagctgtaaatagaataagttttgggaggagtccaatgcatggaaatgcagaaacacttcaccaagacagtgacaatctgacactgggaaaacaaaaatctataaatggaaaattaaatgtatttgtcgatatcaacaataaataaaatgttaatatat

SEQ ID NO: 56885 - protein, 186 aa, Glycine max
  peptide (1)..(186): Ceres Seq. ID no. 14306304
  misc_feature (77)..(180): Pfam Name: Rhodanese-like domain Pfam Description: Rhodanese-like domain
  misc_feature (63)..(183): Homolog of NCBI NO: 18425042 NR Description: senescence-associated protein [Arabidopsis
  misc_feature (72)..(186): Homolog of NCBI NO: 2129628 NR Description: ketoconazole resistance protein - Arabidopsis
  misc_feature (69)..(185): Homolog of NCBI NO: 30698182 NR Description: senescence-associated protein [Arabidopsis
  misc_feature (41)..(185): Homolog of NCBI NO: 118636 NR Description: Senescence-associated protein DIN1
  misc_feature (45)..(185): Homolog of NCBI NO: 1046268 NR Description: senescence-associated protein [Arabidopsis
  misc_feature (45)..(185): Homolog of NCBI NO: 21537402 NR Description: senescence-associated protein sen1 [Arabidopsis
  misc_feature (45)..(185): Homolog of NCBI NO: 15233328 NR Description: senescence-associated protein sen1 [Arabidopsis
  misc_feature (41)..(185): Homolog of NCBI NO: 7488606 NR Description: senescence-associated protein din1,
  misc_feature (45)..(185): Homolog of NCBI NO: 7340289 NR Description: OP1 [Cucumis sativus]
  misc_feature (37)..(185): Homolog of NCBI NO: 7594903 NR Description: Ntdin [Nicotiana tabacum]
MKLMTATTTFDVSATCFRAPPPSCSMNPCHTSFSVINSLNPHKGRRISVAVPPKFPNFRREASLQGNLEAIRVPTSVPVRVAYELLLAGHRYLDVRTPEEFDAGHAPGAINIPYMFRVGSGMTKNSNFIREVSSQFRKDDEIIVGCELGKRSMMAASDLLAAGFTGLTDMAGGYAAWTQNGLPTEL

SEQ ID NO: 56886 - protein, 183 aa, Glycine max
  peptide (1)..(183): Ceres Seq. ID no. 14306305
  misc_feature (74)..(177): Pfam Name: Rhodanese-like domain Pfam Description: Rhodanese-like domain
  misc_feature (60)..(180): Homolog of NCBI NO: 18425042 NR Description: senescence-associated protein [Arabidopsis
  misc_feature (69)..(183): Homolog of NCBI NO: 2129628 NR Description: ketoconazole resistance protein - Arabidopsis
  misc_feature (66)..(182): Homolog of NCBI NO: 30698182 NR Description: senescence-associated protein [Arabidopsis
  misc_feature (38)..(182): Homolog of NCBI NO: 118636 NR Description: Senescence-associated protein DIN1
  misc_feature (42)..(182): Homolog of NCBI NO: 1046268 NR Description: senescence-associated protein [Arabidopsis
  misc_feature (42)..(182): Homolog of NCBI NO: 21537402 NR Description: senescence-associated protein sen1 [Arabidopsis
  misc_feature (42)..(182): Homolog of NCBI NO: 15233328 NR Description: senescence-associated protein sen1 [Arabidopsis
  misc_feature (38)..(182): Homolog of NCBI NO: 7488606 NR Description: senescence-associated protein din1,
  misc_feature (42)..(182): Homolog of NCBI NO: 7340289 NR Description: OP1 [Cucumis sativus]
  misc_feature (34)..(182): Homolog of NCBI NO: 7594903 NR Description: Ntdin [Nicotiana tabacum]
MTATTTFDVSATCFRAPPPSCSMNPCHTSFSVINSLNPHKGRRISVAVPPKFPNFRREASLQGNLEAIRVPTSVPVRVAYELLLAGHRYLDVRTPEEFDAGHAPGAINIPYMFRVGSGMTKNSNFIREVSSQFRKDDEIIVGCELGKRSMMAASDLLAAGFTGLTDMAGGYAAWTQNGLPTEL

SEQ ID NO: 56887 - protein, 161 aa, Glycine max
  peptide (1)..(161): Ceres Seq. ID no. 14306306
  misc_feature (52)..(155): Pfam Name: Rhodanese-like domain Pfam Description: Rhodanese-like domain
  misc_feature (38)..(158): Homolog of NCBI NO: 18425042 NR Description: senescence-associated protein [Arabidopsis
  misc_feature (47)..(161): Homolog of NCBI NO: 2129628 NR Description: ketoconazole resistance protein - Arabidopsis
  misc_feature (44)..(160): Homolog of NCBI NO: 30698182 NR Description: senescence-associated protein [Arabidopsis
  misc_feature (16)..(160): Homolog of NCBI NO: 118636 NR Description: Senescence-associated protein DIN1
  misc_feature (20)..(160): Homolog of NCBI NO: 1046268 NR Description: senescence-associated protein [Arabidopsis
  misc_feature (20)..(160): Homolog of NCBI NO: 21537402 NR Description: senescence-associated protein sen1 [Arabidopsis
  misc_feature (20)..(160): Homolog of NCBI NO: 15233328 NR Description: senescence-associated protein sen1 [Arabidopsis
  misc_feature (16)..(160): Homolog of NCBI NO: 7488606 NR Description: senescence-associated protein din1,
  misc_feature (20)..(160): Homolog of NCBI NO: 7340289 NR Description: OP1 [Cucumis sativus]
  misc_feature (12)..(160): Homolog of NCBI NO: 7594903 NR Description: Ntdin [Nicotiana tabacum]
MNPCHTSFSVINSLNPHKGRRISVAVPPKFPNFRREASLQGNLEAIRVPTSVPVRVAYELLLAGHRYLDVRTPEEFDAGHAPGAINIPYMFRVGSGMTKNSNFIREVSSQFRKDDEIIVGCELGKRSMMAASDLLAAGFTGLTDMAGGYAAWTQNGLPTEL

SEQ ID NO: 56888 - DNA, 1260 bp, Glycine max
  misc_feature (1)..(1260): Ceres Seq. ID no. 14314628
attaattcgctccctacaattttactttgccataacggtgagtttagagagggaataatggatggaagaggaggctgttgcatcgccaggtatgtacccggtgcatcccacgggtccaccgtcgacaaaataatgcttaggtttcgtccaatcgctcccaaacccgccgccgcggccaccgcttccgacggctcttcgtccgagagcagtgacgcttttctcaaaaacggaaccactaaaagaaagtacgtaagagataacaactacaccagcaaacgaagaatccgccggagaaagaacacttcctcgccggagaaaaagcagaagccggtggtgactcttccgttgcttccggaaactcccgatcggaaggattctcgggcaaaggatctaactccatcaccagctaaaccagtacgaaacaacaacaacaacaacaacaagagcaagaacttgaatattattaacaagaacgtgccggtgtgggtgagttttgagaatcgaagccttacgatgatgggagggtggtgttcgtgtgtgacggtggagggcgtgacggacacgtgcttggagagcgagtggctggggagtacagacgaggaacggagactgaacctcagcaatgacacgtgtccagggttcatatcagacggttacgggagggtgacgtggacgaacgaggcgtacgggaagatgatgatgatgaagggcgagggtgatgagggacagggaccagtgttgctggtgaataaggtgaatacggtggttccgcacgcgtcgttcacgtgcttggtgagggtggtgcaatactcgtgtgggaaggagagaaactcgctcacggtgccctgcgatgtgtggagaatggactgtggtgggtttgcatggagattagacgttaaaactgcgcttagcttgagattgggttattagttcacaaaggtatcacgaactcgaaatacaaaacggcgtcgctccatggtcgtagaactataacactatttcttctcttttaagagcttagaatcgtgaatatatatatctatatatctatatatatatatatataactactgacgctaagctagcttgtttcactgtaaattcatatatgcatgtagcttgtcttttgttctcttagatggttttttctgatttgagtttgagcttggaacagtagctgtgagctaattatgaataactcgctacgtaccgttatggttatgtaacacttcttctggttagtgaaacttttgttacgtc

SEQ ID NO: 56889 - protein, 309 aa, Glycine max
  peptide (1)..(309): Ceres Seq. ID no. 14314629
  misc_feature (20)..(308): Homolog of NCBI NO: 15237494 NR Description: hypothetical protein [Arabidopsis thaliana]
  misc_feature (35)..(307): Homolog of NCBI NO: 15237495 NR Description: hypothetical protein [Arabidopsis thaliana]
  misc_feature (30)..(307): Homolog of NCBI NO: 15232126 NR Description: expressed protein [Arabidopsis thaliana]
  misc_feature (20)..(305): Homolog of NCBI NO: 21537225 NR Description: unknown [Arabidopsis thaliana]
  misc_feature (20)..(305): Homolog of NCBI NO: 18408645 NR Description: expressed protein [Arabidopsis thaliana]
  misc_feature (20)..(305): Homolog of NCBI NO: 15240662 NR Description: expressed protein [Arabidopsis thaliana]
  misc_feature (20)..(305): Homolog of NCBI NO: 15242729 NR Description: expressed protein [Arabidopsis thaliana]
INSLPTILLCHNGEFREGIMDGRGGCCIARYVPGASHGSTVDKIMLRFRPIAPKPAAAATASDGSSSESSDAFLKNGTTKRKYVRDNNYTSKRRIRRRKNTSSPEKKQKPVVTLPLLPETPDRKDSRAKDLTPSPAKPVRNNNNNNNKSKNLNIINKNVPVWVSFENRSLTMMGGWCSCVTVEGVTDTCLESEWLGSTDEERRLNLSNDTCPGFISDGYGRVTWTNEAYGKMMMMKGEGDEGQGPVLLVNKVNTVVPHASFTCLVRVVQYSCGKERNSLTVPCDVWRMDCGGFAWRLDVKTALSLRLGY

SEQ ID NO: 56890 - protein, 290 aa, Glycine max
  peptide (1)..(290): Ceres Seq. ID no. 14314630
  misc_feature (1)..(289): Homolog of NCBI NO: 15237494 NR Description: hypothetical protein [Arabidopsis thaliana]
  misc_feature (16)..(288): Homolog of NCBI NO: 15237495 NR Description: hypothetical protein [Arabidopsis thaliana]
  misc_feature (11)..(288): Homolog of NCBI NO: 15232126 NR Description: expressed protein [Arabidopsis thaliana]
  misc_feature (1)..(286): Homolog of NCBI NO: 21537225 NR Description: unknown [Arabidopsis thaliana]
  misc_feature (1)..(286): Homolog of NCBI NO: 18408645 NR Description: expressed protein [Arabidopsis thaliana]
  misc_feature (1)..(286): Homolog of NCBI NO: 15240662 NR Description: expressed protein [Arabidopsis thaliana]
  misc_feature (1)..(286): Homolog of NCBI NO: 15242729 NR Description: expressed protein [Arabidopsis thaliana]
MDGRGGCCIARYVPGASHGSTVDKIMLRFRPIAPKPAAAATASDGSSSESSDAFLKNGTTKRKYVRDNNYTSKRRIRRRKNTSSPEKKQKPVVTLPLLPETPDRKDSRAKDLTPSPAKPVRNNNNNNNKSKNLNIINKNVPVWVSFENRSLTMMGGWCSCVTVEGVTDTCLESEWLGSTDEERRLNLSNDTCPGFISDGYGRVTWTNEAYGKMMMMKGEGDEGQGPVLLVNKVNTVVPHASFTCLVRVVQYSCGKERNSLTVPCDVWRMDCGGFAWRLDVKTALSLRLGY

SEQ ID NO: 56891 - protein, 265 aa, Glycine max
  peptide (1)..(265): Ceres Seq. ID no. 14314631
  misc_feature (1)..(264): Homolog of NCBI NO: 15237494 NR Description: hypothetical protein [Arabidopsis thaliana]
  misc_feature (1)..(263): Homolog of NCBI NO: 15237495 NR Description: hypothetical protein [Arabidopsis thaliana]
  misc_feature (1)..(263): Homolog of NCBI NO: 15232126 NR Description: expressed protein [Arabidopsis thaliana]
  misc_feature (1)..(261): Homolog of NCBI NO: 21537225 NR Description: unknown [Arabidopsis thaliana]
  misc_feature (1)..(261): Homolog of NCBI NO: 18408645 NR Description: expressed protein [Arabidopsis thaliana]
  misc_feature (1)..(261): Homolog of NCBI NO: 15240662 NR Description: expressed protein [Arabidopsis thaliana]
  misc_feature (1)..(261): Homolog of NCBI NO: 15242729 NR Description: expressed protein [Arabidopsis thaliana]
MLRFRPIAPKPAAAATASDGSSSESSDAFLKNGTTKRKYVRDNNYTSKRRIRRRKNTSSPEKKQKPVVTLPLLPETPDRKDSRAKDLTPSPAKPVRNNNNNNNKSKNLNIINKNVPVWVSFENRSLTMMGGWCSCVTVEGVTDTCLESEWLGSTDEERRLNLSNDTCPGFISDGYGRVTWTNEAYGKMMMMKGEGDEGQGPVLLVNKVNTVVPHASFTCLVRVVQYSCGKERNSLTVPCDVWRMDCGGFAWRLDVKTALSLRLGY

SEQ ID NO: 56892 - DNA, 1454 bp, Glycine max
  misc_feature (1)..(1454): Ceres Seq. ID no. 15171197
ttctttctctctctttttctgtttttttttttgttcctctctctagattttatttgttgttcttcttctttatgagccctaacttggggacccatcgtcgtcgtcgtctttagccatgtcgctgaggaaggtcttccgctcccgcaagttctccagatcgttcaaggaggtgctgccggcggagggcgccgcaattgtcggcggcgaggacggggtcgccggcgccggtgaggagtcgtcgaatgggaataatggttggtccaacatgcttccagagatcctcggcgagatcgtgcggcgcgtggatgccgccgaggaacagtggccgaaccgccagaacgtcgtcgcatgcgcgtgcgtctgcaagcgttggcgtgacatcacgcgcgaggtcgtgcgcgtgccctcccacaccgggaaaataaccttccctgcgtgccttaagcagccaggaccacgtgacgttccccaccaatgtcttataaagcggaacaagaaaacttcaactttttatttatatcttgcccttacaccatcattcacagataaagggaagtttctgctagcagctaggagatataggtgtggtactcataccgagtatataatttcacttgatgctgatgatttatcccaaggaagcaatgcttatgttggaaagctaagctcggattttcttggcaccaacttcacaatttatgacagccagccaccccatagtggtgcaaaaccatcaagtggcagggccagccgtcggtttgccagcaagcagataagcccacaagttcctgcaggtaactttgaggtggggcaggtctcctacaagttcaaccttttgaaatcaagagggccaaggagaatggtttgctcattgaagtgtcccgtgactcctgtcgtctcaccatcggttgaaagttcagatagcacgccggtcaatggccataagattcccgataaagaacaagttgcatctggctacacaatcttgaagaataaagctccaaggtggcatgagcatttgcaatgttggtgcttgaatttccatggccgtgtgacagtggcctcggtgaagaactttcagctggttgcaacagtggaccaaagccaaccaggagggaaaggagatgaggaaacagttctcctccagtttggtaaagtaggggatgatacttttaccatggattatagacagcccttgtctgctttccaggcttttgccatttgcttaactagctttggcactaaacttgcttgtgagtaatataattttggtgtcactgcttatttattccgtggatgaatgtttaagtgaatagttattttattttttttactcggctttgagtcaacaatttgattgcaggaagcttcttgttgtaaatgtgttatatcatcaaataggacatgacatcttccataaatcaaatatattgccctattcaagcggttggtcc

SEQ ID NO: 56893 - protein, 381 aa, Glycine max
  peptide (1)..(381): Ceres Seq. ID no. 15171198
  misc_feature (112)..(381): Pfam Name: Tub family Pfam Description: Tub family
  misc_feature (263)..(381): Homolog of NCBI NO: 30690823 NR Description: F-box containing tubby family protein
  misc_feature (48)..(297): Homolog of NCBI NO: 30690823 NR Description: F-box containing tubby family protein
  misc_feature (290)..(381): Homolog of NCBI NO: 34899264 NR Description: contains ESTs
  misc_feature (48)..(277): Homolog of NCBI NO: 34899264 NR Description: contains ESTs
  misc_feature (1)..(379): Homolog of NCBI NO: 34909710 NR Description: putative Tub family protein
  misc_feature (21)..(111): Homolog of NCBI NO: 34911070 NR Description: putative tubby-like protein
  misc_feature (112)..(381): Homolog of NCBI NO: 34911070 NR Description: putative tubby-like protein
  misc_feature (1)..(185): Homolog of NCBI NO: 7769867 NR Description: F12M16.22 [Arabidopsis thaliana]
  misc_feature (173)..(381): Homolog of NCBI NO: 7769867 NR Description: F12M16.22 [Arabidopsis thaliana]
  misc_feature (1)..(381): Homolog of NCBI NO: 18404413 NR Description: F-box containing tubby family protein
MSLRKVFRSRKFSRSFKEVLPAEGAAIVGGEDGVAGAGEESSNGNNGWSNMLPEILGEIVRRVDAAEEQWPNRQNVVACACVCKRWRDITREVVRVPSHTGKITFPACLKQPGPRDVPHQCLIKRNKKTSTFYLYLALTPSFTDKGKFLLAARRYRCGTHTEYIISLDADDLSQGSNAYVGKLSSDFLGTNFTIYDSQPPHSGAKPSSGRASRRFASKQISPQVPAGNFEVGQVSYKFNLLKSRGPRRMVCSLKCPVTPVVSPSVESSDSTPVNGHKIPDKEQVASGYTILKNKAPRWHEHLQCWCLNFHGRVTVASVKNFQLVATVDQSQPGGKGDEETVLLQFGKVGDDTFTMDYRQPLSAFQAFAICLTSFGTKLACE

SEQ ID NO: 56894 - protein, 331 aa, Glycine max
  peptide (1)..(331): Ceres Seq. ID no. 15171199
  misc_feature (62)..(331): Pfam Name: Tub family Pfam Description: Tub family
  misc_feature (213)..(331): Homolog of NCBI NO: 30690823 NR Description: F-box containing tubby family protein
  misc_feature (1)..(247): Homolog of NCBI NO: 30690823 NR Description: F-box containing tubby family protein
  misc_feature (240)..(331): Homolog of NCBI NO: 34899264 NR Description: contains ESTs
  misc_feature (1)..(227): Homolog of NCBI NO: 34899264 NR Description: contains ESTs
  misc_feature (1)..(329): Homolog of NCBI NO: 34909710 NR Description: putative Tub family protein
  misc_feature (1)..(61): Homolog of NCBI NO: 34911070 NR Description: putative tubby-like protein
  misc_feature (62)..(331): Homolog of NCBI NO: 34911070 NR Description: putative tubby-like protein
  misc_feature (1)..(135): Homolog of NCBI NO: 7769867 NR Description: F12M16.22 [Arabidopsis thaliana]
  misc_feature (123)..(331): Homolog of NCBI NO: 7769867 NR Description: F12M16.22 [Arabidopsis thaliana]
  misc_feature (1)..(331): Homolog of NCBI NO: 18404413 NR Description: F-box containing tubby family protein
MLPEILGEIVRRVDAAEEQWPNRQNVVACACVCKRWRDITREVVRVPSHTGKITFPACLKQPGPRDVPHQCLIKRNKKTSTFYLYLALTPSFTDKGKFLLAARRYRCGTHTEYIISLDADDLSQGSNAYVGKLSSDFLGTNFTIYDSQPPHSGAKPSSGRASRRFASKQISPQVPAGNFEVGQVSYKFNLLKSRGPRRMVCSLKCPVTPVVSPSVESSDSTPVNGHKIPDKEQVASGYTILKNKAPRWHEHLQCWCLNFHGRVTVASVKNFQLVATVDQSQPGGKGDEETVLLQFGKVGDDTFTMDYRQPLSAFQAFAICLTSFGTKLACE

SEQ ID NO: 56895 - DNA, 1069 bp, Glycine max
  misc_feature (1)..(1069): Ceres Seq. ID no. 14306299
caattggcgattcttcctcacggacctaaaccgcaagtggcctaactcccctacaacaccatagctaaactccaaccacatattcttaaaccaagttcacatatataaattaaggtacatagctcaaaattttgtgccacacaccaacccaagtgccaaaatgaaagcccatttggtccttttcttgctcatgattcttgtcaccttcactagcaatgttaacactctctcgattaatcccaaatctaactcttcaattcctcaattgacccaacagaaaaggcctgacaatgagaccatatatagggtgtcaaagcagctatgttggggttgcattgcggagtcactagagtttttgttcaggcacaacttggtgagagcagccaagtgggaacttccactgatgtgggacttccagctggagcaatacgcgaggtggtgggctggtgaaaggaaagcagattgcaagctcgaacattctttcccagaagatggtttcaagcttggagagaacatttattggggtagtggctcagcgtggacgccaagtgatgctgtaagagcatgggctgatgaagagaaatactacacctacgccactaatacctgtgtgccaggtcagatgtgtggccattacactcaaatagtatggaagagcacccgaagaattggatgtgctcgggttgtatgtgatgatggagatgtcttcatgacttgtaattatgaccctgtgggcaattatgttggagagcgaccctattagattcttataaactatgtgtgcattaattcatgtggatagattgaaactctagtattacataatatgtagtgctagcttatgtgagtgtcatgaatttactagctagtttagtttagcagtgagtatgtgcgagtgtatgtatatagtacttgtgggagaatatgggattggttttaataattacctagtacttggaacaataaataaaagtaccaagaagtaattaaagggtaccagtagttggagatctgttgcctgaggttaaactttgagtcaagtgaaataaaatatttatcctcccatgtg

SEQ ID NO: 56896 - protein, 200 aa, Glycine max
  peptide (1)..(200): Ceres Seq. ID no. 14306300
  misc_feature (66)..(187): Pfam Name: SCP-like extracellular protein Pfam Description: SCP-like extracellular protein
  misc_feature (1)..(200): Homolog of NCBI NO: 15235962 NR Description: pathogenesis-related protein, putative
  misc_feature (64)..(200): Homolog of NCBI NO: 3702665 NR Description: pathogenisis-related protein 1.2 [Triticum
  misc_feature (64)..(200): Homolog of NCBI NO: 480679 NR Description: pathogenesis-related protein 1a - barley
  misc_feature (62)..(200): Homolog of NCBI NO: 25518458 NR Description: hypothetical protein F6F3.11 - Arabidopsis
  misc_feature (62)..(200): Homolog of NCBI NO: 15223370 NR Description: pathogenesis-related protein family [Arabidopsis
  misc_feature (55)..(200): Homolog of NCBI NO: 15234704 NR Description: pathogenesis-related protein family [Arabidopsis
  misc_feature (64)..(200): Homolog of NCBI NO: 15235994 NR Description: pathogenesis-related protein, putative
  misc_feature (42)..(200): Homolog of NCBI NO: 22327916 NR Description: pathogenesis-related protein family [Arabidopsis
  misc_feature (64)..(200): Homolog of NCBI NO: 2500715 NR Description: Pathogenesis-related protein PR-1 precursor
  misc_feature (47)..(200): Homolog of NCBI NO: 15235992 NR Description: pathogenesis-related protein, putative
MKAHLVLFLLMILVTFTSNVNTLSINPKSNSSIPQLTQQKRPDNETIYRVSKQLCWGCIAESLEFLFRHNLVRAAKWELPLMWDFQLEQYARWWAGERKADCKLEHSFPEDGFKLGENIYWGSGSAWTPSDAVRAWADEEKYYTYATNTCVPGQMCGHYTQIVWKSTRRIGCARVVCDDGDVFMTCNYDPVGNYVGERPY

SEQ ID NO: 56897 - protein, 190 aa, Glycine max
  peptide (1)..(190): Ceres Seq. ID no. 14306301
  misc_feature (56)..(177): Pfam Name: SCP-like extracellular protein Pfam Description: SCP-like extracellular protein
  misc_feature (1)..(190): Homolog of NCBI NO: 15235962 NR Description: pathogenesis-related protein, putative
  misc_feature (54)..(190): Homolog of NCBI NO: 3702665 NR Description: pathogenisis-related protein 1.2 [Triticum
  misc_feature (54)..(190): Homolog of NCBI NO: 480679 NR Description: pathogenesis-related protein 1a - barley
  misc_feature (52)..(190): Homolog of NCBI NO: 25518458 NR Description: hypothetical protein F6F3.11 - Arabidopsis
  misc_feature (52)..(190): Homolog of NCBI NO: 15223370 NR Description: pathogenesis-related protein family [Arabidopsis
  misc_feature (45)..(190): Homolog of NCBI NO: 15234704 NR Description: pathogenesis-related protein family [Arabidopsis
  misc_feature (54)..(190): Homolog of NCBI NO: 15235994 NR Description: pathogenesis-related protein, putative
  misc_feature (32)..(190): Homolog of NCBI NO: 22327916 NR Description: pathogenesis-related protein family [Arabidopsis
  misc_feature (54)..(190): Homolog of NCBI NO: 2500715 NR Description: Pathogenesis-related protein PR-1 precursor
  misc_feature (37)..(190): Homolog of NCBI NO: 15235992 NR Description: pathogenesis-related protein, putative
MILVTFTSNVNTLSINPKSNSSIPQLTQQKRPDNETIYRVSKQLCWGCIAESLEFLFRHNLVRAAKWELPLMWDFQLEQYARWWAGERKADCKLEHSFPEDGFKLGENIYWGSGSAWTPSDAVRAWADEEKYYTYATNTCVPGQMCGHYTQIVWKSTRRIGCARVVCDDGDVFMTCNYDPVGNYVGERPY

SEQ ID NO: 56898 - protein, 119 aa, Glycine max
  peptide (1)..(119): Ceres Seq. ID no. 14306302
  misc_feature (1)..(106): Pfam Name: SCP-like extracellular protein Pfam Description: SCP-like extracellular protein
  misc_feature (1)..(119): Homolog of NCBI NO: 15235962 NR Description: pathogenesis-related protein, putative
  misc_feature (1)..(119): Homolog of NCBI NO: 3702665 NR Description: pathogenisis-related protein 1.2 [Triticum
  misc_feature (1)..(119): Homolog of NCBI NO: 480679 NR Description: pathogenesis-related protein 1a - barley
  misc_feature (1)..(119): Homolog of NCBI NO: 25518458 NR Description: hypothetical protein F6F3.11 - Arabidopsis
  misc_feature (1)..(119): Homolog of NCBI NO: 15223370 NR Description: pathogenesis-related protein family [Arabidopsis
  misc_feature (1)..(119): Homolog of NCBI NO: 15234704 NR Description: pathogenesis-related protein family [Arabidopsis
  misc_feature (1)..(119): Homolog of NCBI NO: 15235994 NR Description: pathogenesis-related protein, putative
  misc_feature (1)..(119): Homolog of NCBI NO: 22327916 NR Description: pathogenesis-related protein family [Arabidopsis
  misc_feature (1)..(119): Homolog of NCBI NO: 2500715 NR Description: Pathogenesis-related protein PR-1 precursor
  misc_feature (1)..(119): Homolog of NCBI NO: 15235992 NR Description: pathogenesis-related protein, putative
MWDFQLEQYARWWAGERKADCKLEHSFPEDGFKLGENIYWGSGSAWTPSDAVRAWADEEKYYTYATNTCVPGQMCGHYTQIVWKSTRRIGCARVVCDDGDVFMTCNYDPVGNYVGERPY

SEQ ID NO: 56899 - DNA, 1247 bp, Glycine max
  misc_feature (1)..(1247): Ceres Seq. ID no. 15171212
atgttcttgttcttttacttttctttatatacatcctttaattgctttcgcagttattcatatgaaacgtctgcatatctgccaaaaagttttttactctttaattaaagaatgcatatctataatatgctcattcaatttatccacatgccagcaccctaaaaaagaaaactgtgtgcgtgcatatatatacagatacactagctagattattcttatttaatttgattaatttgatcaggttcttggacaaggcttgtatcagagtacaacagggtacggggagtagcagtaacgacactaaggaaagcccgtggatattgtgcagtgtcgcgcaagttgagcaagcaaagatattgctatcagttattcccatatttgctagcaccattgttttcaacacaatattagcacaactgcaaacattctcggtccaacaagggagttccatggacactcacctcaccaaatcgtttcatgtccctcctgcgtcgcttcaatccattccttacattttgctcattgttgtggtccctctctatgatagtttctttgtcccttttgctagaaaaatcaccggccatgagtccggaatttcacctttgcagcgaataggctttgggctctttctagctacattttctatgatttcagctgcccttgtggagaaaaagagaagggatgcagctgtgaacctcaacgaaactatatccattttttggattaccccacaattcttaatttttggcttgtctgagatgtttacagctgttgggctcattgagttcttctacaaacagtccttgaaagggatgcagacattcttcactgccatcacatattgctcttactcattcggcttttatctgagctcactattggtttctatggtgaataacatcagttcctcttcttcaactggtggttggctccatgacaacgatctcaacaaagacaagcttgactttttctattggttactagctgccctaagcttcctcaacttcctcaactatctcttttggtccagatggtattcttacaagccatcccaatcccaaggcgatactaatgccaatgaaagcattaatctgtttggccacagctctaaaaactactctggagatgacaatattccgtagcaagttgttaatcatatatactctacattaattaattaattaattagtcttgtattaaaattaaagtataaagtacgttatataagaaatctgcacttatctctt

SEQ ID NO: 56900 - protein, 230 aa, Glycine max
  peptide (1)..(230): Ceres Seq. ID no. 15171213
  misc_feature (1)..(134): Pfam Name: POT family Pfam Description: POT family
  misc_feature (1)..(204): Homolog of NCBI NO: 18409382 NR Description: nitrate transporter (NTL1) [Arabidopsis thaliana]
  misc_feature (1)..(204): Homolog of NCBI NO: 11358579 NR Description: nitrate transporter NTL1 [validated] -
  misc_feature (1)..(199): Homolog of NCBI NO: 28973642 NR Description: putative oligopeptide transporter protein
  misc_feature (1)..(199): Homolog of NCBI NO: 15240905 NR Description: oligopeptide transporter - like protein
  misc_feature (1)..(203): Homolog of NCBI NO: 34909514 NR Description: putative nitrate transporter
  misc_feature (1)..(213): Homolog of NCBI NO: 38346577 NR Description: OSJNBa0064D20.8 [Oryza sativa (japonica
  misc_feature (1)..(213): Homolog of NCBI NO: 32479675 NR Description: P0076O17.8 [Oryza sativa (japonica
  misc_feature (1)..(208): Homolog of NCBI NO: 25404224 NR Description: hypothetical protein F23H11.6 [imported] -
  misc_feature (1)..(208): Homolog of NCBI NO: 15218903 NR Description: oligopeptide transporter -related [Arabidopsis
  misc_feature (1)..(210): Homolog of NCBI NO: 15217546 NR Description: nitrate transporter NTL1 -related [Arabidopsis
MDTHLTKSFHVPPASLQSIPYILLIVVVPLYDSFFVPFARKITGHESGISPLQRIGFGLFLATFSMISAALVEKKRRDAAVNLNETISIFWITPQFLIFGLSEMFTAVGLIEFFYKQSLKGMQTFFTAITYCSYSFGFYLSSLLVSMVNNISSSSSTGGWLHDNDLNKDKLDFFYWLLAALSFLNFLNYLFWSRWYSYKPSQSQGDTNANESINLFGHSSKNYSGDDNIP

SEQ ID NO: 56901 - protein, 165 aa, Glycine max
  peptide (1)..(165): Ceres Seq. ID no. 15171214
  misc_feature (1)..(69): Pfam Name: POT family Pfam Description: POT family
  misc_feature (1)..(139): Homolog of NCBI NO: 25404844 NR Description: nitrate transporter (NTL1), 53025-56402
  misc_feature (1)..(139): Homolog of NCBI NO: 11358579 NR Description: nitrate transporter NTL1 [validated] -
  misc_feature (1)..(134): Homolog of NCBI NO: 28973642 NR Description: putative oligopeptide transporter protein
  misc_feature (1)..(134): Homolog of NCBI NO: 15240905 NR Description: oligopeptide transporter - like protein
  misc_feature (1)..(138): Homolog of NCBI NO: 34909514 NR Description: putative nitrate transporter
  misc_feature (1)..(148): Homolog of NCBI NO: 38346577 NR Description: OSJNBa0064D20.8 [Oryza sativa (japonica
  misc_feature (1)..(148): Homolog of NCBI NO: 32479675 NR Description: P0076O17.8 [Oryza sativa (japonica
  misc_feature (1)..(143): Homolog of NCBI NO: 25404224 NR Description: hypothetical protein F23H11.6 [imported] -
  misc_feature (1)..(143): Homolog of NCBI NO: 15218903 NR Description: oligopeptide transporter -related [Arabidopsis
  misc_feature (1)..(145): Homolog of NCBI NO: 15217546 NR Description: nitrate transporter NTL1 -related [Arabidopsis
MISAALVEKKRRDAAVNLNETISIFWITPQFLIFGLSEMFTAVGLIEFFYKQSLKGMQTFFTAITYCSYSFGFYLSSLLVSMVNNISSSSSTGGWLHDNDLNKDKLDFFYWLLAALSFLNFLNYLFWSRWYSYKPSQSQGDTNANESINLFGHSSKNYSGDDNIP

SEQ ID NO: 56902 - protein, 127 aa, Glycine max
  peptide (1)..(127): Ceres Seq. ID no. 15171215
  misc_feature (1)..(101): Homolog of NCBI NO: 17064754 NR Description: nitrate transporter (NTL1) [Arabidopsis thaliana]
  misc_feature (1)..(101): Homolog of NCBI NO: 11358579 NR Description: nitrate transporter NTL1 [validated] -
  misc_feature (1)..(96): Homolog of NCBI NO: 28973642 NR Description: putative oligopeptide transporter protein
  misc_feature (1)..(96): Homolog of NCBI NO: 15240905 NR Description: oligopeptide transporter - like protein
  misc_feature (1)..(100): Homolog of NCBI NO: 34909514 NR Description: putative nitrate transporter
  misc_feature (1)..(110): Homolog of NCBI NO: 38346577 NR Description: OSJNBa0064D20.8 [Oryza sativa (japonica
  misc_feature (1)..(110): Homolog of NCBI NO: 32479675 NR Description: P0076O17.8 [Oryza sativa (japonica
  misc_feature (1)..(105): Homolog of NCBI NO: 25404224 NR Description: hypothetical protein F23H11.6 [imported] -
  misc_feature (1)..(105): Homolog of NCBI NO: 15218903 NR Description: oligopeptide transporter -related [Arabidopsis
  misc_feature (1)..(107): Homolog of NCBI NO: 15217546 NR Description: nitrate transporter NTL1 -related [Arabidopsis
MFTAVGLIEFFYKQSLKGMQTFFTAITYCSYSFGFYLSSLLVSMVNNISSSSSTGGWLHDNDLNKDKLDFFYWLLAALSFLNFLNYLFWSRWYSYKPSQSQGDTNANESINLFGHSSKNYSGDDNIP

SEQ ID NO: 56903 - DNA, 1583 bp, Glycine max
  misc_feature (1)..(1583): Ceres Seq. ID no. 14314643
acaacccaccttggattgtttttctgcgaccaaagcacgaacttacacacacacagactccgacttgtgttgtgaaaacctttgtgcattacccgacgcttcttcttttcttgttttcgctccaaaacccattgcttcaatcactaatactccactttcagatcggggtgtgtctctctccaacacgcacaaaaaaaggatttgaagatttggataagttgctttcagtcttgaagtactaaaaaagttgagtgtgaggtgtgaagtgaattttaacagtgataattggtaaatggggacccaaactatggggactcatggtggtggtggagacagtaatgggaaacagtcaccactccagcctctggtgcggcaaaactcaatgtacagtctcacacttgatgaggttcagaatcaattgggcgatttggggaagccgctaactagtatgaacattgatgagcttctaaaaaatgtgtggaccgctgaggcaagtcagaccattggtatggacaatgagggcacagcacaagctagtcaagcttctctgcagcgtcaggctagtctgtcattaaccggtgcactaagcaagaagactgtagatgaggtttggagagatatccaacaaaacaaaatcgtaggggagaagaagttccaagacagacatcctactttgggagaaatgacattggaggatttcttggtgaaagcaggtgttgttgcaggtgcatcttctaatagaacaaataccagtactatagctggagttgattcaaacgtggcagtaccacagtttccttcacaagcacagtggatacaatatccacaagcacaatatcagcatccaccacaaagtttaatggggatgtatatgcctagccaaggtatggtacagccattacacatgggggctggagcttcattagatgtttcgtttgcagataatcagatggcaatgccatcgtctctgatgggaacaatgtcagatacgcagactcctggaagaaaaaagagcacttctgaggacatgatagagaagactgttgagaggagacagaaaaggatgataaaaaatcgggaatctgctgcccgttcaagagcaaggaaacaggcatacacaaatgaattggagaataaagtctcgcgcctggaagaggaaaatgaaaggctgaggaaacgaaaggagctagagcagatgttgtcatgtgcaccccctcctgaacctaaatatcaacttcgccgaatagcatcagctccattctgagatctgtacctagttgtagcggtttgtatatttgagtatcagggaattctccttgtggattactgtgtggttgaatccagtatgtcaagaatagctatgtgatgcatttgcatccaatgacttgcttttaattgttaagttctttataactcctctgtgaaggttctttagaaaaaaatgtaaaatattgtagttttacctttcacaatatagcccttttaataatgccttgaggtacttttacgatttggggatgacaaaattgtggggtcttgccatttttcaagatatgggaaaatagggccactgtttaatattc

SEQ ID NO: 56904 - protein, 323 aa, Glycine max
  peptide (1)..(323): Ceres Seq. ID no. 14314644
  misc_feature (10)..(298): Homolog of NCBI NO: 34909206 NR Description: putative promoter-binding factor-like protein
  misc_feature (226)..(321): Homolog of NCBI NO: 21694632 NR Description: basic leucine zipper transcription factor
  misc_feature (47)..(183): Homolog of NCBI NO: 21694632 NR Description: basic leucine zipper transcription factor
  misc_feature (85)..(323): Homolog of NCBI NO: 7489325 NR Description: Dc3 promoter-binding factor-3 - common sunflower
  misc_feature (226)..(321): Homolog of NCBI NO: 18405590 NR Description: bZIP family transcription factor
  misc_feature (13)..(183): Homolog of NCBI NO: 18405590 NR Description: bZIP family transcription factor
  misc_feature (226)..(321): Homolog of NCBI NO: 26451276 NR Description: putative bZIP transcription factor AtbZIP12 /
  misc_feature (13)..(183): Homolog of NCBI NO: 26451276 NR Description: putative bZIP transcription factor AtbZIP12 /
  misc_feature (216)..(323): Homolog of NCBI NO: 13346155 NR Description: bZIP protein DPBF3 [Arabidopsis thaliana]
  misc_feature (18)..(210): Homolog of NCBI NO: 13346155 NR Description: bZIP protein DPBF3 [Arabidopsis thaliana]
MGTQTMGTHGGGGDSNGKQSPLQPLVRQNSMYSLTLDEVQNQLGDLGKPLTSMNIDELLKNVWTAEASQTIGMDNEGTAQASQASLQRQASLSLTGALSKKTVDEVWRDIQQNKIVGEKKFQDRHPTLGEMTLEDFLVKAGVVAGASSNRTNTSTIAGVDSNVAVPQFPSQAQWIQYPQAQYQHPPQSLMGMYMPSQGMVQPLHMGAGASLDVSFADNQMAMPSSLMGTMSDTQTPGRKKSTSEDMIEKTVERRQKRMIKNRESAARSRARKQAYTNELENKVSRLEEENERLRKRKELEQMLSCAPPPEPKYQLRRIASAPF

SEQ ID NO: 56905 - protein, 318 aa, Glycine max
  peptide (1)..(318): Ceres Seq. ID no. 14314645
  misc_feature (5)..(293): Homolog of NCBI NO: 34909206 NR Description: putative promoter-binding factor-like protein
  misc_feature (221)..(316): Homolog of NCBI NO: 21694632 NR Description: basic leucine zipper transcription factor
  misc_feature (42)..(178): Homolog of NCBI NO: 21694632 NR Description: basic leucine zipper transcription factor
  misc_feature (80)..(318): Homolog of NCBI NO: 7489325 NR Description: Dc3 promoter-binding factor-3 - common sunflower
  misc_feature (221)..(316): Homolog of NCBI NO: 18405590 NR Description: bZIP family transcription factor
  misc_feature (8)..(178): Homolog of NCBI NO: 18405590 NR Description: bZIP family transcription factor
  misc_feature (221)..(316): Homolog of NCBI NO: 26451276 NR Description: putative bZIP transcription factor AtbZIP12 /
  misc_feature (8)..(178): Homolog of NCBI NO: 26451276 NR Description: putative bZIP transcription factor AtbZIP12 /
  misc_feature (211)..(318): Homolog of NCBI NO: 13346155 NR Description: bZIP protein DPBF3 [Arabidopsis thaliana]
  misc_feature (13)..(205): Homolog of NCBI NO: 13346155 NR Description: bZIP protein DPBF3 [Arabidopsis thaliana]
MGTHGGGGDSNGKQSPLQPLVRQNSMYSLTLDEVQNQLGDLGKPLTSMNIDELLKNVWTAEASQTIGMDNEGTAQASQASLQRQASLSLTGALSKKTVDEVWRDIQQNKIVGEKKFQDRHPTLGEMTLEDFLVKAGVVAGASSNRTNTSTIAGVDSNVAVPQFPSQAQWIQYPQAQYQHPPQSLMGMYMPSQGMVQPLHMGAGASLDVSFADNQMAMPSSLMGTMSDTQTPGRKKSTSEDMIEKTVERRQKRMIKNRESAARSRARKQAYTNELENKVSRLEEENERLRKRKELEQMLSCAPPPEPKYQLRRIASAPF

SEQ ID NO: 56906 - protein, 293 aa, Glycine max
  peptide (1)..(293): Ceres Seq. ID no. 14314646
  misc_feature (1)..(268): Homolog of NCBI NO: 34909206 NR Description: putative promoter-binding factor-like protein
  misc_feature (196)..(291): Homolog of NCBI NO: 21694632 NR Description: basic leucine zipper transcription factor
  misc_feature (17)..(153): Homolog of NCBI NO: 21694632 NR Description: basic leucine zipper transcription factor
  misc_feature (55)..(293): Homolog of NCBI NO: 7489325 NR Description: Dc3 promoter-binding factor-3 - common sunflower
  misc_feature (196)..(291): Homolog of NCBI NO: 18405590 NR Description: bZIP family transcription factor
  misc_feature (1)..(153): Homolog of NCBI NO: 18405590 NR Description: bZIP family transcription factor
  misc_feature (196)..(291): Homolog of NCBI NO: 26451276 NR Description: putative bZIP transcription factor AtbZIP12 /
  misc_feature (1)..(153): Homolog of NCBI NO: 26451276 NR Description: putative bZIP transcription factor AtbZIP12 /
  misc_feature (186)..(293): Homolog of NCBI NO: 13346155 NR Description: bZIP protein DPBF3 [Arabidopsis thaliana]
  misc_feature (1)..(180): Homolog of NCBI NO: 13346155 NR Description: bZIP protein DPBF3 [Arabidopsis thaliana]
MYSLTLDEVQNQLGDLGKPLTSMNIDELLKNVWTAEASQTIGMDNEGTAQASQASLQRQASLSLTGALSKKTVDEVWRDIQQNKIVGEKKFQDRHPTLGEMTLEDFLVKAGVVAGASSNRTNTSTIAGVDSNVAVPQFPSQAQWIQYPQAQYQHPPQSLMGMYMPSQGMVQPLHMGAGASLDVSFADNQMAMPSSLMGTMSDTQTPGRKKSTSEDMIEKTVERRQKRMIKNRESAARSRARKQAYTNELENKVSRLEEENERLRKRKELEQMLSCAPPPEPKYQLRRIASAPF

SEQ ID NO: 56907 - DNA, 1131 bp, Glycine max
  misc_feature (1)..(1131): Ceres Seq. ID no. 14306297
gaattgcaacccaagctataggtttaataaacgttgaaactattcctcctgcgccatctccattgctgttttctctctgcttgctattacaatccaattcaagaagttcgttcaactttgatgctcaagtctaacaacatatataaccattgacagatattcaaattcagcataattgtgattaaaattttggtccttccctggaatgaaaatactgtttgtcaataaatttgggagtgatttttgcggttatatttaatgggctgctactgttcaacttcaaagaaaaccgaagcacaaggttatgaggaacccactgttcttgcatctgtgacaccttgtgagtaccatgatccatcattgaatgttactgttagtgaagtagaggccttgcatgaactctacaagaagttgagcaattcaattattgaagatggtcttattcacagggaagaattccagctggcactattcaggaataaaaacaagaaaaatctgtttgcagataggatttttgacttatttgatctcaagcgcaacggggtcattgagtttggggaatttgttcgatcactgggtgtttttcacccaaatgcagcattagaagacaagattacctttgcttttaggttgtatgatctgaggcagacagggtttattgaacgagaggagttaaaggagatggtattggcacttttgcatgagtcggatcttgagctttcagatgatatgattgaaaccattgtggataagacttttagtgatgctgatataaacggtgatggaaggatcgatcaagatgaatggaaagcatttgtgtccaagcatccatccttgataaagaatatgacacttccatatctgaaggatattaccttggcttttcccagttttgtcacaggaacggatattgaagagtcagagatgtgactctgggaggttttggcttcaccaataatgatgctatacactagcatagtagtatttgagtcattttgaatacaaggttagaagtactcttgagaatttttctattggaaaaagttctatatttttaatagaaaagctctaaaaaacacttctggtttgtatccaaacataccatatatatctttgatttcgtctcttgat

SEQ ID NO: 56908 - protein, 223 aa, Glycine max
  peptide (1)..(223): Ceres Seq. ID no. 14306298
  misc_feature (81)..(109): Pfam Name: EF hand Pfam Description: EF hand
  misc_feature (1)..(220): Homolog of NCBI NO: 25295757 NR Description: protein F1N19.5 [imported] - Arabidopsis thaliana
  misc_feature (5)..(221): Homolog of NCBI NO: 22137326 NR Description: calcineurin B [Pisum sativum]
  misc_feature (1)..(221): Homolog of NCBI NO: 16924116 NR Description: putative calcineurin B-like protein [Oryza sativa]
  misc_feature (38)..(221): Homolog of NCBI NO: 15236778 NR Description: calcineurin B-like protein 3 (CBL3) [Arabidopsis
  misc_feature (38)..(220): Homolog of NCBI NO: 30689575 NR Description: calcineurin B-like protein (fragment)
  misc_feature (38)..(220): Homolog of NCBI NO: 15234011 NR Description: calcineurin B-like protein (fragment)
  misc_feature (1)..(220): Homolog of NCBI NO: 15217657 NR Description: calcineurin B-like protein (CBL8) [Arabidopsis
  misc_feature (1)..(220): Homolog of NCBI NO: 15238015 NR Description: calcineurin B-like protein 9 (CBL9) [Arabidopsis
  misc_feature (1)..(220): Homolog of NCBI NO: 18414931 NR Description: calcineurin B-like protein 1 (CBL1) [Arabidopsis
  misc_feature (1)..(223): Homolog of NCBI NO: 15237928 NR Description: calcineurin B-like protein, putative [Arabidopsis
MGCYCSTSKKTEAQGYEEPTVLASVTPCEYHDPSLNVTVSEVEALHELYKKLSNSIIEDGLIHREEFQLALFRNKNKKNLFADRIFDLFDLKRNGVIEFGEFVRSLGVFHPNAALEDKITFAFRLYDLRQTGFIEREELKEMVLALLHESDLELSDDMIETIVDKTFSDADINGDGRIDQDEWKAFVSKHPSLIKNMTLPYLKDITLAFPSFVTGTDIEESEM

SEQ ID NO: 56909 - DNA, 843 bp, Glycine max
  misc_feature (1)..(843): Ceres Seq. ID no. 14306286
acgagtcactcttcttagtgatacttatcctttgctgaaccttgttgtgatctgacatggcagaagaacaacaacgacggatcctggtggccgtggatgaaggcgaggagagcatgtatgctctctcatggtgccttaagaaccttgcttttcaaaattccaaagacacccttcttcttctctacgtcaaaccccctcgagtcacttattcagccttcgatggcacaggatatttgttttcctctgacataacggctaccatggagaggtatagccaacaagtggccgattgcgtcttggagaaagccaagaaattgtgtaacaatattgaaaatgtagagacgagggtagagaatggcgatccaagggacgtgatttgtcagatggttcaaaagttgggtgctgatgtcttagtcatgggaagccatggttatggtctcatcaagagggctttccttggaagcgtcagcaatcactgtgcacagaacgtgaagtgcccggttttgattgttaagaagccaaaaccaaccaccggagaaacataataatgataataataataaattaatcgttactagctttgtttttatgtaaaaaatagacaaccagtttgcttctgtcgcttatgtgttatttgggctctgtgtgttttgtttgtttctcctctaaaggaatatctcgccaaatattaaatgttaaaggctaagtgaagatgaggatgcacgccttttggttttgactttattattttctattcaaaagtttcctattcgtttgttacttttacataatttgtactccatgttgaactattgaatattgataatgctcctaaatcatgat

SEQ ID NO: 56910 - protein, 162 aa, Glycine max
  peptide (1)..(162): Ceres Seq. ID no. 14306287
  misc_feature (6)..(153): Pfam Name: Universal stress protein family Pfam Description: Universal stress protein family
  misc_feature (9)..(153): Homolog of NCBI NO: 5669654 NR Description: ER6 protein [Lycopersicon esculentum]
  misc_feature (7)..(159): Homolog of NCBI NO: 30681955 NR Description: ethylene-responsive protein -related [Arabidopsis
  misc_feature (7)..(159): Homolog of NCBI NO: 18399413 NR Description: ethylene-responsive protein -related [Arabidopsis
  misc_feature (7)..(154): Homolog of NCBI NO: 34914610 NR Description: P0520B06.18 [Oryza sativa (japonica
  misc_feature (2)..(156): Homolog of NCBI NO: 22831145 NR Description: universal stress protein USP1-like protein
  misc_feature (9)..(156): Homolog of NCBI NO: 25402571 NR Description: hypothetical protein [imported] - Arabidopsis
  misc_feature (2)..(156): Homolog of NCBI NO: 20067187 NR Description: putative universal stress protein USP1
  misc_feature (9)..(156): Homolog of NCBI NO: 30681321 NR Description: ER6 protein -related [Arabidopsis thaliana]
  misc_feature (2)..(133): Homolog of NCBI NO: 34905540 NR Description: B1146F03.27 [Oryza sativa (japonica
  misc_feature (1)..(154): Homolog of NCBI NO: 15228790 NR Description: expressed protein [Arabidopsis thaliana]
MAEEQQRRILVAVDEGEESMYALSWCLKNLAFQNSKDTLLLLYVKPPRVTYSAFDGTGYLFSSDITATMERYSQQVADCVLEKAKKLCNNIENVETRVENGDPRDVICQMVQKLGADVLVMGSHGYGLIKRAFLGSVSNHCAQNVKCPVLIVKKPKPTTGET

SEQ ID NO: 56911 - protein, 143 aa, Glycine max
  peptide (1)..(143): Ceres Seq. ID no. 14306288
  misc_feature (1)..(134): Pfam Name: Universal stress protein family Pfam Description: Universal stress protein family
  misc_feature (1)..(134): Homolog of NCBI NO: 5669654 NR Description: ER6 protein [Lycopersicon esculentum]
  misc_feature (1)..(140): Homolog of NCBI NO: 30681955 NR Description: ethylene-responsive protein -related [Arabidopsis
  misc_feature (1)..(140): Homolog of NCBI NO: 18399413 NR Description: ethylene-responsive protein -related [Arabidopsis
  misc_feature (1)..(135): Homolog of NCBI NO: 34914610 NR Description: P0520B06.18 [Oryza sativa (japonica
  misc_feature (1)..(137): Homolog of NCBI NO: 22831145 NR Description: universal stress protein USP1-like protein
  misc_feature (1)..(137): Homolog of NCBI NO: 25402571 NR Description: hypothetical protein [imported] - Arabidopsis
  misc_feature (1)..(137): Homolog of NCBI NO: 20067187 NR Description: putative universal stress protein USP1
  misc_feature (1)..(137): Homolog of NCBI NO: 30681321 NR Description: ER6 protein -related [Arabidopsis thaliana]
  misc_feature (1)..(114): Homolog of NCBI NO: 34905540 NR Description: B1146F03.27 [Oryza sativa (japonica
  misc_feature (1)..(135): Homolog of NCBI NO: 15228790 NR Description: expressed protein [Arabidopsis thaliana]
MYALSWCLKNLAFQNSKDTLLLLYVKPPRVTYSAFDGTGYLFSSDITATMERYSQQVADCVLEKAKKLCNNIENVETRVENGDPRDVICQMVQKLGADVLVMGSHGYGLIKRAFLGSVSNHCAQNVKCPVLIVKKPKPTTGET

SEQ ID NO: 56912 - protein, 94 aa, Glycine max
  peptide (1)..(94): Ceres Seq. ID no. 14306289
  misc_feature (1)..(85): Pfam Name: Universal stress protein family Pfam Description: Universal stress protein family
  misc_feature (1)..(85): Homolog of NCBI NO: 5669654 NR Description: ER6 protein [Lycopersicon esculentum]
  misc_feature (1)..(91): Homolog of NCBI NO: 30681955 NR Description: ethylene-responsive protein -related [Arabidopsis
  misc_feature (1)..(91): Homolog of NCBI NO: 18399413 NR Description: ethylene-responsive protein -related [Arabidopsis
  misc_feature (1)..(86): Homolog of NCBI NO: 34914610 NR Description: P0520B06.18 [Oryza sativa (japonica
  misc_feature (1)..(88): Homolog of NCBI NO: 22831145 NR Description: universal stress protein USP1-like protein
  misc_feature (1)..(88): Homolog of NCBI NO: 25402571 NR Description: hypothetical protein [imported] - Arabidopsis
  misc_feature (1)..(88): Homolog of NCBI NO: 20067187 NR Description: putative universal stress protein USP1
  misc_feature (1)..(88): Homolog of NCBI NO: 30681321 NR Description: ER6 protein -related [Arabidopsis thaliana]
  misc_feature (1)..(65): Homolog of NCBI NO: 34905540 NR Description: B1146F03.27 [Oryza sativa (japonica
  misc_feature (1)..(86): Homolog of NCBI NO: 15228790 NR Description: expressed protein [Arabidopsis thaliana]
MERYSQQVADCVLEKAKKLCNNIENVETRVENGDPRDVICQMVQKLGADVLVMGSHGYGLIKRAFLGSVSNHCAQNVKCPVLIVKKPKPTTGET

SEQ ID NO: 56913 - DNA, 402 bp, Glycine max; identical to SEQ ID NO: 52416
  misc_feature (1)..(402): Ceres Seq. ID no. 14306345

SEQ ID NO: 56914 - protein, 56 aa, Glycine max; identical to SEQ ID NO: 52417
  peptide (1)..(56): Ceres Seq. ID no. 14306346
  misc_feature (2)..(50): Pfam Name: Mitochondrial ATP synthase epsilon chain Pfam Description: Mitochondrial ATP synthase epsilon chain
  misc_feature (2)..(50): Pfam Name: Mitochondrial ATP synthase epsilon chain Pfam Description: Mitochondrial ATP synthase epsilon chain
  misc_feature (4)..(52): Homolog of NCBI NO: 21068676 NR Description: putative epsilon subunit of mitochondrial
  misc_feature (1)..(56): Homolog of NCBI NO: 24645608 NR Description: CG31477-PA [Drosophila melanogaster]
  misc_feature (1)..(51): Homolog of NCBI NO: 17864256 NR Description: stunted CG9032-PA [Drosophila melanogaster]
  misc_feature (1)..(56): Homolog of NCBI NO: 24642319 NR Description: stunted CG9032-PB [Drosophila melanogaster]
  misc_feature (1)..(56): Homolog of NCBI NO: 24645608 NR Description: CG31477-PA [Drosophila melanogaster]
  misc_feature (1)..(56): Homolog of NCBI NO: 24642319 NR Description: stunted CG9032-PB [Drosophila melanogaster]
  misc_feature (1)..(56): Homolog of NCBI NO: 31231703 NR Description: ENSANGP00000025012 [Anopheles gambiae]
  misc_feature (1)..(51): Homolog of NCBI NO: 31203819 NR Description: ENSANGP00000012584 [Anopheles gambiae]
  misc_feature (1)..(52): Homolog of NCBI NO: 31210015 NR Description: ENSANGP00000010662 [Anopheles gambiae]
  misc_feature (1)..(51): Homolog of NCBI NO: 17864256 NR Description: stunted CG9032-PA [Drosophila melanogaster]
  misc_feature (4)..(52): Homolog of NCBI NO: 21068676 NR Description: putative epsilon subunit of mitochondrial
  misc_feature (1)..(52): Homolog of NCBI NO: 31210015 NR Description: ENSANGP00000010662 [Anopheles gambiae]
  misc_feature (1)..(56): Homolog of NCBI NO: 31231703 NR Description: ENSANGP00000025012 [Anopheles gambiae]
  misc_feature (1)..(51): Homolog of NCBI NO: 31203819 NR Description: ENSANGP00000012584 [Anopheles gambiae]

SEQ ID NO: 56915 - protein, 48 aa, Glycine max; identical to SEQ ID NO: 52418
  peptide (1)..(48): Ceres Seq. ID no. 14306347
  misc_feature (1)..(42): Pfam Name: Mitochondrial ATP synthase epsilon chain Pfam Description: Mitochondrial ATP synthase epsilon chain
  misc_feature (1)..(42): Pfam Name: Mitochondrial ATP synthase epsilon chain Pfam Description: Mitochondrial ATP synthase epsilon chain
  misc_feature (1)..(44): Homolog of NCBI NO: 21068676 NR Description: putative epsilon subunit of mitochondrial
  misc_feature (1)..(48): Homolog of NCBI NO: 24645608 NR Description: CG31477-PA [Drosophila melanogaster]
  misc_feature (1)..(43): Homolog of NCBI NO: 17864256 NR Description: stunted CG9032-PA [Drosophila melanogaster]
  misc_feature (1)..(48): Homolog of NCBI NO: 24642319 NR Description: stunted CG9032-PB [Drosophila melanogaster]
  misc_feature (1)..(48): Homolog of NCBI NO: 24645608 NR Description: CG31477-PA [Drosophila melanogaster]
  misc_feature (1)..(48): Homolog of NCBI NO: 24642319 NR Description: stunted CG9032-PB [Drosophila melanogaster]
  misc_feature (1)..(48): Homolog of NCBI NO: 31231703 NR Description: ENSANGP00000025012 [Anopheles gambiae]
  misc_feature (1)..(43): Homolog of NCBI NO: 31203819 NR Description: ENSANGP00000012584 [Anopheles gambiae]
  misc_feature (1)..(44): Homolog of NCBI NO: 31210015 NR Description: ENSANGP00000010662 [Anopheles gambiae]
  misc_feature (1)..(43): Homolog of NCBI NO: 17864256 NR Description: stunted CG9032-PA [Drosophila melanogaster]
  misc_feature (1)..(44): Homolog of NCBI NO: 21068676 NR Description: putative epsilon subunit of mitochondrial
  misc_feature (1)..(44): Homolog of NCBI NO: 31210015 NR Description: ENSANGP00000010662 [Anopheles gambiae]
  misc_feature (1)..(48): Homolog of NCBI NO: 31231703 NR Description: ENSANGP00000025012 [Anopheles gambiae]
  misc_feature (1)..(43): Homolog of NCBI NO: 31203819 NR Description: ENSANGP00000012584 [Anopheles gambiae]

SEQ ID NO: 56916 - protein, 36 aa, Glycine max; identical to SEQ ID NO: 52419
  peptide (1)..(36): Ceres Seq. ID no. 14306348

SEQ ID NO: 56917 - DNA, 835 bp, Glycine max
  misc_feature (1)..(835): Ceres Seq. ID no. 14306255
aatattaatctcttccatcacttaaatctcaattcaccgcaaaccaaaaaaagcttcatcatcatcttcttcttctctgcatcatcacaatggctgaagtacgttcacaacaacaacaaccccagcatgtgcaagtccacgcaaccacaacacacaccccacaacaccatggcggggaaggtggcagcggcattctgaacctcatcccggagatgtccctcacgggttcccaactcctagctctcctcgccggcgttccccttggtgcaatgctgctcctcctctccggcatctcgctcatcgccagcctcttggggctggcggtggcgacgccgctcttcatcttcttcagcccgctgctggtccccgccgccttcgccataggaatggcggtgaccgcggtgctggcggcgggggcgtgcgggctggcggggctcgtgttgttctcgtgggtggtgaactatctccggcagatgccacgggggacgacgatgatgacggtgctgccggagcaagcgaagcggcacgtggcggacatggcggagtacgtggggcagaagacgaaggaggttgggcaagacattcagacaagggcacatcatgcccagggaacaacaaggatgacagtgcattgagttatcatgagacaagaaaatggtttcaatttatatcgcttatgtatgacttgtgagatatactagtatgtaattaacctttggtacgtgtgttttggactttggaggagttccattttcagtgttccatgttgtgtcactttctgtatttgctcatgtacgtgtaatcagtaatattaatgcatttttcttttgggttc

SEQ ID NO: 56918 - protein, 181 aa, Glycine max
  peptide (1)..(181): Ceres Seq. ID no. 14306256
  misc_feature (47)..(165): Pfam Name: Oleosin Pfam Description: Oleosin
  misc_feature (1)..(170): Homolog of NCBI NO: 15232141 NR Description: oleosin [Arabidopsis thaliana]
  misc_feature (17)..(179): Homolog of NCBI NO: 82051 NR Description: lipid body-associated membrane protein - carrot
  misc_feature (11)..(169): Homolog of NCBI NO: 13161008 NR Description: oleosin variant B [Arachis hypogaea]
  misc_feature (11)..(169): Homolog of NCBI NO: 13161005 NR Description: oleosin variant A [Arachis hypogaea]
MAEVRSQQQQPQHVQVHATTTHTPQHHGGEGGSGILNLIPEMSLTGSQLLALLAGVPLGAMLLLLSGISLIASLLGLAVATPLFIFFSPLLVPAAFAIGMAVTAVLAAGACGLAGLVLFSWVVNYLRQMPRGTTMMTVLPEQAKRHVADMAEYVGQKTKEVGQDIQTRAHHAQGTTRMTVH

SEQ ID NO: 56919 - protein, 140 aa, Glycine max
  peptide (1)..(140): Ceres Seq. ID no. 14306257
  misc_feature (6)..(124): Pfam Name: Oleosin Pfam Description: Oleosin
  misc_feature (1)..(129): Homolog of NCBI NO: 15232141 NR Description: oleosin [Arabidopsis thaliana]
  misc_feature (1)..(138): Homolog of NCBI NO: 82051 NR Description: lipid body-associated membrane protein - carrot
  misc_feature (1)..(128): Homolog of NCBI NO: 13161008 NR Description: oleosin variant B [Arachis hypogaea]
  misc_feature (1)..(128): Homolog of NCBI NO: 13161005 NR Description: oleosin variant A [Arachis hypogaea]
MSLTGSQLLALLAGVPLGAMLLLLSGISLIASLLGLAVATPLFIFFSPLLVPAAFAIGMAVTAVLAAGACGLAGLVLFSWVVNYLRQMPRGTTMMTVLPEQAKRHVADMAEYVGQKTKEVGQDIQTRAHHAQGTTRMTVH

SEQ ID NO: 56920 - protein, 121 aa, Glycine max
  peptide (1)..(121): Ceres Seq. ID no. 14306258
  misc_feature (1)..(105): Pfam Name: Oleosin Pfam Description: Oleosin
  misc_feature (1)..(110): Homolog of NCBI NO: 15232141 NR Description: oleosin [Arabidopsis thaliana]
  misc_feature (1)..(119): Homolog of NCBI NO: 82051 NR Description: lipid body-associated membrane protein - carrot
  misc_feature (1)..(109): Homolog of NCBI NO: 13161008 NR Description: oleosin variant B [Arachis hypogaea]
  misc_feature (1)..(109): Homolog of NCBI NO: 13161005 NR Description: oleosin variant A [Arachis hypogaea]
MLLLLSGISLIASLLGLAVATPLFIFFSPLLVPAAFAIGMAVTAVLAAGACGLAGLVLFSWVVNYLRQMPRGTTMMTVLPEQAKRHVADMAEYVGQKTKEVGQDIQTRAHHAQGTTRMTVH

SEQ ID NO: 56921 - DNA, 576 bp, Glycine max
  misc_feature (1)..(576): Ceres Seq. ID no. 14314609
attgaaatttcttctcctgggtttctctatatatttttctttccttgcaagtagattctagcaatttcttctattccttagtattgtttaaaggatgattctttcgatgaagcaagttttctcactagcaatattcattgcattttgggaactttcttctgttgtagctgatgggggagatgtgactatagttcgagtatcaaataatttaaaccaaggtttaagtttcacaattcattgcaaaaccaataacaaagacttgggaactcaagtggtgaatcaaaattactatgaacgatttgaactccatcgtgacaatgcacctggcttaacattcttgttttgcaaaataacatggagagatgcatcaattctatatgtcctttaccaagatgcaagggattttcgccgtagatgtacaactgattgtaattgggaagtcaacaacgaaaaccttcttggcactaatcaatatactctaaaaccagatattattgtcccatggcctaaaaattgatacccatttagtgaacatccaattttacttggataatttaaataaaaaagtgttgtgtt

SEQ ID NO: 56922 - protein, 140 aa, Glycine max
  peptide (1)..(140): Ceres Seq. ID no. 14314610
  misc_feature (33)..(126): Pfam Name: Plant self-incompatibility protein S1 Pfam Description: Plant self-incompatibility protein S1
  misc_feature (33)..(126): Homolog of NCBI NO: 2148045 NR Description: self-incompatibility protein S3 precursor -
  misc_feature (8)..(117): Homolog of NCBI NO: 15239857 NR Description: self-incompatibility protein-related [Arabidopsis
  misc_feature (7)..(116): Homolog of NCBI NO: 15239858 NR Description: self-incompatibility protein-related [Arabidopsis
  misc_feature (5)..(126): Homolog of NCBI NO: 3097260 NR Description: self-incompatibility [Papaver rhoeas]
MILSMKQVFSLAIFIAFWELSSVVADGGDVTIVRVSNNLNQGLSFTIHCKTNNKDLGTQVVNQNYYERFELHRDNAPGLTFLFCKITWRDASILYVLYQDARDFRRRCTTDCNWEVNNENLLGTNQYTLKPDIIVPWPKN

SEQ ID NO: 56923 - protein, 136 aa, Glycine max
  peptide (1)..(136): Ceres Seq. ID no. 14314611
  misc_feature (29)..(122): Pfam Name: Plant self-incompatibility protein S1 Pfam Description: Plant self-incompatibility protein S1
  misc_feature (29)..(122): Homolog of NCBI NO: 2148045 NR Description: self-incompatibility protein S3 precursor -
  misc_feature (4)..(113): Homolog of NCBI NO: 15239857 NR Description: self-incompatibility protein-related [Arabidopsis
  misc_feature (3)..(112): Homolog of NCBI NO: 15239858 NR Description: self-incompatibility protein-related [Arabidopsis
  misc_feature (1)..(122): Homolog of NCBI NO: 3097260 NR Description: self-incompatibility [Papaver rhoeas]
MKQVFSLAIFIAFWELSSVVADGGDVTIVRVSNNLNQGLSFTIHCKTNNKDLGTQVVNQNYYERFELHRDNAPGLTFLFCKITWRDASILYVLYQDARDFRRRCTTDCNWEVNNENLLGTNQYTLKPDIIVPWPKN

SEQ ID NO: 56924 - DNA, 1637 bp, Glycine max
  misc_feature (1)..(1637): Ceres Seq. ID no. 14314636
gctcttggctgatatttcctgataagtggacagacgcttaaacagagaaactaacacagatttgcatgcatggggaaaataacgcacattgtagtaattcccagtgcagggtacagccacttcgttcccgttatccacttctcaaagagacttgttgagcttcacccagaaattcacgtcacatgcatcattcccattctggggtctctcccaagtgctgcaaaacccattctccaaacccttccacaaaacatcaacacggttttccttccaccggtgaaccctaatgacctaccacaaggtgttcccgtagttgtccaaattcagctagcaatggctcactccatgccctccatccaccacaccctcaagtccataacttcaaagactccctacgtggccatggtggttgattctttcgccatgcatgccctagatttcgctcacgagttcaacatgttgtcctacgtttacttccctatatcagccaccacactctccatgcacttgaacttgcccttgttggacgaggaaacatcatgtgagtacagatatctgccggaggctatcaaattaccgggttgcgtgccgtttcacggccgcgatctctatgcccaagcccaggatcgaaccagtcaactctaccagatgtcgctgaagcgttacaaacgatgctggttcgttaatgggatcttcatcaacagcttcctggcattggaaactggtcctataagagcattgagagatgaggatagaggttaccctgctgtgtaccctgttggaccacttgtccaaagtggtgatgatgatgcaaaagggttattggagtgtgtaacatggttggagaaacagcaagatggttcagttttgtatgtttcttttgggagtggtggaacactttcacaagagcaaatgaatgagctggcttgtggtttggagttgagtaaccacaagttcttgtgggttgtgagagcaccgaacaatgcaaaagctgatgctgcttatcttggtgcacaaaagtgtgttgaccctttgcagttcttaccatgtgagttcttggagaggacaaaagagaaaggtatggttgttccttcatgggcaccgcaggttcaaatccttagccacagttcagttggtgggttcttgactcactgtggctggaattcgaccctcgagagtgtgctgcatggtgtgccattgataacttggccactgtatgctgagcagagaatgaatgcggttgtgctttgtgaggatctcaaagtgggattgaggccgagagttggtgaaaatggtttggtcgagagaaaagaaattgctgatgttgtgaagcgtttgatggaaggaagggaaggtggggaaatgcgaaaaagaatgaagaaactagaagttgcggctgttaatgctctcaaagaagatgggtcttctaccaagactctttcagagttggcactaatgtggaaaaatgtggcttaggaaaacaagttttttatttatgttatgcatgcagcttgtgtagtagtgcctgtaatgttcaggtatttcgtatcttagtttttatttatgtaatgtaatgcagcttgtatggtgcttgtgtttttagttataaataaataaactttggtcattacaagatc

SEQ ID NO: 56925 - protein, 468 aa, Glycine max
  peptide (1)..(468): Ceres Seq. ID no. 14314637
  misc_feature (6)..(467): Pfam Name: UDP-glucoronosyl and UDP-glucosyl transferase Pfam Description: UDP-glucoronosyl and UDP-glucosyl transferase
  misc_feature (6)..(465): Homolog of NCBI NO: 34912752 NR Description: putative UTP-glucose glucosyltransferase
  misc_feature (6)..(468): Homolog of NCBI NO: 34912764 NR Description: putative UTP-glucose glucosyltransferase
  misc_feature (37)..(465): Homolog of NCBI NO: 7433902 NR Description: UTP-glucose glucosyltransferase homolog
  misc_feature (10)..(465): Homolog of NCBI NO: 25286808 NR Description: protein probable UTP-glucose glucosyltransferase
  misc_feature (6)..(465): Homolog of NCBI NO: 15223392 NR Description: glycosyltransferase family [Arabidopsis thaliana]
  misc_feature (2)..(465): Homolog of NCBI NO: 15223396 NR Description: glycosyltransferase family [Arabidopsis thaliana]
  misc_feature (55)..(457): Homolog of NCBI NO: 19911195 NR Description: glucosyltransferase-6 [Vigna angularis]
  misc_feature (3)..(465): Homolog of NCBI NO: 15234056 NR Description: glycosyltransferase family [Arabidopsis thaliana]
  misc_feature (6)..(466): Homolog of NCBI NO: 28380078 NR Description: Hydroquinone glucosyltransferase (Arbutin
  misc_feature (1)..(467): Homolog of NCBI NO: 19911209 NR Description: glucosyltransferase-13 [Vigna angularis]
MGKITHIVVIPSAGYSHFVPVIHFSKRLVELHPEIHVTCIIPILGSLPSAAKPILQTLPQNINTVFLPPVNPNDLPQGVPVVVQIQLAMAHSMPSIHHTLKSITSKTPYVAMVVDSFAMHALDFAHEFNMLSYVYFPISATTLSMHLNLPLLDEETSCEYRYLPEAIKLPGCVPFHGRDLYAQAQDRTSQLYQMSLKRYKRCWFVNGIFINSFLALETGPIRALRDEDRGYPAVYPVGPLVQSGDDDAKGLLECVTWLEKQQDGSVLYVSFGSGGTLSQEQMNELACGLELSNHKFLWVVRAPNNAKADAAYLGAQKCVDPLQFLPCEFLERTKEKGMVVPSWAPQVQILSHSSVGGFLTHCGWNSTLESVLHGVPLITWPLYAEQRMNAVVLCEDLKVGLRPRVGENGLVERKEIADVVKRLMEGREGGEMRKRMKKLEVAAVNALKEDGSSTKTLSELALMWKNVA

SEQ ID NO: 56926 - protein, 380 aa, Glycine max
  peptide (1)..(380): Ceres Seq. ID no. 14314638
  misc_feature (1)..(379): Pfam Name: UDP-glucoronosyl and UDP-glucosyl transferase Pfam Description: UDP-glucoronosyl and UDP-glucosyl transferase
  misc_feature (1)..(377): Homolog of NCBI NO: 34912752 NR Description: putative UTP-glucose glucosyltransferase
  misc_feature (1)..(380): Homolog of NCBI NO: 34912764 NR Description: putative UTP-glucose glucosyltransferase
  misc_feature (1)..(377): Homolog of NCBI NO: 7433902 NR Description: UTP-glucose glucosyltransferase homolog
  misc_feature (1)..(377): Homolog of NCBI NO: 25286808 NR Description: protein probable UTP-glucose glucosyltransferase
  misc_feature (1)..(377): Homolog of NCBI NO: 15223392 NR Description: glycosyltransferase family [Arabidopsis thaliana]
  misc_feature (1)..(377): Homolog of NCBI NO: 15223396 NR Description: glycosyltransferase family [Arabidopsis thaliana]
  misc_feature (1)..(369): Homolog of NCBI NO: 19911195 NR Description: glucosyltransferase-6 [Vigna angularis]
  misc_feature (1)..(377): Homolog of NCBI NO: 15234056 NR Description: glycosyltransferase family [Arabidopsis thaliana]
  misc_feature (1)..(378): Homolog of NCBI NO: 28380078 NR Description: Hydroquinone glucosyltransferase (Arbutin
  misc_feature (1)..(379): Homolog of NCBI NO: 19911209 NR Description: glucosyltransferase-13 [Vigna angularis]
MAHSMPSIHHTLKSITSKTPYVAMVVDSFAMHALDFAHEFNMLSYVYFPISATTLSMHLNLPLLDEETSCEYRYLPEAIKLPGCVPFHGRDLYAQAQDRTSQLYQMSLKRYKRCWFVNGIFINSFLALETGPIRALRDEDRGYPAVYPVGPLVQSGDDDAKGLLECVTWLEKQQDGSVLYVSFGSGGTLSQEQMNELACGLELSNHKFLWVVRAPNNAKADAAYLGAQKCVDPLQFLPCEFLERTKEKGMVVPSWAPQVQILSHSSVGGFLTHCGWNSTLESVLHGVPLITWPLYAEQRMNAVVLCEDLKVGLRPRVGENGLVERKEIADVVKRLMEGREGGEMRKRMKKLEVAAVNALKEDGSSTKTLSELALMWKNVA

SEQ ID NO: 56927 - protein, 376 aa, Glycine max
  peptide (1)..(376): Ceres Seq. ID no. 14314639
  misc_feature (1)..(375): Pfam Name: UDP-glucoronosyl and UDP-glucosyl transferase Pfam Description: UDP-glucoronosyl and UDP-glucosyl transferase
  misc_feature (1)..(373): Homolog of NCBI NO: 34912752 NR Description: putative UTP-glucose glucosyltransferase
  misc_feature (1)..(376): Homolog of NCBI NO: 34912764 NR Description: putative UTP-glucose glucosyltransferase
  misc_feature (1)..(373): Homolog of NCBI NO: 7433902 NR Description: UTP-glucose glucosyltransferase homolog
  misc_feature (1)..(373): Homolog of NCBI NO: 25286808 NR Description: protein probable UTP-glucose glucosyltransferase
  misc_feature (1)..(373): Homolog of NCBI NO: 15223392 NR Description: glycosyltransferase family [Arabidopsis thaliana]
  misc_feature (1)..(373): Homolog of NCBI NO: 15223396 NR Description: glycosyltransferase family [Arabidopsis thaliana]
  misc_feature (1)..(365): Homolog of NCBI NO: 19911195 NR Description: glucosyltransferase-6 [Vigna angularis]
  misc_feature (1)..(373): Homolog of NCBI NO: 15234056 NR Description: glycosyltransferase family [Arabidopsis thaliana]
  misc_feature (1)..(374): Homolog of NCBI NO: 28380078 NR Description: Hydroquinone glucosyltransferase (Arbutin
  misc_feature (1)..(375): Homolog of NCBI NO: 19911209 NR Description: glucosyltransferase-13 [Vigna angularis]
MPSIHHTLKSITSKTPYVAMVVDSFAMHALDFAHEFNMLSYVYFPISATTLSMHLNLPLLDEETSCEYRYLPEAIKLPGCVPFHGRDLYAQAQDRTSQLYQMSLKRYKRCWFVNGIFINSFLALETGPIRALRDEDRGYPAVYPVGPLVQSGDDDAKGLLECVTWLEKQQDGSVLYVSFGSGGTLSQEQMNELACGLELSNHKFLWVVRAPNNAKADAAYLGAQKCVDPLQFLPCEFLERTKEKGMVVPSWAPQVQILSHSSVGGFLTHCGWNSTLESVLHGVPLITWPLYAEQRMNAVVLCEDLKVGLRPRVGENGLVERKEIADVVKRLMEGREGGEMRKRMKKLEVAAVNALKEDGSSTKTLSELALMWKNVA

SEQ ID NO: 56928 - DNA, 898 bp, Glycine max
  misc_feature (1)..(898): Ceres Seq. ID no. 14306223
aagacacaactccaacaaggcattgtttggtttggtttggttacttgaaaatctcgaatcgcttaattttgatttagttttccaccgcaacgcggaacctctttctcgaactggctaactctcaggcaagtggctcggacgctgattccagcaacacacggctggtggttgcactgtatgacgccctaaactccggcgactccaacgccgtcgtcaagatcgtcgccgccgacctcgagtggtggttccatggtccgccctctcaccagtttttgatgcgcatgctcaccggcgactccgccgccgacaactccttccgattcgttccgcagtccatcgccgccttcggctccaccgtcatcgtcgagggctgcgactccgcccgcaacattgcctgggtccacgcctggaccgtcactgatgggatgatcactcaaatcagagagtacttcaacaccgccctcaccgtcactcgcatccacgattccggcgagattgttccggccagatccggcgccggccgtttgccctgcgtctgggagagcagcgtctccggtcgggtcgggaaatccgtccccggtttggttctcgcaatataaaatataaaataagtaattagggaaggacgaggtcacgtgttgccgttgctataataattaaataagggacttgtgcacgtggcggtgactggatcgatcggtttcagggaacattgatactttgtgttagtattggaggttagggagatgtgagagctttgttgttattggtgtggtttgttttgtttgcttgtgtgtttttcaccactatgggcgtattcaggtggttgtatctttcttttgttatttggagtgttgatgatgatgcaataagaatatctatggactatgcttttaag

SEQ ID NO: 56929 - protein, 107 aa, Glycine max
  peptide (1)..(107): Ceres Seq. ID no. 14306224
  misc_feature (1)..(68): Homolog of NCBI NO: 34898184 NR Description: P0034A04.2 [Oryza sativa (japonica
  misc_feature (1)..(107): Homolog of NCBI NO: 15241041 NR Description: expressed protein [Arabidopsis thaliana]
  misc_feature (1)..(107): Homolog of NCBI NO: 10241935 NR Description: elicitor inducible protein [Nicotiana tabacum]
  misc_feature (1)..(107): Homolog of NCBI NO: 139780 NR Description: WOUND-INDUCED PROTEIN 1
  misc_feature (1)..(107): Homolog of NCBI NO: 4574320 NR Description: wound-induced protein WI12 [Mesembryanthemum
  misc_feature (1)..(107): Homolog of NCBI NO: 15028339 NR Description: unknown protein [Arabidopsis thaliana]
  misc_feature (1)..(107): Homolog of NCBI NO: 15228414 NR Description: expressed protein [Arabidopsis thaliana]
MRMLTGDSAADNSFRFVPQSIAAFGSTVIVEGCDSARNIAWVHAWTVTDGMITQIREYFNTALTVTRIHDSGEIVPARSGAGRLPCVWESSVSGRVGKSVPGLVLAI

SEQ ID NO: 56930 - protein, 105 aa, Glycine max
  peptide (1)..(105): Ceres Seq. ID no. 14306225
  misc_feature (1)..(66): Homolog of NCBI NO: 34898184 NR Description: P0034A04.2 [Oryza sativa (japonica
  misc_feature (1)..(105): Homolog of NCBI NO: 15241041 NR Description: expressed protein [Arabidopsis thaliana]
  misc_feature (1)..(105): Homolog of NCBI NO: 10241935 NR Description: elicitor inducible protein [Nicotiana tabacum]
  misc_feature (1)..(105): Homolog of NCBI NO: 139780 NR Description: WOUND-INDUCED PROTEIN 1
  misc_feature (1)..(105): Homolog of NCBI NO: 4574320 NR Description: wound-induced protein WI12 [Mesembryanthemum
  misc_feature (1)..(105): Homolog of NCBI NO: 15028339 NR Description: unknown protein [Arabidopsis thaliana]
  misc_feature (1)..(105): Homolog of NCBI NO: 15228414 NR Description: expressed protein [Arabidopsis thaliana]
MLTGDSAADNSFRFVPQSIAAFGSTVIVEGCDSARNIAWVHAWTVTDGMITQIREYFNTALTVTRIHDSGEIVPARSGAGRLPCVWESSVSGRVGKSVPGLVLAI

SEQ ID NO: 56931 - protein, 57 aa, Glycine max
  peptide (1)..(57): Ceres Seq. ID no. 14306226
  misc_feature (1)..(18): Homolog of NCBI NO: 34898184 NR Description: P0034A04.2 [Oryza sativa (japonica
  misc_feature (1)..(57): Homolog of NCBI NO: 15241041 NR Description: expressed protein [Arabidopsis thaliana]
  misc_feature (1)..(57): Homolog of NCBI NO: 10241935 NR Description: elicitor inducible protein [Nicotiana tabacum]
  misc_feature (1)..(57): Homolog of NCBI NO: 139780 NR Description: WOUND-INDUCED PROTEIN 1
  misc_feature (1)..(57): Homolog of NCBI NO: 4574320 NR Description: wound-induced protein WI12 [Mesembryanthemum
  misc_feature (1)..(57): Homolog of NCBI NO: 15028339 NR Description: unknown protein [Arabidopsis thaliana]
  misc_feature (1)..(57): Homolog of NCBI NO: 15228414 NR Description: expressed protein [Arabidopsis thaliana]
MITQIREYFNTALTVTRIHDSGEIVPARSGAGRLPCVWESSVSGRVGKSVPGLVLAI

SEQ ID NO: 56932 - DNA, 1163 bp, Glycine max
  misc_feature (1)..(1163): Ceres Seq. ID no. 14314019
gtacgattaacatggagcaaatagtttttctccgctcactgcgagcacctttgttgcacggaggaaaagagggctttgttcatctacccaatctccatgcatgctgtgaatcatccaattcccacccatgttctctcaatgcagaaaaccattttaacagttctatttcttaccttggagttgcattgcttggagtaggaatcgctctagatttttttcttacaactgggggaggaagtggatttgagtcttcattgctggagagtgtgtcgttttgcctgtcattgtagggaaccaggaatggaatggcttagaagaaatgtatgtgaaaacggcttgtggtttcacccatagcctgcggaaaatgctttattgtgtttcggatatcaatttaaagttcacagttatgcaaataaccagtgcattagtgaatggcagcgctcttcgtttccacttacctagatttctatgtgtgcgtcatcattcatcaaccaagttgtttgtcacagggctttcctatgataccaatgaaccgattctgagagatgcctttgggcaacatggtgaaatcattgaagttaaagtaatatgtgatcatgtgactgggaaatcaagaggttatggatttgtgcggttcgtttctgaaactacagctgctgcagctcgcaaagaaatgaatggccagatactggatggaagacgcattcgggtgagttatgcacacaaaggcgagcgactaagtctgccaaacaattcataaaacagttcatggttgcaacatattcactttctaactgtgatactcgaagtctatagttttggcttttaattttagccattcaacgcaccttttttcatttgatggcgatctagatagtctcagtttgtttcgatggcttgaattgttgttctcatgttccttgaccttgaaatgctaatatccgatgaataacaaaatataatttagggttcattttgttttgatggatggcttgaattgatgttctcatatcccttgcccttgaaatactaatatcatatcataagatcattgacaatatataatttgggaccaagctgtttttctgtttgtttcttcttttcttttttttttccgtaaattgttacttgaaatagaaagatgagtgtgacatattggcaac

SEQ ID NO: 56933 - protein, 146 aa, Glycine max
  peptide (1)..(146): Ceres Seq. ID no. 14314020
  misc_feature (60)..(131): Pfam Name: RNA recognition motif. (a.k.a. RRM, RBD, or RNP domain) Pfam Description: RNA recognition motif. (a.k.a. RRM, RBD, or RNP
  misc_feature (55)..(146): Homolog of NCBI NO: 15229525 NR Description: RNA-binding protein, putative [Arabidopsis
  misc_feature (57)..(143): Homolog of NCBI NO: 30682622 NR Description: glycine-rich RNA-binding protein (AtGRP2)
  misc_feature (57)..(143): Homolog of NCBI NO: 15236359 NR Description: glycine-rich RNA-binding protein (AtGRP2)
  misc_feature (57)..(143): Homolog of NCBI NO: 2826811 NR Description: AtGRP2 [Arabidopsis thaliana]
  misc_feature (57)..(143): Homolog of NCBI NO: 322514 NR Description: glycine-rich RNA-binding protein (clone A81) -
  misc_feature (49)..(136): Homolog of NCBI NO: 21388662 NR Description: glycine-rich RNA-binding protein [Physcomitrella
  misc_feature (49)..(139): Homolog of NCBI NO: 15822705 NR Description: RNA-binding protein precursor [Solanum tuberosum]
  misc_feature (31)..(134): Homolog of NCBI NO: 1084415 NR Description: RNA-binding protein - wood tobacco
  misc_feature (49)..(139): Homolog of NCBI NO: 15822703 NR Description: RNA-binding protein precursor [Nicotiana tabacum]
  misc_feature (52)..(143): Homolog of NCBI NO: 7439994 NR Description: glycine-rich RNA-binding protein - garden pea
MYVKTACGFTHSLRKMLYCVSDINLKFTVMQITSALVNGSALRFHLPRFLCVRHHSSTKLFVTGLSYDTNEPILRDAFGQHGEIIEVKVICDHVTGKSRGYGFVRFVSETTAAAARKEMNGQILDGRRIRVSYAHKGERLSLPNNS

SEQ ID NO: 56934 - protein, 131 aa, Glycine max
  peptide (1)..(131): Ceres Seq. ID no. 14314021
  misc_feature (45)..(116): Pfam Name: RNA recognition motif. (a.k.a. RRM, RBD, or RNP domain) Pfam Description: RNA recognition motif. (a.k.a. RRM, RBD, or RNP
  misc_feature (40)..(131): Homolog of NCBI NO: 15229525 NR Description: RNA-binding protein, putative [Arabidopsis
  misc_feature (42)..(128): Homolog of NCBI NO: 15236359 NR Description: glycine-rich RNA-binding protein (AtGRP2)
  misc_feature (42)..(128): Homolog of NCBI NO: 30682622 NR Description: glycine-rich RNA-binding protein (AtGRP2)
  misc_feature (42)..(128): Homolog of NCBI NO: 2826811 NR Description: AtGRP2 [Arabidopsis thaliana]
  misc_feature (42)..(128): Homolog of NCBI NO: 322514 NR Description: glycine-rich RNA-binding protein (clone A81) -
  misc_feature (34)..(121): Homolog of NCBI NO: 21388662 NR Description: glycine-rich RNA-binding protein [Physcomitrella
  misc_feature (34)..(124): Homolog of NCBI NO: 15822705 NR Description: RNA-binding protein precursor [Solanum tuberosum]
  misc_feature (16)..(119): Homolog of NCBI NO: 1084415 NR Description: RNA-binding protein - wood tobacco
  misc_feature (34)..(124): Homolog of NCBI NO: 15822703 NR Description: RNA-binding protein precursor [Nicotiana tabacum]
  misc_feature (37)..(128): Homolog of NCBI NO: 7439994 NR Description: glycine-rich RNA-binding protein - garden pea
MLYCVSDINLKFTVMQITSALVNGSALRFHLPRFLCVRHHSSTKLFVTGLSYDTNEPILRDAFGQHGEIIEVKVICDHVTGKSRGYGFVRFVSETTAAAARKEMNGQILDGRRIRVSYAHKGERLSLPNNS

SEQ ID NO: 56935 - protein, 117 aa, Glycine max
  peptide (1)..(117): Ceres Seq. ID no. 14314022
  misc_feature (31)..(102): Pfam Name: RNA recognition motif. (a.k.a. RRM, RBD, or RNP domain) Pfam Description: RNA recognition motif. (a.k.a. RRM, RBD, or RNP
  misc_feature (26)..(117): Homolog of NCBI NO: 15229525 NR Description: RNA-binding protein, putative [Arabidopsis
  misc_feature (28)..(114): Homolog of NCBI NO: 15236359 NR Description: glycine-rich RNA-binding protein (AtGRP2)
  misc_feature (28)..(114): Homolog of NCBI NO: 30682622 NR Description: glycine-rich RNA-binding protein (AtGRP2)
  misc_feature (28)..(114): Homolog of NCBI NO: 2826811 NR Description: AtGRP2 [Arabidopsis thaliana]
  misc_feature (28)..(114): Homolog of NCBI NO: 322514 NR Description: glycine-rich RNA-binding protein (clone A81) -
  misc_feature (20)..(107): Homolog of NCBI NO: 21388662 NR Description: glycine-rich RNA-binding protein [Physcomitrella
  misc_feature (20)..(110): Homolog of NCBI NO: 15822705 NR Description: RNA-binding protein precursor [Solanum tuberosum]
  misc_feature (2)..(105): Homolog of NCBI NO: 1084415 NR Description: RNA-binding protein - wood tobacco
  misc_feature (20)..(110): Homolog of NCBI NO: 15822703 NR Description: RNA-binding protein precursor [Nicotiana tabacum]
  misc_feature (23)..(114): Homolog of NCBI NO: 7439994 NR Description: glycine-rich RNA-binding protein - garden pea
MQITSALVNGSALRFHLPRFLCVRHHSSTKLFVTGLSYDTNEPILRDAFGQHGEIIEVKVICDHVTGKSRGYGFVRFVSETTAAAARKEMNGQILDGRRIRVSYAHKGERLSLPNNS

SEQ ID NO: 56936 - DNA, 1424 bp, Glycine max
  misc_feature (1)..(1424): Ceres Seq. ID no. 15178086
aaaaaaggggttgactgaatgtcttgagtgtctcttcctccccaaggctgagccccgctcgttacgggtctctgtctcctttcctttcacgtatgcatcatagtaatagtaattacgaagagagacggaggagccgcagaggagtaaggaggagagcccagaatgagaatgagaagatggtggatctgccacaggaattgatacatgaaatccttttgcgcttgcccgtcaagtctcttattcgattcaaaactgtctgtaagtcatggctttctcacatctctgatccacactttactgcttcacattttaaactaggggcagcacccactgagagacttttgttcttatcgcctattgctcgtgaattcctatccatagacttcaatgaatcccttaatgatgattctgcttctgccgcattgaattgtgactttgtggaacattttgattaccttgaaatcattggttcatgtagagggtttttactcttggatttccgctatactctctgcgtgtggaatccatccacaggtgtccaccaatttgtgaaatggtcaccttttgtgtcatctaatatcatgggtctcgatgtgggtgatgagttttccttatctattcgtggttttgggtatgacccttcaacagatgattacttggcagttctggcatcgtgcaacgacgagcttgttataatccacatggagtatttctcactcagagctaatacttggaaagaaattgaggctagccatttgtcttttgcagaaatagcttataatgaagtcgggtcgttcttgaacactgctattcattggttggcttttagtcttgaggtatcaatggatgttattgttgcttttgatttaactgaaaaggagtttttcagagatacttctaccaattgattttgatttggacaattttcaactctgtgttttggcggtactgggagaattgctcaatctatgtgctgttggaggagatcagacattcggtagaaatatgggcgatgggagaatacaaagtaaggtcatcttggacaaagaccactgttgtgtctcacgattatttttctagtctctccttatttccaatatgttctaccgaagatggagatattgttgggacagatggctgtaatgtattgataaaatgtaatgacgagggacagctgcaagagtaccaaatctattctaatggtccatatcgatcagctgtgtacacagaatctctactttcactcccttgtgacagggagccagcagaaaatgtttaataagcgaataagaggaattaggttgtgaaatattttctgatacttttactatttgttggatactcatcttatattatcaattcttatggtatattaaagcatgaagaagtgacaggtagattaatgaaattgatatttcatggcc

SEQ ID NO: 56937 - protein, 271 aa, Glycine max
  peptide (1)..(271): Ceres Seq. ID no. 15178087
  misc_feature (32)..(68): Pfam Name: F-box domain Pfam Description: F-box domain
  misc_feature (31)..(266): Homolog of NCBI NO: 15238057 NR Description: hypothetical protein [Arabidopsis thaliana]
  misc_feature (29)..(266): Homolog of NCBI NO: 15229648 NR Description: hypothetical protein [Arabidopsis thaliana]
  misc_feature (18)..(264): Homolog of NCBI NO: 15231179 NR Description: F-box protein family [Arabidopsis thaliana]
  misc_feature (31)..(266): Homolog of NCBI NO: 15229011 NR Description: hypothetical protein [Arabidopsis thaliana]
  misc_feature (15)..(264): Homolog of NCBI NO: 15241905 NR Description: F-box protein family [Arabidopsis thaliana]
  misc_feature (9)..(264): Homolog of NCBI NO: 15220964 NR Description: F-box protein family [Arabidopsis thaliana]
  misc_feature (29)..(264): Homolog of NCBI NO: 30682162 NR Description: F-box protein family [Arabidopsis thaliana]
  misc_feature (29)..(264): Homolog of NCBI NO: 7487230 NR Description: hypothetical protein T1P17.150 - Arabidopsis
  misc_feature (12)..(264): Homolog of NCBI NO: 15241861 NR Description: F-box protein family [Arabidopsis thaliana]
  misc_feature (31)..(264): Homolog of NCBI NO: 15229536 NR Description: F-box protein family [Arabidopsis thaliana]
MHHSNSNYEERRRSRRGVRRRAQNENEKMVDLPQELIHEILLRLPVKSLIRFKTVCKSWLSHISDPHFTASHFKLGAAPTERLLFLSPIAREFLSIDFNESLNDDSASAALNCDFVEHFDYLEIIGSCRGFLLLDFRYTLCVWNPSTGVHQFVKWSPFVSSNIMGLDVGDEFSLSIRGFGYDPSTDDYLAVLASCNDELVIIHMEYFSLRANTWKEIEASHLSFAEIAYNEVGSFLNTAIHWLAFSLEVSMDVIVAFDLTEKEFFRDTSTN

SEQ ID NO: 56938 - protein, 243 aa, Glycine max
  peptide (1)..(243): Ceres Seq. ID no. 15178088
  misc_feature (4)..(40): Pfam Name: F-box domain Pfam Description: F-box domain
  misc_feature (3)..(238): Homolog of NCBI NO: 15238057 NR Description: hypothetical protein [Arabidopsis thaliana]
  misc_feature (1)..(238): Homolog of NCBI NO: 15229648 NR Description: hypothetical protein [Arabidopsis thaliana]
  misc_feature (1)..(236): Homolog of NCBI NO: 15231179 NR Description: F-box protein family [Arabidopsis thaliana]
  misc_feature (3)..(238): Homolog of NCBI NO: 15229011 NR Description: hypothetical protein [Arabidopsis thaliana]
  misc_feature (1)..(236): Homolog of NCBI NO: 15241905 NR Description: F-box protein family [Arabidopsis thaliana]
  misc_feature (1)..(236): Homolog of NCBI NO: 15220964 NR Description: F-box protein family [Arabidopsis thaliana]
  misc_feature (1)..(236): Homolog of NCBI NO: 30682162 NR Description: F-box protein family [Arabidopsis thaliana]
  misc_feature (1)..(236): Homolog of NCBI NO: 7487230 NR Description: hypothetical protein T1P17.150 - Arabidopsis
  misc_feature (1)..(236): Homolog of NCBI NO: 15241861 NR Description: F-box protein family [Arabidopsis thaliana]
  misc_feature (3)..(236): Homolog of NCBI NO: 15229536 NR Description: F-box protein family [Arabidopsis thaliana]
MVDLPQELIHEILLRLPVKSLIRFKTVCKSWLSHISDPHFTASHFKLGAAPTERLLFLSPIAREFLSIDFNESLNDDSASAALNCDFVEHFDYLEIIGSCRGFLLLDFRYTLCVWNPSTGVHQFVKWSPFVSSNIMGLDVGDEFSLSIRGFGYDPSTDDYLAVLASCNDELVIIHMEYFSLRANTWKEIEASHLSFAEIAYNEVGSFLNTAIHWLAFSLEVSMDVIVAFDLTEKEFFRDTSTN

SEQ ID NO: 56939 - DNA, 1574 bp, Glycine max
  misc_feature (1)..(1574): Ceres Seq. ID no. 14314054
aaagcagagagcaaatcaacaaaagaagccatggtagtgttacaagaagtcttcaacgttgtaccaacttccgaatcagaagagtttcagttaccaactcaaacatcgctttccctcaccttcttcgacatcctatggttaaggttaccacctgttcaacgcgtcttcttctatgaattccctcacccaacccatctcttctttgatacccttcttcccaaactcaaacactctctttctcttgcacttgcccactttttccctcttgcgggccacctcacttggccacttcactcccaaaaacccatcatcaattacaaatctggtgacactgttcccctcacagttgctgtatctgaagctgatttcaaccacctagcaggcacagatctttatgaagccaaagaaattccccatcttttaccccacttgaccatatcccacgaaaaagccacgcttttggccctgcaagctaccctctttccaaactctggattttccattggaataacctcacaccatgctgttctagatggcaagacttcaacatcgtttatcaaatcctgggcttatctttgtagagaatcacaatcacccacttctttaccacctgaactgattcctttttatgacagggaagtaatcaaagaccctaaccatttaggggtaaaatatgtcagtgattggttagagcagaatggacccaacaaccgaagcctcttggtttgggatctgcaagctccagaagatgcaactagaggcatatttcaattgtctcgttcggatattgaaaagctgaagcaaatagtggtgtccaagaagaaagggaacaacaccaaccttcgcttgtcaacctttgtgttgtctattgcctatgcttgtgttttcagggtgagagcagaggaaacaaagaacaagagagttatgttggctttgaatgttgattgcagggcacgtttggagccacctattccaccaacatattttggaaactgtgttggagcgagacttgcaattgctgaaacaagagagatattgggggaagatggcctaattgtggttgtggatgcactgaatgatgccttggggagtctcaaggatggagcactgagtggagcagaaaattggtcaaggtggttgcttgaaagttttagtgatgatgtgagaataattggtgttgctgggtcacctaggtttgaggcttatagtaatgactttggttggggaagaccaaagaaagtggagatggcttctatagacagaactggggcactttgtttatcagatagcaaaaatggtgatggggttgaggtaagttttgtgtccaacaaaagagcaatggagacctttgcttatctctttgccaatggccttcgatcttgagtccctcttggtacaatcttgtggtttttcatgaataaaaagttgaggaaaaataaaggtagagtagtgtaggtgttcttatgaaaattcgtttttaacaattaattgtctgaaatgttctggtggtgtgtaatgcttcaattatttgacaattttatgtatattaatcatgtattgctgttgattatccg

SEQ ID NO: 56940 - protein, 460 aa, Glycine max
  peptide (1)..(460): Ceres Seq. ID no. 14314055
  misc_feature (17)..(447): Pfam Name: Transferase family Pfam Description: Transferase family
  misc_feature (36)..(460): Homolog of NCBI NO: 28396175 NR Description: malonyl-coenzyme A: anthocyanidin
  misc_feature (37)..(456): Homolog of NCBI NO: 15230049 NR Description: transferase family [Arabidopsis thaliana]
  misc_feature (16)..(459): Homolog of NCBI NO: 21593292 NR Description: acyltransferase-like protein [Arabidopsis
  misc_feature (16)..(449): Homolog of NCBI NO: 15241631 NR Description: transferase family [Arabidopsis thaliana]
  misc_feature (9)..(460): Homolog of NCBI NO: 10177550 NR Description: anthocyanin acyltransferase-like protein
  misc_feature (16)..(458): Homolog of NCBI NO: 15230034 NR Description: transferase family [Arabidopsis thaliana]
  misc_feature (18)..(458): Homolog of NCBI NO: 15230013 NR Description: transferase family [Arabidopsis thaliana]
  misc_feature (16)..(460): Homolog of NCBI NO: 15230048 NR Description: transferase family [Arabidopsis thaliana]
  misc_feature (9)..(460): Homolog of NCBI NO: 15450469 NR Description: AT5g39050/MXF12_60 [Arabidopsis thaliana]
  misc_feature (17)..(459): Homolog of NCBI NO: 15241632 NR Description: transferase family [Arabidopsis thaliana]
KAESKSTKEAMVVLQEVFNVVPTSESEEFQLPTQTSLSLTFFDILWLRLPPVQRVFFYEFPHPTHLFFDTLLPKLKHSLSLALAHFFPLAGHLTWPLHSQKPIINYKSGDTVPLTVAVSEADFNHLAGTDLYEAKEIPHLLPHLTISHEKATLLALQATLFPNSGFSIGITSHHAVLDGKTSTSFIKSWAYLCRESQSPTSLPPELIPFYDREVIKDPNHLGVKYVSDWLEQNGPNNRSLLVWDLQAPEDATRGIFQLSRSDIEKLKQIVVSKKKGNNTNLRLSTFVLSIAYACVFRVRAEETKNKRVMLALNVDCRARLEPPIPPTYFGNCVGARLAIAETREILGEDGLIVVVDALNDALGSLKDGALSGAENWSRWLLESFSDDVRIIGVAGSPRFEAYSNDFGWGRPKKVEMASIDRTGALCLSDSKNGDGVEVSFVSNKRAMETFAYLFANGLRS

SEQ ID NO: 56941 - protein, 450 aa, Glycine max
  peptide (1)..(450): Ceres Seq. ID no. 14314056
  misc_feature (7)..(437): Pfam Name: Transferase family Pfam Description: Transferase family
  misc_feature (26)..(450): Homolog of NCBI NO: 28396175 NR Description: malonyl-coenzyme A: anthocyanidin
  misc_feature (27)..(446): Homolog of NCBI NO: 15230049 NR Description: transferase family [Arabidopsis thaliana]
  misc_feature (6)..(449): Homolog of NCBI NO: 21593292 NR Description: acyltransferase-like protein [Arabidopsis
  misc_feature (6)..(439): Homolog of NCBI NO: 15241631 NR Description: transferase family [Arabidopsis thaliana]
  misc_feature (1)..(450): Homolog of NCBI NO: 10177550 NR Description: anthocyanin acyltransferase-like protein
  misc_feature (6)..(448): Homolog of NCBI NO: 15230034 NR Description: transferase family [Arabidopsis thaliana]
  misc_feature (8)..(448): Homolog of NCBI NO: 15230013 NR Description: transferase family [Arabidopsis thaliana]
  misc_feature (6)..(450): Homolog of NCBI NO: 15230048 NR Description: transferase family [Arabidopsis thaliana]
  misc_feature (1)..(450): Homolog of NCBI NO: 15450469 NR Description: AT5g39050/MXF12_60 [Arabidopsis thaliana]
  misc_feature (7)..(449): Homolog of NCBI NO: 15241632 NR Description: transferase family [Arabidopsis thaliana]
MVVLQEVFNVVPTSESEEFQLPTQTSLSLTFFDILWLRLPPVQRVFFYEFPHPTHLFFDTLLPKLKHSLSLALAHFFPLAGHLTWPLHSQKPIINYKSGDTVPLTVAVSEADFNHLAGTDLYEAKEIPHLLPHLTISHEKATLLALQATLFPNSGFSIGITSHHAVLDGKTSTSFIKSWAYLCRESQSPTSLPPELIPFYDREVIKDPNHLGVKYVSDWLEQNGPNNRSLLVWDLQAPEDATRGIFQLSRSDIEKLKQIVVSKKKGNNTNLRLSTFVLSIAYACVFRVRAEETKNKRVMLALNVDCRARLEPPIPPTYFGNCVGARLAIAETREILGEDGLIVVVDALNDALGSLKDGALSGAENWSRWLLESFSDDVRIIGVAGSPRFEAYSNDFGWGRPKKVEMASIDRTGALCLSDSKNGDGVEVSFVSNKRAMETFAYLFANGLRS

SEQ ID NO: 56942 - DNA, 1390 bp, Glycine max
  misc_feature (1)..(1390): Ceres Seq. ID no. 14314015
attcattgcacgcagttcctggaaagtagcaaagtaaagctctcttggttttgggaaccgaaacctaagaaaaacgcagaatctgtttcggaaagcgaaggaggcatggcatttgagtccaacgaagttgcagccacaacgctccaagccatatgctacaagcgcggttccctccagcttctcgatcagagaaagctccctctggagacagtttacttggaaattcgggattcaacggatggctggaatgccatacgggaaatggtggtccggggagcacctgctattgcaattgcagcggcactctctttggctgtggaggtgttcaatttagattttaatgggtcagctactgatgctgtatccttgctgcagaagaaattagaatatcttgtcacaagtcggccaactgcagtgaacctatcagatgctgcgacaaaactcaaagaagtgatatcaaatgctgctgctaccacttcagagggaaggagtgttttccaagtgtatatagatgctgctgaagttatgcttgaggatgatgttgcgtcaaatagagctattggttcttatggagctagtattattcaacaacaaacagagaaacaaaagctttctgttttgactcattgcaacactggaagtctagccacagctggatatggtactgctctgggtgtcatccgtgcacttcatagtgccggagttctaaaaagggcttattgcacagaaacacgcccatttaatcaaggatctagacttactgcctttgagttggtgcatgaaaaaataccaggaactcttattgccgattctgctgcagctgcattaatgaaggcaggacatgtggatgctgttgttgttggggcagatcgggttgcatcaaatggtgacacagccaacaaaattggaacctacagcgttgccttgtccgctaagtttcataatgtacctttttatgtggctgcacccctaacttccattgatctatcactttcttctggacaagaaattgtcattgaggagaggtctcccaaggaattgctgaacacacatggaggacttggagagcagattgctgcctcaggaatttctgtgtggaacccagcttttgatgttactcctgctaatctaatatcggggatcatcactgagaagggtgtcattacgaagacatctgctggtgatgcatttgacatcaaagccttcgtacagaaaacaggttaaggtagagtgagatttttatcacacgttacaacattgtaggcttgaaaagtattggagtggtagggttctttaagagcctctttggtacgcaagttagataagacttattaactttgagacctaattgtataagatgataacatcaatatattatgcaatgtttggt

SEQ ID NO: 56943 - protein, 407 aa, Glycine max
  peptide (1)..(407): Ceres Seq. ID no. 14314016
  misc_feature (75)..(390): Pfam Name: Initiation factor 2 subunit family Pfam Description: Initiation factor 2 subunit family
  misc_feature (90)..(388): Homolog of NCBI NO: 31242173 NR Description: ENSANGP00000017411 [Anopheles gambiae]
  misc_feature (47)..(388): Homolog of NCBI NO: 19577378 NR Description: putative translation initiation factor [Anopheles
  misc_feature (47)..(388): Homolog of NCBI NO: 31242175 NR Description: ENSANGP00000023010 [Anopheles gambiae]
  misc_feature (48)..(394): Homolog of NCBI NO: 40740852 NR Description: hypothetical protein AN4290.2 [Aspergillus
  misc_feature (88)..(407): Homolog of NCBI NO: 20466258 NR Description: putative translation initiation factor eIF-2B
  misc_feature (45)..(404): Homolog of NCBI NO: 12407304 NR Description: IDI2 [Hordeum vulgare subsp. vulgare]
  misc_feature (46)..(385): Homolog of NCBI NO: 25315908 NR Description: hypothetical protein At2g05830 [imported] -
  misc_feature (47)..(406): Homolog of NCBI NO: 15216226 NR Description: CIG2 [Nicotiana tabacum]
  misc_feature (46)..(407): Homolog of NCBI NO: 21593194 NR Description: putative translation initiation factor eIF-2B
  misc_feature (46)..(407): Homolog of NCBI NO: 18396170 NR Description: translation initiation factor eIF-2B alpha
IHCTQFLESSKVKLSWFWEPKPKKNAESVSESEGGMAFESNEVAATTLQAICYKRGSLQLLDQRKLPLETVYLEIRDSTDGWNAIREMVVRGAPAIAIAAALSLAVEVFNLDFNGSATDAVSLLQKKLEYLVTSRPTAVNLSDAATKLKEVISNAAATTSEGRSVFQVYIDAAEVMLEDDVASNRAIGSYGASIIQQQTEKQKLSVLTHCNTGSLATAGYGTALGVIRALHSAGVLKRAYCTETRPFNQGSRLTAFELVHEKIPGTLIADSAAAALMKAGHVDAVVVGADRVASNGDTANKIGTYSVALSAKFHNVPFYVAAPLTSIDLSLSSGQEIVIEERSPKELLNTHGGLGEQIAASGISVWNPAFDVTPANLISGIITEKGVITKTSAGDAFDIKAFVQKTG

SEQ ID NO: 56944 - protein, 372 aa, Glycine max
  peptide (1)..(372): Ceres Seq. ID no. 14314017
  misc_feature (40)..(355): Pfam Name: Initiation factor 2 subunit family Pfam Description: Initiation factor 2 subunit family
  misc_feature (55)..(353): Homolog of NCBI NO: 31242173 NR Description: ENSANGP00000017411 [Anopheles gambiae]
  misc_feature (12)..(353): Homolog of NCBI NO: 19577378 NR Description: putative translation initiation factor [Anopheles
  misc_feature (12)..(353): Homolog of NCBI NO: 31242175 NR Description: ENSANGP00000023010 [Anopheles gambiae]
  misc_feature (13)..(359): Homolog of NCBI NO: 40740852 NR Description: hypothetical protein AN4290.2 [Aspergillus
  misc_feature (53)..(372): Homolog of NCBI NO: 20466258 NR Description: putative translation initiation factor eIF-2B
  misc_feature (10)..(369): Homolog of NCBI NO: 12407304 NR Description: IDI2 [Hordeum vulgare subsp. vulgare]
  misc_feature (11)..(350): Homolog of NCBI NO: 25315908 NR Description: hypothetical protein At2g05830 [imported] -
  misc_feature (12)..(371): Homolog of NCBI NO: 15216226 NR Description: CIG2 [Nicotiana tabacum]
  misc_feature (11)..(372): Homolog of NCBI NO: 21593194 NR Description: putative translation initiation factor eIF-2B
  misc_feature (11)..(372): Homolog of NCBI NO: 18396170 NR Description: translation initiation factor eIF-2B alpha
MAFESNEVAATTLQAICYKRGSLQLLDQRKLPLETVYLEIRDSTDGWNAIREMVVRGAPAIAIAAALSLAVEVFNLDFNGSATDAVSLLQKKLEYLVTSRPTAVNLSDAATKLKEVISNAAATTSEGRSVFQVYIDAAEVMLEDDVASNRAIGSYGASIIQQQTEKQKLSVLTHCNTGSLATAGYGTALGVIRALHSAGVLKRAYCTETRPFNQGSRLTAFELVHEKIPGTLIADSAAAALMKAGHVDAVVVGADRVASNGDTANKIGTYSVALSAKFHNVPFYVAAPLTSIDLSLSSGQEIVIEERSPKELLNTHGGLGEQIAASGISVWNPAFDVTPANLISGIITEKGVITKTSAGDAFDIKAFVQKTG

SEQ ID NO: 56945 - protein, 320 aa, Glycine max
  peptide (1)..(320): Ceres Seq. ID no. 14314018
  misc_feature (1)..(303): Pfam Name: Initiation factor 2 subunit family Pfam Description: Initiation factor 2 subunit family
  misc_feature (3)..(301): Homolog of NCBI NO: 31242173 NR Description: ENSANGP00000017411 [Anopheles gambiae]
  misc_feature (1)..(301): Homolog of NCBI NO: 19577378 NR Description: putative translation initiation factor [Anopheles
  misc_feature (1)..(301): Homolog of NCBI NO: 31242175 NR Description: ENSANGP00000023010 [Anopheles gambiae]
  misc_feature (1)..(307): Homolog of NCBI NO: 40740852 NR Description: hypothetical protein AN4290.2 [Aspergillus
  misc_feature (1)..(320): Homolog of NCBI NO: 20466258 NR Description: putative translation initiation factor eIF-2B
  misc_feature (1)..(317): Homolog of NCBI NO: 12407304 NR Description: IDI2 [Hordeum vulgare subsp. vulgare]
  misc_feature (1)..(298): Homolog of NCBI NO: 25315908 NR Description: hypothetical protein At2g05830 [imported] -
  misc_feature (1)..(319): Homolog of NCBI NO: 15216226 NR Description: CIG2 [Nicotiana tabacum]
  misc_feature (1)..(320): Homolog of NCBI NO: 21593194 NR Description: putative translation initiation factor eIF-2B
  misc_feature (1)..(320): Homolog of NCBI NO: 18396170 NR Description: translation initiation factor eIF-2B alpha
MVVRGAPAIAIAAALSLAVEVFNLDFNGSATDAVSLLQKKLEYLVTSRPTAVNLSDAATKLKEVISNAAATTSEGRSVFQVYIDAAEVMLEDDVASNRAIGSYGASIIQQQTEKQKLSVLTHCNTGSLATAGYGTALGVIRALHSAGVLKRAYCTETRPFNQGSRLTAFELVHEKIPGTLIADSAAAALMKAGHVDAVVVGADRVASNGDTANKIGTYSVALSAKFHNVPFYVAAPLTSIDLSLSSGQEIVIEERSPKELLNTHGGLGEQIAASGISVWNPAFDVTPANLISGIITEKGVITKTSAGDAFDIKAFVQKTG

SEQ ID NO: 56946 - DNA, 945 bp, Glycine max
  misc_feature (1)..(945): Ceres Seq. ID no. 14314070
aaacacaacaactcatcatcctatattctcttcttggatcatcttggttaagctgcagatcagaatagaataataataaataaagataagatggagactcatttggttttcttgcttggtttgatcttcactctagttgccggcgttggagcccaagcccaaggcccatccacctctcctgcgcctcccacaccccaagcatctccacctcccgtccagtcttctccgccacctgttccctcttcacctccaccctctcagtctccaccaccagcttccactccccctccatccccactcagctctcctcctccttcctctcctccaccctcctcccctcctccttcttctccaccccccgcctctcctcctccttcttctccaccccccgcctctcctcctccttcttcccctcccccttcctctccccctcctttttcaccacctcctgccactcctccccccgccactcctccccccgcagttccaccaccctcattgaccccaacagttacacctctttcttctccacctgtctcttctccagctccgtctccttccaaggtgtttgctcctgcactctctccttcccttgctcccggtcccagcctctccaccatctctccctccggcgatgacagtggggctcaaaacttgtggtcctttcagaagatgattgggagcttagtattcggatgtgctttgctgtccatgttgttctagacatcgatctctgtcttcggactcgcagatttttctgccaattcatgttattttgctatttaccctataccttacctttatatattattttgtggatgtgatcgtgggagtttattactgtatttgaactatataaattgcttgcattcttgggagatttgaggggaggttttgtattcgagggcagttattttgtatgacattactattagtttatcgatc

SEQ ID NO: 56947 - protein, 210 aa, Glycine max
  peptide (1)..(210): Ceres Seq. ID no. 14314071
  misc_feature (26)..(172): Pfam Name: Formin Homology 2 Domain Pfam Description: Formin Homology 2 Domain
  misc_feature (26)..(179): Homolog of NCBI NO: 6523547 NR Description: hydroxyproline-rich glycoprotein DZ-HRGP
  misc_feature (15)..(173): Homolog of NCBI NO: 6523547 NR Description: hydroxyproline-rich glycoprotein DZ-HRGP
  misc_feature (26)..(154): Homolog of NCBI NO: 14253159 NR Description: VMP3 protein [Volvox carteri f. nagariensis]
  misc_feature (20)..(179): Homolog of NCBI NO: 6523547 NR Description: hydroxyproline-rich glycoprotein DZ-HRGP
  misc_feature (34)..(206): Homolog of NCBI NO: 15226024 NR Description: arabinogalactan-protein (AGP9) [Arabidopsis
  misc_feature (34)..(206): Homolog of NCBI NO: 13265426 NR Description: At2g14890 [Arabidopsis thaliana]
  misc_feature (4)..(188): Homolog of NCBI NO: 1084362 NR Description: extensin-like protein S3 - alfalfa
  misc_feature (6)..(209): Homolog of NCBI NO: 7441829 NR Description: proline-rich cell wall protein - upland cotton
  misc_feature (6)..(209): Homolog of NCBI NO: 7441828 NR Description: extensin-like cell wall protein - sea-island
  misc_feature (26)..(210): Homolog of NCBI NO: 1084362 NR Description: extensin-like protein S3 - alfalfa
METHLVFLLGLIFTLVAGVGAQAQGPSTSPAPPTPQASPPPVQSSPPPVPSSPPPSQSPPPASTPPPSPLSSPPPSSPPPSSPPPSSPPPASPPPSSPPPASPPPSSPPPSSPPPFSPPPATPPPATPPPAVPPPSLTPTVTPLSSPPVSSPAPSPSKVFAPALSPSLAPGPSLSTISPSGDDSGAQNLWSFQKMIGSLVFGCALLSMLF

SEQ ID NO: 56948 - DNA, 1335 bp, Glycine max
  misc_feature (1)..(1335): Ceres Seq. ID no. 15171228
aattctgcttcagaaatccctgcgtgaagaagaaatcactgtgtgtgattcaattgcatcggtttcttcaattccagcaccggtgcgtgcatctgatttatataaccttgtttgttcactcttatttttatgttatggctatttcatatttgaggtcagcatcataagcagttgttgtttcggaaacacaagatgaattctggtgggtacgctgttgaggttacgggtctctcgccaaaagccacggacaaggatgttcgtgacttctttgctttctccggtgtcattgagaatgttgaaattatcaggtctggtgattatgcttgtaccgcttatgtgacattcaaagatgcatatgctcaagaaactgcatgcttgctcagtggagccactattttagatcaacgtgtatgcataacacgctggggacactatgaagatgaatttgatttttggaaccagccttcgtatagtcatgaggatgagactgcttcaactacaccacaaagcaatcaatttgtttcctctgctggagaagcagttaccatggctcaagaagttgttaggaccatgctgtcaaagggatatgttctcagcaaggatgcactagctaaggctaaagactttgacgagtctcatcaggtttccgccactgcaacagcgaaggtttctgaactgagccagagaattggcctatcagataagatatctgcaggtattggagctgttaaatctgtggatcagagatataatgtctctgaaacaaccatggcggctgcatccacagcaggaagatcggtagcagcggctgcaaactctttggtaaatagcagctatttttcaaaaggagccttgtgggtgtcaggtgctctaacccgagcagctcaggttgcttctgatatgggtactcacagggataggcagtaaataaagcattgacatgattaaacactatcttttagatatgtctgcttctgctaaatagcttttgaaacttcagttagcaatattattatacttttacaatacataaatcctgtttggataattttttggataaacacttatagaagtaaggtaaaatgaattgagcttctctcgtaagttaaaatcaacttatgcacttaacttttataaaagatttttcatttaacttttctgaaggccgaagtacataagttgattttagtttatgagaaaatcacatttcattttactttcttgtaagtatttatagagaaatttatcttaacaggatcatagtgcatgtaattatgaataaatctagtgtatgcccagacaggattgaactatgaaacccgtgctatttctacc

SEQ ID NO: 56949 - protein, 244 aa, Glycine max
  peptide (1)..(244): Ceres Seq. ID no. 15171229
  misc_feature (8)..(76): Pfam Name: RNA recognition motif. (a.k.a. RRM, RBD, or RNP domain) Pfam Description: RNA recognition motif. (a.k.a. RRM, RBD, or RNP
  misc_feature (8)..(238): Homolog of NCBI NO: 7485085 NR Description: hypothetical protein - Arabidopsis thaliana
  misc_feature (8)..(238): Homolog of NCBI NO: 30695063 NR Description: RNA recognition motif (RRM)-containing protein
  misc_feature (8)..(238): Homolog of NCBI NO: 8809670 NR Description: gene_id:MSD23.5~pir||C71447~similar to unknown
  misc_feature (8)..(238): Homolog of NCBI NO: 18414951 NR Description: RNA recognition motif (RRM)-containing protein
  misc_feature (8)..(239): Homolog of NCBI NO: 38347069 NR Description: OSJNBa0006A01.10 [Oryza sativa (japonica
  misc_feature (5)..(238): Homolog of NCBI NO: 6714467 NR Description: unknown protein [Arabidopsis thaliana]
  misc_feature (1)..(240): Homolog of NCBI NO: 38344906 NR Description: OSJNBb0079B02.9 [Oryza sativa (japonica
  misc_feature (5)..(239): Homolog of NCBI NO: 25518024 NR Description: F14L17.11 protein - Arabidopsis thaliana
  misc_feature (5)..(244): Homolog of NCBI NO: 21618045 NR Description: unknown [Arabidopsis thaliana]
  misc_feature (5)..(244): Homolog of NCBI NO: 18394102 NR Description: RNA recognition motif (RRM)-containing protein
MNSGGYAVEVTGLSPKATDKDVRDFFAFSGVIENVEIIRSGDYACTAYVTFKDAYAQETACLLSGATILDQRVCITRWGHYEDEFDFWNQPSYSHEDETASTTPQSNQFVSSAGEAVTMAQEVVRTMLSKGYVLSKDALAKAKDFDESHQVSATATAKVSELSQRIGLSDKISAGIGAVKSVDQRYNVSETTMAAASTAGRSVAAAANSLVNSSYFSKGALWVSGALTRAAQVASDMGTHRDRQ

SEQ ID NO: 56950 - protein, 126 aa, Glycine max
  peptide (1)..(126): Ceres Seq. ID no. 15171230
  misc_feature (1)..(120): Homolog of NCBI NO: 7485085 NR Description: hypothetical protein - Arabidopsis thaliana
  misc_feature (1)..(120): Homolog of NCBI NO: 30695063 NR Description: RNA recognition motif (RRM)-containing protein
  misc_feature (1)..(120): Homolog of NCBI NO: 8809670 NR Description: gene_id:MSD23.5~pir||C71447~similar to unknown
  misc_feature (1)..(120): Homolog of NCBI NO: 18414951 NR Description: RNA recognition motif (RRM)-containing protein
  misc_feature (1)..(121): Homolog of NCBI NO: 38347069 NR Description: OSJNBa0006A01.10 [Oryza sativa (japonica
  misc_feature (1)..(120): Homolog of NCBI NO: 6714467 NR Description: unknown protein [Arabidopsis thaliana]
  misc_feature (1)..(122): Homolog of NCBI NO: 38344906 NR Description: OSJNBb0079B02.9 [Oryza sativa (japonica
  misc_feature (1)..(121): Homolog of NCBI NO: 25518024 NR Description: F14L17.11 protein - Arabidopsis thaliana
  misc_feature (1)..(126): Homolog of NCBI NO: 21618045 NR Description: unknown [Arabidopsis thaliana]
  misc_feature (1)..(126): Homolog of NCBI NO: 18394102 NR Description: RNA recognition motif (RRM)-containing protein
MAQEVVRTMLSKGYVLSKDALAKAKDFDESHQVSATATAKVSELSQRIGLSDKISAGIGAVKSVDQRYNVSETTMAAASTAGRSVAAAANSLVNSSYFSKGALWVSGALTRAAQVASDMGTHRDRQ

SEQ ID NO: 56951 - DNA, 1528 bp, Glycine max
  misc_feature (1)..(1528): Ceres Seq. ID no. 14315052
ttaccacttcccatcttcgcacacaacacagccatccctttctctcccttcttttgctctctgccctaaccagcctcaccagatcttttacctccatttccagtgcatcacaccttagcttcaagccatcacaagttgtagatacagttaatactcaatatggagctgagtactataaaagatgcttttgaccgtgttactaagaagcaaaagttatcttgttccaagactcaagaagcaattgatcagatcagacaggaaattgagagtgttttagacacactgcagtcagcgaataacactgaccatgaacttgattataaaactgtcctgaatgaacttaaggccagttttcttttaattgctccacttagtcaaatggaaggtacacagaaggagctaaatgtagcactcaccaagtatgggaagcttcttgagaaacatttcaaccctgatatatccaaggcttacagaaatatcgacattgatagacatacattaaaccaaataattgctaaccatttttatcaccagggcctttttgagataggggaccattttatgagtgtggttggagagcctgaatccgcagccattatgaaatttccgttcgtggaaatgtatcaaatacttgaagccatgcagaatcagaacctagagccagccctcaactgggcttccactaatggtgacaaacttgctcaaagtggatctgatattgtgttgaaacttcactcaatgcaatttgtgaaagtacttcaaaatggaagtagagaggaagctcttcattatgctcgaatgcacctttctccttttgctaccagtcacatgaccgatattcagaaacttatgggctgtcttctatggacgggaaagcttgatcgttctccttaccatgcattactatcaccatctaactgggataagttggctgaggaacttaaaaggcagttctgcaatcttttgggacagtcgtataatagtccattgagcgtgactgtagcagcaggggtccaggttttgccaccactcctcaaatttatgaatgtcatggcagggaagaagaatgaatggcagtctatgaaccagttaccggtgccggttgagttggaccgtgagttccagttccattctatttttgtttgtcctgtctccaaggaacaagcaaccgaggataaccctccgatgttaatgtcctgtggccatgtcctctgcaagcagtctatcttgaagatgtccaagaatagcacaaaagtgtttaagtgcccatattgtccctttgatattgatgcagcacagtgcaagcagctatatttctgatgttgatggatttgtatgaaactcctgtataaattcaatcctgtgttagcaataggtgtaaccacgtttgcaaaggcccatgccttgttgtgatctctgtgtatttcataaatttgttgtaaatagaaattctttttaatctggatatgactggcaagtccttcattatttgaataagttttgatacacttaaagctggtttttcccc

SEQ ID NO: 56952 - protein, 386 aa, Glycine max
  peptide (1)..(386): Ceres Seq. ID no. 14315053
  misc_feature (339)..(372): Pfam Name: Zinc finger, C3HC4 type (RING finger) Pfam Description: Zinc finger, C3HC4 type (RING finger)
  misc_feature (4)..(386): Homolog of NCBI NO: 31240441 NR Description: ENSANGP00000021271 [Anopheles gambiae]
  misc_feature (71)..(386): Homolog of NCBI NO: 10434433 NR Description: unnamed protein product [Homo sapiens]
  misc_feature (23)..(386): Homolog of NCBI NO: 37595352 NR Description: hypothetical protein FLJ22318 [Danio rerio]
  misc_feature (71)..(386): Homolog of NCBI NO: 12232469 NR Description: hypothetical protein FLJ13910 [Homo sapiens]
  misc_feature (23)..(386): Homolog of NCBI NO: 37590378 NR Description: Unknown (protein for MGC:73277) [Danio rerio]
  misc_feature (1)..(386): Homolog of NCBI NO: 28829262 NR Description: similar to Arabidopsis thaliana (Mouse-ear
  misc_feature (5)..(386): Homolog of NCBI NO: 15242463 NR Description: expressed protein [Arabidopsis thaliana]
  misc_feature (1)..(386): Homolog of NCBI NO: 21593562 NR Description: unknown [Arabidopsis thaliana]
  misc_feature (1)..(386): Homolog of NCBI NO: 18400050 NR Description: expressed protein [Arabidopsis thaliana]
  misc_feature (1)..(386): Homolog of NCBI NO: 15235735 NR Description: expressed protein [Arabidopsis thaliana]
MELSTIKDAFDRVTKKQKLSCSKTQEAIDQIRQEIESVLDTLQSANNTDHELDYKTVLNELKASFLLIAPLSQMEGTQKELNVALTKYGKLLEKHFNPDISKAYRNIDIDRHTLNQIIANHFYHQGLFEIGDHFMSVVGEPESAAIMKFPFVEMYQILEAMQNQNLEPALNWASTNGDKLAQSGSDIVLKLHSMQFVKVLQNGSREEALHYARMHLSPFATSHMTDIQKLMGCLLWTGKLDRSPYHALLSPSNWDKLAEELKRQFCNLLGQSYNSPLSVTVAAGVQVLPPLLKFMNVMAGKKNEWQSMNQLPVPVELDREFQFHSIFVCPVSKEQATEDNPPMLMSCGHVLCKQSILKMSKNSTKVFKCPYCPFDIDAAQCKQLYF

SEQ ID NO: 56953 - protein, 313 aa, Glycine max
  peptide (1)..(313): Ceres Seq. ID no. 14315054
  misc_feature (266)..(299): Pfam Name: Zinc finger, C3HC4 type (RING finger) Pfam Description: Zinc finger, C3HC4 type (RING finger)
  misc_feature (1)..(313): Homolog of NCBI NO: 31240441 NR Description: ENSANGP00000021271 [Anopheles gambiae]
  misc_feature (1)..(313): Homolog of NCBI NO: 10434433 NR Description: unnamed protein product [Homo sapiens]
  misc_feature (1)..(313): Homolog of NCBI NO: 37595352 NR Description: hypothetical protein FLJ22318 [Danio rerio]
  misc_feature (1)..(313): Homolog of NCBI NO: 12232469 NR Description: hypothetical protein FLJ13910 [Homo sapiens]
  misc_feature (1)..(313): Homolog of NCBI NO: 37590378 NR Description: Unknown (protein for MGC:73277) [Danio rerio]
  misc_feature (1)..(313): Homolog of NCBI NO: 28829262 NR Description: similar to Arabidopsis thaliana (Mouse-ear
  misc_feature (1)..(313): Homolog of NCBI NO: 15242463 NR Description: expressed protein [Arabidopsis thaliana]
  misc_feature (1)..(313): Homolog of NCBI NO: 21593562 NR Description: unknown [Arabidopsis thaliana]
  misc_feature (1)..(313): Homolog of NCBI NO: 18400050 NR Description: expressed protein [Arabidopsis thaliana]
  misc_feature (1)..(313): Homolog of NCBI NO: 15235735 NR Description: expressed protein [Arabidopsis thaliana]
MEGTQKELNVALTKYGKLLEKHFNPDISKAYRNIDIDRHTLNQIIANHFYHQGLFEIGDHFMSVVGEPESAAIMKFPFVEMYQILEAMQNQNLEPALNWASTNGDKLAQSGSDIVLKLHSMQFVKVLQNGSREEALHYARMHLSPFATSHMTDIQKLMGCLLWTGKLDRSPYHALLSPSNWDKLAEELKRQFCNLLGQSYNSPLSVTVAAGVQVLPPLLKFMNVMAGKKNEWQSMNQLPVPVELDREFQFHSIFVCPVSKEQATEDNPPMLMSCGHVLCKQSILKMSKNSTKVFKCPYCPFDIDAAQCKQLYF

SEQ ID NO: 56954 - protein, 252 aa, Glycine max
  peptide (1)..(252): Ceres Seq. ID no. 14315055
  misc_feature (205)..(238): Pfam Name: Zinc finger, C3HC4 type (RING finger) Pfam Description: Zinc finger, C3HC4 type (RING finger)
  misc_feature (1)..(252): Homolog of NCBI NO: 31240441 NR Description: ENSANGP00000021271 [Anopheles gambiae]
  misc_feature (1)..(252): Homolog of NCBI NO: 10434433 NR Description: unnamed protein product [Homo sapiens]
  misc_feature (1)..(252): Homolog of NCBI NO: 37595352 NR Description: hypothetical protein FLJ22318 [Danio rerio]
  misc_feature (1)..(252): Homolog of NCBI NO: 12232469 NR Description: hypothetical protein FLJ13910 [Homo sapiens]
  misc_feature (1)..(252): Homolog of NCBI NO: 37590378 NR Description: Unknown (protein for MGC:73277) [Danio rerio]
  misc_feature (1)..(252): Homolog of NCBI NO: 28829262 NR Description: similar to Arabidopsis thaliana (Mouse-ear
  misc_feature (1)..(252): Homolog of NCBI NO: 15242463 NR Description: expressed protein [Arabidopsis thaliana]
  misc_feature (1)..(252): Homolog of NCBI NO: 21593562 NR Description: unknown [Arabidopsis thaliana]
  misc_feature (1)..(252): Homolog of NCBI NO: 18400050 NR Description: expressed protein [Arabidopsis thaliana]
  misc_feature (1)..(252): Homolog of NCBI NO: 15235735 NR Description: expressed protein [Arabidopsis thaliana]
MSVVGEPESAAIMKFPFVEMYQILEAMQNQNLEPALNWASTNGDKLAQSGSDIVLKLHSMQFVKVLQNGSREEALHYARMHLSPFATSHMTDIQKLMGCLLWTGKLDRSPYHALLSPSNWDKLAEELKRQFCNLLGQSYNSPLSVTVAAGVQVLPPLLKFMNVMAGKKNEWQSMNQLPVPVELDREFQFHSIFVCPVSKEQATEDNPPMLMSCGHVLCKQSILKMSKNSTKVFKCPYCPFDIDAAQCKQLYF

SEQ ID NO: 56955 - DNA, 1387 bp, Glycine max
  misc_feature (1)..(1387): Ceres Seq. ID no. 14314747
atctaaacattgacaaccttaataatttattctgtttgtggtctcactagctagaaacaacatcactacacacaaatggcacatactttatccactaatctggctcttaaccttcccacatcgaggtatgttcgtccctcgagaccaacccaggtgaagcccatgaaggtcatgatgggtgatgcaagagaaaagctagaacatgtccatgtgcctaaacacaacaagcaccaccagcccctccccaaaaacaaagttgctcctaccccacccgtaggtaattaattaagctcaatcactctttcacataaattattatatacattaaattctaattgagctattcaacttacaagtaaaattaataaaactcaattatgtttcagctaaaaatttgttttagatcttgttcacctttggatcgaccttgaatcatataatagtcctatgtccacgtataagttgaaattgttctaaacgatatattaatttctggcactctgtggatttgtatatgctatgttattgactaagtgcaaacttaattattcttcttcttaattttctagttagcactaaatatatgactatatactgtgtattaattcagttaacatggggaattgaataaacgcagggttgtgggatcgatttcctacggcaaggacagtgcaagagatgatggagacgatggagagaatgatggaggacccttttgcatttagcacacttgagtggccttcatcaccccttccaagtgagggagtgggagggtatcgaagaaggggaagggcaccatgggaaattaaagagtgtgagagtgaatacaagatgaggtttgatatgcctgggatgaacaaggaggatgtgaaggtgtgggtggaggagaagatgcttgtggtcaaggctgagaaggcacaaaagaagaagcaagagaatgagattgtggaattacaacaagaaaagcagcaagaagaggaggaatggtctgctaagagttatggtaggtatagcagtaggattgctttgcctgataatgtgcagtttgagaatattaaggcagaggttaaggatggtatgctttacataaccatacccaaggctaccagctactccaacatccttgatatccaagttcaatgattcattttgttttgaggtcttttcttagtttttttgttttggattttccacatgtctcttcctttggagacaatcctgttagaggtatgatcagatattaaatataaacatcttttttaacagagatttaaacattaatttatcactttatgaaagactaacctcttctcttagacctaattattggtcttttattagtttgatagacaactttcctctaaataaatagaaaatatgtgtagat

SEQ ID NO: 56956 - protein, 154 aa, Glycine max
  peptide (1)..(154): Ceres Seq. ID no. 14314748
  misc_feature (1)..(154): Homolog of NCBI NO: 4996284 NR Description: heat shock protein 26 [Oryza sativa]
  misc_feature (25)..(154): Homolog of NCBI NO: 123558 NR Description: Small heat shock protein, chloroplast precursor
  misc_feature (1)..(153): Homolog of NCBI NO: 7441305 NR Description: heat shock protein 20, chromoplast-associated -
  misc_feature (1)..(153): Homolog of NCBI NO: 2495334 NR Description: Small heat shock protein, chloroplast precursor
  misc_feature (1)..(154): Homolog of NCBI NO: 232278 NR Description: Small heat shock protein, chloroplast precursor
  misc_feature (1)..(153): Homolog of NCBI NO: 7441307 NR Description: heat shock protein 26a, chloroplast - common
  misc_feature (1)..(88): Homolog of NCBI NO: 22530884 NR Description: small heat shock protein [Lycopersicon esculentum]
  misc_feature (1)..(88): Homolog of NCBI NO: 22530880 NR Description: small heat shock protein [Lycopersicon
  misc_feature (32)..(154): Homolog of NCBI NO: 22530884 NR Description: small heat shock protein [Lycopersicon esculentum]
  misc_feature (4)..(154): Homolog of NCBI NO: 22530880 NR Description: small heat shock protein [Lycopersicon
MMETMERMMEDPFAFSTLEWPSSPLPSEGVGGYRRRGRAPWEIKECESEYKMRFDMPGMNKEDVKVWVEEKMLVVKAEKAQKKKQENEIVELQQEKQQEEEEWSAKSYGRYSSRIALPDNVQFENIKAEVKDGMLYITIPKATSYSNILDIQVQ

SEQ ID NO: 56957 - protein, 153 aa, Glycine max
  peptide (1)..(153): Ceres Seq. ID no. 14314749
  misc_feature (1)..(153): Homolog of NCBI NO: 4996284 NR Description: heat shock protein 26 [Oryza sativa]
  misc_feature (24)..(153): Homolog of NCBI NO: 123558 NR Description: Small heat shock protein, chloroplast precursor
  misc_feature (1)..(152): Homolog of NCBI NO: 7441305 NR Description: heat shock protein 20, chromoplast-associated -
  misc_feature (1)..(152): Homolog of NCBI NO: 2495334 NR Description: Small heat shock protein, chloroplast precursor
  misc_feature (1)..(153): Homolog of NCBI NO: 232278 NR Description: Small heat shock protein, chloroplast precursor
  misc_feature (1)..(152): Homolog of NCBI NO: 7441307 NR Description: heat shock protein 26a, chloroplast - common
  misc_feature (1)..(87): Homolog of NCBI NO: 22530884 NR Description: small heat shock protein [Lycopersicon esculentum]
  misc_feature (1)..(87): Homolog of NCBI NO: 22530880 NR Description: small heat shock protein [Lycopersicon
  misc_feature (31)..(153): Homolog of NCBI NO: 22530884 NR Description: small heat shock protein [Lycopersicon esculentum]
  misc_feature (3)..(153): Homolog of NCBI NO: 22530880 NR Description: small heat shock protein [Lycopersicon
METMERMMEDPFAFSTLEWPSSPLPSEGVGGYRRRGRAPWEIKECESEYKMRFDMPGMNKEDVKVWVEEKMLVVKAEKAQKKKQENEIVELQQEKQQEEEEWSAKSYGRYSSRIALPDNVQFENIKAEVKDGMLYITIPKATSYSNILDIQVQ

SEQ ID NO: 56958 - protein, 150 aa, Glycine max
  peptide (1)..(150): Ceres Seq. ID no. 14314750
  misc_feature (1)..(150): Homolog of NCBI NO: 4996284 NR Description: heat shock protein 26 [Oryza sativa]
  misc_feature (21)..(150): Homolog of NCBI NO: 123558 NR Description: Small heat shock protein, chloroplast precursor
  misc_feature (1)..(149): Homolog of NCBI NO: 7441305 NR Description: heat shock protein 20, chromoplast-associated -
  misc_feature (1)..(149): Homolog of NCBI NO: 2495334 NR Description: Small heat shock protein, chloroplast precursor
  misc_feature (1)..(150): Homolog of NCBI NO: 232278 NR Description: Small heat shock protein, chloroplast precursor
  misc_feature (1)..(149): Homolog of NCBI NO: 7441307 NR Description: heat shock protein 26a, chloroplast - common
  misc_feature (1)..(84): Homolog of NCBI NO: 22530884 NR Description: small heat shock protein [Lycopersicon esculentum]
  misc_feature (1)..(84): Homolog of NCBI NO: 22530880 NR Description: small heat shock protein [Lycopersicon
  misc_feature (28)..(150): Homolog of NCBI NO: 22530884 NR Description: small heat shock protein [Lycopersicon esculentum]
  misc_feature (1)..(150): Homolog of NCBI NO: 22530880 NR Description: small heat shock protein [Lycopersicon
MERMMEDPFAFSTLEWPSSPLPSEGVGGYRRRGRAPWEIKECESEYKMRFDMPGMNKEDVKVWVEEKMLVVKAEKAQKKKQENEIVELQQEKQQEEEEWSAKSYGRYSSRIALPDNVQFENIKAEVKDGMLYITIPKATSYSNILDIQVQ

SEQ ID NO: 56959 - DNA, 1310 bp, Glycine max
  misc_feature (1)..(1310): Ceres Seq. ID no. 14315042
accacccccctcattgcagcagtttttgagtttccttacattcttaaagaaaccactcgttgttctttaggatatttctcttttcattttcctcttttcttcaaatcccaaaggatatttgtctctaatatccaaccttcaagatcatggatgttgcgcatttcattttcgggatatttgggaatgcttctggtttgttcctcttcttggccccaatagtgacattctggaggatcgtttcgaacaaatccacagagaagttctcgggggttccttaccctatgacacttctcaattgtctcctttctgcttggtatggtttgccatttgtgtccccaaacaacttacttgtgacaattatcaatggcacaggagcaggaattgaaatcatatacgtctttatattcatctacttcgcaccaaagaaagagaagaccaagattattggccttttctccttcgtggtggcagtgttctctgttgttgttctggtgtcactgtttgctctgcagggcaatgcccgaaagctcttctgtggcttcgctgctgccatattttccatcgtcatgtatggttcacccctctcaattatgaggctagtgataaaaaccaagagcgtggagttcatgcccttcttcctctcactctttgtgttcctctgtggcacatcttggttcatctacgggctactaggccgtgacccatttgtggctgtacctaatggcgttggttctgcgttggggacagcacaactaatattgtattttatctaccgtgacaacaaaagtgatccaaagaagattccaagaacagaagaagaagctatggaaatgggcaccgctaataaaaatcccatatccaactcgaatggaatacaagagggacgcgtctagggacgcgtctagggacgcgtgttagcattaaaaagaacaagccgttatctttgtctctgtctctttctaagcattaagagcacatctttaatttggactatgcttacatctttgttgttgttttttttttcttttttctttttaaaaaatctgttgttgttgctatcatctttgtgactctgtttcctccacgatttgtagtttttgttttttttttcttttagttatgatagttgtactataagtttagccatattgaaacgagtttgtgttgtgtgaattttcttttcttttcttccttttcagtccatttgtcgagacacatccgagcgatatcttgtgtctggataaaatttaaaagagtaatgaatatgtgaatctttctatctttaatttacaatattcatatttttggtt

SEQ ID NO: 56960 - protein, 248 aa, Glycine max
  peptide (1)..(248): Ceres Seq. ID no. 14315043
  misc_feature (128)..(213): Pfam Name: MtN3/saliva family Pfam Description: MtN3/saliva family
  misc_feature (1)..(233): Homolog of NCBI NO: 18413388 NR Description: nodulin MtN3 family protein [Arabidopsis
  misc_feature (1)..(227): Homolog of NCBI NO: 27754697 NR Description: putative cytochrome c oxidoreductase [Arabidopsis
  misc_feature (2)..(227): Homolog of NCBI NO: 34912462 NR Description: MtN3-like protein [Oryza sativa (japonica
  misc_feature (7)..(212): Homolog of NCBI NO: 18400517 NR Description: nodulin MtN3 family protein [Arabidopsis
  misc_feature (2)..(236): Homolog of NCBI NO: 34912454 NR Description: P0681B11.31 [Oryza sativa (japonica
  misc_feature (2)..(215): Homolog of NCBI NO: 15238678 NR Description: nodulin MtN3 family protein [Arabidopsis
  misc_feature (2)..(215): Homolog of NCBI NO: 34146818 NR Description: At5g53190 [Arabidopsis thaliana]
  misc_feature (46)..(244): Homolog of NCBI NO: 25518644 NR Description: hypothetical protein F24J8.9 - Arabidopsis
  misc_feature (3)..(234): Homolog of NCBI NO: 34907420 NR Description: P0018C10.36 [Oryza sativa (japonica
  misc_feature (1)..(244): Homolog of NCBI NO: 18394992 NR Description: nodulin MtN3 family protein [Arabidopsis
MDVAHFIFGIFGNASGLFLFLAPIVTFWRIVSNKSTEKFSGVPYPMTLLNCLLSAWYGLPFVSPNNLLVTIINGTGAGIEIIYVFIFIYFAPKKEKTKIIGLFSFVVAVFSVVVLVSLFALQGNARKLFCGFAAAIFSIVMYGSPLSIMRLVIKTKSVEFMPFFLSLFVFLCGTSWFIYGLLGRDPFVAVPNGVGSALGTAQLILYFIYRDNKSDPKKIPRTEEEAMEMGTANKNPISNSNGIQEGRV

SEQ ID NO: 56961 - protein, 203 aa, Glycine max
  peptide (1)..(203): Ceres Seq. ID no. 14315044
  misc_feature (83)..(168): Pfam Name: MtN3/saliva family Pfam Description: MtN3/saliva family
  misc_feature (1)..(188): Homolog of NCBI NO: 18413388 NR Description: nodulin MtN3 family protein [Arabidopsis
  misc_feature (1)..(182): Homolog of NCBI NO: 27754697 NR Description: putative cytochrome c oxidoreductase [Arabidopsis
  misc_feature (1)..(182): Homolog of NCBI NO: 34912462 NR Description: MtN3-like protein [Oryza sativa (japonica
  misc_feature (1)..(167): Homolog of NCBI NO: 18400517 NR Description: nodulin MtN3 family protein [Arabidopsis
  misc_feature (1)..(191): Homolog of NCBI NO: 34912454 NR Description: P0681B11.31 [Oryza sativa (japonica
  misc_feature (1)..(170): Homolog of NCBI NO: 15238678 NR Description: nodulin MtN3 family protein [Arabidopsis
  misc_feature (1)..(170): Homolog of NCBI NO: 34146818 NR Description: At5g53190 [Arabidopsis thaliana]
  misc_feature (1)..(199): Homolog of NCBI NO: 25518644 NR Description: hypothetical protein F24J8.9 - Arabidopsis
  misc_feature (1)..(189): Homolog of NCBI NO: 34907420 NR Description: P0018C10.36 [Oryza sativa (japonica
  misc_feature (1)..(199): Homolog of NCBI NO: 18394992 NR Description: nodulin MtN3 family protein [Arabidopsis
MTLLNCLLSAWYGLPFVSPNNLLVTIINGTGAGIEIIYVFIFIYFAPKKEKTKIIGLFSFVVAVFSVVVLVSLFALQGNARKLFCGFAAAIFSIVMYGSPLSIMRLVIKTKSVEFMPFFLSLFVFLCGTSWFIYGLLGRDPFVAVPNGVGSALGTAQLILYFIYRDNKSDPKKIPRTEEEAMEMGTANKNPISNSNGIQEGRV

SEQ ID NO: 56962 - DNA, 1577 bp, Glycine max
  misc_feature (1)..(1577): Ceres Seq. ID no. 15169153
gatctatgttttcccaagtgacagaaaagaaggtttattcaatcttttggaggcctgagtgtcgtccccaatccatagcttggaattccagaaaggcttcagcttcagcttgctgctcccttctcaacttcaacaatttcgatagcacttaatgtcctgttattgtagggacatcagtattgctaatcatgatatggtcaaggctaagtaggagaactcatctcttgccataccttagggctttgcaaacagactcaattgaatccaggtgcctatctatcattcctaaaggatcaagttacaagttcattaatcctaataccagcttccaacacaatttctcttgtaatatacggctatcaaagtttaagcaagaattgagtacaaaaccattccatctgtgttaccgctcttcagctttggcttcacagtatgttggaaagtcatgttccatgcctggtttccgacacttctcttctcatgcatccaaagaacagaaatcacgaaagatgcttttatacttgacgggcttagtttttgctatggttgggtgcacatatgctgcagttcccctttacaggagattttgccaagcaactggctatgggggaactgttacccggcgtgagactgttgaagaaaagattgctcgacatgatagcaataatacagtcaccacaagggaaatcgtggtgcagttcaatgctgatattgctgatgggatgcaatggaagtttgttcccacacagagagaggttagggtcaagcctggtgaaagtgcccttgcattttatactgccgaaaacaaaagttctactccaataacaggtgtttctacgtataatgtcactcctatgaaggctgcagtgtacttcaataaaattcaatgcttctgctttgaggagcagcgacttcttcctggagagcagattgacatgcctgtattcttttatattgacccggaatttgagacggatcctaaaatgaatggtatcaataacattatattatcatataccttcttcaaggtttctgaggaataagaccaacttgaatgttcacatgagattcaaataacaagctccctccatttcaaaggacaaagatgcatagcacattgatgaagttaaagttttggttacctatggtggctgacataaaagacaaattcattttcttatttgtttcacacgtataaagaaggctgcctcttctgtatgcttgccaagttcttgaatattttcagcttcagcaaaactactagaaaacccatgtgatcaacttttgaaggttcaaggtaccatgccatgacatttggaattatgctgattttctggtgctcctaagttaatgcaagcagggatttggagtacctcttcaaattagccatttagatgaatgaataattttgcttttagaatttattgatagtaaaacttatctaagaactgtaaaaggttgagatatattcacaaaatggtaagtgacaatgacgtctacaatcaggggaaactagcatggtatgaatattggtgatagtttaacggggcatttatctttatacttttacaaaaccc

SEQ ID NO: 56963 - protein, 284 aa, Glycine max
  peptide (1)..(284): Ceres Seq. ID no. 15169154
  misc_feature (126)..(281): Pfam Name: Cytochrome c oxidase assembly protein  CtaG / Cox11 Pfam Description: Cytochrome c oxidase assembly protein CtaG /
  misc_feature (5)..(280): Homolog of NCBI NO: 13810231 NR Description: SPAPB8E5.01 [Schizosaccharomyces pombe]
  misc_feature (97)..(283): Homolog of NCBI NO: 4758034 NR Description: COX11 homolog
  misc_feature (5)..(280): Homolog of NCBI NO: 19114191 NR Description: putative cytochrome c oxidase assembly protein
  misc_feature (97)..(280): Homolog of NCBI NO: 39587698 NR Description: Hypothetical protein CBG01804 [Caenorhabditis
  misc_feature (104)..(283): Homolog of NCBI NO: 11466506 NR Description: component involved in Haem biosynthesis
  misc_feature (73)..(283): Homolog of NCBI NO: 24581944 NR Description: CG31648-PA [Drosophila melanogaster]
  misc_feature (83)..(280): Homolog of NCBI NO: 31205111 NR Description: ENSANGP00000022656 [Anopheles gambiae]
  misc_feature (78)..(283): Homolog of NCBI NO: 28301938 NR Description: putative cytochrome c oxidase assembly protein
  misc_feature (93)..(284): Homolog of NCBI NO: 25310029 NR Description: hypothetical protein T6A9.10 - Arabidopsis
  misc_feature (85)..(284): Homolog of NCBI NO: 15217755 NR Description: expressed protein [Arabidopsis thaliana]
MIWSRLSRRTHLLPYLRALQTDSIESRCLSIIPKGSSYKFINPNTSFQHNFSCNIRLSKFKQELSTKPFHLCYRSSALASQYVGKSCSMPGFRHFSSHASKEQKSRKMLLYLTGLVFAMVGCTYAAVPLYRRFCQATGYGGTVTRRETVEEKIARHDSNNTVTTREIVVQFNADIADGMQWKFVPTQREVRVKPGESALAFYTAENKSSTPITGVSTYNVTPMKAAVYFNKIQCFCFEEQRLLPGEQIDMPVFFYIDPEFETDPKMNGINNIILSYTFFKVSEE

SEQ ID NO: 56964 - protein, 196 aa, Glycine max
  peptide (1)..(196): Ceres Seq. ID no. 15169155
  misc_feature (38)..(193): Pfam Name: Cytochrome c oxidase assembly protein  CtaG / Cox11 Pfam Description: Cytochrome c oxidase assembly protein CtaG /
  misc_feature (1)..(192): Homolog of NCBI NO: 13810231 NR Description: SPAPB8E5.01 [Schizosaccharomyces pombe]
  misc_feature (9)..(195): Homolog of NCBI NO: 4758034 NR Description: COX11 homolog
  misc_feature (1)..(192): Homolog of NCBI NO: 19114191 NR Description: putative cytochrome c oxidase assembly protein
  misc_feature (9)..(192): Homolog of NCBI NO: 39587698 NR Description: Hypothetical protein CBG01804 [Caenorhabditis
  misc_feature (16)..(195): Homolog of NCBI NO: 11466506 NR Description: component involved in Haem biosynthesis
  misc_feature (1)..(195): Homolog of NCBI NO: 24581944 NR Description: CG31648-PA [Drosophila melanogaster]
  misc_feature (1)..(192): Homolog of NCBI NO: 31205111 NR Description: ENSANGP00000022656 [Anopheles gambiae]
  misc_feature (1)..(195): Homolog of NCBI NO: 28301938 NR Description: putative cytochrome c oxidase assembly protein
  misc_feature (5)..(196): Homolog of NCBI NO: 25310029 NR Description: hypothetical protein T6A9.10 - Arabidopsis
  misc_feature (1)..(196): Homolog of NCBI NO: 15217755 NR Description: expressed protein [Arabidopsis thaliana]
MPGFRHFSSHASKEQKSRKMLLYLTGLVFAMVGCTYAAVPLYRRFCQATGYGGTVTRRETVEEKIARHDSNNTVTTREIVVQFNADIADGMQWKFVPTQREVRVKPGESALAFYTAENKSSTPITGVSTYNVTPMKAAVYFNKIQCFCFEEQRLLPGEQIDMPVFFYIDPEFETDPKMNGINNIILSYTFFKVSEE

SEQ ID NO: 56965 - protein, 177 aa, Glycine max
  peptide (1)..(177): Ceres Seq. ID no. 15169156
  misc_feature (19)..(174): Pfam Name: Cytochrome c oxidase assembly protein  CtaG / Cox11 Pfam Description: Cytochrome c oxidase assembly protein CtaG /
  misc_feature (1)..(173): Homolog of NCBI NO: 13810231 NR Description: SPAPB8E5.01 [Schizosaccharomyces pombe]
  misc_feature (1)..(176): Homolog of NCBI NO: 4758034 NR Description: COX11 homolog
  misc_feature (1)..(173): Homolog of NCBI NO: 19114191 NR Description: putative cytochrome c oxidase assembly protein
  misc_feature (1)..(173): Homolog of NCBI NO: 39587698 NR Description: Hypothetical protein CBG01804 [Caenorhabditis
  misc_feature (1)..(176): Homolog of NCBI NO: 11466506 NR Description: component involved in Haem biosynthesis
  misc_feature (1)..(176): Homolog of NCBI NO: 24581944 NR Description: CG31648-PA [Drosophila melanogaster]
  misc_feature (1)..(173): Homolog of NCBI NO: 31205111 NR Description: ENSANGP00000022656 [Anopheles gambiae]
  misc_feature (1)..(176): Homolog of NCBI NO: 28301938 NR Description: putative cytochrome c oxidase assembly protein
  misc_feature (1)..(177): Homolog of NCBI NO: 25310029 NR Description: hypothetical protein T6A9.10 - Arabidopsis
  misc_feature (1)..(177): Homolog of NCBI NO: 15217755 NR Description: expressed protein [Arabidopsis thaliana]
MLLYLTGLVFAMVGCTYAAVPLYRRFCQATGYGGTVTRRETVEEKIARHDSNNTVTTREIVVQFNADIADGMQWKFVPTQREVRVKPGESALAFYTAENKSSTPITGVSTYNVTPMKAAVYFNKIQCFCFEEQRLLPGEQIDMPVFFYIDPEFETDPKMNGINNIILSYTFFKVSEE

SEQ ID NO: 56966 - DNA, 2330 bp, Glycine max
  misc_feature (1)..(2330): Ceres Seq. ID no. 13593967
cagctacgtaggccccccccccgacacactatcctcttaacaaaacacaaaccagtgttcagtgttcagtgttcagtgttcagtgttacacttcacacagacaagaatccaagacaacaagggaaaccagacacatcattaacacacgacacaaacatcctcactactcttccatcttcattaagttaagtccttgtgggtcagggagcattcaagcagtgaggcccaactaattaacctgtttctctttactggatataaggcaattaaaccatgcaaacaccaaagacaagaaatggatcctctgatgtgcctcagaaggtgtctccacgtgctgtacgccaactcaagcctactactctggacattgattctgcatcttctttaagtcaggctactaaatcatcaaaagaaagaagccccaaagtcactgaccgcagatcacccagaagcccagttattgagaggaagcgccctagcaaaatatctgagttggaatctcaaatttctcaactccaaaatgatttgaagaaggtgagggaccagtttatcttgtccgaatcatgcaagaagcaagctcagcaagaagctgaggagtccaaggagcaactattggccctatctgcaaaacctgaagagtcacaaaaacaagttctggatctttgtgctactggagaagctcgtgttcttgagctccagaaaattgtagaagaacgtgatatggcatgccgatctgagcttgaggcctccaaaaagcagctctcagttgagtctgcttccctggcatctgcagcgaatgaaattcagttgctcaaggcgcaacttgaattggttgctaattgtgagagcgtgcaatctcaacatgcagaatcagcagacatggagctactaaaccttaagcagaacttgtcagaaactctttctcttgtggacgccttgaaaaaccaagtaagggattgcaaagagtctgaagctcaggcccaagcattggtcaatgaaactacggtgcaacttgaggccgcaaaaggaactgttgagttcctaagggctgatgttgcaagagctgttgatggctacaactccgttgctttagagttagaccagtctaaagctcgggtgaactcactagaggcacttgttagcaaaattgagaaagaccccatcaataataaatgcatcccttctgaaaatgttgcagatgaccataaatctgagcaccaacctgaaatattgaaagagggagaggatcctaatcagctggaagcagaagttgtttttttgaagtccgaggttgaacaattgagatctgctatagagactgctgagactaaataccaagaggaacagattcgaagcatggtgcagatcaggaatgcatatgagttagtagagcagataaaatctgaatcaggtaagagggaatgtgagctagaggctgagttgaaaaagaagaaagctgatattgaagagttgaaggctaacctaatggacaaggaaactgagttgcaaggcattgtggaggagaatgacaacttgaacctaaagcttgaagagagcatgtcatccaaaaatgagcacaaactcaaaagggaaattaaaagactatcagaatgtgtggcagaactgaaggcggatatgatggacaaggagacaacactgcaaagcatatctgaagagaacgaaatgctgaaatcggaaatcaacaacagtggcaaagcgagagaggaagttgctgctgaagtagagggagccaaggcggcagaacacgaggctctcatgaaacttgggattgtgatggaggaagcagataagagcaacaagaaggctgcaagagtggccgagcagctggaagcggcacaagctgcaaacttggaaatggaagctgaactgagaagactgaaggtgcagtctgatcagtggaggaaggctgcagaggcagctgctgctatgatttcaacagggaacaacaatgggaggctcacagagagaactgtgtctttggataacaacaactatatgtgctcaccctatgctgaagacatggatgatgatttccagaggaagaaaaatggcaacatgctgaagaagattggagtcttgtggaagaagcctcaaaaatagttgtgatgatgtctgatttatgaagtgttctgaaattgtagtccaataaatagtgtgttcatgtcatgtttattactatgtcttttgcaattgtctgacccctacattaccctctgcactgcactgtaaatcctgcccctatctgaaactgtttgtgaactgtacttgaaacattggcgtttaattattgaaygaactaagctyttaac

SEQ ID NO: 56967 - protein, 615 aa, Glycine max
  peptide (1)..(615): Ceres Seq. ID no. 15221271
  misc_feature (70)..(571): Pfam Name: Myosin tail Pfam Description: Myosin tail
  misc_feature (1)..(403): Homolog of NCBI NO: 17978993 NR Description: AT3g53350/F4P12_50 [Arabidopsis thaliana]
  misc_feature (1)..(403): Homolog of NCBI NO: 11357801 NR Description: hypothetical protein F4P12.50 - Arabidopsis
  misc_feature (1)..(403): Homolog of NCBI NO: 22331765 NR Description: expressed protein [Arabidopsis thaliana]
  misc_feature (62)..(439): Homolog of NCBI NO: 34908020 NR Description: P0460C04.20 [Oryza sativa (japonica
  misc_feature (49)..(615): Homolog of NCBI NO: 30697347 NR Description: expressed protein [Arabidopsis thaliana]
  misc_feature (42)..(615): Homolog of NCBI NO: 8885572 NR Description: myosin heavy chain-like [Arabidopsis thaliana]
  misc_feature (37)..(615): Homolog of NCBI NO: 15228082 NR Description: myosin heavy chain -related [Arabidopsis
  misc_feature (7)..(527): Homolog of NCBI NO: 30697347 NR Description: expressed protein [Arabidopsis thaliana]
  misc_feature (1)..(527): Homolog of NCBI NO: 8885572 NR Description: myosin heavy chain-like [Arabidopsis thaliana]
  misc_feature (1)..(615): Homolog of NCBI NO: 18076679 NR Description: P70 protein [Nicotiana tabacum]
MQTPKTRNGSSDVPQKVSPRAVRQLKPTTLDIDSASSLSQATKSSKERSPKVTDRRSPRSPVIERKRPSKISELESQISQLQNDLKKVRDQFILSESCKKQAQQEAEESKEQLLALSAKPEESQKQVLDLCATGEARVLELQKIVEERDMACRSELEASKKQLSVESASLASAANEIQLLKAQLELVANCESVQSQHAESADMELLNLKQNLSETLSLVDALKNQVRDCKESEAQAQALVNETTVQLEAAKGTVEFLRADVARAVDGYNSVALELDQSKARVNSLEALVSKIEKDPINNKCIPSENVADDHKSEHQPEILKEGEDPNQLEAEVVFLKSEVEQLRSAIETAETKYQEEQIRSMVQIRNAYELVEQIKSESGKRECELEAELKKKKADIEELKANLMDKETELQGIVEENDNLNLKLEESMSSKNEHKLKREIKRLSECVAELKADMMDKETTLQSISEENEMLKSEINNSGKAREEVAAEVEGAKAAEHEALMKLGIVMEEADKSNKKAARVAEQLEAAQAANLEMEAELRRLKVQSDQWRKAAEAAAAMISTGNNNGRLTERTVSLDNNNYMCSPYAEDMDDDFQRKKNGNMLKKIGVLWKKPQK

SEQ ID NO: 56968 - protein, 466 aa, Glycine max
  peptide (1)..(466): Ceres Seq. ID no. 15221272
  misc_feature (1)..(422): Pfam Name: Myosin tail Pfam Description: Myosin tail
  misc_feature (1)..(254): Homolog of NCBI NO: 17978993 NR Description: AT3g53350/F4P12_50 [Arabidopsis thaliana]
  misc_feature (1)..(254): Homolog of NCBI NO: 11357801 NR Description: hypothetical protein F4P12.50 - Arabidopsis
  misc_feature (1)..(254): Homolog of NCBI NO: 22331765 NR Description: expressed protein [Arabidopsis thaliana]
  misc_feature (1)..(290): Homolog of NCBI NO: 34908020 NR Description: P0460C04.20 [Oryza sativa (japonica
  misc_feature (1)..(466): Homolog of NCBI NO: 30697347 NR Description: expressed protein [Arabidopsis thaliana]
  misc_feature (1)..(466): Homolog of NCBI NO: 8885572 NR Description: myosin heavy chain-like [Arabidopsis thaliana]
  misc_feature (1)..(466): Homolog of NCBI NO: 15228082 NR Description: myosin heavy chain -related [Arabidopsis
  misc_feature (1)..(378): Homolog of NCBI NO: 30697347 NR Description: expressed protein [Arabidopsis thaliana]
  misc_feature (1)..(378): Homolog of NCBI NO: 8885572 NR Description: myosin heavy chain-like [Arabidopsis thaliana]
  misc_feature (1)..(466): Homolog of NCBI NO: 18076679 NR Description: P70 protein [Nicotiana tabacum]
MACRSELEASKKQLSVESASLASAANEIQLLKAQLELVANCESVQSQHAESADMELLNLKQNLSETLSLVDALKNQVRDCKESEAQAQALVNETTVQLEAAKGTVEFLRADVARAVDGYNSVALELDQSKARVNSLEALVSKIEKDPINNKCIPSENVADDHKSEHQPEILKEGEDPNQLEAEVVFLKSEVEQLRSAIETAETKYQEEQIRSMVQIRNAYELVEQIKSESGKRECELEAELKKKKADIEELKANLMDKETELQGIVEENDNLNLKLEESMSSKNEHKLKREIKRLSECVAELKADMMDKETTLQSISEENEMLKSEINNSGKAREEVAAEVEGAKAAEHEALMKLGIVMEEADKSNKKAARVAEQLEAAQAANLEMEAELRRLKVQSDQWRKAAEAAAAMISTGNNNGRLTERTVSLDNNNYMCSPYAEDMDDDFQRKKNGNMLKKIGVLWKKPQK

SEQ ID NO: 56969 - protein, 413 aa, Glycine max
  peptide (1)..(413): Ceres Seq. ID no. 15221273
  misc_feature (1)..(369): Pfam Name: Myosin tail Pfam Description: Myosin tail
  misc_feature (1)..(201): Homolog of NCBI NO: 17978993 NR Description: AT3g53350/F4P12_50 [Arabidopsis thaliana]
  misc_feature (1)..(201): Homolog of NCBI NO: 11357801 NR Description: hypothetical protein F4P12.50 - Arabidopsis
  misc_feature (1)..(201): Homolog of NCBI NO: 22331765 NR Description: expressed protein [Arabidopsis thaliana]
  misc_feature (1)..(237): Homolog of NCBI NO: 34908020 NR Description: P0460C04.20 [Oryza sativa (japonica
  misc_feature (1)..(413): Homolog of NCBI NO: 30697347 NR Description: expressed protein [Arabidopsis thaliana]
  misc_feature (1)..(413): Homolog of NCBI NO: 8885572 NR Description: myosin heavy chain-like [Arabidopsis thaliana]
  misc_feature (1)..(413): Homolog of NCBI NO: 15228082 NR Description: myosin heavy chain -related [Arabidopsis
  misc_feature (1)..(325): Homolog of NCBI NO: 30697347 NR Description: expressed protein [Arabidopsis thaliana]
  misc_feature (1)..(325): Homolog of NCBI NO: 8885572 NR Description: myosin heavy chain-like [Arabidopsis thaliana]
  misc_feature (1)..(413): Homolog of NCBI NO: 18076679 NR Description: P70 protein [Nicotiana tabacum]
MELLNLKQNLSETLSLVDALKNQVRDCKESEAQAQALVNETTVQLEAAKGTVEFLRADVARAVDGYNSVALELDQSKARVNSLEALVSKIEKDPINNKCIPSENVADDHKSEHQPEILKEGEDPNQLEAEVVFLKSEVEQLRSAIETAETKYQEEQIRSMVQIRNAYELVEQIKSESGKRECELEAELKKKKADIEELKANLMDKETELQGIVEENDNLNLKLEESMSSKNEHKLKREIKRLSECVAELKADMMDKETTLQSISEENEMLKSEINNSGKAREEVAAEVEGAKAAEHEALMKLGIVMEEADKSNKKAARVAEQLEAAQAANLEMEAELRRLKVQSDQWRKAAEAAAAMISTGNNNGRLTERTVSLDNNNYMCSPYAEDMDDDFQRKKNGNMLKKIGVLWKKPQK

SEQ ID NO: 56970 - DNA, 1766 bp, Glycine max
  misc_feature (1)..(1766): Ceres Seq. ID no. 15175785
ggtatcttacttactgctgtctgctaaacttgattttttgtttactctttcttgcttccttcatatttatattatattattattttgcccacatttcttcttcaacgactacactctctctcaaccttcaaagcttcaaactcaaaagaaatggcatccgatcccgagcaacccgctcattcctctttcgcaaaggaagcaaggtcaggtggtgagattgggagtgcaatagagcctctgcttaatggggttcatgactctgaaagctattccgtctctgctgcaattctcccatttctcttcccagctttgggtggcctactatttggctatgatattggtgccacatcttctgcaactatttccattcagtcaccaacactaagtggagtatcttggtacaagttgtcttctgttgaaattggtcttcttactagtggatcattgtatggtgccttaattggctccttgttggccttcaatgttgctgacttcttaggtagaagaaaggagctgattggagctgcagtagtttatcttgttggagctcttgtaacagcattagctcctaattttcttgtattggtgcttgggagacttgtatttggcataggaattggactggcaatgcatgctgctccaatgtacattgcagagacagctccaacaccaatacgtggacaactaatatctctaaaagagttctttatagtacttgggatggttgcaggatatggaattggtagcttgttcgtcgaaaccgtatctgggtggcggtatatgtatggagttagtagtcctgtggcaataatcatgggagttggaatgtggtggctcccagcttctcctagatggttacttttacgtgctatacagggaaaaggggatgttcagaattcaaaagacatagcaattcgtagtttgtgtcagcttcgaggtcaagctttttatgattcagttcctcggcaagtagatgagattctggcagaactttcttatctaggtgaagaaaaagaagctacctttggagaactattccaaggaaaatgcttgaaagccctttggattggttcaggattggtcttgtttcagcagatcacagggcaaccaagtgtgctctactatgctggatcaatctttcagagtgcaggattctccggagcatctgatgcaacccgagtctctattctccttgggtttttcaagttgattatgactggagttgctgttgtcgttgttgataaacttggaaggaggcctttactacttgggggagtttcagggatagtgatctctttattctttctcggttcatattacattttcttggataattcaccagttgttgctgtaattggtctgctgttgtacgttggcagttatcagatttcctttggtccaattggttggttaatgatagcagagattttccccttgcgcctaagaggtcgaggactaagtatagctgtactcgtcaattttggtgcaaatgccctggtgacatttgctttttccccactgaaggcattattgggagctggaattttgttttacacattttgtgtaatagccgtggcatctcttgtattcatatactttgttataccagaaaccaaggggcttacactagaggagatcgaggccaaatgcctctagtcagtcaccttgttttacctctataaatatctgtttttagtactctgttgcaacttgtcttgaatattgtaatgacacatatattatattaataaaaatatgcaatgatg

SEQ ID NO: 56971 - protein, 501 aa, Glycine max
  peptide (1)..(501): Ceres Seq. ID no. 15175786
  misc_feature (48)..(500): Pfam Name: Sugar (and other) transporter Pfam Description: Sugar (and other) transporter
  misc_feature (194)..(501): Homolog of NCBI NO: 15237848 NR Description: sugar transporter family [Arabidopsis thaliana]
  misc_feature (347)..(379): Homolog of NCBI NO: 15237892 NR Description: sugar transporter family [Arabidopsis thaliana]
  misc_feature (422)..(501): Homolog of NCBI NO: 15237892 NR Description: sugar transporter family [Arabidopsis thaliana]
  misc_feature (1)..(316): Homolog of NCBI NO: 15237892 NR Description: sugar transporter family [Arabidopsis thaliana]
  misc_feature (347)..(379): Homolog of NCBI NO: 30686148 NR Description: sugar transporter family [Arabidopsis thaliana]
  misc_feature (422)..(501): Homolog of NCBI NO: 30686148 NR Description: sugar transporter family [Arabidopsis thaliana]
  misc_feature (1)..(316): Homolog of NCBI NO: 30686148 NR Description: sugar transporter family [Arabidopsis thaliana]
  misc_feature (13)..(501): Homolog of NCBI NO: 9759246 NR Description: sugar transporter-like protein [Arabidopsis
  misc_feature (1)..(498): Homolog of NCBI NO: 37537174 NR Description: putative sugar transporter protein
  misc_feature (1)..(501): Homolog of NCBI NO: 30678759 NR Description: sugar transporter family [Arabidopsis thaliana]
MASDPEQPAHSSFAKEARSGGEIGSAIEPLLNGVHDSESYSVSAAILPFLFPALGGLLFGYDIGATSSATISIQSPTLSGVSWYKLSSVEIGLLTSGSLYGALIGSLLAFNVADFLGRRKELIGAAVVYLVGALVTALAPNFLVLVLGRLVFGIGIGLAMHAAPMYIAETAPTPIRGQLISLKEFFIVLGMVAGYGIGSLFVETVSGWRYMYGVSSPVAIIMGVGMWWLPASPRWLLLRAIQGKGDVQNSKDIAIRSLCQLRGQAFYDSVPRQVDEILAELSYLGEEKEATFGELFQGKCLKALWIGSGLVLFQQITGQPSVLYYAGSIFQSAGFSGASDATRVSILLGFFKLIMTGVAVVVVDKLGRRPLLLGGVSGIVISLFFLGSYYIFLDNSPVVAVIGLLLYVGSYQISFGPIGWLMIAEIFPLRLRGRGLSIAVLVNFGANALVTFAFSPLKALLGAGILFYTFCVIAVASLVFIYFVIPETKGLTLEEIEAKCL

SEQ ID NO: 56972 - protein, 342 aa, Glycine max
  peptide (1)..(342): Ceres Seq. ID no. 15175787
  misc_feature (1)..(341): Pfam Name: Sugar (and other) transporter Pfam Description: Sugar (and other) transporter
  misc_feature (35)..(342): Homolog of NCBI NO: 15237848 NR Description: sugar transporter family [Arabidopsis thaliana]
  misc_feature (188)..(220): Homolog of NCBI NO: 15237892 NR Description: sugar transporter family [Arabidopsis thaliana]
  misc_feature (263)..(342): Homolog of NCBI NO: 15237892 NR Description: sugar transporter family [Arabidopsis thaliana]
  misc_feature (1)..(157): Homolog of NCBI NO: 15237892 NR Description: sugar transporter family [Arabidopsis thaliana]
  misc_feature (188)..(220): Homolog of NCBI NO: 30686148 NR Description: sugar transporter family [Arabidopsis thaliana]
  misc_feature (263)..(342): Homolog of NCBI NO: 30686148 NR Description: sugar transporter family [Arabidopsis thaliana]
  misc_feature (1)..(157): Homolog of NCBI NO: 30686148 NR Description: sugar transporter family [Arabidopsis thaliana]
  misc_feature (1)..(342): Homolog of NCBI NO: 9759246 NR Description: sugar transporter-like protein [Arabidopsis
  misc_feature (1)..(339): Homolog of NCBI NO: 37537174 NR Description: putative sugar transporter protein
  misc_feature (1)..(342): Homolog of NCBI NO: 30678759 NR Description: sugar transporter family [Arabidopsis thaliana]
MHAAPMYIAETAPTPIRGQLISLKEFFIVLGMVAGYGIGSLFVETVSGWRYMYGVSSPVAIIMGVGMWWLPASPRWLLLRAIQGKGDVQNSKDIAIRSLCQLRGQAFYDSVPRQVDEILAELSYLGEEKEATFGELFQGKCLKALWIGSGLVLFQQITGQPSVLYYAGSIFQSAGFSGASDATRVSILLGFFKLIMTGVAVVVVDKLGRRPLLLGGVSGIVISLFFLGSYYIFLDNSPVVAVIGLLLYVGSYQISFGPIGWLMIAEIFPLRLRGRGLSIAVLVNFGANALVTFAFSPLKALLGAGILFYTFCVIAVASLVFIYFVIPETKGLTLEEIEAKCL

SEQ ID NO: 56973 - protein, 337 aa, Glycine max
  peptide (1)..(337): Ceres Seq. ID no. 15175788
  misc_feature (1)..(336): Pfam Name: Sugar (and other) transporter Pfam Description: Sugar (and other) transporter
  misc_feature (30)..(337): Homolog of NCBI NO: 15237848 NR Description: sugar transporter family [Arabidopsis thaliana]
  misc_feature (183)..(215): Homolog of NCBI NO: 15237892 NR Description: sugar transporter family [Arabidopsis thaliana]
  misc_feature (258)..(337): Homolog of NCBI NO: 15237892 NR Description: sugar transporter family [Arabidopsis thaliana]
  misc_feature (1)..(152): Homolog of NCBI NO: 15237892 NR Description: sugar transporter family [Arabidopsis thaliana]
  misc_feature (183)..(215): Homolog of NCBI NO: 30686148 NR Description: sugar transporter family [Arabidopsis thaliana]
  misc_feature (258)..(337): Homolog of NCBI NO: 30686148 NR Description: sugar transporter family [Arabidopsis thaliana]
  misc_feature (1)..(152): Homolog of NCBI NO: 30686148 NR Description: sugar transporter family [Arabidopsis thaliana]
  misc_feature (1)..(337): Homolog of NCBI NO: 9759246 NR Description: sugar transporter-like protein [Arabidopsis
  misc_feature (1)..(334): Homolog of NCBI NO: 37537174 NR Description: putative sugar transporter protein
  misc_feature (1)..(337): Homolog of NCBI NO: 30678759 NR Description: sugar transporter family [Arabidopsis thaliana]
MYIAETAPTPIRGQLISLKEFFIVLGMVAGYGIGSLFVETVSGWRYMYGVSSPVAIIMGVGMWWLPASPRWLLLRAIQGKGDVQNSKDIAIRSLCQLRGQAFYDSVPRQVDEILAELSYLGEEKEATFGELFQGKCLKALWIGSGLVLFQQITGQPSVLYYAGSIFQSAGFSGASDATRVSILLGFFKLIMTGVAVVVVDKLGRRPLLLGGVSGIVISLFFLGSYYIFLDNSPVVAVIGLLLYVGSYQISFGPIGWLMIAEIFPLRLRGRGLSIAVLVNFGANALVTFAFSPLKALLGAGILFYTFCVIAVASLVFIYFVIPETKGLTLEEIEAKCL

SEQ ID NO: 56974 - DNA, 1110 bp, Glycine max
  misc_feature (1)..(1110): Ceres Seq. ID no. 15168436
cctatcaaatccaaacactgccttaagcctttgattcccaaatcctcccttcctctcccattgcacagtgatcgttgcgatccatgacgacaccaccgtcttcctcctcagcttcgcaatcgcagttcgcctattcaaacccctcctcctcctcctcctacttccccgttccctttcaccttcagcaacccgcaaccactcactacgctgcgccctacgtcgccgccccctccgtgcaaatccccgctcctccagtcgtcggccccgttgcgcccgcccctgtacccggcgtatactccgccgtgccgcaatatcaggcacagcagttatttgagagggatgcgcagataataacgccggaggctctcgagaatgtcaaggcagcgattgcaagcagcgacgtggagcacaaaaccgatgccaaaaagaaagcggttcctcgcaaagctgctggccacgcttgggaggatcctatccttgcagagtggccagaagatgattatcggctcttctgtggggatcttggtaacgaggtgaatgatgatgttctctcaaaagcattttcacgatttccttcctttaacatggcacgagttgtcagagacaagcggactggtaaaacaaaaggttatggatttgtgagctttgccaatccttctgaccttgctggtgctcttaaagaaatgaatggtaagtatgttggaaaccgtcctataaaactacgcaagagtaagtggagggagaggacagattatgaagcactggagaaacagaagaatcacattcaaaagaaaccgaaaatggcaaggaaaggtgtgctgcacaagtgacaggctggaatctgtgtaaatcaggttaactaagtagagaacactttacaaatgctatttcttttttccatctgaaaggtatttcccatgtaaccgaaaaaagcccccccaagacattcctttcccgtttgcaaaatactatagttgttattttaaagtgtatgatgtatgcccaataccaaaaaaccttatttatgtttacatttcaggaatttgtggcagtcgtttaatacagcatgaggaaggaactcagaaaatgtataaaatttgattgactggc

SEQ ID NO: 56975 - protein, 248 aa, Glycine max
  peptide (1)..(248): Ceres Seq. ID no. 15168437
  misc_feature (142)..(213): Pfam Name: RNA recognition motif. (a.k.a. RRM, RBD, or RNP domain) Pfam Description: RNA recognition motif. (a.k.a. RRM, RBD, or RNP
  misc_feature (1)..(237): Homolog of NCBI NO: 39582665 NR Description: Hypothetical protein CBG21313 [Caenorhabditis
  misc_feature (1)..(237): Homolog of NCBI NO: 17556216 NR Description: protein conserved like (3G242) [Caenorhabditis
  misc_feature (42)..(235): Homolog of NCBI NO: 21357051 NR Description: CG2931-PA [Drosophila melanogaster]
  misc_feature (42)..(231): Homolog of NCBI NO: 19526864 NR Description: RIKEN cDNA 3100004P22 [Mus musculus]
  misc_feature (42)..(231): Homolog of NCBI NO: 34855705 NR Description: similar to RIKEN cDNA 3100004P22 [Rattus
  misc_feature (42)..(231): Homolog of NCBI NO: 21594922 NR Description: hypothetical protein MGC10433 [Homo sapiens]
  misc_feature (42)..(231): Homolog of NCBI NO: 21359951 NR Description: hypothetical protein MGC10433 [Homo sapiens]
  misc_feature (42)..(231): Homolog of NCBI NO: 12804031 NR Description: Unknown (protein for MGC:10433) [Homo sapiens]
  misc_feature (42)..(231): Homolog of NCBI NO: 2098575 NR Description: F25451_2 [Homo sapiens]
  misc_feature (1)..(248): Homolog of NCBI NO: 15229308 NR Description: RNA recognition motif (RRM)-containing protein
MTTPPSSSSASQSQFAYSNPSSSSSYFPVPFHLQQPATTHYAAPYVAAPSVQIPAPPVVGPVAPAPVPGVYSAVPQYQAQQLFERDAQIITPEALENVKAAIASSDVEHKTDAKKKAVPRKAAGHAWEDPILAEWPEDDYRLFCGDLGNEVNDDVLSKAFSRFPSFNMARVVRDKRTGKTKGYGFVSFANPSDLAGALKEMNGKYVGNRPIKLRKSKWRERTDYEALEKQKNHIQKKPKMARKGVLHK

SEQ ID NO: 56976 - DNA, 1321 bp, Glycine max
  misc_feature (1)..(1321): Ceres Seq. ID no. 15168549
ttttttgtcgtgagatgtttgttgacagctgctaccattctcctattgttttatgaattttggaaggaaaaatagtaataagagagagagatgagcgttgtaataggggttgggttggctcacatgtcccagtctctttccaactctactagtctaagtttgtaactcttgttgattccaaagttgcacaccacactcaacttaccgttccttttcctctcccataaaaccagcaagcaactcactcccacactcaccccagtcaagagagagaatgtcgaaggaagtgagccaagaaggcctgcagaggaaggactacgtagaccctcctccagcccctcttttcgaccttgccgagatcaagctctggtccttctacagagccctcatcgccgagttcattgcctcactcctcttcctctacgtcaccgtcgccaccatcatcggccacaagaaacagaccggaccatgcgacggcgttggccttctcggcatcgcatggtccttcggtggcatgatcttcgtcctcgtctactgcaccgccggcatttctggtggacacatcaaccctgcggtgacttttggcctgttcctggcccgcaaggtgtctctcattcgcgccgtgttctacatggtagcacagtgtcttggtgccatctgcggtgttgggttggtgaaggccttcatgaagcactcctacaactccctcggcggcggtgctaactccgtcagcgcaggctacaacaaaggcagtgctctgggtgctgagattatcggcactttcgtccttgtctacaccgttttctcagctaccgaccccaagagaagcgcgcgtgactcccatgtccccgtgttggccccattgcccattgggtttgccgttttcatggttcacttggccaccattcccatcaccggtaccgggatcaacccagccaggagcttgggtgcagctgttatctacaacaatggcaaagtttgggacgagcattggatattctgggttgggccattggtgggagctttggcggcggcggcataccaccagtacatccttagagcaggggctattaaggccttgggttcattcaggagcaaccctaccaactagttcccaagacaatgtcatcatcaccaattcgcctcttcttttctatttatttcttttgtttgtatgagagatcatcatgcccttgtgtatggggataattcgtctttttttcttcttccttccttttatctccccgcctgtctcatttgtccgttcgcttacacttctaaccaaaattcccgtgaacacaacccacagggtttgctgtcg

SEQ ID NO: 56977 - protein, 278 aa, Glycine max
  peptide (1)..(278): Ceres Seq. ID no. 15168550
  misc_feature (28)..(257): Pfam Name: Major intrinsic protein Pfam Description: Major intrinsic protein
  misc_feature (1)..(278): Homolog of NCBI NO: 7441266 NR Description: plasma membrane major intrinsic protein 2 - beet
  misc_feature (1)..(278): Homolog of NCBI NO: 1168480 NR Description: Aquaporin PIP-type
  misc_feature (1)..(278): Homolog of NCBI NO: 7441276 NR Description: mipE protein - common ice plant
  misc_feature (1)..(278): Homolog of NCBI NO: 2306917 NR Description: plasma membrane intrinsic protein [Arabidopsis
  misc_feature (1)..(278): Homolog of NCBI NO: 1688296 NR Description: plasma membrane intrinsic protein PIP3
  misc_feature (1)..(278): Homolog of NCBI NO: 17940742 NR Description: aquaporin-like protein [Petunia x hybrida]
  misc_feature (1)..(278): Homolog of NCBI NO: 15236267 NR Description: aquaporin, putative [Arabidopsis thaliana]
  misc_feature (1)..(278): Homolog of NCBI NO: 11119335 NR Description: aquaporin [Brassica oleracea]
  misc_feature (1)..(278): Homolog of NCBI NO: 15227302 NR Description: putative plasma membrane intrinsic protein
  misc_feature (1)..(278): Homolog of NCBI NO: 8071628 NR Description: putative aquaporin PIP2-2 [Vitis berlandieri x
MSKEVSQEGLQRKDYVDPPPAPLFDLAEIKLWSFYRALIAEFIASLLFLYVTVATIIGHKKQTGPCDGVGLLGIAWSFGGMIFVLVYCTAGISGGHINPAVTFGLFLARKVSLIRAVFYMVAQCLGAICGVGLVKAFMKHSYNSLGGGANSVSAGYNKGSALGAEIIGTFVLVYTVFSATDPKRSARDSHVPVLAPLPIGFAVFMVHLATIPITGTGINPARSLGAAVIYNNGKVWDEHWIFWVGPLVGALAAAAYHQYILRAGAIKALGSFRSNPTN

SEQ ID NO: 56978 - protein, 198 aa, Glycine max
  peptide (1)..(198): Ceres Seq. ID no. 15168551
  misc_feature (1)..(177): Pfam Name: Major intrinsic protein Pfam Description: Major intrinsic protein
  misc_feature (1)..(198): Homolog of NCBI NO: 7441266 NR Description: plasma membrane major intrinsic protein 2 - beet
  misc_feature (1)..(198): Homolog of NCBI NO: 1168480 NR Description: Aquaporin PIP-type
  misc_feature (1)..(198): Homolog of NCBI NO: 7441276 NR Description: mipE protein - common ice plant
  misc_feature (1)..(198): Homolog of NCBI NO: 2306917 NR Description: plasma membrane intrinsic protein [Arabidopsis
  misc_feature (1)..(198): Homolog of NCBI NO: 1688296 NR Description: plasma membrane intrinsic protein PIP3
  misc_feature (1)..(198): Homolog of NCBI NO: 17940742 NR Description: aquaporin-like protein [Petunia x hybrida]
  misc_feature (1)..(198): Homolog of NCBI NO: 15236267 NR Description: aquaporin, putative [Arabidopsis thaliana]
  misc_feature (1)..(198): Homolog of NCBI NO: 11119335 NR Description: aquaporin [Brassica oleracea]
  misc_feature (1)..(198): Homolog of NCBI NO: 15227302 NR Description: putative plasma membrane intrinsic protein
  misc_feature (1)..(198): Homolog of NCBI NO: 8071628 NR Description: putative aquaporin PIP2-2 [Vitis berlandieri x
MIFVLVYCTAGISGGHINPAVTFGLFLARKVSLIRAVFYMVAQCLGAICGVGLVKAFMKHSYNSLGGGANSVSAGYNKGSALGAEIIGTFVLVYTVFSATDPKRSARDSHVPVLAPLPIGFAVFMVHLATIPITGTGINPARSLGAAVIYNNGKVWDEHWIFWVGPLVGALAAAAYHQYILRAGAIKALGSFRSNPTN

SEQ ID NO: 56979 - protein, 159 aa, Glycine max
  peptide (1)..(159): Ceres Seq. ID no. 15168552
  misc_feature (1)..(138): Pfam Name: Major intrinsic protein Pfam Description: Major intrinsic protein
  misc_feature (1)..(159): Homolog of NCBI NO: 7441266 NR Description: plasma membrane major intrinsic protein 2 - beet
  misc_feature (1)..(159): Homolog of NCBI NO: 1168480 NR Description: Aquaporin PIP-type
  misc_feature (1)..(159): Homolog of NCBI NO: 7441276 NR Description: mipE protein - common ice plant
  misc_feature (1)..(159): Homolog of NCBI NO: 2306917 NR Description: plasma membrane intrinsic protein [Arabidopsis
  misc_feature (1)..(159): Homolog of NCBI NO: 1688296 NR Description: plasma membrane intrinsic protein PIP3
  misc_feature (1)..(159): Homolog of NCBI NO: 17940742 NR Description: aquaporin-like protein [Petunia x hybrida]
  misc_feature (1)..(159): Homolog of NCBI NO: 15236267 NR Description: aquaporin, putative [Arabidopsis thaliana]
  misc_feature (1)..(159): Homolog of NCBI NO: 11119335 NR Description: aquaporin [Brassica oleracea]
  misc_feature (1)..(159): Homolog of NCBI NO: 15227302 NR Description: putative plasma membrane intrinsic protein
  misc_feature (1)..(159): Homolog of NCBI NO: 8071628 NR Description: putative aquaporin PIP2-2 [Vitis berlandieri x
MVAQCLGAICGVGLVKAFMKHSYNSLGGGANSVSAGYNKGSALGAEIIGTFVLVYTVFSATDPKRSARDSHVPVLAPLPIGFAVFMVHLATIPITGTGINPARSLGAAVIYNNGKVWDEHWIFWVGPLVGALAAAAYHQYILRAGAIKALGSFRSNPTN

SEQ ID NO: 56980 - DNA, 1764 bp, Glycine max
  misc_feature (1)..(1764): Ceres Seq. ID no. 15168405
atttttctttttctattctttgcttcagtggccttaccagtgtgttgctcactgagaaaccaccaattttcagcatgacaaagataagtcctgaagttgaaatcaggatgccaatggaggcatttccaccagtttcagctgatgtgagctttatttctaatagttttccgaaatacaaactggatgttgataatcaagttctggaagagccagttgaggataacctgggtccttctttgaaggatgttattgaacaagaagctttcaatttgtcagaccaacacaagcgtatctcagttcgtgaccttgccagtaaatttgacaagaacttggctgcagctgctaagttgtctaatgaggcaaagctgagagaggtggcatctttggagggacatgttcttttgaaaaagctaagagatgcattagaaaatttaagaggacgttttgcaggaataaacaaagaggatgtggagaaagctatctctatggtggaagctttagcagttaagttaactcaaaacgaaggtgaattgattcaagagaagtttgaagtgaagaagcttgtaaactttctcaaacaggcttctgaagatgctaaaaagttggttaatcaagagaagtcttttgcttgtgccgaaattgaaagtgctagagctgtggtgctgagaattggggaggcgcttgaagaacaagaaaaagcttcccaagcttctaaaccacaggatgtggatggactaattgaagaagttcaagaagctagaagaatcaaattgttgcatcagccaagcaaggtgatggccatggaatatgaactacgtgctcttagggatcaaattcgagagaaatctatattttcaattaagcttcagaaagagctaaccatgagcaagagggatgaggaaaataaatctcgtttatacatgttagatggttctgaagctttgggttcatatctgcgagtccagccttgctcagctgaagtgccacaggtttcgaaatgttcatttcagtggtatcgcttgtcttctgaaggcagctggagggaagttatttcaggtgccaacaaaacaatatatgctcctgacccctctgatgttgggagaatcttacaagtagatattgtctcaaatgggaaaaaacttaccctaacaactgatcccattcaaactgtttcaggacttggaagccatgtggagacacttctacgaaaatctaataccgattttaatgtagttatttctcaaatgaatggaaaagatcactcttcacattctactcattcatttaatgtggggagaatgaggataaagctatgcagaggttggattacaaaagcaagagagatttactccccatcaatgcagctatgtggagttagaagtgatatcgctaatgcagcgaaggcgttgttttggcaagcaagaaagggcctctcatttgtattaacctttgaatcagagagagacagaaatgcagccattatggttgccaggaaatatgctcttgattgcaatgtcgtgctcgctgggccagatgatctagtgtaggagcaaaatttaactgactgagtttttccatcaaacgtgagatttatcagattcttggtgtgagtatacatgtgtgcttgttttgttaaagatatgatttcatctttgtgattgggtttcactaattgagttgcattgttttaggcatgttttttatttgcctaatcatgttgtaccaaactcaactttttataattattagttcatttgttcaaag

SEQ ID NO: 56981 - protein, 514 aa, Glycine max
  peptide (1)..(514): Ceres Seq. ID no. 15168406
  misc_feature (120)..(253): Pfam Name: Transcription factor AP-2 Pfam Description: Transcription factor AP-2
  misc_feature (49)..(361): Homolog of NCBI NO: 34904752 NR Description: hypothetical protein~similar to Arabidopsis
  misc_feature (49)..(512): Homolog of NCBI NO: 33146645 NR Description: hypothetical protein [Oryza sativa (japonica
  misc_feature (452)..(505): Homolog of NCBI NO: 30688418 NR Description: proline-rich protein family [Arabidopsis thaliana]
  misc_feature (452)..(505): Homolog of NCBI NO: 7487240 NR Description: hypothetical protein At2g40820 [imported] -
  misc_feature (25)..(455): Homolog of NCBI NO: 30688418 NR Description: proline-rich protein family [Arabidopsis thaliana]
  misc_feature (25)..(455): Homolog of NCBI NO: 7487240 NR Description: hypothetical protein At2g40820 [imported] -
  misc_feature (25)..(514): Homolog of NCBI NO: 34909052 NR Description: P0034E02.39 [Oryza sativa (japonica
  misc_feature (25)..(512): Homolog of NCBI NO: 15225786 NR Description: expressed protein [Arabidopsis thaliana]
  misc_feature (25)..(509): Homolog of NCBI NO: 11358381 NR Description: hypothetical protein T5P19.130 - Arabidopsis
  misc_feature (25)..(512): Homolog of NCBI NO: 30694458 NR Description: expressed protein [Arabidopsis thaliana]
FSFSILCFSGLTSVLLTEKPPIFSMTKISPEVEIRMPMEAFPPVSADVSFISNSFPKYKLDVDNQVLEEPVEDNLGPSLKDVIEQEAFNLSDQHKRISVRDLASKFDKNLAAAAKLSNEAKLREVASLEGHVLLKKLRDALENLRGRFAGINKEDVEKAISMVEALAVKLTQNEGELIQEKFEVKKLVNFLKQASEDAKKLVNQEKSFACAEIESARAVVLRIGEALEEQEKASQASKPQDVDGLIEEVQEARRIKLLHQPSKVMAMEYELRALRDQIREKSIFSIKLQKELTMSKRDEENKSRLYMLDGSEALGSYLRVQPCSAEVPQVSKCSFQWYRLSSEGSWREVISGANKTIYAPDPSDVGRILQVDIVSNGKKLTLTTDPIQTVSGLGSHVETLLRKSNTDFNVVISQMNGKDHSSHSTHSFNVGRMRIKLCRGWITKAREIYSPSMQLCGVRSDIANAAKALFWQARKGLSFVLTFESERDRNAAIMVARKYALDCNVVLAGPDDLV

SEQ ID NO: 56982 - protein, 490 aa, Glycine max
  peptide (1)..(490): Ceres Seq. ID no. 15168407
  misc_feature (96)..(229): Pfam Name: Transcription factor AP-2 Pfam Description: Transcription factor AP-2
  misc_feature (25)..(337): Homolog of NCBI NO: 34904752 NR Description: hypothetical protein~similar to Arabidopsis
  misc_feature (25)..(488): Homolog of NCBI NO: 33146645 NR Description: hypothetical protein [Oryza sativa (japonica
  misc_feature (428)..(481): Homolog of NCBI NO: 30688418 NR Description: proline-rich protein family [Arabidopsis thaliana]
  misc_feature (428)..(481): Homolog of NCBI NO: 7487240 NR Description: hypothetical protein At2g40820 [imported] -
  misc_feature (1)..(431): Homolog of NCBI NO: 30688418 NR Description: proline-rich protein family [Arabidopsis thaliana]
  misc_feature (1)..(431): Homolog of NCBI NO: 7487240 NR Description: hypothetical protein At2g40820 [imported] -
  misc_feature (1)..(490): Homolog of NCBI NO: 34909052 NR Description: P0034E02.39 [Oryza sativa (japonica
  misc_feature (1)..(488): Homolog of NCBI NO: 15225786 NR Description: expressed protein [Arabidopsis thaliana]
  misc_feature (1)..(485): Homolog of NCBI NO: 11358381 NR Description: hypothetical protein T5P19.130 - Arabidopsis
  misc_feature (1)..(488): Homolog of NCBI NO: 30694458 NR Description: expressed protein [Arabidopsis thaliana]
MTKISPEVEIRMPMEAFPPVSADVSFISNSFPKYKLDVDNQVLEEPVEDNLGPSLKDVIEQEAFNLSDQHKRISVRDLASKFDKNLAAAAKLSNEAKLREVASLEGHVLLKKLRDALENLRGRFAGINKEDVEKAISMVEALAVKLTQNEGELIQEKFEVKKLVNFLKQASEDAKKLVNQEKSFACAEIESARAVVLRIGEALEEQEKASQASKPQDVDGLIEEVQEARRIKLLHQPSKVMAMEYELRALRDQIREKSIFSIKLQKELTMSKRDEENKSRLYMLDGSEALGSYLRVQPCSAEVPQVSKCSFQWYRLSSEGSWREVISGANKTIYAPDPSDVGRILQVDIVSNGKKLTLTTDPIQTVSGLGSHVETLLRKSNTDFNVVISQMNGKDHSSHSTHSFNVGRMRIKLCRGWITKAREIYSPSMQLCGVRSDIANAAKALFWQARKGLSFVLTFESERDRNAAIMVARKYALDCNVVLAGPDDLV

SEQ ID NO: 56983 - protein, 479 aa, Glycine max
  peptide (1)..(479): Ceres Seq. ID no. 15168408
  misc_feature (85)..(218): Pfam Name: Transcription factor AP-2 Pfam Description: Transcription factor AP-2
  misc_feature (14)..(326): Homolog of NCBI NO: 34904752 NR Description: hypothetical protein~similar to Arabidopsis
  misc_feature (14)..(477): Homolog of NCBI NO: 33146645 NR Description: hypothetical protein [Oryza sativa (japonica
  misc_feature (417)..(470): Homolog of NCBI NO: 30688418 NR Description: proline-rich protein family [Arabidopsis thaliana]
  misc_feature (417)..(470): Homolog of NCBI NO: 7487240 NR Description: hypothetical protein At2g40820 [imported] -
  misc_feature (1)..(420): Homolog of NCBI NO: 30688418 NR Description: proline-rich protein family [Arabidopsis thaliana]
  misc_feature (1)..(420): Homolog of NCBI NO: 7487240 NR Description: hypothetical protein At2g40820 [imported] -
  misc_feature (1)..(479): Homolog of NCBI NO: 34909052 NR Description: P0034E02.39 [Oryza sativa (japonica
  misc_feature (1)..(477): Homolog of NCBI NO: 15225786 NR Description: expressed protein [Arabidopsis thaliana]
  misc_feature (1)..(474): Homolog of NCBI NO: 11358381 NR Description: hypothetical protein T5P19.130 - Arabidopsis
  misc_feature (1)..(477): Homolog of NCBI NO: 30694458 NR Description: expressed protein [Arabidopsis thaliana]
MPMEAFPPVSADVSFISNSFPKYKLDVDNQVLEEPVEDNLGPSLKDVIEQEAFNLSDQHKRISVRDLASKFDKNLAAAAKLSNEAKLREVASLEGHVLLKKLRDALENLRGRFAGINKEDVEKAISMVEALAVKLTQNEGELIQEKFEVKKLVNFLKQASEDAKKLVNQEKSFACAEIESARAVVLRIGEALEEQEKASQASKPQDVDGLIEEVQEARRIKLLHQPSKVMAMEYELRALRDQIREKSIFSIKLQKELTMSKRDEENKSRLYMLDGSEALGSYLRVQPCSAEVPQVSKCSFQWYRLSSEGSWREVISGANKTIYAPDPSDVGRILQVDIVSNGKKLTLTTDPIQTVSGLGSHVETLLRKSNTDFNVVISQMNGKDHSSHSTHSFNVGRMRIKLCRGWITKAREIYSPSMQLCGVRSDIANAAKALFWQARKGLSFVLTFESERDRNAAIMVARKYALDCNVVLAGPDDLV

SEQ ID NO: 56984 - DNA, 1680 bp, Glycine max
  misc_feature (1)..(1680): Ceres Seq. ID no. 14312196
aaaaattcagagagaactgtccaccctttttcgtttttctccttattacagaccccccttaattgatggtgctctgtatcccctttttcttctgcaagaactacaccaactaaaacctccttcttctttttttttttttttttttggaggctggtgtgtgtttttctttttcttcttcttcttcttccaatccttaaggaaaaaaactaaagaaaaaaaagtgagccatgtcaggcttgtataatcccaacttctctcctgctagagcagcttctcctcagattaggagcaatccagaagtggacagtcagtacctatcagagttgctggcagaacatcagaagcttggacccttcatgcaagtgcttcccatatgcagccgcctcctaaatcaagaaatattaagggtttctggaatgttgtccaatcaaggttttggtgacttcgatagactgcgacatagaagccctagtcctatggcttcttcaaaccttatgtccaatgtcagtgggactgggttgggtggatggaatagtctccagcaagagagattatgtggaccccctggaatgacgatggactggcaaagtgctcctgcaagtcctagttcgttcactgttaagagaatcttgcgcttggaaattccagtagatacatatcccaatttcaattttgttggaagacttctgggccctagaggcaattctttgaaacgggtagaagctacaactggttgtcgtgtgtatattagaggaaaaggatcgataaaggatccagacaaggaagagaaattacgaggaagaccaggttatgagcatctcaatgaaccactgcacattttgattgaggctgaattacctgctaatgttgttgacataaggctcaggcaggctcaggaaattattgaagaactgctcaagcctgtggatgaatcacaggactatatcaagaggcagcagttgcgtgaactcgccatgctgaattcaaatttcagagaagagagtcccgggcccagtggtagtgtgtccccattcaactctagtggaatgaaacgtgcaaagacgggtcgctgaaagttgtccttgattgttggtgtagatgatgagtatcgtggtcctccagctattgattgctgggaatatcttccagtacatgtctcattcaatgcaagctataaaagaataggctaacaattcttgctggttagcactctggtggtttttccttcccctttgtccctacctttttctttttgaacagacaggagacaaagctggaatgaagaatttttaaaagagaacaattatatagttggggtattgagaataggtttgttcaaaccaaccctttttttttctcccttgcaaacttaatacattcattggatttattcatgcgtcagttactttttgagaagtgtggaatatatacatatgatggttggtggtgatgaagttttaggtcctatgacaatgcagtgtttattggcatgtgacattgtcaaagtctcatggtattttaatatttattataagttagcataggctggattctttttagttgtttgtcacaggcatttgtattctcttcggaggactatgcactgtagttggaatgatgcatgccagataaacttcttaccatgtaccattaaagaacaaatgtggtatttgtttatat

SEQ ID NO: 56985 - protein, 281 aa, Glycine max
  peptide (1)..(281): Ceres Seq. ID no. 14312197
  misc_feature (136)..(191): Pfam Name: KH domain Pfam Description: KH domain
  misc_feature (28)..(279): Homolog of NCBI NO: 19424087 NR Description: putative RNA-binding protein [Arabidopsis
  misc_feature (6)..(279): Homolog of NCBI NO: 15241136 NR Description: KH domain protein [Arabidopsis thaliana]
  misc_feature (6)..(279): Homolog of NCBI NO: 20268733 NR Description: unknown protein [Arabidopsis thaliana]
  misc_feature (6)..(279): Homolog of NCBI NO: 15236738 NR Description: KH domain protein [Arabidopsis thaliana]
  misc_feature (1)..(278): Homolog of NCBI NO: 34909270 NR Description: P0454H12.18 [Oryza sativa (japonica
  misc_feature (3)..(278): Homolog of NCBI NO: 34900448 NR Description: contains EST C27129(C51039)~similar to
  misc_feature (1)..(281): Homolog of NCBI NO: 30680583 NR Description: KH domain protein [Arabidopsis thaliana]
  misc_feature (1)..(281): Homolog of NCBI NO: 12322716 NR Description: unknown protein; 28504-31237 [Arabidopsis
  misc_feature (1)..(281): Homolog of NCBI NO: 40645104 NR Description: hypothetical protein [Nicotiana tabacum]
  misc_feature (1)..(280): Homolog of NCBI NO: 15224909 NR Description: KH domain protein [Arabidopsis thaliana]
MSGLYNPNFSPARAASPQIRSNPEVDSQYLSELLAEHQKLGPFMQVLPICSRLLNQEILRVSGMLSNQGFGDFDRLRHRSPSPMASSNLMSNVSGTGLGGWNSLQQERLCGPPGMTMDWQSAPASPSSFTVKRILRLEIPVDTYPNFNFVGRLLGPRGNSLKRVEATTGCRVYIRGKGSIKDPDKEEKLRGRPGYEHLNEPLHILIEAELPANVVDIRLRQAQEIIEELLKPVDESQDYIKRQQLRELAMLNSNFREESPGPSGSVSPFNSSGMKRAKTGR

SEQ ID NO: 56986 - protein, 238 aa, Glycine max
  peptide (1)..(238): Ceres Seq. ID no. 14312198
  misc_feature (93)..(148): Pfam Name: KH domain Pfam Description: KH domain
  misc_feature (1)..(236): Homolog of NCBI NO: 19424087 NR Description: putative RNA-binding protein [Arabidopsis
  misc_feature (1)..(236): Homolog of NCBI NO: 15241136 NR Description: KH domain protein [Arabidopsis thaliana]
  misc_feature (1)..(236): Homolog of NCBI NO: 20268733 NR Description: unknown protein [Arabidopsis thaliana]
  misc_feature (1)..(236): Homolog of NCBI NO: 15236738 NR Description: KH domain protein [Arabidopsis thaliana]
  misc_feature (1)..(235): Homolog of NCBI NO: 34909270 NR Description: P0454H12.18 [Oryza sativa (japonica
  misc_feature (1)..(235): Homolog of NCBI NO: 34900448 NR Description: contains EST C27129(C51039)~similar to
  misc_feature (1)..(238): Homolog of NCBI NO: 30680583 NR Description: KH domain protein [Arabidopsis thaliana]
  misc_feature (1)..(238): Homolog of NCBI NO: 12322716 NR Description: unknown protein; 28504-31237 [Arabidopsis
  misc_feature (1)..(238): Homolog of NCBI NO: 40645104 NR Description: hypothetical protein [Nicotiana tabacum]
  misc_feature (1)..(237): Homolog of NCBI NO: 15224909 NR Description: KH domain protein [Arabidopsis thaliana]
MQVLPICSRLLNQEILRVSGMLSNQGFGDFDRLRHRSPSPMASSNLMSNVSGTGLGGWNSLQQERLCGPPGMTMDWQSAPASPSSFTVKRILRLEIPVDTYPNFNFVGRLLGPRGNSLKRVEATTGCRVYIRGKGSIKDPDKEEKLRGRPGYEHLNEPLHILIEAELPANVVDIRLRQAQEIIEELLKPVDESQDYIKRQQLRELAMLNSNFREESPGPSGSVSPFNSSGMKRAKTGR

SEQ ID NO: 56987 - protein, 218 aa, Glycine max
  peptide (1)..(218): Ceres Seq. ID no. 14312199
  misc_feature (73)..(128): Pfam Name: KH domain Pfam Description: KH domain
  misc_feature (1)..(216): Homolog of NCBI NO: 19424087 NR Description: putative RNA-binding protein [Arabidopsis
  misc_feature (1)..(216): Homolog of NCBI NO: 15241136 NR Description: KH domain protein [Arabidopsis thaliana]
  misc_feature (1)..(216): Homolog of NCBI NO: 20268733 NR Description: unknown protein [Arabidopsis thaliana]
  misc_feature (1)..(216): Homolog of NCBI NO: 15236738 NR Description: KH domain protein [Arabidopsis thaliana]
  misc_feature (1)..(215): Homolog of NCBI NO: 34909270 NR Description: P0454H12.18 [Oryza sativa (japonica
  misc_feature (1)..(215): Homolog of NCBI NO: 34900448 NR Description: contains EST C27129(C51039)~similar to
  misc_feature (1)..(218): Homolog of NCBI NO: 30680583 NR Description: KH domain protein [Arabidopsis thaliana]
  misc_feature (1)..(218): Homolog of NCBI NO: 12322716 NR Description: unknown protein; 28504-31237 [Arabidopsis
  misc_feature (1)..(218): Homolog of NCBI NO: 40645104 NR Description: hypothetical protein [Nicotiana tabacum]
  misc_feature (1)..(217): Homolog of NCBI NO: 15224909 NR Description: KH domain protein [Arabidopsis thaliana]
MLSNQGFGDFDRLRHRSPSPMASSNLMSNVSGTGLGGWNSLQQERLCGPPGMTMDWQSAPASPSSFTVKRILRLEIPVDTYPNFNFVGRLLGPRGNSLKRVEATTGCRVYIRGKGSIKDPDKEEKLRGRPGYEHLNEPLHILIEAELPANVVDIRLRQAQEIIEELLKPVDESQDYIKRQQLRELAMLNSNFREESPGPSGSVSPFNSSGMKRAKTGR

SEQ ID NO: 56988 - DNA, 1339 bp, Glycine max
  misc_feature (1)..(1339): Ceres Seq. ID no. 14315455
agaatattattcactgtactttatccctttctgtgagggaattatggtaattgatatcgaggttttgactcatggattctgatcgccccagaaaaccttccaaaaatttagttcactctcgcttcttccttttcggcttctattgctgggattgggagttcttaaccgctctcctcctttttagttgttccccttaatcttgttccttcatatttttatttttttttcttattagatcagattgaacaaaagggttgctctttattttttaatcttgggggaataatagaaatagaaataagaaaagattagtgaggttgaaatgttgcaacaacgatcggtgccggcaccgttcttgacgaagacgtatcagttggtggaggatccggggacggacgaggtaatatcgtggggtgaaagtgggaacacttttgtggtgtggaagcatgcggattttgcaaaggatttgcttccaaaatatttcaagcacaacaacttctccagctttgttcgacagctcaacacctatggatttcgaaaaattgtgccagacaaatgggaattcgcgaacgaacacttcaagcgagggcagaaggagcttctctcggagatcaaacgccgcaagaccgtgcctcagtcgtcgacacattccccggatgccggaaaacccggcgccgaaggcaactctccgtcgaaccccggcggctgcgacgacgcgggctccacctcaacctcgtcctcgtcctccggttccaagaaccagggatcggtggaaacaaacacaacgccttctcaccagttatcgagcgagaacgagaaactgaagaaggataacgaaacgctgagttgcgagctggcacgtgcgaggaagcagtgcgatgagctcgtggcttttctcagggaccgtctgatggtgggtcccgatcagatcgatcgcatcatgcggcaaggaagttgcggatctgaaaacgcggtaggtgaaggcggtggtggaggacactgtttgaaactgtttggtgtttggttaaaaggggatacactaacagacaaaagaaacaaccacaagagaggccgcgaagaccaaatgggcttcggtgggcctcgcctcaaggagtcaaagcccgttgttgactttagtaggaataggatgatgatgattaatgaaaaaggaaaaggctaagcggtaatcatgtttgggtaaaaagaccaaatgcgctagcctatgcttcctaaacatgttgaggctgtgtaatttttaatgtacgtaggtaaatgcctctatgaatattgattgggaaattaaacaggttttaataatcaatgtatggccttttatgtc

SEQ ID NO: 56989 - protein, 285 aa, Glycine max
  peptide (1)..(285): Ceres Seq. ID no. 14315456
  misc_feature (8)..(206): Pfam Name: HSF-type DNA-binding Pfam Description: HSF-type DNA-binding
MLQQRSVPAPFLTKTYQLVEDPGTDEVISWGESGNTFVVWKHADFAKDLLPKYFKHNNFSSFVRQLNTYGFRKIVPDKWEFANEHFKRGQKELLSEIKRRKTVPQSSTHSPDAGKPGAEGNSPSNPGGCDDAGSTSTSSSSSGSKNQGSVETNTTPSHQLSSENEKLKKDNETLSCELARARKQCDELVAFLRDRLMVGPDQIDRIMRQGSCGSENAVGEGGGGGHCLKLFGVWLKGDTLTDKRNNHKRGREDQMGFGGPRLKESKPVVDFSRNRMMMINEKGKG

SEQ ID NO: 56990 - DNA, 1419 bp, Glycine max
  misc_feature (1)..(1419): Ceres Seq. ID no. 14315481
gaggtacccctactactacttagagaaagtgaaagtgaaagtgaagtgcaacactgcagatgcagttgcaggggaatcagttaaaccgtatttaattttcacaacctccaactccaccaacttacccaatattctttactttcttcctccgtcttcttccctttcaaaccctagaaacagcaaaatcccccttttgatgcaaatgggatcactccaccaactctagagccacacccttcaagatttagctcatgcccacttcaattatggctccattttccacttccccccacttcacagccttcaccttcctcatcttgttcctcaaaacacaagcttttgatccactctctttcttttccttcacggattttgagaaagatccaaattttaagtcaagtgtggggctttatggcaatgcaaaagttgtcaataatggttctgaggttcttctttctgggaatggtgggagagtcatatacaagaagcccgtcaagcttgttcatggtggagcaagggaattggtctcattttcaacttactttgggttttcaatgtccttggatagtgagaagagtggcttggcttttgttatggttcctagtggtgttgaaggtgaggtttttggtaatagttcatatgggctttcttttggattgaaggaaagggaatttaaggttgtcggtgttcagtttagtgcttatggtaggaatgggggttctggtagttgtattgtgtccattaatgttggtagttctgttcctgttaaaacaatcaatgcctcatctgtcattatgggtctaaaaagtgaggggaaattgcatgcttggattgattatgaggcgagttcaaagcgcttagaagttaggttgaatcaatatggtcaatcaaggccagttgatccattgctttggcattcaatggacttatcaaatgtttggggtactgaagagatgtttgcaggctttagcacagtgaaagagaataatacttctcaaacatgctttctctattcatggagctttattgtgaggcattttccacattggatgcattctgagcctctgaatccaaaggtccttgctaagaagactgaaactccagcagtgaaatccagaagtgattgccttttgagggttcttgctgcaatgatatttggtgctggatgtggagcattgacagcattcattgtgctttatttgtggaccatctttggtaataaacgaccggtggtgccggaggagtatgctatgcagcctgtagattttgagtacaagaaagtgagcattgttgtagataaaacaaccatcatagatgctaaggagtagatctacagttggatgcttgcattgtaaatcagtgtttcttgtattcaggttttgctttgttgtagtttgataaagaactgttttatttacc

SEQ ID NO: 56991 - protein, 358 aa, Glycine max
  peptide (1)..(358): Ceres Seq. ID no. 14315482
  misc_feature (47)..(258): Homolog of NCBI NO: 8778564 NR Description: F22G5.19 [Arabidopsis thaliana]
  misc_feature (1)..(258): Homolog of NCBI NO: 15242646 NR Description: receptor like protein kinase [Arabidopsis
  misc_feature (34)..(358): Homolog of NCBI NO: 15232413 NR Description: expressed protein [Arabidopsis thaliana]
  misc_feature (46)..(337): Homolog of NCBI NO: 5923683 NR Description: putative lectin [Arabidopsis thaliana]
  misc_feature (6)..(335): Homolog of NCBI NO: 22330926 NR Description: lectin -related protein [Arabidopsis thaliana]
  misc_feature (6)..(350): Homolog of NCBI NO: 21593676 NR Description: lectin-like protein [Arabidopsis thaliana]
  misc_feature (6)..(350): Homolog of NCBI NO: 15240888 NR Description: lectin - like protein [Arabidopsis thaliana]
MPTSIMAPFSTSPHFTAFTFLILFLKTQAFDPLSFFSFTDFEKDPNFKSSVGLYGNAKVVNNGSEVLLSGNGGRVIYKKPVKLVHGGARELVSFSTYFGFSMSLDSEKSGLAFVMVPSGVEGEVFGNSSYGLSFGLKEREFKVVGVQFSAYGRNGGSGSCIVSINVGSSVPVKTINASSVIMGLKSEGKLHAWIDYEASSKRLEVRLNQYGQSRPVDPLLWHSMDLSNVWGTEEMFAGFSTVKENNTSQTCFLYSWSFIVRHFPHWMHSEPLNPKVLAKKTETPAVKSRSDCLLRVLAAMIFGAGCGALTAFIVLYLWTIFGNKRPVVPEEYAMQPVDFEYKKVSIVVDKTTIIDAKE

SEQ ID NO: 56992 - protein, 353 aa, Glycine max
  peptide (1)..(353): Ceres Seq. ID no. 14315483
  misc_feature (42)..(253): Homolog of NCBI NO: 8778564 NR Description: F22G5.19 [Arabidopsis thaliana]
  misc_feature (1)..(253): Homolog of NCBI NO: 15242646 NR Description: receptor like protein kinase [Arabidopsis
  misc_feature (29)..(353): Homolog of NCBI NO: 15232413 NR Description: expressed protein [Arabidopsis thaliana]
  misc_feature (41)..(332): Homolog of NCBI NO: 5923683 NR Description: putative lectin [Arabidopsis thaliana]
  misc_feature (1)..(330): Homolog of NCBI NO: 22330926 NR Description: lectin -related protein [Arabidopsis thaliana]
  misc_feature (1)..(345): Homolog of NCBI NO: 21593676 NR Description: lectin-like protein [Arabidopsis thaliana]
  misc_feature (1)..(345): Homolog of NCBI NO: 15240888 NR Description: lectin - like protein [Arabidopsis thaliana]
MAPFSTSPHFTAFTFLILFLKTQAFDPLSFFSFTDFEKDPNFKSSVGLYGNAKVVNNGSEVLLSGNGGRVIYKKPVKLVHGGARELVSFSTYFGFSMSLDSEKSGLAFVMVPSGVEGEVFGNSSYGLSFGLKEREFKVVGVQFSAYGRNGGSGSCIVSINVGSSVPVKTINASSVIMGLKSEGKLHAWIDYEASSKRLEVRLNQYGQSRPVDPLLWHSMDLSNVWGTEEMFAGFSTVKENNTSQTCFLYSWSFIVRHFPHWMHSEPLNPKVLAKKTETPAVKSRSDCLLRVLAAMIFGAGCGALTAFIVLYLWTIFGNKRPVVPEEYAMQPVDFEYKKVSIVVDKTTIIDAKE

SEQ ID NO: 56993 - protein, 257 aa, Glycine max
  peptide (1)..(257): Ceres Seq. ID no. 14315484
  misc_feature (1)..(157): Homolog of NCBI NO: 8778564 NR Description: F22G5.19 [Arabidopsis thaliana]
  misc_feature (1)..(157): Homolog of NCBI NO: 15242646 NR Description: receptor like protein kinase [Arabidopsis
  misc_feature (1)..(257): Homolog of NCBI NO: 15232413 NR Description: expressed protein [Arabidopsis thaliana]
  misc_feature (1)..(236): Homolog of NCBI NO: 5923683 NR Description: putative lectin [Arabidopsis thaliana]
  misc_feature (1)..(234): Homolog of NCBI NO: 22330926 NR Description: lectin -related protein [Arabidopsis thaliana]
  misc_feature (1)..(249): Homolog of NCBI NO: 21593676 NR Description: lectin-like protein [Arabidopsis thaliana]
  misc_feature (1)..(249): Homolog of NCBI NO: 15240888 NR Description: lectin - like protein [Arabidopsis thaliana]
MSLDSEKSGLAFVMVPSGVEGEVFGNSSYGLSFGLKEREFKVVGVQFSAYGRNGGSGSCIVSINVGSSVPVKTINASSVIMGLKSEGKLHAWIDYEASSKRLEVRLNQYGQSRPVDPLLWHSMDLSNVWGTEEMFAGFSTVKENNTSQTCFLYSWSFIVRHFPHWMHSEPLNPKVLAKKTETPAVKSRSDCLLRVLAAMIFGAGCGALTAFIVLYLWTIFGNKRPVVPEEYAMQPVDFEYKKVSIVVDKTTIIDAKE

SEQ ID NO: 56994 - DNA, 1433 bp, Glycine max
  misc_feature (1)..(1433): Ceres Seq. ID no. 15175767
atgatgataataaagcagtgaatgatgactcttccttcattgtcctctctattcttcttcttcttccctaactctctctgcaataacaacaccatcaacaaccccttcaagccggcctaaaccccattacccaaaactttttcttttttctttccttcaacactctctattggatcatcacatattcaatttcattctcttcaaaaattccccttcaaaaaaatttaaaattaaaaaaaagtgctctttttgtgaattttgagccatttgccaccgacagatttcgatcttctccgtgccaaagttgtaatcttttcgaattttggcgaggtgggtcgatctgatttcgctcgaataattgcgggttcgattttgatctgaaaaaggaaaagagaaaaaaagattgggttatttctgattcaagattttgtccttttttgaaatggtctatttccatagctcaatctctctctgcaagttcgttgatcaatcatctttcatggcgaattcaatttgttctgcggatttcggttcgaaatcgagacaaatcaatcaccttcagaagaatcggagaacccctagttcatcatcatcatcatcatcatcatcgaattcccttcagattccaccctgtgatcgatctcgatcggcaatggttgatgttgtgatgttcattgctgttgtttgtgcctgtggctttttgttcttcccttatgtagagtttttggtgacaaagtgttacgaggttattaagggtgttgtgtttttgattaaggaggaggtttctgtggcaccttggatctatatttccatagggttgagtgttgtgtttgctgcattggccacgtgggctgtggtggcttgcaccactaggaagtgtgggaatcccagttgcaagggtctgaggaaggctgctgagtttgacattcagttggagactgaggattgtgtgaagaatttggcttctgcgtcgtcgaatgtagcgaaagatggtggtggtggaacgaagaagggtctctttgaattgcctcgtgatcaccatagggagctggaggctgagctcaagaagatggcaccaccaaatggaagggctgtgctcgtgctccgggcgaggtgtggatgttctgttggtaggttagaggttccaggaccaaggaagcatcttcgaaagatcaacaagaagtagcagcaatcctgttcgagccgagtaggacacaggagaggacacccttttgagttattggatggaattaaggaaagggatggtaattggatcaaatagaaaatttgtacttcttgtcctatgttcattgatctagtaggaaattagaatgtctttgaataagccccttggcaataagttgtaaggaactatgggccatacagtttagttggttatacctggaaatataaaaaaagaacatttttatttt

SEQ ID NO: 56995 - protein, 247 aa, Glycine max
  peptide (1)..(247): Ceres Seq. ID no. 15175768
  misc_feature (127)..(247): Homolog of NCBI NO: 15239636 NR Description: pentatricopeptide (PPR) repeat-containing protein
  misc_feature (42)..(247): Homolog of NCBI NO: 15230653 NR Description: expressed protein [Arabidopsis thaliana]
  misc_feature (41)..(224): Homolog of NCBI NO: 6714471 NR Description: unknown protein [Arabidopsis thaliana]
  misc_feature (33)..(239): Homolog of NCBI NO: 11288897 NR Description: hypothetical protein F8M21.150 - Arabidopsis
  misc_feature (41)..(246): Homolog of NCBI NO: 18395728 NR Description: expressed protein [Arabidopsis thaliana]
  misc_feature (1)..(246): Homolog of NCBI NO: 22326823 NR Description: expressed protein [Arabidopsis thaliana]
MVYFHSSISLCKFVDQSSFMANSICSADFGSKSRQINHLQKNRRTPSSSSSSSSSSNSLQIPPCDRSRSAMVDVVMFIAVVCACGFLFFPYVEFLVTKCYEVIKGVVFLIKEEVSVAPWIYISIGLSVVFAALATWAVVACTTRKCGNPSCKGLRKAAEFDIQLETEDCVKNLASASSNVAKDGGGGTKKGLFELPRDHHRELEAELKKMAPPNGRAVLVLRARCGCSVGRLEVPGPRKHLRKINKK

SEQ ID NO: 56996 - protein, 228 aa, Glycine max
  peptide (1)..(228): Ceres Seq. ID no. 15175769
  misc_feature (108)..(228): Homolog of NCBI NO: 15239636 NR Description: pentatricopeptide (PPR) repeat-containing protein
  misc_feature (23)..(228): Homolog of NCBI NO: 15230653 NR Description: expressed protein [Arabidopsis thaliana]
  misc_feature (22)..(205): Homolog of NCBI NO: 6714471 NR Description: unknown protein [Arabidopsis thaliana]
  misc_feature (14)..(220): Homolog of NCBI NO: 11288897 NR Description: hypothetical protein F8M21.150 - Arabidopsis
  misc_feature (22)..(227): Homolog of NCBI NO: 18395728 NR Description: expressed protein [Arabidopsis thaliana]
  misc_feature (1)..(227): Homolog of NCBI NO: 22326823 NR Description: expressed protein [Arabidopsis thaliana]
MANSICSADFGSKSRQINHLQKNRRTPSSSSSSSSSSNSLQIPPCDRSRSAMVDVVMFIAVVCACGFLFFPYVEFLVTKCYEVIKGVVFLIKEEVSVAPWIYISIGLSVVFAALATWAVVACTTRKCGNPSCKGLRKAAEFDIQLETEDCVKNLASASSNVAKDGGGGTKKGLFELPRDHHRELEAELKKMAPPNGRAVLVLRARCGCSVGRLEVPGPRKHLRKINKK

SEQ ID NO: 56997 - protein, 177 aa, Glycine max
  peptide (1)..(177): Ceres Seq. ID no. 15175770
  misc_feature (57)..(177): Homolog of NCBI NO: 15239636 NR Description: pentatricopeptide (PPR) repeat-containing protein
  misc_feature (1)..(177): Homolog of NCBI NO: 15230653 NR Description: expressed protein [Arabidopsis thaliana]
  misc_feature (1)..(154): Homolog of NCBI NO: 6714471 NR Description: unknown protein [Arabidopsis thaliana]
  misc_feature (1)..(169): Homolog of NCBI NO: 11288897 NR Description: hypothetical protein F8M21.150 - Arabidopsis
  misc_feature (1)..(176): Homolog of NCBI NO: 18395728 NR Description: expressed protein [Arabidopsis thaliana]
  misc_feature (1)..(176): Homolog of NCBI NO: 22326823 NR Description: expressed protein [Arabidopsis thaliana]
MVDVVMFIAVVCACGFLFFPYVEFLVTKCYEVIKGVVFLIKEEVSVAPWIYISIGLSVVFAALATWAVVACTTRKCGNPSCKGLRKAAEFDIQLETEDCVKNLASASSNVAKDGGGGTKKGLFELPRDHHRELEAELKKMAPPNGRAVLVLRARCGCSVGRLEVPGPRKHLRKINKK

SEQ ID NO: 56998 - DNA, 1366 bp, Glycine max
  misc_feature (1)..(1366): Ceres Seq. ID no. 14315911
gttggaacttggaggaacttgtgtctgtgtccctttttacagagtcatgactatggctggagctttgagtctctcccaattcccagttcgtgggtctgtttctttgcccaaaagaagaatacccagaagaagcttttgcattaggggcatgtcagaaatctcttccactttttctgtgagcacccaacaagaagaaccaacttctaatgcttcgtcagtgacaattgcacctccccccaacttcaagccccctgagcctaaacgctttgcaatcagacctgacaagaccagtgaagtatttggagctttgcttcctttgctctttcgctttgctaccggagttttcgtttctgggtattctttttcaattgtttctaaggatgaaattcctccagatgaatatgctttggaacttaatggcgttaccataaaagaaacagcaaaattaggccctcgcccagagaagcctattgagatatatgaatttgagagctgtccattttgccgaaaggttagagaaattgttgccattttggaccttgatgttcttttctatccttgtccaagaaatggcccaaatttccgtcaaaaggttctagagatgggtggcaaactgcagttcccctacatggttgacccaaacacaggcgcttcaatgtatgaatcagatgacataattcggtatttggttgacaaatatggtgatggaaacgttcctctatctttatcacttggatttttaacgaccctaactgctggtcttggtatgcttagtcgtatttcaaaggggactacttatactccagcgaagttccctccaaagccacttaaattatgggcatatgaggggtctcctttctgcaaacttgtacgtgaagtacttgtggaattggagctgccacacttgcttgtctgttgtgctaggggtagcccaaagagaaatatactatatcagaaaactggaactttccaggcaccttttttggaagatccaaacactgggatagaaatgtttgaaagtgcagaaatcatagagtatctaagagcaacatacgctcttcagtaagtgatgcctatgataggaagaggcttgtgagggtttttaagtaaatgtaattgctaatggttctaacagggttacatcaaattttctctatatagaaatttcaaatagtggaatcaagtgcctcaatattcagcaatggtttgaggtggataaaaatttcggttgcaaaatgggaatctgtttcattcttcttttcttctttattattgttattattatttgggactcttttcattcattattactgcacctacaactctgcaataataactacataatacattaatgcccttgaaaatg

SEQ ID NO: 56999 - protein, 354 aa, Glycine max
  peptide (1)..(354): Ceres Seq. ID no. 14315912
  misc_feature (157)..(229): Pfam Name: Glutathione S-transferase, N-terminal domain Pfam Description: Glutathione S-transferase, N-terminal domain
  misc_feature (147)..(269): Homolog of NCBI NO: 15488040 NR Description: unknown [Photobacterium profundum]
  misc_feature (153)..(352): Homolog of NCBI NO: 7487730 NR Description: hypothetical protein T5L19.130 - Arabidopsis
  misc_feature (153)..(352): Homolog of NCBI NO: 21593568 NR Description: unknown [Arabidopsis thaliana]
  misc_feature (153)..(352): Homolog of NCBI NO: 18413285 NR Description: expressed protein [Arabidopsis thaliana]
  misc_feature (18)..(352): Homolog of NCBI NO: 11282317 NR Description: hypothetical protein F8F6.90 - Arabidopsis
  misc_feature (18)..(352): Homolog of NCBI NO: 21593275 NR Description: unknown [Arabidopsis thaliana]
  misc_feature (18)..(352): Homolog of NCBI NO: 18414386 NR Description: auxin-regulated protein [Arabidopsis thaliana]
LELGGTCVCVPFYRVMTMAGALSLSQFPVRGSVSLPKRRIPRRSFCIRGMSEISSTFSVSTQQEEPTSNASSVTIAPPPNFKPPEPKRFAIRPDKTSEVFGALLPLLFRFATGVFVSGYSFSIVSKDEIPPDEYALELNGVTIKETAKLGPRPEKPIEIYEFESCPFCRKVREIVAILDLDVLFYPCPRNGPNFRQKVLEMGGKLQFPYMVDPNTGASMYESDDIIRYLVDKYGDGNVPLSLSLGFLTTLTAGLGMLSRISKGTTYTPAKFPPKPLKLWAYEGSPFCKLVREVLVELELPHLLVCCARGSPKRNILYQKTGTFQAPFLEDPNTGIEMFESAEIIEYLRATYALQ

SEQ ID NO: 57000 - protein, 339 aa, Glycine max
  peptide (1)..(339): Ceres Seq. ID no. 14315913
  misc_feature (142)..(214): Pfam Name: Glutathione S-transferase, N-terminal domain Pfam Description: Glutathione S-transferase, N-terminal domain
  misc_feature (132)..(254): Homolog of NCBI NO: 15488040 NR Description: unknown [Photobacterium profundum]
  misc_feature (138)..(337): Homolog of NCBI NO: 7487730 NR Description: hypothetical protein T5L19.130 - Arabidopsis
  misc_feature (138)..(337): Homolog of NCBI NO: 21593568 NR Description: unknown [Arabidopsis thaliana]
  misc_feature (138)..(337): Homolog of NCBI NO: 18413285 NR Description: expressed protein [Arabidopsis thaliana]
  misc_feature (3)..(337): Homolog of NCBI NO: 11282317 NR Description: hypothetical protein F8F6.90 - Arabidopsis
  misc_feature (3)..(337): Homolog of NCBI NO: 21593275 NR Description: unknown [Arabidopsis thaliana]
  misc_feature (3)..(337): Homolog of NCBI NO: 18414386 NR Description: auxin-regulated protein [Arabidopsis thaliana]
MTMAGALSLSQFPVRGSVSLPKRRIPRRSFCIRGMSEISSTFSVSTQQEEPTSNASSVTIAPPPNFKPPEPKRFAIRPDKTSEVFGALLPLLFRFATGVFVSGYSFSIVSKDEIPPDEYALELNGVTIKETAKLGPRPEKPIEIYEFESCPFCRKVREIVAILDLDVLFYPCPRNGPNFRQKVLEMGGKLQFPYMVDPNTGASMYESDDIIRYLVDKYGDGNVPLSLSLGFLTTLTAGLGMLSRISKGTTYTPAKFPPKPLKLWAYEGSPFCKLVREVLVELELPHLLVCCARGSPKRNILYQKTGTFQAPFLEDPNTGIEMFESAEIIEYLRATYALQ

SEQ ID NO: 57001 - protein, 337 aa, Glycine max
  peptide (1)..(337): Ceres Seq. ID no. 14315914
  misc_feature (140)..(212): Pfam Name: Glutathione S-transferase, N-terminal domain Pfam Description: Glutathione S-transferase, N-terminal domain
  misc_feature (130)..(252): Homolog of NCBI NO: 15488040 NR Description: unknown [Photobacterium profundum]
  misc_feature (136)..(335): Homolog of NCBI NO: 7487730 NR Description: hypothetical protein T5L19.130 - Arabidopsis
  misc_feature (136)..(335): Homolog of NCBI NO: 21593568 NR Description: unknown [Arabidopsis thaliana]
  misc_feature (136)..(335): Homolog of NCBI NO: 18413285 NR Description: expressed protein [Arabidopsis thaliana]
  misc_feature (1)..(335): Homolog of NCBI NO: 11282317 NR Description: hypothetical protein F8F6.90 - Arabidopsis
  misc_feature (1)..(335): Homolog of NCBI NO: 21593275 NR Description: unknown [Arabidopsis thaliana]
  misc_feature (1)..(335): Homolog of NCBI NO: 18414386 NR Description: auxin-regulated protein [Arabidopsis thaliana]
MAGALSLSQFPVRGSVSLPKRRIPRRSFCIRGMSEISSTFSVSTQQEEPTSNASSVTIAPPPNFKPPEPKRFAIRPDKTSEVFGALLPLLFRFATGVFVSGYSFSIVSKDEIPPDEYALELNGVTIKETAKLGPRPEKPIEIYEFESCPFCRKVREIVAILDLDVLFYPCPRNGPNFRQKVLEMGGKLQFPYMVDPNTGASMYESDDIIRYLVDKYGDGNVPLSLSLGFLTTLTAGLGMLSRISKGTTYTPAKFPPKPLKLWAYEGSPFCKLVREVLVELELPHLLVCCARGSPKRNILYQKTGTFQAPFLEDPNTGIEMFESAEIIEYLRATYALQ

SEQ ID NO: 57002 - DNA, 1470 bp, Glycine max
  misc_feature (1)..(1470): Ceres Seq. ID no. 14312140
aaacggatgccattgctgcaccccgtgaaagctctatccctctctttctttgttttccgtggaaaccaacctatcttcctttgttattttcattctgataaaacaaacatattttcttccacctttttccatctttgcaaaggggataaagggttgctagttgctaccatttatggttttattccgccatttggaggaaccttatgctcttaaaacaaataaaacccaaagggttctcttgaaaaacaccagaactttcatctaatcaaaacacgtgttggccaaaaacatcaccttctctttattatcgcatgcaagagcttttttagatgctcctttgtgttcaagattgagagaaaacataacctgggtatgatatgactacgagcatgccccgttaatgtttcaacggtttttgtttctttggttcattttcagacacccccatattcttcttctcaattgaaaaccttggtttttgaatctcccctgttttcctttgtgtgcttcaagttctttttgtctttttctagaaacctatgtcgtctgtgccggcacgaacagggcgacaaagacagcgttatgaggacaatttgcgccttgtctctggatgtattccctatagatggacaaaggacaacacagatcaaatgggggaaacccgggagataatagaagtacttatggtttcttcaccaaaacgtgatgaccttgtattcccaaagggtggatgggaggatgatgagactgttacagaagctgcttgccgcgaggctttagaggaagcaggagttaaaggaatactaagagaaattccactaggaatatgggagttcagaagcaaaaccagtcaagacttatgtagcgtggaaggaggctgcagaggatacatgtttgccttggaggtgactgaagaacttgagacatggccagagcagaaaaaccacgctcgccaatggttaaacataaaagatgcattcaaactcagccgatatgactggatgtgtaatgcacttgaggcatttttgagagtaatggcagaagacagaaagcctgagaaccaagaccagaatgtggaacttgaacccccttcaattgtagaagatatgccagaatgccaaagtatgtcacctaactgctataagagatcctctactatgcagcaccatggtatgcctcctaaagccaatcttctgtcacgtgctactcgagaaatagccatccactttggttattgacattatcaggaggacacttttgaaatatgcttatgtaatggatcaacattgtgcaataactccttaaaattgtgaaagaaaaaactatgaagttattatggcttggatgcacaatccatcaacttcattgttgtaggctctttctttctttctttccaatgtgaccatgatgtaaaatgtggtggtgaaagtctcaagtgtatatgatcttaacagttgtttgcttcacccc

SEQ ID NO: 57003 - protein, 232 aa, Glycine max
  peptide (1)..(232): Ceres Seq. ID no. 14312141
  misc_feature (20)..(165): Pfam Name: NUDIX domain Pfam Description: NUDIX domain
  misc_feature (1)..(182): Homolog of NCBI NO: 21595695 NR Description: unknown [Arabidopsis thaliana]
  misc_feature (1)..(182): Homolog of NCBI NO: 18379275 NR Description: MutT/nudix family protein [Arabidopsis thaliana]
  misc_feature (1)..(181): Homolog of NCBI NO: 15223919 NR Description: MutT/nudix family protein [Arabidopsis thaliana]
  misc_feature (1)..(174): Homolog of NCBI NO: 15221055 NR Description: MutT/nudix family protein [Arabidopsis thaliana]
  misc_feature (1)..(180): Homolog of NCBI NO: 34900054 NR Description: MutT-like protein~contains ESTs
  misc_feature (1)..(180): Homolog of NCBI NO: 38175436 NR Description: MutT-like protein [Oryza sativa (japonica
  misc_feature (1)..(164): Homolog of NCBI NO: 18399682 NR Description: MutT/nudix family protein [Arabidopsis thaliana]
  misc_feature (1)..(169): Homolog of NCBI NO: 15231598 NR Description: MutT/nudix family protein [Arabidopsis thaliana]
  misc_feature (1)..(179): Homolog of NCBI NO: 18391450 NR Description: MutT/nudix family protein [Arabidopsis thaliana]
  misc_feature (1)..(205): Homolog of NCBI NO: 25518008 NR Description: F13K23.14 protein - Arabidopsis thaliana
MSSVPARTGRQRQRYEDNLRLVSGCIPYRWTKDNTDQMGETREIIEVLMVSSPKRDDLVFPKGGWEDDETVTEAACREALEEAGVKGILREIPLGIWEFRSKTSQDLCSVEGGCRGYMFALEVTEELETWPEQKNHARQWLNIKDAFKLSRYDWMCNALEAFLRVMAEDRKPENQDQNVELEPPSIVEDMPECQSMSPNCYKRSSTMQHHGMPPKANLLSRATREIAIHFGY

SEQ ID NO: 57004 - protein, 195 aa, Glycine max
  peptide (1)..(195): Ceres Seq. ID no. 14312142
  misc_feature (1)..(128): Pfam Name: NUDIX domain Pfam Description: NUDIX domain
  misc_feature (1)..(145): Homolog of NCBI NO: 21595695 NR Description: unknown [Arabidopsis thaliana]
  misc_feature (1)..(145): Homolog of NCBI NO: 18379275 NR Description: MutT/nudix family protein [Arabidopsis thaliana]
  misc_feature (1)..(144): Homolog of NCBI NO: 15223919 NR Description: MutT/nudix family protein [Arabidopsis thaliana]
  misc_feature (1)..(137): Homolog of NCBI NO: 15221055 NR Description: MutT/nudix family protein [Arabidopsis thaliana]
  misc_feature (1)..(143): Homolog of NCBI NO: 34900054 NR Description: MutT-like protein~contains ESTs
  misc_feature (1)..(143): Homolog of NCBI NO: 38175436 NR Description: MutT-like protein [Oryza sativa (japonica
  misc_feature (1)..(127): Homolog of NCBI NO: 18399682 NR Description: MutT/nudix family protein [Arabidopsis thaliana]
  misc_feature (1)..(132): Homolog of NCBI NO: 15231598 NR Description: MutT/nudix family protein [Arabidopsis thaliana]
  misc_feature (1)..(142): Homolog of NCBI NO: 18391450 NR Description: MutT/nudix family protein [Arabidopsis thaliana]
  misc_feature (1)..(168): Homolog of NCBI NO: 25518008 NR Description: F13K23.14 protein - Arabidopsis thaliana
MGETREIIEVLMVSSPKRDDLVFPKGGWEDDETVTEAACREALEEAGVKGILREIPLGIWEFRSKTSQDLCSVEGGCRGYMFALEVTEELETWPEQKNHARQWLNIKDAFKLSRYDWMCNALEAFLRVMAEDRKPENQDQNVELEPPSIVEDMPECQSMSPNCYKRSSTMQHHGMPPKANLLSRATREIAIHFGY

SEQ ID NO: 57005 - protein, 184 aa, Glycine max
  peptide (1)..(184): Ceres Seq. ID no. 14312143
  misc_feature (1)..(117): Pfam Name: NUDIX domain Pfam Description: NUDIX domain
  misc_feature (1)..(134): Homolog of NCBI NO: 21595695 NR Description: unknown [Arabidopsis thaliana]
  misc_feature (1)..(134): Homolog of NCBI NO: 18379275 NR Description: MutT/nudix family protein [Arabidopsis thaliana]
  misc_feature (1)..(133): Homolog of NCBI NO: 15223919 NR Description: MutT/nudix family protein [Arabidopsis thaliana]
  misc_feature (1)..(126): Homolog of NCBI NO: 15221055 NR Description: MutT/nudix family protein [Arabidopsis thaliana]
  misc_feature (1)..(132): Homolog of NCBI NO: 34900054 NR Description: MutT-like protein~contains ESTs
  misc_feature (1)..(132): Homolog of NCBI NO: 38175436 NR Description: MutT-like protein [Oryza sativa (japonica
  misc_feature (1)..(116): Homolog of NCBI NO: 18399682 NR Description: MutT/nudix family protein [Arabidopsis thaliana]
  misc_feature (1)..(121): Homolog of NCBI NO: 15231598 NR Description: MutT/nudix family protein [Arabidopsis thaliana]
  misc_feature (1)..(131): Homolog of NCBI NO: 18391450 NR Description: MutT/nudix family protein [Arabidopsis thaliana]
  misc_feature (1)..(157): Homolog of NCBI NO: 25518008 NR Description: F13K23.14 protein - Arabidopsis thaliana
MVSSPKRDDLVFPKGGWEDDETVTEAACREALEEAGVKGILREIPLGIWEFRSKTSQDLCSVEGGCRGYMFALEVTEELETWPEQKNHARQWLNIKDAFKLSRYDWMCNALEAFLRVMAEDRKPENQDQNVELEPPSIVEDMPECQSMSPNCYKRSSTMQHHGMPPKANLLSRATREIAIHFGY

SEQ ID NO: 57006 - DNA, 839 bp, Glycine max
  misc_feature (1)..(839): Ceres Seq. ID no. 14315444
atcattgagaagcttggatgatgactgggatgatgaaaaggcaagtcccatgactcccatccacatgggggctgctaacagtaataacagcattgaagaggttgaatctgatgacaatgtcgaagcaatggaatctgatgacaatgttcaagcaatggagtctgatgacaaagtccaagcaatggaatccgatgacaatgtccaagcagcagaatctgatgacaatggccaagctgtggaatatgatcaaggaaactgggaaataggttttaatggtgcccccagcagatggagtagggatttggtaggaggaattagcgatgaggatgaggatgaggatgcggaagcttctgaagatgacaatgacaatggcattggcattgaaaacaatgaggaggaggattcagaggcagatgctatgagtgaggagggttcagatggtactgcaaacagaattgtaaatgaagaaagctcagactcggatgtctctgaagattcttctgattagaacattgcttttttaagggaaaggatcctcgagtaacatttattttctcaaaaacttaataatggaagaaatggagagaaaaggaaacagaggatcttttctcgttttttaaggctgcgttacattttttccccctatactgcagccagctttacaacgtacctgagctccaaagtcatggcaaggcttcatagttcatactagttttatggttgagtagattaatagtgtataataggatatataaacccgcccattgcgtggattcttaaaaaaaaaataaaaaaaattaatatcattatacaatcaataattcaagaaaacaattcac

SEQ ID NO: 57007 - protein, 168 aa, Glycine max
  peptide (1)..(168): Ceres Seq. ID no. 14315445
  misc_feature (27)..(168): Pfam Name: Chromadorea ALT protein Pfam Description: Chromadorea ALT protein
  misc_feature (4)..(168): Homolog of NCBI NO: 4322670 NR Description: dentin phosphoryn [Homo sapiens]
  misc_feature (3)..(165): Homolog of NCBI NO: 23042413 NR Description: hypothetical protein [Trichodesmium erythraeum
  misc_feature (8)..(168): Homolog of NCBI NO: 19923672 NR Description: dentin sailophosphoprotein
  misc_feature (10)..(168): Homolog of NCBI NO: 23613490 NR Description: hypothetical protein [Plasmodium falciparum 3D7]
  misc_feature (10)..(168): Homolog of NCBI NO: 23613490 NR Description: hypothetical protein [Plasmodium falciparum 3D7]
  misc_feature (27)..(168): Homolog of NCBI NO: 23613490 NR Description: hypothetical protein [Plasmodium falciparum 3D7]
SLRSLDDDWDDEKASPMTPIHMGAANSNNSIEEVESDDNVEAMESDDNVQAMESDDKVQAMESDDNVQAAESDDNGQAVEYDQGNWEIGFNGAPSRWSRDLVGGISDEDEDEDAEASEDDNDNGIGIENNEEEDSEADAMSEEGSDGTANRIVNEESSDSDVSEDSSD

SEQ ID NO: 57008 - protein, 152 aa, Glycine max
  peptide (1)..(152): Ceres Seq. ID no. 14315446
  misc_feature (11)..(152): Pfam Name: Chromadorea ALT protein Pfam Description: Chromadorea ALT protein
  misc_feature (1)..(152): Homolog of NCBI NO: 4322670 NR Description: dentin phosphoryn [Homo sapiens]
  misc_feature (1)..(149): Homolog of NCBI NO: 23042413 NR Description: hypothetical protein [Trichodesmium erythraeum
  misc_feature (1)..(152): Homolog of NCBI NO: 19923672 NR Description: dentin sailophosphoprotein
  misc_feature (1)..(152): Homolog of NCBI NO: 23613490 NR Description: hypothetical protein [Plasmodium falciparum 3D7]
  misc_feature (1)..(152): Homolog of NCBI NO: 23613490 NR Description: hypothetical protein [Plasmodium falciparum 3D7]
  misc_feature (11)..(152): Homolog of NCBI NO: 23613490 NR Description: hypothetical protein [Plasmodium falciparum 3D7]
MTPIHMGAANSNNSIEEVESDDNVEAMESDDNVQAMESDDKVQAMESDDNVQAAESDDNGQAVEYDQGNWEIGFNGAPSRWSRDLVGGISDEDEDEDAEASEDDNDNGIGIENNEEEDSEADAMSEEGSDGTANRIVNEESSDSDVSEDSSD

SEQ ID NO: 57009 - protein, 147 aa, Glycine max
  peptide (1)..(147): Ceres Seq. ID no. 14315447
  misc_feature (6)..(147): Pfam Name: Chromadorea ALT protein Pfam Description: Chromadorea ALT protein
  misc_feature (1)..(147): Homolog of NCBI NO: 4322670 NR Description: dentin phosphoryn [Homo sapiens]
  misc_feature (1)..(144): Homolog of NCBI NO: 23042413 NR Description: hypothetical protein [Trichodesmium erythraeum
  misc_feature (1)..(147): Homolog of NCBI NO: 19923672 NR Description: dentin sailophosphoprotein
  misc_feature (1)..(147): Homolog of NCBI NO: 23613490 NR Description: hypothetical protein [Plasmodium falciparum 3D7]
  misc_feature (1)..(147): Homolog of NCBI NO: 23613490 NR Description: hypothetical protein [Plasmodium falciparum 3D7]
  misc_feature (6)..(147): Homolog of NCBI NO: 23613490 NR Description: hypothetical protein [Plasmodium falciparum 3D7]
MGAANSNNSIEEVESDDNVEAMESDDNVQAMESDDKVQAMESDDNVQAAESDDNGQAVEYDQGNWEIGFNGAPSRWSRDLVGGISDEDEDEDAEASEDDNDNGIGIENNEEEDSEADAMSEEGSDGTANRIVNEESSDSDVSEDSSD

SEQ ID NO: 57010 - DNA, 1560 bp, Glycine max
  misc_feature (1)..(1560): Ceres Seq. ID no. 15179926
atatacactcgttcatatataattctctctgatcttattatttcctttcaagtctcttaatttctctatatttcaaaaactcaaaccctaaaatgaacgacttgttctccggctccttctcccgcaccaatgaccaagtctcgccggaccaccaccatgtgatcgagatggcggccaccgcatcgccaacggccgagggaagcgtgaatctcgaaaagttctttcaagaagttgagcaggtaaaagaggagctgaaggagctagagcgtctccatgaaaatctgcgtgggtcccacgagaaaagcaagatccttcacagcgccaaagctgtgaaggaacttcgcttacgcatggacagtgacgtgacacttgctctaaagaatgcaaagctcgttaaggttcggcttgaggcactggaccggtccaaccagaccagtcaaagcttgcctggttcgggacctggttcgtcctcagaccggaccagaacgtccgttgtgagcggactgaggaagaagctgaaggactcgatggacagcttcaacagcctcagacaaaagatatcgtcagagtatagggaaaccgtgcagcgtagatattatactgtcaccggagagaaccctgatgacaaaaccattgatctccttatttctacgggtgagagtgaaacattcttgcagaaggcgatccagcagcaaggtagagccagtgtgatggacacgatccaagagattcaagagaggcacgacacagtcaaggaaatagagagaaacctaaacgagctccaccaagtgttcttggacatggccgtgctggtgcagtcccagggcgaacaactggacgacatcgagagccacgtggcgcgcgccaattcgtacgtgcggggtggggtccagcagttgcacgtggcaaggaagcaccagaagaacacccgaaagtggacatgcatagccatcatactgctcattattatcatcttgattatagtcctccctatagttctaagaaattgattgatcacatattctaattggttcaaggtggtggctgccaagaaattggactagttcaaacttcaaagattattagtcaggtcaattcatgctgcctagaccattgcattagaaaaatatataccttggcttttgtaatcagttttgttttcttctttttggtcgcatcatgtgttgattagtttacattttccacgtacccatttgtacatgtttgaagattgagacattttggtttggtttggtttctagaagcctatgtatggacacggtgcttgcatgtaccgtttagaattattactttactaccgggaagagaactcattgaagcggttttattctagctagctagggagagaaacgctaagccagggtgatgttcatggtggtacattcttttgcaaatatgtatttaattttaagcagttctatatgggtgaactactataggcattgcaggagttacttcaattgctttgcgtgtttatgccattgcatgtacaaaagaattgcacctttttcactagcatattgataacattgctttcac

SEQ ID NO: 57011 - protein, 305 aa, Glycine max
  peptide (1)..(305): Ceres Seq. ID no. 15179927
  misc_feature (39)..(146): Pfam Name: Syntaxin Pfam Description: Syntaxin
  misc_feature (1)..(301): Homolog of NCBI NO: 5912543 NR Description: Knolle [Capsicum annuum]
  misc_feature (1)..(301): Homolog of NCBI NO: 29788865 NR Description: putative cytokinesis-specific syntaxin-related
  misc_feature (1)..(301): Homolog of NCBI NO: 28974542 NR Description: knolle [Antirrhinum majus]
  misc_feature (1)..(302): Homolog of NCBI NO: 15236285 NR Description: syntaxin of plants SYP123 [Arabidopsis thaliana]
  misc_feature (1)..(300): Homolog of NCBI NO: 15219900 NR Description: syntaxin of plants SYP124 [Arabidopsis thaliana]
  misc_feature (1)..(302): Homolog of NCBI NO: 15220328 NR Description: syntaxin of plants SYP125 [Arabidopsis thaliana]
  misc_feature (1)..(299): Homolog of NCBI NO: 15231205 NR Description: syntaxin of plants SYP122 [Arabidopsis thaliana]
  misc_feature (1)..(299): Homolog of NCBI NO: 11358871 NR Description: syntaxin synt4 [imported] - Arabidopsis thaliana
  misc_feature (1)..(302): Homolog of NCBI NO: 15229865 NR Description: syntaxin of plants SYP121 [Arabidopsis thaliana]
  misc_feature (1)..(301): Homolog of NCBI NO: 4206787 NR Description: syntaxin-related protein Nt-syr1 [Nicotiana
MNDLFSGSFSRTNDQVSPDHHHVIEMAATASPTAEGSVNLEKFFQEVEQVKEELKELERLHENLRGSHEKSKILHSAKAVKELRLRMDSDVTLALKNAKLVKVRLEALDRSNQTSQSLPGSGPGSSSDRTRTSVVSGLRKKLKDSMDSFNSLRQKISSEYRETVQRRYYTVTGENPDDKTIDLLISTGESETFLQKAIQQQGRASVMDTIQEIQERHDTVKEIERNLNELHQVFLDMAVLVQSQGEQLDDIESHVARANSYVRGGVQQLHVARKHQKNTRKWTCIAIILLIIIILIIVLPIVLRN

SEQ ID NO: 57012 - protein, 280 aa, Glycine max
  peptide (1)..(280): Ceres Seq. ID no. 15179928
  misc_feature (14)..(121): Pfam Name: Syntaxin Pfam Description: Syntaxin
  misc_feature (1)..(276): Homolog of NCBI NO: 5912543 NR Description: Knolle [Capsicum annuum]
  misc_feature (1)..(276): Homolog of NCBI NO: 29788865 NR Description: putative cytokinesis-specific syntaxin-related
  misc_feature (1)..(276): Homolog of NCBI NO: 28974542 NR Description: knolle [Antirrhinum majus]
  misc_feature (1)..(277): Homolog of NCBI NO: 15236285 NR Description: syntaxin of plants SYP123 [Arabidopsis thaliana]
  misc_feature (1)..(275): Homolog of NCBI NO: 15219900 NR Description: syntaxin of plants SYP124 [Arabidopsis thaliana]
  misc_feature (1)..(277): Homolog of NCBI NO: 15220328 NR Description: syntaxin of plants SYP125 [Arabidopsis thaliana]
  misc_feature (1)..(274): Homolog of NCBI NO: 15231205 NR Description: syntaxin of plants SYP122 [Arabidopsis thaliana]
  misc_feature (1)..(274): Homolog of NCBI NO: 11358871 NR Description: syntaxin synt4 [imported] - Arabidopsis thaliana
  misc_feature (1)..(277): Homolog of NCBI NO: 15229865 NR Description: syntaxin of plants SYP121 [Arabidopsis thaliana]
  misc_feature (1)..(276): Homolog of NCBI NO: 4206787 NR Description: syntaxin-related protein Nt-syr1 [Nicotiana
MAATASPTAEGSVNLEKFFQEVEQVKEELKELERLHENLRGSHEKSKILHSAKAVKELRLRMDSDVTLALKNAKLVKVRLEALDRSNQTSQSLPGSGPGSSSDRTRTSVVSGLRKKLKDSMDSFNSLRQKISSEYRETVQRRYYTVTGENPDDKTIDLLISTGESETFLQKAIQQQGRASVMDTIQEIQERHDTVKEIERNLNELHQVFLDMAVLVQSQGEQLDDIESHVARANSYVRGGVQQLHVARKHQKNTRKWTCIAIILLIIIILIIVLPIVLRN

SEQ ID NO: 57013 - protein, 219 aa, Glycine max
  peptide (1)..(219): Ceres Seq. ID no. 15179929
  misc_feature (1)..(60): Pfam Name: Syntaxin Pfam Description: Syntaxin
  misc_feature (1)..(215): Homolog of NCBI NO: 5912543 NR Description: Knolle [Capsicum annuum]
  misc_feature (1)..(215): Homolog of NCBI NO: 29788865 NR Description: putative cytokinesis-specific syntaxin-related
  misc_feature (1)..(215): Homolog of NCBI NO: 28974542 NR Description: knolle [Antirrhinum majus]
  misc_feature (1)..(216): Homolog of NCBI NO: 15236285 NR Description: syntaxin of plants SYP123 [Arabidopsis thaliana]
  misc_feature (1)..(214): Homolog of NCBI NO: 15219900 NR Description: syntaxin of plants SYP124 [Arabidopsis thaliana]
  misc_feature (1)..(216): Homolog of NCBI NO: 15220328 NR Description: syntaxin of plants SYP125 [Arabidopsis thaliana]
  misc_feature (1)..(213): Homolog of NCBI NO: 15231205 NR Description: syntaxin of plants SYP122 [Arabidopsis thaliana]
  misc_feature (1)..(213): Homolog of NCBI NO: 11358871 NR Description: syntaxin synt4 [imported] - Arabidopsis thaliana
  misc_feature (1)..(216): Homolog of NCBI NO: 15229865 NR Description: syntaxin of plants SYP121 [Arabidopsis thaliana]
  misc_feature (1)..(215): Homolog of NCBI NO: 4206787 NR Description: syntaxin-related protein Nt-syr1 [Nicotiana
MDSDVTLALKNAKLVKVRLEALDRSNQTSQSLPGSGPGSSSDRTRTSVVSGLRKKLKDSMDSFNSLRQKISSEYRETVQRRYYTVTGENPDDKTIDLLISTGESETFLQKAIQQQGRASVMDTIQEIQERHDTVKEIERNLNELHQVFLDMAVLVQSQGEQLDDIESHVARANSYVRGGVQQLHVARKHQKNTRKWTCIAIILLIIIILIIVLPIVLRN

SEQ ID NO: 57014 - DNA, 1647 bp, Glycine max
  misc_feature (1)..(1647): Ceres Seq. ID no. 14315457
cttgtgttttatggtgtcgtagcctcctccaaaaacagagaagcaccatctcctaacactgctcaaaagcgaaggatggaggttgttttggcgtcgtcgtccgtcgacggcggaatagggtgctgggaccttcacaccggcgcggagcagctccgctacaaatcttgcacctccccttctcatggcctcgtctctgtcgctgctcgcttcatcgcttcgtcgcagcttcgagaagatcaatcagcccctggctctgttctcttctggtcctggtccaagcctcaagttgaagtgaagagttttcctgctgaacaaattaaacctcttgctactaatcacccgggaacctttatagctgctggagctccgtctggtgacatttacttgtgggaggttgaaacgggtaggttgcttaagaagtggcatgctcattttagggcggtttcttgcttggtgttttccgaagatgactcgctgctggtatctggttctgaagatggatccgtaagagtttggtctctcttcatgatatttgatgatttgcgaaatcagcaagcaagtagtctttatgagtatagtttttcagagcacaccctgactgtgactgatgttgttattggtaatggagggtgcaatgcgattatcgtgtcagcttcaaaggatcggacttgtaaggtatggagcttatctaggggaatgctactaagaaatatagtattcccttcaataattaattgcattgcattggatccagccgaacatgtcttttatgctggcagtgaagatggaaagatatttatcgcagcacttaacactgaaagcatcgccactaataattatgggatgcatatcatcagttctttttctaaccacagcaaccaagttacttgcttagcatatggctcaagtgagaatttgttaatatctgggtcagaggatggaatggttcgtgtttggaatgcgagaactcgtaacattgtccgcatgtttaaacattctaaaggacctgtaaataacattctcgttgttagacgagaaaatgactccagtaatcacatatcttctaatgtacaagcatcatcaagaaagcagggatctaatttaccccctccattggaaaaatatgcaaattcaatagatgacgactcagatatgaagactatgatcagccttgggggtggcaggaaatctgtggatccttcatacatcagttctcatgtgatatctaattacattaaggaacttcagcatcaaggttcagctgctgcttctgaaatggagatggagaaactaaaacatgattaccaaaagtcagtgcaaatggctaaccagttgaagaaaatgaatgaaaaattgcatcaattttgtgtaaaggagctgttggatggtagtcaagctagaaccttgggtgaaaatgacaattaagacatttttttttctcttgccagtcacttttctattttgtaggtaaaatgtgtaggatctctggcatcagtagattcccttctgcgagtttgcaattcttcaatgctgctattatattatttttgttgcccctcgtcccctttctctcggtgtgttttgctgctgaatgttgtaaaaagaattttcatcttttgtggatacgataaaagaattgatttctac

SEQ ID NO: 57015 - protein, 449 aa, Glycine max
  peptide (1)..(449): Ceres Seq. ID no. 14315458
  misc_feature (111)..(148): Pfam Name: WD domain, G-beta repeat Pfam Description: WD domain, G-beta repeat
  misc_feature (1)..(242): Homolog of NCBI NO: 7511885 NR Description: hypothetical protein 63B12.7 - fruit fly
  misc_feature (1)..(318): Homolog of NCBI NO: 3025445 NR Description: R32184_1 [Homo sapiens]
  misc_feature (107)..(266): Homolog of NCBI NO: 34897604 NR Description: G-protein beta family-like protein
  misc_feature (1)..(318): Homolog of NCBI NO: 33859749 NR Description: WD repeat domain 18 [Homo sapiens]
  misc_feature (1)..(317): Homolog of NCBI NO: 34862331 NR Description: similar to WD-repeat protein 18 [Rattus
  misc_feature (1)..(381): Homolog of NCBI NO: 20151747 NR Description: RE49866p [Drosophila melanogaster]
  misc_feature (1)..(381): Homolog of NCBI NO: 20128895 NR Description: CG14805-PA [Drosophila melanogaster]
  misc_feature (2)..(266): Homolog of NCBI NO: 33354207 NR Description: transducin / WD-40 repeat protein family -like
  misc_feature (1)..(434): Homolog of NCBI NO: 21592898 NR Description: unknown [Arabidopsis thaliana]
  misc_feature (1)..(434): Homolog of NCBI NO: 15229101 NR Description: transducin / WD-40 repeat protein family
MEVVLASSSVDGGIGCWDLHTGAEQLRYKSCTSPSHGLVSVAARFIASSQLREDQSAPGSVLFWSWSKPQVEVKSFPAEQIKPLATNHPGTFIAAGAPSGDIYLWEVETGRLLKKWHAHFRAVSCLVFSEDDSLLVSGSEDGSVRVWSLFMIFDDLRNQQASSLYEYSFSEHTLTVTDVVIGNGGCNAIIVSASKDRTCKVWSLSRGMLLRNIVFPSIINCIALDPAEHVFYAGSEDGKIFIAALNTESIATNNYGMHIISSFSNHSNQVTCLAYGSSENLLISGSEDGMVRVWNARTRNIVRMFKHSKGPVNNILVVRRENDSSNHISSNVQASSRKQGSNLPPPLEKYANSIDDDSDMKTMISLGGGRKSVDPSYISSHVISNYIKELQHQGSAAASEMEMEKLKHDYQKSVQMANQLKKMNEKLHQFCVKELLDGSQARTLGENDN

SEQ ID NO: 57016 - protein, 299 aa, Glycine max
  peptide (1)..(299): Ceres Seq. ID no. 14315459
  misc_feature (1)..(92): Homolog of NCBI NO: 7511885 NR Description: hypothetical protein 63B12.7 - fruit fly
  misc_feature (1)..(168): Homolog of NCBI NO: 3025445 NR Description: R32184_1 [Homo sapiens]
  misc_feature (1)..(116): Homolog of NCBI NO: 34897604 NR Description: G-protein beta family-like protein
  misc_feature (1)..(168): Homolog of NCBI NO: 33859749 NR Description: WD repeat domain 18 [Homo sapiens]
  misc_feature (1)..(167): Homolog of NCBI NO: 34862331 NR Description: similar to WD-repeat protein 18 [Rattus
  misc_feature (1)..(231): Homolog of NCBI NO: 20151747 NR Description: RE49866p [Drosophila melanogaster]
  misc_feature (1)..(231): Homolog of NCBI NO: 20128895 NR Description: CG14805-PA [Drosophila melanogaster]
  misc_feature (1)..(116): Homolog of NCBI NO: 33354207 NR Description: transducin / WD-40 repeat protein family -like
  misc_feature (1)..(284): Homolog of NCBI NO: 21592898 NR Description: unknown [Arabidopsis thaliana]
  misc_feature (1)..(284): Homolog of NCBI NO: 15229101 NR Description: transducin / WD-40 repeat protein family
MIFDDLRNQQASSLYEYSFSEHTLTVTDVVIGNGGCNAIIVSASKDRTCKVWSLSRGMLLRNIVFPSIINCIALDPAEHVFYAGSEDGKIFIAALNTESIATNNYGMHIISSFSNHSNQVTCLAYGSSENLLISGSEDGMVRVWNARTRNIVRMFKHSKGPVNNILVVRRENDSSNHISSNVQASSRKQGSNLPPPLEKYANSIDDDSDMKTMISLGGGRKSVDPSYISSHVISNYIKELQHQGSAAASEMEMEKLKHDYQKSVQMANQLKKMNEKLHQFCVKELLDGSQARTLGENDN

SEQ ID NO: 57017 - protein, 474 aa, Glycine max
  peptide (1)..(474): Ceres Seq. ID no. 14315460
  misc_feature (136)..(173): Pfam Name: WD domain, G-beta repeat Pfam Description: WD domain, G-beta repeat
  misc_feature (26)..(267): Homolog of NCBI NO: 7511885 NR Description: hypothetical protein 63B12.7 - fruit fly
  misc_feature (26)..(343): Homolog of NCBI NO: 3025445 NR Description: R32184_1 [Homo sapiens]
  misc_feature (132)..(291): Homolog of NCBI NO: 34897604 NR Description: G-protein beta family-like protein
  misc_feature (26)..(343): Homolog of NCBI NO: 33859749 NR Description: WD repeat domain 18 [Homo sapiens]
  misc_feature (26)..(342): Homolog of NCBI NO: 34862331 NR Description: similar to WD-repeat protein 18 [Rattus
  misc_feature (26)..(406): Homolog of NCBI NO: 20151747 NR Description: RE49866p [Drosophila melanogaster]
  misc_feature (26)..(406): Homolog of NCBI NO: 20128895 NR Description: CG14805-PA [Drosophila melanogaster]
  misc_feature (27)..(291): Homolog of NCBI NO: 33354207 NR Description: transducin / WD-40 repeat protein family -like
  misc_feature (26)..(459): Homolog of NCBI NO: 21592898 NR Description: unknown [Arabidopsis thaliana]
  misc_feature (26)..(459): Homolog of NCBI NO: 15229101 NR Description: transducin / WD-40 repeat protein family
LVFYGVVASSKNREAPSPNTAQKRRMEVVLASSSVDGGIGCWDLHTGAEQLRYKSCTSPSHGLVSVAARFIASSQLREDQSAPGSVLFWSWSKPQVEVKSFPAEQIKPLATNHPGTFIAAGAPSGDIYLWEVETGRLLKKWHAHFRAVSCLVFSEDDSLLVSGSEDGSVRVWSLFMIFDDLRNQQASSLYEYSFSEHTLTVTDVVIGNGGCNAIIVSASKDRTCKVWSLSRGMLLRNIVFPSIINCIALDPAEHVFYAGSEDGKIFIAALNTESIATNNYGMHIISSFSNHSNQVTCLAYGSSENLLISGSEDGMVRVWNARTRNIVRMFKHSKGPVNNILVVRRENDSSNHISSNVQASSRKQGSNLPPPLEKYANSIDDDSDMKTMISLGGGRKSVDPSYISSHVISNYIKELQHQGSAAASEMEMEKLKHDYQKSVQMANQLKKMNEKLHQFCVKELLDGSQARTLGENDN

SEQ ID NO: 57018 - DNA, 1689 bp, Glycine max
  misc_feature (1)..(1689): Ceres Seq. ID no. 14315021
aacatacacttcttctattgcgacccatttttccaatccacaatcgtgggagtgagcgaacaactacaaagggatattagatactattgtgagtgagtgcgtgcgattcattgtgtttgtgtagtagtgactttgggttgggtttcgtctcaactcaacaaacgtcgtcgttctgcatttcccaaccttcctccaatggcttctgcttccttaatcaactcgttgacttgttcttcgcgtgctcccactcagcactgttccactttcacccgcaccaccgccgccacgtcactgagacaatttaacagccactgtcggagaccactcgcgacgaggatctcgccgccttccaccgttgtctgcaaagctgtctccgttaagccccaaaccgaaatcgaaggtctcaacattgctgaagatgtcacccagctcatagggaaaacgccaatggtttacctgaacaatatcgtgaagggttctgtggccaatattgctgccaagcttgagattatggagccctgttgtagtgtaaaggacaggattggttttagtatgataaatgatgctgagcagagaggagctataacacctgggaagagtatattggtggaacctactagcggcaacaccggaattggtcttgcctttatagcagcttcaagaggttataaactcattttgacaatgcctgcttcaatgagtttagaaagacgagttctcttgaaagcatttggggccgagcttgttttgactgatgcagcaaagggcatgaatggagcagttcaaaaagctgaagaaattttaaaaagtacccccaatgcatacatgcttcaacaatttgataatccttcaaatcctaagattcattatgagacaactggcccagagatatgggaagatacaagaggaaagatagatattttagttgcaggaattggaactggtggaactgtttctggagttggccaattcctaaaacaacaaaatccaaaaatacaggttattggtgtagagcctctggaaagcaacatacttactggcggaaagccaggacctcacaaaattcagggtattggggctggttttgtgcccaggaatttggatcaagatgtgcttgatgaagttatagcgatatcaagtgatgaagcagttgaaactgcaaagcaattagcactccaggaaggcttgctggtgggaatttcttcaggagctgctgctgcagctgctttgaaggttggaaagaggcctgagaatgcaggcaagcttattggggttgtcttcccaagctttggtgaaagatatttgtctactattcttttccagtcaattcgggaagaatgcgagaaaatgcaacctgagccatgaattgactttgcttgttaatgtttcatactcattctccacgagtatctgtatgtaaatgacagtgtgacatgtccatgttatgtccgtgtttctcatttttgacactcaagaaattagataactgtgtaaaggtcattgacttgacttacagcacagatcaatggcccttgattgaataagttttttttccttctctctttgggctaaaacttttagatgtagtaggaattactggcattgctcttctttttgtatggcagcgtaagaaatttctgtctaatgttcgctattaaaaaataattgatgaaacagtttatctgttgc

SEQ ID NO: 57019 - protein, 389 aa, Glycine max
  peptide (1)..(389): Ceres Seq. ID no. 14315022
  misc_feature (76)..(365): Pfam Name: Pyridoxal-phosphate dependent enzyme Pfam Description: Pyridoxal-phosphate dependent enzyme
  misc_feature (2)..(388): Homolog of NCBI NO: 572517 NR Description: cysteine synthase [Arabidopsis thaliana]
  misc_feature (52)..(388): Homolog of NCBI NO: 12644209 NR Description: CYSTEINE SYNTHASE, CHLOROPLAST PRECURSOR SULFHYDRYLASE) (O-ACETYLSERINE (THIOL)-LYASE) (CSASE B) (CS-B)
  misc_feature (52)..(388): Homolog of NCBI NO: 303902 NR Description: cysteine synthase [Spinacia oleracea]
  misc_feature (6)..(388): Homolog of NCBI NO: 25291707 NR Description: cysteine synthase (EC 4.2.99.8) precursor,
  misc_feature (2)..(388): Homolog of NCBI NO: 15224351 NR Description: cysteine synthase, chloroplast (O-acetylserine
  misc_feature (1)..(388): Homolog of NCBI NO: 12643295 NR Description: CYSTEINE SYNTHASE, MITOCHONDRIAL PRECURSOR SULFHYDRYLASE) (O-ACETYLSERINE (THIOL)-LYASE) (CSASE C) (CS-C)
  misc_feature (1)..(388): Homolog of NCBI NO: 30695056 NR Description: cysteine synthase, mitochondrial (O-acetylserine
  misc_feature (1)..(388): Homolog of NCBI NO: 22331875 NR Description: cysteine synthase, mitochondrial (O-acetylserine
  misc_feature (47)..(388): Homolog of NCBI NO: 11131628 NR Description: Cysteine synthase, chloroplast precursor sulfhydrylase) (O-acetylserine (Thiol)-lyase) (CSase B) (CS-B)
  misc_feature (47)..(388): Homolog of NCBI NO: 12081919 NR Description: plastidic cysteine synthase 1 [Solanum tuberosum]
MASASLINSLTCSSRAPTQHCSTFTRTTAATSLRQFNSHCRRPLATRISPPSTVVCKAVSVKPQTEIEGLNIAEDVTQLIGKTPMVYLNNIVKGSVANIAAKLEIMEPCCSVKDRIGFSMINDAEQRGAITPGKSILVEPTSGNTGIGLAFIAASRGYKLILTMPASMSLERRVLLKAFGAELVLTDAAKGMNGAVQKAEEILKSTPNAYMLQQFDNPSNPKIHYETTGPEIWEDTRGKIDILVAGIGTGGTVSGVGQFLKQQNPKIQVIGVEPLESNILTGGKPGPHKIQGIGAGFVPRNLDQDVLDEVIAISSDEAVETAKQLALQEGLLVGISSGAAAAAALKVGKRPENAGKLIGVVFPSFGERYLSTILFQSIREECEKMQPEP

SEQ ID NO: 57020 - protein, 305 aa, Glycine max
  peptide (1)..(305): Ceres Seq. ID no. 14315023
  misc_feature (1)..(281): Pfam Name: Pyridoxal-phosphate dependent enzyme Pfam Description: Pyridoxal-phosphate dependent enzyme
  misc_feature (1)..(304): Homolog of NCBI NO: 572517 NR Description: cysteine synthase [Arabidopsis thaliana]
  misc_feature (1)..(304): Homolog of NCBI NO: 12644209 NR Description: CYSTEINE SYNTHASE, CHLOROPLAST PRECURSOR SULFHYDRYLASE) (O-ACETYLSERINE (THIOL)-LYASE) (CSASE B) (CS-B)
  misc_feature (1)..(304): Homolog of NCBI NO: 303902 NR Description: cysteine synthase [Spinacia oleracea]
  misc_feature (1)..(304): Homolog of NCBI NO: 25291707 NR Description: cysteine synthase (EC 4.2.99.8) precursor,
  misc_feature (1)..(304): Homolog of NCBI NO: 15224351 NR Description: cysteine synthase, chloroplast (O-acetylserine
  misc_feature (1)..(304): Homolog of NCBI NO: 12643295 NR Description: CYSTEINE SYNTHASE, MITOCHONDRIAL PRECURSOR SULFHYDRYLASE) (O-ACETYLSERINE (THIOL)-LYASE) (CSASE C) (CS-C)
  misc_feature (1)..(304): Homolog of NCBI NO: 30695056 NR Description: cysteine synthase, mitochondrial (O-acetylserine
  misc_feature (1)..(304): Homolog of NCBI NO: 22331875 NR Description: cysteine synthase, mitochondrial (O-acetylserine
  misc_feature (1)..(304): Homolog of NCBI NO: 11131628 NR Description: Cysteine synthase, chloroplast precursor sulfhydrylase) (O-acetylserine (Thiol)-lyase) (CSase B) (CS-B)
  misc_feature (1)..(304): Homolog of NCBI NO: 12081919 NR Description: plastidic cysteine synthase 1 [Solanum tuberosum]
MVYLNNIVKGSVANIAAKLEIMEPCCSVKDRIGFSMINDAEQRGAITPGKSILVEPTSGNTGIGLAFIAASRGYKLILTMPASMSLERRVLLKAFGAELVLTDAAKGMNGAVQKAEEILKSTPNAYMLQQFDNPSNPKIHYETTGPEIWEDTRGKIDILVAGIGTGGTVSGVGQFLKQQNPKIQVIGVEPLESNILTGGKPGPHKIQGIGAGFVPRNLDQDVLDEVIAISSDEAVETAKQLALQEGLLVGISSGAAAAAALKVGKRPENAGKLIGVVFPSFGERYLSTILFQSIREECEKMQPEP

SEQ ID NO: 57021 - protein, 284 aa, Glycine max
  peptide (1)..(284): Ceres Seq. ID no. 14315024
  misc_feature (1)..(260): Pfam Name: Pyridoxal-phosphate dependent enzyme Pfam Description: Pyridoxal-phosphate dependent enzyme
  misc_feature (1)..(283): Homolog of NCBI NO: 572517 NR Description: cysteine synthase [Arabidopsis thaliana]
  misc_feature (1)..(283): Homolog of NCBI NO: 12644209 NR Description: CYSTEINE SYNTHASE, CHLOROPLAST PRECURSOR SULFHYDRYLASE) (O-ACETYLSERINE (THIOL)-LYASE) (CSASE B) (CS-B)
  misc_feature (1)..(283): Homolog of NCBI NO: 303902 NR Description: cysteine synthase [Spinacia oleracea]
  misc_feature (1)..(283): Homolog of NCBI NO: 25291707 NR Description: cysteine synthase (EC 4.2.99.8) precursor,
  misc_feature (1)..(283): Homolog of NCBI NO: 15224351 NR Description: cysteine synthase, chloroplast (O-acetylserine
  misc_feature (1)..(283): Homolog of NCBI NO: 12643295 NR Description: CYSTEINE SYNTHASE, MITOCHONDRIAL PRECURSOR SULFHYDRYLASE) (O-ACETYLSERINE (THIOL)-LYASE) (CSASE C) (CS-C)
  misc_feature (1)..(283): Homolog of NCBI NO: 30695056 NR Description: cysteine synthase, mitochondrial (O-acetylserine
  misc_feature (1)..(283): Homolog of NCBI NO: 22331875 NR Description: cysteine synthase, mitochondrial (O-acetylserine
  misc_feature (1)..(283): Homolog of NCBI NO: 11131628 NR Description: Cysteine synthase, chloroplast precursor sulfhydrylase) (O-acetylserine (Thiol)-lyase) (CSase B) (CS-B)
  misc_feature (1)..(283): Homolog of NCBI NO: 12081919 NR Description: plastidic cysteine synthase 1 [Solanum tuberosum]
MEPCCSVKDRIGFSMINDAEQRGAITPGKSILVEPTSGNTGIGLAFIAASRGYKLILTMPASMSLERRVLLKAFGAELVLTDAAKGMNGAVQKAEEILKSTPNAYMLQQFDNPSNPKIHYETTGPEIWEDTRGKIDILVAGIGTGGTVSGVGQFLKQQNPKIQVIGVEPLESNILTGGKPGPHKIQGIGAGFVPRNLDQDVLDEVIAISSDEAVETAKQLALQEGLLVGISSGAAAAAALKVGKRPENAGKLIGVVFPSFGERYLSTILFQSIREECEKMQPEP

SEQ ID NO: 57022 - DNA, 1589 bp, Glycine max
  misc_feature (1)..(1589): Ceres Seq. ID no. 15168513
gttacatttcttaccctctttgactctctctagtgtcatcaaatgggtacccccggaaatgatgaaccaggtacccagaccccacaaaacacaaaaagttctccccttttcagatacaattcacccttcattcagatcgttttaattgggttggtctgtttctgttgcccgggaatgttcaacgccctctccggcatgggtggcggtggccaagtcaacgcaaccgcctccaacaacgccctcaccgccctctacaccaccttcgccatcttcggcatcctcggcggcggcatctacaacattctcggaccccacctcaccctcttcgcaggttgctccacctacgtcctctacgcaggctccttcctctactacaaccactaccagcaccagttcttcgccatcgtcgccggcgccatcctcggcgtcggcgcagggctcctctgggccgcgcagggcgccatcatgacctcctaccctccggagaatcggaaaggcacttacatttccatcttctggagcatcttcaacatggggggtgtcatcggtggcctaattcccttcattctcaattacaatcgcggtgactcagctgtcactgtcaacgacggaacctacataggattcatggtatttatggccgttggggctgttctgtcgttgaccattttacccgctagcaaggttgttcgcgacgatgggactcggtgtactaaaatgttgtactccaatgcggcaactgaatccgttgaaattctcaagcttttctacaactggaagatgcttctcattattcccgctgcttggtctagtaattttttttatacctaccagtttaaccatgttaataagccgcagttcaatttgaggactagagggttcaacaatgtgttctattggggggcgcagatggtgggttcggttgggattgggtatgtgatggatttcagctttaggagcaggaggaagagaggggttgtggggattggtgtggttgctcttcttgcttctgctatttggggtggtgcacttgcgaatcagattaagcatgaccccggggtgatcttggatttcaaggactccggttctcgctatgctgggccttttgttttgtatttcagttttgggttgcttgatgccgtgttccaaagcatggtctattgggttatcggtgccctggccaatgattctgagattcttagcaggtatgctgggttctataaaggcatacaaagtgcaggggcagcagtggcttggcaaattgataaccataatgtgtccgctatggctcagttgattgtgaattgggtgctcactactgtgagctatccgttgttgttgattttggttgttttggctgtgaaagaaggagacaacaggggagaagaggaacctgtcaaagaggttgctggctttgcccactgatattgttttgttacctgtaaaaatcaactgcatattttgtctttatttctgttatcttgtttttcattgttaccattgtcatcacatataaaagtctgaaatggatgaagatttatctgtatgagttcatgcgtcggagaatattaaaggcaacaaattaatgc

SEQ ID NO: 57023 - protein, 460 aa, Glycine max
  peptide (1)..(460): Ceres Seq. ID no. 15168514
  misc_feature (26)..(176): Pfam Name: Eukaryotic protein of unknown function (DUF895) Pfam Description: Eukaryotic protein of unknown function (DUF895)
  misc_feature (6)..(460): Homolog of NCBI NO: 40745511 NR Description: hypothetical protein AN2562.2 [Aspergillus
  misc_feature (3)..(442): Homolog of NCBI NO: 40743917 NR Description: hypothetical protein AN2699.2 [Aspergillus
  misc_feature (31)..(450): Homolog of NCBI NO: 19114809 NR Description: hypothetical protein [Schizosaccharomyces pombe]
  misc_feature (1)..(456): Homolog of NCBI NO: 40740559 NR Description: hypothetical protein AN8127.2 [Aspergillus
  misc_feature (25)..(424): Homolog of NCBI NO: 19115917 NR Description: hypothetical protein [Schizosaccharomyces pombe]
  misc_feature (15)..(453): Homolog of NCBI NO: 40745401 NR Description: hypothetical protein AN1427.2 [Aspergillus
  misc_feature (25)..(455): Homolog of NCBI NO: 38110995 NR Description: hypothetical protein MG06605.4 [Magnaporthe
  misc_feature (25)..(408): Homolog of NCBI NO: 32419955 NR Description: hypothetical protein [Neurospora crassa]
  misc_feature (15)..(445): Homolog of NCBI NO: 21536696 NR Description: unknown [Arabidopsis thaliana]
  misc_feature (15)..(445): Homolog of NCBI NO: 18394560 NR Description: expressed protein [Arabidopsis thaliana]
MGTPGNDEPGTQTPQNTKSSPLFRYNSPFIQIVLIGLVCFCCPGMFNALSGMGGGGQVNATASNNALTALYTTFAIFGILGGGIYNILGPHLTLFAGCSTYVLYAGSFLYYNHYQHQFFAIVAGAILGVGAGLLWAAQGAIMTSYPPENRKGTYISIFWSIFNMGGVIGGLIPFILNYNRGDSAVTVNDGTYIGFMVFMAVGAVLSLTILPASKVVRDDGTRCTKMLYSNAATESVEILKLFYNWKMLLIIPAAWSSNFFYTYQFNHVNKPQFNLRTRGFNNVFYWGAQMVGSVGIGYVMDFSFRSRRKRGVVGIGVVALLASAIWGGALANQIKHDPGVILDFKDSGSRYAGPFVLYFSFGLLDAVFQSMVYWVIGALANDSEILSRYAGFYKGIQSAGAAVAWQIDNHNVSAMAQLIVNWVLTTVSYPLLLILVVLAVKEGDNRGEEEPVKEVAGFAH

SEQ ID NO: 57024 - protein, 416 aa, Glycine max
  peptide (1)..(416): Ceres Seq. ID no. 15168515
  misc_feature (1)..(132): Pfam Name: Eukaryotic protein of unknown function (DUF895) Pfam Description: Eukaryotic protein of unknown function (DUF895)
  misc_feature (1)..(416): Homolog of NCBI NO: 40745511 NR Description: hypothetical protein AN2562.2 [Aspergillus
  misc_feature (1)..(398): Homolog of NCBI NO: 40743917 NR Description: hypothetical protein AN2699.2 [Aspergillus
  misc_feature (1)..(406): Homolog of NCBI NO: 19114809 NR Description: hypothetical protein [Schizosaccharomyces pombe]
  misc_feature (1)..(412): Homolog of NCBI NO: 40740559 NR Description: hypothetical protein AN8127.2 [Aspergillus
  misc_feature (1)..(380): Homolog of NCBI NO: 19115917 NR Description: hypothetical protein [Schizosaccharomyces pombe]
  misc_feature (1)..(409): Homolog of NCBI NO: 40745401 NR Description: hypothetical protein AN1427.2 [Aspergillus
  misc_feature (1)..(411): Homolog of NCBI NO: 38110995 NR Description: hypothetical protein MG06605.4 [Magnaporthe
  misc_feature (1)..(364): Homolog of NCBI NO: 32419955 NR Description: hypothetical protein [Neurospora crassa]
  misc_feature (1)..(401): Homolog of NCBI NO: 21536696 NR Description: unknown [Arabidopsis thaliana]
  misc_feature (1)..(401): Homolog of NCBI NO: 18394560 NR Description: expressed protein [Arabidopsis thaliana]
MFNALSGMGGGGQVNATASNNALTALYTTFAIFGILGGGIYNILGPHLTLFAGCSTYVLYAGSFLYYNHYQHQFFAIVAGAILGVGAGLLWAAQGAIMTSYPPENRKGTYISIFWSIFNMGGVIGGLIPFILNYNRGDSAVTVNDGTYIGFMVFMAVGAVLSLTILPASKVVRDDGTRCTKMLYSNAATESVEILKLFYNWKMLLIIPAAWSSNFFYTYQFNHVNKPQFNLRTRGFNNVFYWGAQMVGSVGIGYVMDFSFRSRRKRGVVGIGVVALLASAIWGGALANQIKHDPGVILDFKDSGSRYAGPFVLYFSFGLLDAVFQSMVYWVIGALANDSEILSRYAGFYKGIQSAGAAVAWQIDNHNVSAMAQLIVNWVLTTVSYPLLLILVVLAVKEGDNRGEEEPVKEVAGFAH

SEQ ID NO: 57025 - protein, 409 aa, Glycine max
  peptide (1)..(409): Ceres Seq. ID no. 15168516
  misc_feature (1)..(125): Pfam Name: Eukaryotic protein of unknown function (DUF895) Pfam Description: Eukaryotic protein of unknown function (DUF895)
  misc_feature (1)..(409): Homolog of NCBI NO: 40745511 NR Description: hypothetical protein AN2562.2 [Aspergillus
  misc_feature (1)..(391): Homolog of NCBI NO: 40743917 NR Description: hypothetical protein AN2699.2 [Aspergillus
  misc_feature (1)..(399): Homolog of NCBI NO: 19114809 NR Description: hypothetical protein [Schizosaccharomyces pombe]
  misc_feature (1)..(405): Homolog of NCBI NO: 40740559 NR Description: hypothetical protein AN8127.2 [Aspergillus
  misc_feature (1)..(373): Homolog of NCBI NO: 19115917 NR Description: hypothetical protein [Schizosaccharomyces pombe]
  misc_feature (1)..(402): Homolog of NCBI NO: 40745401 NR Description: hypothetical protein AN1427.2 [Aspergillus
  misc_feature (1)..(404): Homolog of NCBI NO: 38110995 NR Description: hypothetical protein MG06605.4 [Magnaporthe
  misc_feature (1)..(357): Homolog of NCBI NO: 32419955 NR Description: hypothetical protein [Neurospora crassa]
  misc_feature (1)..(394): Homolog of NCBI NO: 21536696 NR Description: unknown [Arabidopsis thaliana]
  misc_feature (1)..(394): Homolog of NCBI NO: 18394560 NR Description: expressed protein [Arabidopsis thaliana]
MGGGGQVNATASNNALTALYTTFAIFGILGGGIYNILGPHLTLFAGCSTYVLYAGSFLYYNHYQHQFFAIVAGAILGVGAGLLWAAQGAIMTSYPPENRKGTYISIFWSIFNMGGVIGGLIPFILNYNRGDSAVTVNDGTYIGFMVFMAVGAVLSLTILPASKVVRDDGTRCTKMLYSNAATESVEILKLFYNWKMLLIIPAAWSSNFFYTYQFNHVNKPQFNLRTRGFNNVFYWGAQMVGSVGIGYVMDFSFRSRRKRGVVGIGVVALLASAIWGGALANQIKHDPGVILDFKDSGSRYAGPFVLYFSFGLLDAVFQSMVYWVIGALANDSEILSRYAGFYKGIQSAGAAVAWQIDNHNVSAMAQLIVNWVLTTVSYPLLLILVVLAVKEGDNRGEEEPVKEVAGFAH

SEQ ID NO: 57026 - DNA, 1485 bp, Glycine max
  misc_feature (1)..(1485): Ceres Seq. ID no. 14315491
gagagagagagagagaacttcactcactcactcatgggctgcgtctcctcaaaacacatcaagaaagacctcaagcaagaagaagaagtcactgtcaccaatggcggcggttacgtgaaccacgtggtatccctgacttcctccacctatggagcactaatgctggacaaggagaaggagcaacttcaacttcaacccaccgtcgaagaagaatccaaaacatcccctcctcggattcgcgaagaacccgaagtcatcaacgcttgggaactcatggagggtctcgaagagggagtgcccatttcaaataaccccatgaaaagccccaagtccacacctttccttcgcggattcatctccaccgacccaaaacccaaaattacccccttcaaattccttaaccaattcgggtcccccaagagtctcaggaagttcacagggaaagagaacaaagttcaagttcaaccacccaatgctggtgttagacgcttggactacaatttcagcccaaagggtattctcaaaccctccaatttttgttctcctctaaaagggtctccgattcgtgctcgaaggaacagtttcgggaccgacattaagcgaaggagtcctagtcctctgttcgatccagagcttctcgcctcttacgaaaaggaactctccgaagaggaagaacagatcaagagaatggtgtgggccacccccaagacccgaagagtcagaaaacctttggattcacaaactttcattaagacgtttgaggaaaaattgccccctggaggagaaaactgcgttgtcatttacaccaccacgttacgggggatcagaaaaacgtttgaggagtgcaacaaggtaaggtccattgtcgagtcctattgcgtgcacgtggtggagcgtgacgtgtcaatggattcggggtttaaggaggagttgcggaagctgatggggaccaaacaagttaaggttccggttgtgttcgtgaaaggaaggttggttgggggtgctgaggaaattgtgaagttggaagaagagggaaaattgggtgttctctttgaagggattccccacaaggctttgggggagtgtgaagggtgtggtggtgtgaggtttgtaatgtgcgtggagtgtaatggaagttgtaaggttttggatcatgagaatcacaagaagactctgaggtgtggccagtgtaatgagaatggattgattcagtgtcctatgtgtcgttgaggttgctgaaaatggagtgttggtttgggttttgggatggtttgtttctgttattgatttgtaggaagagagggacagaacaggcatgatgtgcatgtggtccgttgttaatttgtcatgttccttagtgtagggttctaaagcgtgttttagttccctttttgttgtttgattctgtagtttgtcatgtattttgggacactggttgttccttctctagtctaatttaatttgcactatcactagcttcttttt

SEQ ID NO: 57027 - protein, 409 aa, Glycine max
  peptide (1)..(409): Ceres Seq. ID no. 14315492
  misc_feature (265)..(350): Pfam Name: Glutaredoxin Pfam Description: Glutaredoxin
  misc_feature (241)..(408): Homolog of NCBI NO: 17381052 NR Description: putative peptide transporter protein [Arabidopsis
  misc_feature (241)..(408): Homolog of NCBI NO: 15217659 NR Description: peptide transporter -related [Arabidopsis
  misc_feature (250)..(408): Homolog of NCBI NO: 34899868 NR Description: OJ1714_H10.16 [Oryza sativa (japonica
  misc_feature (253)..(408): Homolog of NCBI NO: 15240060 NR Description: hypothetical protein [Arabidopsis thaliana]
  misc_feature (253)..(408): Homolog of NCBI NO: 26451045 NR Description: unknown protein [Arabidopsis thaliana]
  misc_feature (253)..(408): Homolog of NCBI NO: 15240974 NR Description: expressed protein [Arabidopsis thaliana]
  misc_feature (235)..(408): Homolog of NCBI NO: 15223291 NR Description: expressed protein [Arabidopsis thaliana]
  misc_feature (181)..(408): Homolog of NCBI NO: 15235179 NR Description: hypothetical protein [Arabidopsis thaliana]
  misc_feature (55)..(408): Homolog of NCBI NO: 38346321 NR Description: OJ000126_13.3 [Oryza sativa (japonica
  misc_feature (12)..(408): Homolog of NCBI NO: 15237554 NR Description: expressed protein [Arabidopsis thaliana]
ERERENFTHSLMGCVSSKHIKKDLKQEEEVTVTNGGGYVNHVVSLTSSTYGALMLDKEKEQLQLQPTVEEESKTSPPRIREEPEVINAWELMEGLEEGVPISNNPMKSPKSTPFLRGFISTDPKPKITPFKFLNQFGSPKSLRKFTGKENKVQVQPPNAGVRRLDYNFSPKGILKPSNFCSPLKGSPIRARRNSFGTDIKRRSPSPLFDPELLASYEKELSEEEEQIKRMVWATPKTRRVRKPLDSQTFIKTFEEKLPPGGENCVVIYTTTLRGIRKTFEECNKVRSIVESYCVHVVERDVSMDSGFKEELRKLMGTKQVKVPVVFVKGRLVGGAEEIVKLEEEGKLGVLFEGIPHKALGECEGCGGVRFVMCVECNGSCKVLDHENHKKTLRCGQCNENGLIQCPMCR

SEQ ID NO: 57028 - protein, 398 aa, Glycine max
  peptide (1)..(398): Ceres Seq. ID no. 14315493
  misc_feature (254)..(339): Pfam Name: Glutaredoxin Pfam Description: Glutaredoxin
  misc_feature (230)..(397): Homolog of NCBI NO: 17381052 NR Description: putative peptide transporter protein [Arabidopsis
  misc_feature (230)..(397): Homolog of NCBI NO: 15217659 NR Description: peptide transporter -related [Arabidopsis
  misc_feature (239)..(397): Homolog of NCBI NO: 34899868 NR Description: OJ1714_H10.16 [Oryza sativa (japonica
  misc_feature (242)..(397): Homolog of NCBI NO: 15240060 NR Description: hypothetical protein [Arabidopsis thaliana]
  misc_feature (242)..(397): Homolog of NCBI NO: 26451045 NR Description: unknown protein [Arabidopsis thaliana]
  misc_feature (242)..(397): Homolog of NCBI NO: 15240974 NR Description: expressed protein [Arabidopsis thaliana]
  misc_feature (224)..(397): Homolog of NCBI NO: 15223291 NR Description: expressed protein [Arabidopsis thaliana]
  misc_feature (170)..(397): Homolog of NCBI NO: 15235179 NR Description: hypothetical protein [Arabidopsis thaliana]
  misc_feature (44)..(397): Homolog of NCBI NO: 38346321 NR Description: OJ000126_13.3 [Oryza sativa (japonica
  misc_feature (1)..(397): Homolog of NCBI NO: 15237554 NR Description: expressed protein [Arabidopsis thaliana]
MGCVSSKHIKKDLKQEEEVTVTNGGGYVNHVVSLTSSTYGALMLDKEKEQLQLQPTVEEESKTSPPRIREEPEVINAWELMEGLEEGVPISNNPMKSPKSTPFLRGFISTDPKPKITPFKFLNQFGSPKSLRKFTGKENKVQVQPPNAGVRRLDYNFSPKGILKPSNFCSPLKGSPIRARRNSFGTDIKRRSPSPLFDPELLASYEKELSEEEEQIKRMVWATPKTRRVRKPLDSQTFIKTFEEKLPPGGENCVVIYTTTLRGIRKTFEECNKVRSIVESYCVHVVERDVSMDSGFKEELRKLMGTKQVKVPVVFVKGRLVGGAEEIVKLEEEGKLGVLFEGIPHKALGECEGCGGVRFVMCVECNGSCKVLDHENHKKTLRCGQCNENGLIQCPMCR

SEQ ID NO: 57029 - protein, 356 aa, Glycine max
  peptide (1)..(356): Ceres Seq. ID no. 14315494
  misc_feature (212)..(297): Pfam Name: Glutaredoxin Pfam Description: Glutaredoxin
  misc_feature (188)..(355): Homolog of NCBI NO: 17381052 NR Description: putative peptide transporter protein [Arabidopsis
  misc_feature (188)..(355): Homolog of NCBI NO: 15217659 NR Description: peptide transporter -related [Arabidopsis
  misc_feature (197)..(355): Homolog of NCBI NO: 34899868 NR Description: OJ1714_H10.16 [Oryza sativa (japonica
  misc_feature (200)..(355): Homolog of NCBI NO: 15240060 NR Description: hypothetical protein [Arabidopsis thaliana]
  misc_feature (200)..(355): Homolog of NCBI NO: 26451045 NR Description: unknown protein [Arabidopsis thaliana]
  misc_feature (200)..(355): Homolog of NCBI NO: 15240974 NR Description: expressed protein [Arabidopsis thaliana]
  misc_feature (182)..(355): Homolog of NCBI NO: 15223291 NR Description: expressed protein [Arabidopsis thaliana]
  misc_feature (128)..(355): Homolog of NCBI NO: 15235179 NR Description: hypothetical protein [Arabidopsis thaliana]
  misc_feature (2)..(355): Homolog of NCBI NO: 38346321 NR Description: OJ000126_13.3 [Oryza sativa (japonica
  misc_feature (1)..(355): Homolog of NCBI NO: 15237554 NR Description: expressed protein [Arabidopsis thaliana]
MLDKEKEQLQLQPTVEEESKTSPPRIREEPEVINAWELMEGLEEGVPISNNPMKSPKSTPFLRGFISTDPKPKITPFKFLNQFGSPKSLRKFTGKENKVQVQPPNAGVRRLDYNFSPKGILKPSNFCSPLKGSPIRARRNSFGTDIKRRSPSPLFDPELLASYEKELSEEEEQIKRMVWATPKTRRVRKPLDSQTFIKTFEEKLPPGGENCVVIYTTTLRGIRKTFEECNKVRSIVESYCVHVVERDVSMDSGFKEELRKLMGTKQVKVPVVFVKGRLVGGAEEIVKLEEEGKLGVLFEGIPHKALGECEGCGGVRFVMCVECNGSCKVLDHENHKKTLRCGQCNENGLIQCPMCR

SEQ ID NO: 57030 - DNA, 1358 bp, Glycine max
  misc_feature (1)..(1358): Ceres Seq. ID no. 14312893
gttcgttccctctcaaccaaaaccaaccacttcatgttatcattgctatgacccttcaagcttttcatggctctgcatgttgtttccgttcccaccttcttcacttttcttcttccaccgcttcatctccaccattccttgcttcgaggaggttccaatcatgcccttcaacaagaaaatctctcaagttgaattgcagttcaagtggcaataatggtgaccaagattaccttctggatgctccagtttctgttggagatggattctctttcagtggagggaagtattcagatggccctagtccaagtgatgaatggtttaagcaagggaaaaaggttaaagcctattcaatacctggcactggtgaaaaggcaaaagatccaatttttggacttgctatgggttccggttctcaagctactggcgatcgtttcagatggttttgtgttgaaagcggaagtgctgataatccttcagtgatattaatccatggtttcccttcacaggcatattcttaccgcaaagttcttccagtactctccaaggactatcacgtcatagcctttgactggctaggatttgggttttctgacaagcctcaacccagatatgggtttgactacacactggatgagtatgtctcatcattggagtcacttattgatgaactggctgctactaaagtctcacttgttgtccagggatatttttcgcctgttgtagccaagtatgccagcattcaccaggaaaaagtcagaaacttaatactccttaatccgcctctaacagcccaacatgccaagcttccaccaacattgtccatattcagcaactttctactaggtgaaatattttcacaggatccattaagggccagtgacaaagctctaacaagctgtggcccctataaaatgaaagaagaagatgcaatggtctatcgaagaccctatcttacatctggttcctctggctttgctctaaatgcaattagcaggaacatgaacaaagacctcaagagatatgtggaggatatgcaaacaatactgaaggacaaaaattggaaagttcaaaccacaatatgttggggccaaagagaccgctggttgagctatgatggagtggaggatttctgcaaggattccaatcataaactcattgatgttcctacggctggtcatcatgtgcaggaagattgtggcgaagaagttggacaacttattcgtgggataataagcaaaaggaccaagatataggatattttctcattgcttcttgagatgctgaacaaatttttttgttacatggattcctatcttttccttggtctctatccttccaataaatcttgattcaattcc

SEQ ID NO: 57031 - protein, 416 aa, Glycine max
  peptide (1)..(416): Ceres Seq. ID no. 14312894
  misc_feature (183)..(412): Pfam Name: alpha/beta hydrolase fold Pfam Description: alpha/beta hydrolase fold
  misc_feature (140)..(396): Homolog of NCBI NO: 17228848 NR Description: putative hydrolase [Nostoc sp. PCC 7120]
  misc_feature (146)..(406): Homolog of NCBI NO: 23041852 NR Description: hypothetical protein [Trichodesmium erythraeum
  misc_feature (32)..(407): Homolog of NCBI NO: 25405562 NR Description: hypothetical protein F6D8.27 [imported] -
  misc_feature (142)..(402): Homolog of NCBI NO: 23130266 NR Description: hypothetical protein [Nostoc punctiforme]
  misc_feature (32)..(407): Homolog of NCBI NO: 22330196 NR Description: hydrolase, alpha/beta fold family [Arabidopsis
  misc_feature (136)..(410): Homolog of NCBI NO: 38344893 NR Description: OSJNBa0033G05.17 [Oryza sativa (japonica
  misc_feature (338)..(388): Homolog of NCBI NO: 7487267 NR Description: hypothetical protein T20K18.180 - Arabidopsis
  misc_feature (28)..(286): Homolog of NCBI NO: 7487267 NR Description: hypothetical protein T20K18.180 - Arabidopsis
  misc_feature (28)..(412): Homolog of NCBI NO: 21537159 NR Description: hydrolase-like protein [Arabidopsis thaliana]
  misc_feature (28)..(412): Homolog of NCBI NO: 18413878 NR Description: hydrolase, alpha/beta fold family [Arabidopsis
SFPLNQNQPLHVIIAMTLQAFHGSACCFRSHLLHFSSSTASSPPFLASRRFQSCPSTRKSLKLNCSSSGNNGDQDYLLDAPVSVGDGFSFSGGKYSDGPSPSDEWFKQGKKVKAYSIPGTGEKAKDPIFGLAMGSGSQATGDRFRWFCVESGSADNPSVILIHGFPSQAYSYRKVLPVLSKDYHVIAFDWLGFGFSDKPQPRYGFDYTLDEYVSSLESLIDELAATKVSLVVQGYFSPVVAKYASIHQEKVRNLILLNPPLTAQHAKLPPTLSIFSNFLLGEIFSQDPLRASDKALTSCGPYKMKEEDAMVYRRPYLTSGSSGFALNAISRNMNKDLKRYVEDMQTILKDKNWKVQTTICWGQRDRWLSYDGVEDFCKDSNHKLIDVPTAGHHVQEDCGEEVGQLIRGIISKRTKI

SEQ ID NO: 57032 - protein, 401 aa, Glycine max
  peptide (1)..(401): Ceres Seq. ID no. 14312895
  misc_feature (168)..(397): Pfam Name: alpha/beta hydrolase fold Pfam Description: alpha/beta hydrolase fold
  misc_feature (125)..(381): Homolog of NCBI NO: 17228848 NR Description: putative hydrolase [Nostoc sp. PCC 7120]
  misc_feature (131)..(391): Homolog of NCBI NO: 23041852 NR Description: hypothetical protein [Trichodesmium erythraeum
  misc_feature (17)..(392): Homolog of NCBI NO: 25405562 NR Description: hypothetical protein F6D8.27 [imported] -
  misc_feature (127)..(387): Homolog of NCBI NO: 23130266 NR Description: hypothetical protein [Nostoc punctiforme]
  misc_feature (17)..(392): Homolog of NCBI NO: 22330196 NR Description: hydrolase, alpha/beta fold family [Arabidopsis
  misc_feature (121)..(395): Homolog of NCBI NO: 38344893 NR Description: OSJNBa0033G05.17 [Oryza sativa (japonica
  misc_feature (323)..(373): Homolog of NCBI NO: 7487267 NR Description: hypothetical protein T20K18.180 - Arabidopsis
  misc_feature (13)..(271): Homolog of NCBI NO: 7487267 NR Description: hypothetical protein T20K18.180 - Arabidopsis
  misc_feature (13)..(397): Homolog of NCBI NO: 21537159 NR Description: hydrolase-like protein [Arabidopsis thaliana]
  misc_feature (13)..(397): Homolog of NCBI NO: 18413878 NR Description: hydrolase, alpha/beta fold family [Arabidopsis
MTLQAFHGSACCFRSHLLHFSSSTASSPPFLASRRFQSCPSTRKSLKLNCSSSGNNGDQDYLLDAPVSVGDGFSFSGGKYSDGPSPSDEWFKQGKKVKAYSIPGTGEKAKDPIFGLAMGSGSQATGDRFRWFCVESGSADNPSVILIHGFPSQAYSYRKVLPVLSKDYHVIAFDWLGFGFSDKPQPRYGFDYTLDEYVSSLESLIDELAATKVSLVVQGYFSPVVAKYASIHQEKVRNLILLNPPLTAQHAKLPPTLSIFSNFLLGEIFSQDPLRASDKALTSCGPYKMKEEDAMVYRRPYLTSGSSGFALNAISRNMNKDLKRYVEDMQTILKDKNWKVQTTICWGQRDRWLSYDGVEDFCKDSNHKLIDVPTAGHHVQEDCGEEVGQLIRGIISKRTKI

SEQ ID NO: 57033 - protein, 284 aa, Glycine max
  peptide (1)..(284): Ceres Seq. ID no. 14312896
  misc_feature (51)..(280): Pfam Name: alpha/beta hydrolase fold Pfam Description: alpha/beta hydrolase fold
  misc_feature (8)..(264): Homolog of NCBI NO: 17228848 NR Description: putative hydrolase [Nostoc sp. PCC 7120]
  misc_feature (14)..(274): Homolog of NCBI NO: 23041852 NR Description: hypothetical protein [Trichodesmium erythraeum
  misc_feature (1)..(275): Homolog of NCBI NO: 25405562 NR Description: hypothetical protein F6D8.27 [imported] -
  misc_feature (10)..(270): Homolog of NCBI NO: 23130266 NR Description: hypothetical protein [Nostoc punctiforme]
  misc_feature (1)..(275): Homolog of NCBI NO: 22330196 NR Description: hydrolase, alpha/beta fold family [Arabidopsis
  misc_feature (4)..(278): Homolog of NCBI NO: 38344893 NR Description: OSJNBa0033G05.17 [Oryza sativa (japonica
  misc_feature (206)..(256): Homolog of NCBI NO: 7487267 NR Description: hypothetical protein T20K18.180 - Arabidopsis
  misc_feature (1)..(154): Homolog of NCBI NO: 7487267 NR Description: hypothetical protein T20K18.180 - Arabidopsis
  misc_feature (1)..(280): Homolog of NCBI NO: 21537159 NR Description: hydrolase-like protein [Arabidopsis thaliana]
  misc_feature (1)..(280): Homolog of NCBI NO: 18413878 NR Description: hydrolase, alpha/beta fold family [Arabidopsis
MGSGSQATGDRFRWFCVESGSADNPSVILIHGFPSQAYSYRKVLPVLSKDYHVIAFDWLGFGFSDKPQPRYGFDYTLDEYVSSLESLIDELAATKVSLVVQGYFSPVVAKYASIHQEKVRNLILLNPPLTAQHAKLPPTLSIFSNFLLGEIFSQDPLRASDKALTSCGPYKMKEEDAMVYRRPYLTSGSSGFALNAISRNMNKDLKRYVEDMQTILKDKNWKVQTTICWGQRDRWLSYDGVEDFCKDSNHKLIDVPTAGHHVQEDCGEEVGQLIRGIISKRTKI

SEQ ID NO: 57034 - DNA, 1202 bp, Glycine max
  misc_feature (1)..(1202): Ceres Seq. ID no. 15168484
gtaacaccgttgttcgaaacttcaaatcaaaaaaagctcagagaacccatcccgccgccgccgtgtactccgaccgccacctccattcgccgatgtactctcaatcccttggtaattattgatttcttctattatcctttgagttaaagtcgaaggagtgcgattattctgatttgagaagcaaaaataccaaagagtgaagaaaagaaaagaaaaaatgctgtacataattggtttagggttgggtgatgagcaagacatcactctcaaaggcttggaagctgtgaagaagtgcagcaaggtttacatggaagcctacacttccctcctctcctttggtctctccaccaatggcatctccaacctggaaaaactatacggtaaacccattattcttgctgacagagaaatggtagaagaaaaggctgatgaaattctctctgaagctgatcatgcccatgttgctttccttgttgttggggatccttttggggctaccactcacactgacctggttgttcgagcaaagaagatggcaattgaagtcaaagtagtacacaatgcatctgtgatgaatgctattggagtttgtggtctacagctttaccgttatggggagaccgtttctataccattctttacagagacttggagacctgatagcttctatgaaaagattcaaagaaacctatcaatgggactgcacacgctttgcttgttagatattcgtgtgaaggaacccacactagaatctttgtgcagaggaagaaaagcttatgaaccacccagatatatgacaataaacacagccattgagcagctcttggagattgtgcaagcacgtgaagaacctgcatatactgaggataccgagtgtgttgggcttgcacggcttgggagtgaagatcagatgatagtagctggaacaatgaagcagttgcagatggttgattttggagcacctttgcattgccttgttataacaggccagacccatcctgtggaggaagaaatgctgtatttttacagatgcaggacatcgatacaacattaagacagcagcaccagtttaatttagcaaaaaagacttgtttgtttcttttgaaggaacccttgtatttttgttcttcctgtaaaaactttttggttgctaatcagggccaaaattaactaaattcattggtggctgaaaaattatgggc

SEQ ID NO: 57035 - protein, 278 aa, Glycine max
  peptide (1)..(278): Ceres Seq. ID no. 15168485
  misc_feature (1)..(207): Pfam Name: Tetrapyrrole (Corrin/Porphyrin) Methylases Pfam Description: Tetrapyrrole (Corrin/Porphyrin) Methylases
  misc_feature (1)..(270): Homolog of NCBI NO: 28572120 NR Description: Diphthamide methyltransferase CG31289-PA
  misc_feature (1)..(270): Homolog of NCBI NO: 19075941 NR Description: putative diphthine synthase [Schizosaccharomyces
  misc_feature (1)..(257): Homolog of NCBI NO: 7706272 NR Description: CGI-30 protein [Homo sapiens]
  misc_feature (1)..(92): Homolog of NCBI NO: 34859873 NR Description: similar to RIKEN cDNA 2410012M04 [Rattus
  misc_feature (87)..(270): Homolog of NCBI NO: 34859873 NR Description: similar to RIKEN cDNA 2410012M04 [Rattus
  misc_feature (1)..(273): Homolog of NCBI NO: 28829458 NR Description: similar to Arabidopsis thaliana (Mouse-ear Methyltransferase - like protein (Methyltransferase-like protein)
  misc_feature (1)..(270): Homolog of NCBI NO: 31753136 NR Description: Unknown (protein for MGC:61450) [Homo sapiens]
  misc_feature (1)..(270): Homolog of NCBI NO: 12845949 NR Description: unnamed protein product [Mus musculus]
  misc_feature (1)..(270): Homolog of NCBI NO: 40254183 NR Description: RIKEN cDNA 2410012M04 [Mus musculus]
  misc_feature (1)..(274): Homolog of NCBI NO: 15236075 NR Description: methyltransferase - like protein [Arabidopsis
MLYIIGLGLGDEQDITLKGLEAVKKCSKVYMEAYTSLLSFGLSTNGISNLEKLYGKPIILADREMVEEKADEILSEADHAHVAFLVVGDPFGATTHTDLVVRAKKMAIEVKVVHNASVMNAIGVCGLQLYRYGETVSIPFFTETWRPDSFYEKIQRNLSMGLHTLCLLDIRVKEPTLESLCRGRKAYEPPRYMTINTAIEQLLEIVQAREEPAYTEDTECVGLARLGSEDQMIVAGTMKQLQMVDFGAPLHCLVITGQTHPVEEEMLYFYRCRTSIQH

SEQ ID NO: 57036 - protein, 248 aa, Glycine max
  peptide (1)..(248): Ceres Seq. ID no. 15168486
  misc_feature (1)..(177): Pfam Name: Tetrapyrrole (Corrin/Porphyrin) Methylases Pfam Description: Tetrapyrrole (Corrin/Porphyrin) Methylases
  misc_feature (1)..(240): Homolog of NCBI NO: 28572120 NR Description: Diphthamide methyltransferase CG31289-PA
  misc_feature (1)..(240): Homolog of NCBI NO: 19075941 NR Description: putative diphthine synthase [Schizosaccharomyces
  misc_feature (1)..(227): Homolog of NCBI NO: 7706272 NR Description: CGI-30 protein [Homo sapiens]
  misc_feature (1)..(62): Homolog of NCBI NO: 34859873 NR Description: similar to RIKEN cDNA 2410012M04 [Rattus
  misc_feature (57)..(240): Homolog of NCBI NO: 34859873 NR Description: similar to RIKEN cDNA 2410012M04 [Rattus
  misc_feature (1)..(243): Homolog of NCBI NO: 28829458 NR Description: similar to Arabidopsis thaliana (Mouse-ear Methyltransferase - like protein (Methyltransferase-like protein)
  misc_feature (1)..(240): Homolog of NCBI NO: 31753136 NR Description: Unknown (protein for MGC:61450) [Homo sapiens]
  misc_feature (1)..(240): Homolog of NCBI NO: 12845949 NR Description: unnamed protein product [Mus musculus]
  misc_feature (1)..(240): Homolog of NCBI NO: 40254183 NR Description: RIKEN cDNA 2410012M04 [Mus musculus]
  misc_feature (1)..(244): Homolog of NCBI NO: 15236075 NR Description: methyltransferase - like protein [Arabidopsis
MEAYTSLLSFGLSTNGISNLEKLYGKPIILADREMVEEKADEILSEADHAHVAFLVVGDPFGATTHTDLVVRAKKMAIEVKVVHNASVMNAIGVCGLQLYRYGETVSIPFFTETWRPDSFYEKIQRNLSMGLHTLCLLDIRVKEPTLESLCRGRKAYEPPRYMTINTAIEQLLEIVQAREEPAYTEDTECVGLARLGSEDQMIVAGTMKQLQMVDFGAPLHCLVITGQTHPVEEEMLYFYRCRTSIQH

SEQ ID NO: 57037 - protein, 214 aa, Glycine max
  peptide (1)..(214): Ceres Seq. ID no. 15168487
  misc_feature (1)..(143): Pfam Name: Tetrapyrrole (Corrin/Porphyrin) Methylases Pfam Description: Tetrapyrrole (Corrin/Porphyrin) Methylases
  misc_feature (1)..(206): Homolog of NCBI NO: 28572120 NR Description: Diphthamide methyltransferase CG31289-PA
  misc_feature (1)..(206): Homolog of NCBI NO: 19075941 NR Description: putative diphthine synthase [Schizosaccharomyces
  misc_feature (1)..(193): Homolog of NCBI NO: 7706272 NR Description: CGI-30 protein [Homo sapiens]
  misc_feature (1)..(28): Homolog of NCBI NO: 34859873 NR Description: similar to RIKEN cDNA 2410012M04 [Rattus
  misc_feature (23)..(206): Homolog of NCBI NO: 34859873 NR Description: similar to RIKEN cDNA 2410012M04 [Rattus
  misc_feature (1)..(209): Homolog of NCBI NO: 28829458 NR Description: similar to Arabidopsis thaliana (Mouse-ear Methyltransferase - like protein (Methyltransferase-like protein)
  misc_feature (1)..(206): Homolog of NCBI NO: 31753136 NR Description: Unknown (protein for MGC:61450) [Homo sapiens]
  misc_feature (1)..(206): Homolog of NCBI NO: 12845949 NR Description: unnamed protein product [Mus musculus]
  misc_feature (1)..(206): Homolog of NCBI NO: 40254183 NR Description: RIKEN cDNA 2410012M04 [Mus musculus]
  misc_feature (1)..(210): Homolog of NCBI NO: 15236075 NR Description: methyltransferase - like protein [Arabidopsis
MVEEKADEILSEADHAHVAFLVVGDPFGATTHTDLVVRAKKMAIEVKVVHNASVMNAIGVCGLQLYRYGETVSIPFFTETWRPDSFYEKIQRNLSMGLHTLCLLDIRVKEPTLESLCRGRKAYEPPRYMTINTAIEQLLEIVQAREEPAYTEDTECVGLARLGSEDQMIVAGTMKQLQMVDFGAPLHCLVITGQTHPVEEEMLYFYRCRTSIQH

SEQ ID NO: 57038 - DNA, 731 bp, Glycine max
  misc_feature (1)..(731): Ceres Seq. ID no. 13594213
agcatcaattaataaaactattcaactcacttaagcctgcacaaaaacaacttaatagaagatgccttccaagaggcttcaatggagatccttagtacttggttgtttcaaggccaccaagaaccaatccttggaatctccaaacatagtttccaagaaatcatcttcaagtagaatcttcctttctgatttaagcctaagcgattattcatcagtttctatcatgagtgatttgtccaattctctcgtgggatcaaatcttcgtattttcacctaccaagagctctctgaggttacacacaacttcagcaaatccaactatcttggggaaggtgggtttgggaaggtgtataaaggatttattgatgacaatcttaaacgtggattgaaagctcagactgtggcagttaaggccttaaacttggatggaaaacaaggccacagagagtggttggctgaagtaatctttctggggcaattgaaacatcgccatctggttaacttaattggctactgctgtgaagatgagcataggcttcttgtgtatgagtacatggagaggggcaatctagaggaaaagcttttnnnnggttatttagcagccttgccttggctaacaagaatcaaaatagcaattggggccgcaaagggacttatgtttcttcatgaagaagagaaaccagtcatatatagagatatcaaggcctcaaacattctattagactctgatt

SEQ ID NO: 57039 - protein, 223 aa, Glycine max
  peptide (1)..(223): Ceres Seq. ID no. 13594214
  misc_feature (82)..(222): Pfam Name: Protein kinase domain Pfam Description: Protein kinase domain
  misc_feature (1)..(222): Homolog of NCBI NO: 37534008 NR Description: putative serine/threonine protein kinase
  misc_feature (4)..(222): Homolog of NCBI NO: 15238553 NR Description: protein kinase, putative [Arabidopsis thaliana]
  misc_feature (4)..(222): Homolog of NCBI NO: 10176804 NR Description: serine/threonine protein kinase-like [Arabidopsis
  misc_feature (131)..(222): Homolog of NCBI NO: 27436752 NR Description: Putative serine/threonine protein kinase
  misc_feature (29)..(131): Homolog of NCBI NO: 27436752 NR Description: Putative serine/threonine protein kinase
  misc_feature (4)..(222): Homolog of NCBI NO: 15225277 NR Description: protein kinase, putative [Arabidopsis thaliana]
  misc_feature (5)..(222): Homolog of NCBI NO: 15218526 NR Description: protein kinase, putative [Arabidopsis thaliana]
  misc_feature (4)..(222): Homolog of NCBI NO: 15225019 NR Description: protein kinase, putative [Arabidopsis thaliana]
  misc_feature (6)..(222): Homolog of NCBI NO: 14484938 NR Description: auxin-regulated dual specificity cytosolic kinase
  misc_feature (5)..(222): Homolog of NCBI NO: 30013675 NR Description: Avr9/Cf-9 rapidly elicited protein 264 [Nicotiana
  misc_feature (175)..(175): Xaa is any aa, unknown or other
  misc_feature (176)..(176): Xaa is any aa, unknown or other
MPSKRLQWRSLVLGCFKATKNQSLESPNIVSKKSSSSRIFLSDLSLSDYSSVSIMSDLSNSLVGSNLRIFTYQELSEVTHNFSKSNYLGEGGFGKVYKGFIDDNLKRGLKAQTVAVKALNLDGKQGHREWLAEVIFLGQLKHRHLVNLIGYCCEDEHRLLVYEYMERGNLEEKLXXGYLAALPWLTRIKIAIGAAKGLMFLHEEEKPVIYRDIKASNILLDSD

SEQ ID NO: 57040 - protein, 169 aa, Glycine max
  peptide (1)..(169): Ceres Seq. ID no. 13594215
  misc_feature (28)..(168): Pfam Name: Protein kinase domain Pfam Description: Protein kinase domain
  misc_feature (1)..(168): Homolog of NCBI NO: 37534008 NR Description: putative serine/threonine protein kinase
  misc_feature (1)..(168): Homolog of NCBI NO: 15238553 NR Description: protein kinase, putative [Arabidopsis thaliana]
  misc_feature (1)..(168): Homolog of NCBI NO: 10176804 NR Description: serine/threonine protein kinase-like [Arabidopsis
  misc_feature (77)..(168): Homolog of NCBI NO: 27436752 NR Description: Putative serine/threonine protein kinase
  misc_feature (1)..(77): Homolog of NCBI NO: 27436752 NR Description: Putative serine/threonine protein kinase
  misc_feature (1)..(168): Homolog of NCBI NO: 15225277 NR Description: protein kinase, putative [Arabidopsis thaliana]
  misc_feature (1)..(168): Homolog of NCBI NO: 15218526 NR Description: protein kinase, putative [Arabidopsis thaliana]
  misc_feature (1)..(168): Homolog of NCBI NO: 15225019 NR Description: protein kinase, putative [Arabidopsis thaliana]
  misc_feature (1)..(168): Homolog of NCBI NO: 14484938 NR Description: auxin-regulated dual specificity cytosolic kinase
  misc_feature (1)..(168): Homolog of NCBI NO: 30013675 NR Description: Avr9/Cf-9 rapidly elicited protein 264 [Nicotiana
  misc_feature (121)..(121): Xaa is any aa, unknown or other
  misc_feature (122)..(122): Xaa is any aa, unknown or other
MSDLSNSLVGSNLRIFTYQELSEVTHNFSKSNYLGEGGFGKVYKGFIDDNLKRGLKAQTVAVKALNLDGKQGHREWLAEVIFLGQLKHRHLVNLIGYCCEDEHRLLVYEYMERGNLEEKLXXGYLAALPWLTRIKIAIGAAKGLMFLHEEEKPVIYRDIKASNILLDSD

SEQ ID NO: 57041 - DNA, 1200 bp, Glycine max
  misc_feature (1)..(1200): Ceres Seq. ID no. 15168500
taacacacaacacaacacaaacactacatagacattgaatcaaaaatcaatggtggttgcatccattcgtcttcttccttctccattcctctctttcgcgcctcgtttctctccatattcatattcatggcgctgccgtccctcttccaccattcccttttcttccatccactccaaagcttctactaagggagatggtggagtagtggaatttggtggtgatcaaacagagcttatatttttggggactggaaccagtgaaggggttccacgtgtcagctgcttgactaatcctttacacaaatgtgaggtgtgttcaaaagctgctcaaccgggtaataagaataggagacttaacacaagcatcctcattcgtcaccccggttcctcaggaacacacaataatattcttatagatgctggaaaatttttctatcacagtgctctccggtggtttcctgcttttgggataagaacaattgatgcggtcattattactcattcacatgctgatgcaatcggaggtcttgatgatcttagagattggacaaacaatgttcagcctcatattccaatatatgtagccaagcgtgactttgaggtgatgacaaagacccattattatttagtagatactagtgttatcttacctggtgcccaagtctcagagttgcaattcaatatcgtatcagaagaaccattttttgtacatggactgaagttcaccccattaccagtgtggcacggccagaattatcggtcccttggttttcgttttggtaatatatgttacattagtgatgtcagcgacattcctgaagaaacatatccacttctgaaggactgtgaaattctaatcccggatgctttgaggcctgattgctctacttctacacattttggacttcaaagggccttggacgaagtgcgaaaaattcaacccaaaagaacactttttaccggtatgatgcatctgatggatcatgaagaagtgaatgactcccttgcgaagctattggagtctgaaggccttgatgcacaactgagctatgacgggcttcgtataccaattagactctagtttgtatacagtctctttcataagatgactttttttttttttctcaaagagaaattattaaataaacattcaaataattttacaagttcatacattctgcaggttcctgcatctattct

SEQ ID NO: 57042 - protein, 343 aa, Glycine max
  peptide (1)..(343): Ceres Seq. ID no. 15168501
  misc_feature (102)..(306): Pfam Name: Metallo-beta-lactamase superfamily Pfam Description: Metallo-beta-lactamase superfamily
  misc_feature (65)..(341): Homolog of NCBI NO: 23501878 NR Description: conserved hypothetical protein [Brucella suis
  misc_feature (65)..(341): Homolog of NCBI NO: 17987268 NR Description: PHNP PROTEIN [Brucella melitensis]
  misc_feature (85)..(341): Homolog of NCBI NO: 32477197 NR Description: phnP protein homolog-putative hydrolase
  misc_feature (58)..(321): Homolog of NCBI NO: 15236346 NR Description: hydrolase -related [Arabidopsis thaliana]
  misc_feature (43)..(264): Homolog of NCBI NO: 30691663 NR Description: expressed protein [Arabidopsis thaliana]
  misc_feature (43)..(264): Homolog of NCBI NO: 25513552 NR Description: 36.3K hypothetical protein F12P21.8 - Arabidopsis
  misc_feature (60)..(332): Homolog of NCBI NO: 19075752 NR Description: putative hydrolase [Schizosaccharomyces pombe]
  misc_feature (296)..(343): Homolog of NCBI NO: 15231379 NR Description: hydrolase, putative [Arabidopsis thaliana]
  misc_feature (45)..(268): Homolog of NCBI NO: 15231379 NR Description: hydrolase, putative [Arabidopsis thaliana]
  misc_feature (45)..(343): Homolog of NCBI NO: 9294602 NR Description: hydrolase-like protein [Arabidopsis thaliana]
MVVASIRLLPSPFLSFAPRFSPYSYSWRCRPSSTIPFSSIHSKASTKGDGGVVEFGGDQTELIFLGTGTSEGVPRVSCLTNPLHKCEVCSKAAQPGNKNRRLNTSILIRHPGSSGTHNNILIDAGKFFYHSALRWFPAFGIRTIDAVIITHSHADAIGGLDDLRDWTNNVQPHIPIYVAKRDFEVMTKTHYYLVDTSVILPGAQVSELQFNIVSEEPFFVHGLKFTPLPVWHGQNYRSLGFRFGNICYISDVSDIPEETYPLLKDCEILIPDALRPDCSTSTHFGLQRALDEVRKIQPKRTLFTGMMHLMDHEEVNDSLAKLLESEGLDAQLSYDGLRIPIRL

SEQ ID NO: 57043 - DNA, 1399 bp, Glycine max
  misc_feature (1)..(1399): Ceres Seq. ID no. 13638097
aaaccaaaccacacaaataaacgaccaacacacattatatctctttgttaccttcgcacgaacgagagaagagaagcaaacgatggctacttttctttccaaccaatctctgttgggttcttgtccttgttctactcccttctcttcaaagccctttcaaaccctaaaaccccaaatcttatcttttccatctcgcgggtttccgcgccccctaatttcctcagtcaatcgaagaacccaattgaagtcttcccaagatttccctccaactacaaatgatgaaacagaggagacccagaatgatgtaagagggacaaatgatgatgaagataaaaaacaagtacctagtttaatgatcctccttgaagcatacaaggaagccttttttaatggcgaccaaaataccgtagctcagattgaagaggggatatattcaatagcaaataggaaaaataaattgattcagaaattatcaagtttatcggcagacaaagctgcttccaagaagagttatcttcgtttacaagctgattttgataattttaggaaaaggactgacaaagagagacttaacatccaatccgatgcccagcaacaagtcattgaaaagcttttgttgatggtcgacaattttgagagaacccaacagcaaattaaagcagcaacagagaaagagaagaaaattggtgttagctatcaaggtatttacaaacaatttgtagaggttctgaggaatcataatgtttcagtggtagcaacagtgggcaagccgtttaatcccttgcaacatgaagccgttgcacgtgaggagtccacagagttcaaaaaagggattataattaaagaatcccgacgtggtttcttgctcagagatcgagttctaaggccagcccttgtcaaggtttccttaggtcctggaaataagaaatctcccgtgtctcctgacaagtctgtggagcaaccttcaacagctgctggaatagatgaaagatagtctcttgaacttgttcattaaaaatccagttccacctgcatacctgatatcttgtcattggtcaacttgaaattcttctagtttggtattttggcctgaggtgagtatagtctcttgtagtatggacctcaccaattttaacttgtgtcccgccgcactacaattttttgcttcatcatgacaaagggaattacttttgttcatgagagaatggtgatttcttttgcaatccatttttttttttaccaaagcttagaatgttcattctcggactttgttggcattattgttccttgtctcaatgcttaacaaagggaaatactagagaaagctcgactgcaaaaattacccatgtcattctacaatattgtatgtgttatatatatgccatatcttacgacttgt

SEQ ID NO: 57044 - protein, 330 aa, Glycine max
  peptide (1)..(330): Ceres Seq. ID no. 13638098
  misc_feature (150)..(303): Pfam Name: GrpE Pfam Description: GrpE
  misc_feature (140)..(318): Homolog of NCBI NO: 22298857 NR Description: heat shock protein [Thermosynechococcus elongatus
  misc_feature (130)..(313): Homolog of NCBI NO: 2495091 NR Description: GRPE PROTEIN (HSP-70 COFACTOR)
  misc_feature (136)..(302): Homolog of NCBI NO: 15384279 NR Description: co-chaperone CGE1 precursor isoform b
  misc_feature (136)..(302): Homolog of NCBI NO: 15384277 NR Description: co-chaperone CGE1 precursor isoform a
  misc_feature (132)..(329): Homolog of NCBI NO: 33860576 NR Description: Heat shock protein GrpE
  misc_feature (115)..(327): Homolog of NCBI NO: 32488078 NR Description: OSJNBa0084A10.6 [Oryza sativa (japonica
  misc_feature (64)..(329): Homolog of NCBI NO: 30686476 NR Description: chloroplast GrpE protein [Arabidopsis thaliana]
  misc_feature (70)..(329): Homolog of NCBI NO: 18418410 NR Description: chloroplast GrpE protein [Arabidopsis thaliana]
  misc_feature (42)..(316): Homolog of NCBI NO: 18400095 NR Description: heat shock protein -related [Arabidopsis
  misc_feature (42)..(316): Homolog of NCBI NO: 21593629 NR Description: putative heat shock protein [Arabidopsis thaliana]
NQTTQINDQHTLYLFVTFARTREEKQTMATFLSNQSLLGSCPCSTPFSSKPFQTLKPQILSFPSRGFPRPLISSVNRRTQLKSSQDFPPTTNDETEETQNDVRGTNDDEDKKQVPSLMILLEAYKEAFFNGDQNTVAQIEEGIYSIANRKNKLIQKLSSLSADKAASKKSYLRLQADFDNFRKRTDKERLNIQSDAQQQVIEKLLLMVDNFERTQQQIKAATEKEKKIGVSYQGIYKQFVEVLRNHNVSVVATVGKPFNPLQHEAVAREESTEFKKGIIIKESRRGFLLRDRVLRPALVKVSLGPGNKKSPVSPDKSVEQPSTAAGIDER

SEQ ID NO: 57045 - protein, 303 aa, Glycine max
  peptide (1)..(303): Ceres Seq. ID no. 13638099
  misc_feature (123)..(276): Pfam Name: GrpE Pfam Description: GrpE
  misc_feature (113)..(291): Homolog of NCBI NO: 22298857 NR Description: heat shock protein [Thermosynechococcus elongatus
  misc_feature (103)..(286): Homolog of NCBI NO: 2495091 NR Description: GRPE PROTEIN (HSP-70 COFACTOR)
  misc_feature (109)..(275): Homolog of NCBI NO: 15384279 NR Description: co-chaperone CGE1 precursor isoform b
  misc_feature (109)..(275): Homolog of NCBI NO: 15384277 NR Description: co-chaperone CGE1 precursor isoform a
  misc_feature (105)..(302): Homolog of NCBI NO: 33860576 NR Description: Heat shock protein GrpE
  misc_feature (88)..(300): Homolog of NCBI NO: 32488078 NR Description: OSJNBa0084A10.6 [Oryza sativa (japonica
  misc_feature (37)..(302): Homolog of NCBI NO: 30686476 NR Description: chloroplast GrpE protein [Arabidopsis thaliana]
  misc_feature (43)..(302): Homolog of NCBI NO: 18418410 NR Description: chloroplast GrpE protein [Arabidopsis thaliana]
  misc_feature (15)..(289): Homolog of NCBI NO: 18400095 NR Description: heat shock protein -related [Arabidopsis
  misc_feature (15)..(289): Homolog of NCBI NO: 21593629 NR Description: putative heat shock protein [Arabidopsis thaliana]
MATFLSNQSLLGSCPCSTPFSSKPFQTLKPQILSFPSRGFPRPLISSVNRRTQLKSSQDFPPTTNDETEETQNDVRGTNDDEDKKQVPSLMILLEAYKEAFFNGDQNTVAQIEEGIYSIANRKNKLIQKLSSLSADKAASKKSYLRLQADFDNFRKRTDKERLNIQSDAQQQVIEKLLLMVDNFERTQQQIKAATEKEKKIGVSYQGIYKQFVEVLRNHNVSVVATVGKPFNPLQHEAVAREESTEFKKGIIIKESRRGFLLRDRVLRPALVKVSLGPGNKKSPVSPDKSVEQPSTAAGIDER

SEQ ID NO: 57046 - protein, 213 aa, Glycine max
  peptide (1)..(213): Ceres Seq. ID no. 13638100
  misc_feature (33)..(186): Pfam Name: GrpE Pfam Description: GrpE
  misc_feature (23)..(201): Homolog of NCBI NO: 22298857 NR Description: heat shock protein [Thermosynechococcus elongatus
  misc_feature (13)..(196): Homolog of NCBI NO: 2495091 NR Description: GRPE PROTEIN (HSP-70 COFACTOR)
  misc_feature (19)..(185): Homolog of NCBI NO: 15384279 NR Description: co-chaperone CGE1 precursor isoform b
  misc_feature (19)..(185): Homolog of NCBI NO: 15384277 NR Description: co-chaperone CGE1 precursor isoform a
  misc_feature (15)..(212): Homolog of NCBI NO: 33860576 NR Description: Heat shock protein GrpE
  misc_feature (1)..(210): Homolog of NCBI NO: 32488078 NR Description: OSJNBa0084A10.6 [Oryza sativa (japonica
  misc_feature (1)..(212): Homolog of NCBI NO: 30686476 NR Description: chloroplast GrpE protein [Arabidopsis thaliana]
  misc_feature (1)..(212): Homolog of NCBI NO: 18418410 NR Description: chloroplast GrpE protein [Arabidopsis thaliana]
  misc_feature (1)..(199): Homolog of NCBI NO: 18400095 NR Description: heat shock protein -related [Arabidopsis
  misc_feature (1)..(199): Homolog of NCBI NO: 21593629 NR Description: putative heat shock protein [Arabidopsis thaliana]
MILLEAYKEAFFNGDQNTVAQIEEGIYSIANRKNKLIQKLSSLSADKAASKKSYLRLQADFDNFRKRTDKERLNIQSDAQQQVIEKLLLMVDNFERTQQQIKAATEKEKKIGVSYQGIYKQFVEVLRNHNVSVVATVGKPFNPLQHEAVAREESTEFKKGIIIKESRRGFLLRDRVLRPALVKVSLGPGNKKSPVSPDKSVEQPSTAAGIDER

SEQ ID NO: 57047 - DNA, 1308 bp, Glycine max
  misc_feature (1)..(1308): Ceres Seq. ID no. 15171755
cccttccttccttctttcattcctttccctcattttcctcttttctctctcctttttccccttcacatgtcttctgccggcggcgacaggggcggcggcgctacctccggcgaccctcgccaatacttctgccaccagtgcaaccgcaccgtctcaatttccccttccccctcctccgatctcctctgccccacttgcaacggcggcttcctcgaagaactcgaattcccaatccccaaccctaaccctaaccctcccaatcccttcttccccgacttccccctcgccggcgccgccaccattcccctcgtcctccccggcgccgccgcctcccctcccttcgaggatctctccgccctcttcggaaaccgacccgacgccgccgccgatgccttcaaccccctcgtcttcctccagaactacttccaaaccctaagagccggcggcaacctccaattggtgatagagtccggcgaccctggcggagcgttccgcttccccggcgtcacccacggcgactacttctttgggccgggcctcgaggagctgatccagcatctcgctgagaacgatcccaaccgttacggcaccccgccggcctccaagtcggtcgtcgagggcctgccggacgtctccgtcaccgaggagctgctggcgtcggattcctcgcagtgcgccgtgtgcaaagacaccttcgagctcggcgagaccgcgaagcagatcccctgtaagcatatatatcacgcggattgcattttgccgtggttagaattgcacaattcttgccccgtttgtcggtatgagttgcccacagatgatcctgattacgagcagagggctcgtcgtggtggtagtggtggtggtggtgctgccggcagtggggcagctccacaggtgaattggaacatggcattggggtccggtggttctgcggattcatctggtagcggtggcggtgataattcacagaggagaaggtttagggtgtctttgccatggccgtttaggcaatttgctgagacaagtaatgttgggagtggcaacaatgatagcaacaataacaacaacagcaatagcaatagtgacagtagtggaaataatggtgggcaatcgaactctggaaaccgggggaatcagaattttgactcggagaccagacaggaagatctcgattgagagccactcgtgttttatatgtatcaagagtttttccaaaattgcagcattttgttgaatagaaatgatgctaaatatcaattagtggttagtgacagttgaaaattttatatttgattataatgaacttac

SEQ ID NO: 57048 - protein, 391 aa, Glycine max
  peptide (1)..(391): Ceres Seq. ID no. 15171756
  misc_feature (225)..(265): Pfam Name: Zinc finger, C3HC4 type (RING finger) Pfam Description: Zinc finger, C3HC4 type (RING finger)
  misc_feature (169)..(281): Homolog of NCBI NO: 15219060 NR Description: hypothetical protein [Arabidopsis thaliana]
  misc_feature (24)..(272): Homolog of NCBI NO: 14719329 NR Description: putative RING-H2 finger protein [Oryza sativa]
  misc_feature (167)..(352): Homolog of NCBI NO: 18405411 NR Description: expressed protein [Arabidopsis thaliana]
  misc_feature (167)..(367): Homolog of NCBI NO: 15241188 NR Description: expressed protein [Arabidopsis thaliana]
  misc_feature (42)..(288): Homolog of NCBI NO: 18410530 NR Description: expressed protein [Arabidopsis thaliana]
  misc_feature (310)..(377): Homolog of NCBI NO: 18405518 NR Description: RING-H2 finger protein (RHC1a) [Arabidopsis
  misc_feature (134)..(271): Homolog of NCBI NO: 18405518 NR Description: RING-H2 finger protein (RHC1a) [Arabidopsis
  misc_feature (125)..(364): Homolog of NCBI NO: 37535546 NR Description: putative zinc finger protein
  misc_feature (23)..(324): Homolog of NCBI NO: 15231003 NR Description: expressed protein [Arabidopsis thaliana]
  misc_feature (23)..(324): Homolog of NCBI NO: 11994207 NR Description: gene_id:MPN9.20~unknown protein [Arabidopsis
PFLPSFIPFPHFPLFSLLFPLHMSSAGGDRGGGATSGDPRQYFCHQCNRTVSISPSPSSDLLCPTCNGGFLEELEFPIPNPNPNPPNPFFPDFPLAGAATIPLVLPGAAASPPFEDLSALFGNRPDAAADAFNPLVFLQNYFQTLRAGGNLQLVIESGDPGGAFRFPGVTHGDYFFGPGLEELIQHLAENDPNRYGTPPASKSVVEGLPDVSVTEELLASDSSQCAVCKDTFELGETAKQIPCKHIYHADCILPWLELHNSCPVCRYELPTDDPDYEQRARRGGSGGGGAAGSGAAPQVNWNMALGSGGSADSSGSGGGDNSQRRRFRVSLPWPFRQFAETSNVGSGNNDSNNNNNSNSNSDSSGNNGGQSNSGNRGNQNFDSETRQEDLD

SEQ ID NO: 57049 - protein, 369 aa, Glycine max
  peptide (1)..(369): Ceres Seq. ID no. 15171757
  misc_feature (203)..(243): Pfam Name: Zinc finger, C3HC4 type (RING finger) Pfam Description: Zinc finger, C3HC4 type (RING finger)
  misc_feature (147)..(259): Homolog of NCBI NO: 15219060 NR Description: hypothetical protein [Arabidopsis thaliana]
  misc_feature (2)..(250): Homolog of NCBI NO: 14719329 NR Description: putative RING-H2 finger protein [Oryza sativa]
  misc_feature (145)..(330): Homolog of NCBI NO: 18405411 NR Description: expressed protein [Arabidopsis thaliana]
  misc_feature (145)..(345): Homolog of NCBI NO: 15241188 NR Description: expressed protein [Arabidopsis thaliana]
  misc_feature (20)..(266): Homolog of NCBI NO: 18410530 NR Description: expressed protein [Arabidopsis thaliana]
  misc_feature (288)..(355): Homolog of NCBI NO: 18405518 NR Description: RING-H2 finger protein (RHC1a) [Arabidopsis
  misc_feature (112)..(249): Homolog of NCBI NO: 18405518 NR Description: RING-H2 finger protein (RHC1a) [Arabidopsis
  misc_feature (103)..(342): Homolog of NCBI NO: 37535546 NR Description: putative zinc finger protein
  misc_feature (1)..(302): Homolog of NCBI NO: 15231003 NR Description: expressed protein [Arabidopsis thaliana]
  misc_feature (1)..(302): Homolog of NCBI NO: 11994207 NR Description: gene_id:MPN9.20~unknown protein [Arabidopsis
MSSAGGDRGGGATSGDPRQYFCHQCNRTVSISPSPSSDLLCPTCNGGFLEELEFPIPNPNPNPPNPFFPDFPLAGAATIPLVLPGAAASPPFEDLSALFGNRPDAAADAFNPLVFLQNYFQTLRAGGNLQLVIESGDPGGAFRFPGVTHGDYFFGPGLEELIQHLAENDPNRYGTPPASKSVVEGLPDVSVTEELLASDSSQCAVCKDTFELGETAKQIPCKHIYHADCILPWLELHNSCPVCRYELPTDDPDYEQRARRGGSGGGGAAGSGAAPQVNWNMALGSGGSADSSGSGGGDNSQRRRFRVSLPWPFRQFAETSNVGSGNNDSNNNNNSNSNSDSSGNNGGQSNSGNRGNQNFDSETRQEDLD

SEQ ID NO: 57050 - DNA, 1335 bp, Glycine max
  misc_feature (1)..(1335): Ceres Seq. ID no. 13594117
gaatttgctctagacaagtttggtgattgacgatgtcgggcttgaagcttggcacgactgcttccatctacgttcgaacagcgaaaaccaaaagcaaacccctcttatcatggagaagcccaccccaacacccccgcagccgcaggtacatgctttccccttccaaaaatcaaatcctagggttcacacctagaaacaaattcccatgctattctttgggaagggctggtcttgtcacagattttggttcgtcagtgccccaacctcaacctcaacctcagccaaagccagagccagaaccagaacctgaaccttccaaattgcttacgttgccaacaattttgactctaggccgtgtcgccgctgtcccacttcttgttgctactttctacatggacggttggcgtggaactgctgctactaccagcattttcgtcgctgcatcaatcactgattggcttgatggctatcttgctcgcaagatgaagttaaaatcttcattcggtgcattcttagatccagttgctgacaagcttatggttgctgctacactggtcttattatgtactagacctttggatggtggtgtgtttggacaagcgccgtggctactcactatacctgcaattgccataattggtagagagataaccatgtctgcagtcagggagtgggctgcttcccaggatagcaagcttttagaggctgttgctgtaaataacttggggaagtggaaaacagccacacagatgacagcattaaccatccttcttgcgacccgggactggagccatggaggaggagctgccattgtagtaggctctggtgttgctttgctttatacttcagcagggcttgccttatggtcgttggttgtatatatgaagaaaatatggagggtgttgttgaggtagcttgcgaacatttaccaatgtcacgaaagggggctgcaattttagtggcatgcaaatgtttttttttttcctgcgcaatctctaaccccatgcagtgtcatttctcctactcgtgtattttctgcgcatttttttggtcctctaaaaaagataagggccactagccatgcttaagcgttacagcagtgattgtgttgggaaaacgttgtgttgtaagttgtaacccacgttttccccaaatccatgaaggcacttgcttctccgtttgatgctttggaaagtgtgaacacacgcattttgttttaggccctaactcaatttagagtcattgaaagtttgagaattgcgaccagagaaaattcacaacaggtcaggaattattgtataatggttgatttgttctgatatagttcaacgatgc

SEQ ID NO: 57051 - protein, 293 aa, Glycine max
  peptide (1)..(293): Ceres Seq. ID no. 13594118
  misc_feature (131)..(286): Pfam Name: CDP-alcohol phosphatidyltransferase Pfam Description: CDP-alcohol phosphatidyltransferase
  misc_feature (98)..(288): Homolog of NCBI NO: 23104171 NR Description: hypothetical protein [Azotobacter vinelandii]
  misc_feature (98)..(288): Homolog of NCBI NO: 15597780 NR Description: CDP-diacylglycerol--glycerol-3-phosphate
  misc_feature (98)..(288): Homolog of NCBI NO: 26990792 NR Description: CDP-diacylglycerol--glycerol-3-phosphate
  misc_feature (98)..(288): Homolog of NCBI NO: 28870198 NR Description: CDP-diacylglycerol--glycerol-3-phosphate
  misc_feature (98)..(288): Homolog of NCBI NO: 23472904 NR Description: hypothetical protein [Pseudomonas syringae pv.
  misc_feature (98)..(288): Homolog of NCBI NO: 27753591 NR Description: CDP-diacylglycerol-glycerol-3-phosphate
  misc_feature (98)..(288): Homolog of NCBI NO: 23061902 NR Description: hypothetical protein [Pseudomonas fluorescens
  misc_feature (86)..(293): Homolog of NCBI NO: 15233163 NR Description: phosphatidylglycerolphosphate synthase (PGS1),
  misc_feature (90)..(293): Homolog of NCBI NO: 24796824 NR Description: putative phosphatidylglycerolphosphate synthase
  misc_feature (88)..(293): Homolog of NCBI NO: 15225064 NR Description: phosphatidylglycerolphosphate synthase (PGS1)
MSGLKLGTTASIYVRTAKTKSKPLLSWRSPPQHPRSRRYMLSPSKNQILGFTPRNKFPCYSLGRAGLVTDFGSSVPQPQPQPQPKPEPEPEPEPSKLLTLPTILTLGRVAAVPLLVATFYMDGWRGTAATTSIFVAASITDWLDGYLARKMKLKSSFGAFLDPVADKLMVAATLVLLCTRPLDGGVFGQAPWLLTIPAIAIIGREITMSAVREWAASQDSKLLEAVAVNNLGKWKTATQMTALTILLATRDWSHGGGAAIVVGSGVALLYTSAGLALWSLVVYMKKIWRVLLR

SEQ ID NO: 57052 - protein, 254 aa, Glycine max
  peptide (1)..(254): Ceres Seq. ID no. 13594119
  misc_feature (92)..(247): Pfam Name: CDP-alcohol phosphatidyltransferase Pfam Description: CDP-alcohol phosphatidyltransferase
  misc_feature (59)..(249): Homolog of NCBI NO: 23104171 NR Description: hypothetical protein [Azotobacter vinelandii]
  misc_feature (59)..(249): Homolog of NCBI NO: 15597780 NR Description: CDP-diacylglycerol--glycerol-3-phosphate
  misc_feature (59)..(249): Homolog of NCBI NO: 26990792 NR Description: CDP-diacylglycerol--glycerol-3-phosphate
  misc_feature (59)..(249): Homolog of NCBI NO: 28870198 NR Description: CDP-diacylglycerol--glycerol-3-phosphate
  misc_feature (59)..(249): Homolog of NCBI NO: 23472904 NR Description: hypothetical protein [Pseudomonas syringae pv.
  misc_feature (59)..(249): Homolog of NCBI NO: 27753591 NR Description: CDP-diacylglycerol-glycerol-3-phosphate
  misc_feature (59)..(249): Homolog of NCBI NO: 23061902 NR Description: hypothetical protein [Pseudomonas fluorescens
  misc_feature (47)..(254): Homolog of NCBI NO: 15233163 NR Description: phosphatidylglycerolphosphate synthase (PGS1),
  misc_feature (51)..(254): Homolog of NCBI NO: 24796824 NR Description: putative phosphatidylglycerolphosphate synthase
  misc_feature (49)..(254): Homolog of NCBI NO: 15225064 NR Description: phosphatidylglycerolphosphate synthase (PGS1)
MLSPSKNQILGFTPRNKFPCYSLGRAGLVTDFGSSVPQPQPQPQPKPEPEPEPEPSKLLTLPTILTLGRVAAVPLLVATFYMDGWRGTAATTSIFVAASITDWLDGYLARKMKLKSSFGAFLDPVADKLMVAATLVLLCTRPLDGGVFGQAPWLLTIPAIAIIGREITMSAVREWAASQDSKLLEAVAVNNLGKWKTATQMTALTILLATRDWSHGGGAAIVVGSGVALLYTSAGLALWSLVVYMKKIWRVLLR

SEQ ID NO: 57053 - protein, 173 aa, Glycine max
  peptide (1)..(173): Ceres Seq. ID no. 13594120
  misc_feature (11)..(166): Pfam Name: CDP-alcohol phosphatidyltransferase Pfam Description: CDP-alcohol phosphatidyltransferase
  misc_feature (1)..(168): Homolog of NCBI NO: 23104171 NR Description: hypothetical protein [Azotobacter vinelandii]
  misc_feature (1)..(168): Homolog of NCBI NO: 15597780 NR Description: CDP-diacylglycerol--glycerol-3-phosphate
  misc_feature (1)..(168): Homolog of NCBI NO: 26990792 NR Description: CDP-diacylglycerol--glycerol-3-phosphate
  misc_feature (1)..(168): Homolog of NCBI NO: 28870198 NR Description: CDP-diacylglycerol--glycerol-3-phosphate
  misc_feature (1)..(168): Homolog of NCBI NO: 23472904 NR Description: hypothetical protein [Pseudomonas syringae pv.
  misc_feature (1)..(168): Homolog of NCBI NO: 27753591 NR Description: CDP-diacylglycerol-glycerol-3-phosphate
  misc_feature (1)..(168): Homolog of NCBI NO: 23061902 NR Description: hypothetical protein [Pseudomonas fluorescens
  misc_feature (1)..(173): Homolog of NCBI NO: 15233163 NR Description: phosphatidylglycerolphosphate synthase (PGS1),
  misc_feature (1)..(173): Homolog of NCBI NO: 24796824 NR Description: putative phosphatidylglycerolphosphate synthase
  misc_feature (1)..(173): Homolog of NCBI NO: 15225064 NR Description: phosphatidylglycerolphosphate synthase (PGS1)
MDGWRGTAATTSIFVAASITDWLDGYLARKMKLKSSFGAFLDPVADKLMVAATLVLLCTRPLDGGVFGQAPWLLTIPAIAIIGREITMSAVREWAASQDSKLLEAVAVNNLGKWKTATQMTALTILLATRDWSHGGGAAIVVGSGVALLYTSAGLALWSLVVYMKKIWRVLLR

SEQ ID NO: 57054 - DNA, 1852 bp, Glycine max
  misc_feature (1)..(1852): Ceres Seq. ID no. 13594216
aaacataattcgttcctgggagtctctctgtcttctacttgtttgttagggttccttttcccgtttcgtttcgtttcgttttttttgcaatggaagaaagccctcgtggtcgcagaaagcgagcacacccttcttctccttctcctccttcgccaatctccaagaagccccaaaccttcccttcgttccaagacatccccaatctcccttctaacatcaaatccctctgccacctcatcgccaccacctccgccgccaccgtcgagcactccctccaatccgccgccatctccgtcatccctcacgacgtcgaagaagtcctcaaactctcctacggcttcccgggccaatccgtcaaattcttccgctggagcggccgccacctcaacgacaaccacacgccctattcctggaacctcgttgtcgatatcctcggcagaaaccgcttcttcgaccccatgtgggacgccgttaagtcaatgaacaaagaagggttactctcgctcgccacattcgcctccgtcttcagcagctatgttgccgctgacagaatccgtgaagcaattatggcgtttgagattatggacaattacggttgtgtgagggatgcttttgctttgaattcgcttttgagtgcaatttgtagcaatggtaggactcttgatgcttgtgattacttgcaggttgctaagaaattcgtccgaccggatacggatacttacgcgattttaatggaggggtgggaaggggagaagagtatggttagtgctaaggagacatttgctgagatggtgattgagattggatgggatcctgcgaatgtgccggcttatgattcgttcttgtgtacacttgttagagggcatgatggattgcttgaggctattaagtttgttgattccatgagggataggaggtgttaccccggtgtgaggtttctgaaggctgcattggatgagtgtgttaagtgccatgatgttaggacagctgagtttttctgggaggtgttggtggttgggaaggtgttgcagcccacctctgagatgtacaatttgatgatcggtttgtgttgctatcgcggtgacaccgatgctgcaaggaggatgctccatgagatggtttaccaaggggcttttcctgatgtggtgacttataacttgttgtttaagttcttgctcaaggggaggaaactgagggaggcttcgtcggtgtttgcggagatggtgcagaatgagtgtgtgccggagcaggataactgtgatttggcagttaaggcgtatgtggattgcggggagcctgttatggcgatcaaggtttggaagtgtttggtggagaattataagaagggtttggagcagaccgcgaattttctggttgtggggctttgcaatttgaacaggccacaggtggcggttaagtatgccgaggatatgattggcaggggaatcagtttgtcctcttccacattgtcgaagctgagacaaagccttgtcaaggagagaagagaatatgtgtatgaggatcttttgagaaagtggaaatctcactaggtagtttggattttttttgctaaaactgtgtaacttaatattagtgccgaatttgaatgttttgcttttgtctgatagagaggggaagaattttgaagtggttattattatctaaaagatgatactttggttctgcattgggataaataggctccagcatgtgttatctttgtatatagttactgcaaaagatcctactagaattgctttagaaggttaaaggtagaggaagtttatataggtttttgtatcaaacttatattataaaaaataaaaaaaagctttatctatttacctatctt

SEQ ID NO: 57055 - protein, 486 aa, Glycine max
  peptide (1)..(486): Ceres Seq. ID no. 13594217
  misc_feature (58)..(482): Homolog of NCBI NO: 15217756 NR Description: pentatricopeptide (PPR) repeat-containing protein
  misc_feature (58)..(482): Homolog of NCBI NO: 25511622 NR Description: T6A9.11 protein - Arabidopsis thaliana
  misc_feature (26)..(468): Homolog of NCBI NO: 15219049 NR Description: hypothetical protein [Arabidopsis thaliana]
  misc_feature (40)..(484): Homolog of NCBI NO: 15241508 NR Description: pentatricopeptide (PPR) repeat-containing protein
  misc_feature (40)..(484): Homolog of NCBI NO: 15228788 NR Description: pentatricopeptide (PPR) repeat-containing protein
  misc_feature (52)..(482): Homolog of NCBI NO: 18394846 NR Description: expressed protein [Arabidopsis thaliana]
  misc_feature (40)..(484): Homolog of NCBI NO: 15228767 NR Description: pentatricopeptide (PPR) repeat-containing protein
  misc_feature (46)..(482): Homolog of NCBI NO: 15223927 NR Description: pentatricopeptide (PPR) repeat-containing protein
  misc_feature (30)..(482): Homolog of NCBI NO: 15223926 NR Description: pentatricopeptide (PPR) repeat-containing protein
  misc_feature (49)..(482): Homolog of NCBI NO: 14488357 NR Description: unknown protein [Oryza sativa (japonica
MEESPRGRRKRAHPSSPSPPSPISKKPQTFPSFQDIPNLPSNIKSLCHLIATTSAATVEHSLQSAAISVIPHDVEEVLKLSYGFPGQSVKFFRWSGRHLNDNHTPYSWNLVVDILGRNRFFDPMWDAVKSMNKEGLLSLATFASVFSSYVAADRIREAIMAFEIMDNYGCVRDAFALNSLLSAICSNGRTLDACDYLQVAKKFVRPDTDTYAILMEGWEGEKSMVSAKETFAEMVIEIGWDPANVPAYDSFLCTLVRGHDGLLEAIKFVDSMRDRRCYPGVRFLKAALDECVKCHDVRTAEFFWEVLVVGKVLQPTSEMYNLMIGLCCYRGDTDAARRMLHEMVYQGAFPDVVTYNLLFKFLLKGRKLREASSVFAEMVQNECVPEQDNCDLAVKAYVDCGEPVMAIKVWKCLVENYKKGLEQTANFLVVGLCNLNRPQVAVKYAEDMIGRGISLSSSTLSKLRQSLVKERREYVYEDLLRKWKSH

SEQ ID NO: 57056 - protein, 363 aa, Glycine max
  peptide (1)..(363): Ceres Seq. ID no. 13594218
  misc_feature (1)..(359): Homolog of NCBI NO: 15217756 NR Description: pentatricopeptide (PPR) repeat-containing protein
  misc_feature (1)..(359): Homolog of NCBI NO: 25511622 NR Description: T6A9.11 protein - Arabidopsis thaliana
  misc_feature (1)..(345): Homolog of NCBI NO: 15219049 NR Description: hypothetical protein [Arabidopsis thaliana]
  misc_feature (1)..(361): Homolog of NCBI NO: 15241508 NR Description: pentatricopeptide (PPR) repeat-containing protein
  misc_feature (1)..(361): Homolog of NCBI NO: 15228788 NR Description: pentatricopeptide (PPR) repeat-containing protein
  misc_feature (1)..(359): Homolog of NCBI NO: 18394846 NR Description: expressed protein [Arabidopsis thaliana]
  misc_feature (1)..(361): Homolog of NCBI NO: 15228767 NR Description: pentatricopeptide (PPR) repeat-containing protein
  misc_feature (1)..(359): Homolog of NCBI NO: 15223927 NR Description: pentatricopeptide (PPR) repeat-containing protein
  misc_feature (1)..(359): Homolog of NCBI NO: 15223926 NR Description: pentatricopeptide (PPR) repeat-containing protein
  misc_feature (1)..(359): Homolog of NCBI NO: 14488357 NR Description: unknown protein [Oryza sativa (japonica
MWDAVKSMNKEGLLSLATFASVFSSYVAADRIREAIMAFEIMDNYGCVRDAFALNSLLSAICSNGRTLDACDYLQVAKKFVRPDTDTYAILMEGWEGEKSMVSAKETFAEMVIEIGWDPANVPAYDSFLCTLVRGHDGLLEAIKFVDSMRDRRCYPGVRFLKAALDECVKCHDVRTAEFFWEVLVVGKVLQPTSEMYNLMIGLCCYRGDTDAARRMLHEMVYQGAFPDVVTYNLLFKFLLKGRKLREASSVFAEMVQNECVPEQDNCDLAVKAYVDCGEPVMAIKVWKCLVENYKKGLEQTANFLVVGLCNLNRPQVAVKYAEDMIGRGISLSSSTLSKLRQSLVKERREYVYEDLLRKWKSH

SEQ ID NO: 57057 - protein, 356 aa, Glycine max
  peptide (1)..(356): Ceres Seq. ID no. 13594219
  misc_feature (1)..(352): Homolog of NCBI NO: 15217756 NR Description: pentatricopeptide (PPR) repeat-containing protein
  misc_feature (1)..(352): Homolog of NCBI NO: 25511622 NR Description: T6A9.11 protein - Arabidopsis thaliana
  misc_feature (1)..(338): Homolog of NCBI NO: 15219049 NR Description: hypothetical protein [Arabidopsis thaliana]
  misc_feature (1)..(354): Homolog of NCBI NO: 15241508 NR Description: pentatricopeptide (PPR) repeat-containing protein
  misc_feature (1)..(354): Homolog of NCBI NO: 15228788 NR Description: pentatricopeptide (PPR) repeat-containing protein
  misc_feature (1)..(352): Homolog of NCBI NO: 18394846 NR Description: expressed protein [Arabidopsis thaliana]
  misc_feature (1)..(354): Homolog of NCBI NO: 15228767 NR Description: pentatricopeptide (PPR) repeat-containing protein
  misc_feature (1)..(352): Homolog of NCBI NO: 15223927 NR Description: pentatricopeptide (PPR) repeat-containing protein
  misc_feature (1)..(352): Homolog of NCBI NO: 15223926 NR Description: pentatricopeptide (PPR) repeat-containing protein
  misc_feature (1)..(352): Homolog of NCBI NO: 14488357 NR Description: unknown protein [Oryza sativa (japonica
MNKEGLLSLATFASVFSSYVAADRIREAIMAFEIMDNYGCVRDAFALNSLLSAICSNGRTLDACDYLQVAKKFVRPDTDTYAILMEGWEGEKSMVSAKETFAEMVIEIGWDPANVPAYDSFLCTLVRGHDGLLEAIKFVDSMRDRRCYPGVRFLKAALDECVKCHDVRTAEFFWEVLVVGKVLQPTSEMYNLMIGLCCYRGDTDAARRMLHEMVYQGAFPDVVTYNLLFKFLLKGRKLREASSVFAEMVQNECVPEQDNCDLAVKAYVDCGEPVMAIKVWKCLVENYKKGLEQTANFLVVGLCNLNRPQVAVKYAEDMIGRGISLSSSTLSKLRQSLVKERREYVYEDLLRKWKSH

SEQ ID NO: 57058 - DNA, 837 bp, Glycine max
  misc_feature (1)..(837): Ceres Seq. ID no. 13594121
acttaccacacacacctcctaaaccaaaattatccaaaaccatgtccagcttcactcatgccaccacactcctccatgcccacatcaaaaccaagcacaaaaaaccctccaccaccaccaccaccaccaccccattaccccataaccattcccccaacagaaggaagctgatttcaacttttctagccacttcaacagcagcactactagtgcatggagtcaccagcaccccacaagcactggcccagagctggggcacgcactccttcatcaaggagcacttcttcgagccggggctctccccggaagacgcggtggcgaggataaagcagactgcggaggggctgcacagcattcgggaggcgctggagaccatgtcttggaggtatatcatgttctacatacgcatcaagcaggcctatcttgaccaggacttgaggactgccttcaccaccttgcctgagagtagacgcaaggagtatgtcaaaactgctaatgagttggtgtctaactttggtgagtttgataggcatattcggacgccaaaggtatatgaatcatacctatactacgagaagacattgaagtcaatagatcaacttgtggccatactagcatagcacaaggaggaagctgcagggtataacggtcttaatttgcaattcttatttttatggtataaagcctcttgttacgttttttttccttccattttaattccgaattgaaatagaaggtattatagcacgaagttcaagcatatattatgtacatgtttgtatgcaacttcaaattcatgaacacaaagaaggttctaaaatgagaagcttcaatctc

SEQ ID NO: 57059 - protein, 205 aa, Glycine max
  peptide (1)..(205): Ceres Seq. ID no. 15221309
  misc_feature (16)..(205): Pfam Name: Oxygen evolving enhancer protein 3 (PsbQ) Pfam Description: Oxygen evolving enhancer protein 3 (PsbQ)
  misc_feature (90)..(204): Homolog of NCBI NO: 15234637 NR Description: oxygen-evolving complex protein 16, chloroplast
  misc_feature (85)..(204): Homolog of NCBI NO: 131397 NR Description: Oxygen-evolving enhancer protein 3, chloroplast (OEE3) (16 kDa subunit of oxygen evolving system of photosystem
  misc_feature (90)..(204): Homolog of NCBI NO: 11134057 NR Description: Oxygen-evolving enhancer protein 3-1, chloroplast (OEE3) (16 kDa subunit of oxygen evolving system of photosystem
  misc_feature (90)..(204): Homolog of NCBI NO: 11134066 NR Description: Oxygen-evolving enhancer protein 3-2, chloroplast (OEE3) (16 kDa subunit of oxygen evolving system of photosystem (OEC 16 kDa subunit) (Ferredoxin-NADP reductase binding protein)
  misc_feature (85)..(204): Homolog of NCBI NO: 34810268 NR Description: Chain A, Crystal Structure Of Psbq Polypeptide Of
  misc_feature (90)..(200): Homolog of NCBI NO: 8131595 NR Description: oxygen evolving enhancer protein 3 [Bruguiera
  misc_feature (14)..(205): Homolog of NCBI NO: 18394073 NR Description: PsbQ domain protein family [Arabidopsis thaliana]
LPHTPPKPKLSKTMSSFTHATTLLHAHIKTKHKKPSTTTTTTTPLPHNHSPNRRKLISTFLATSTAALLVHGVTSTPQALAQSWGTHSFIKEHFFEPGLSPEDAVARIKQTAEGLHSIREALETMSWRYIMFYIRIKQAYLDQDLRTAFTTLPESRRKEYVKTANELVSNFGEFDRHIRTPKVYESYLYYEKTLKSIDQLVAILA

SEQ ID NO: 57060 - protein, 192 aa, Glycine max
  peptide (1)..(192): Ceres Seq. ID no. 15221310
  misc_feature (3)..(192): Pfam Name: Oxygen evolving enhancer protein 3 (PsbQ) Pfam Description: Oxygen evolving enhancer protein 3 (PsbQ)
  misc_feature (77)..(191): Homolog of NCBI NO: 15234637 NR Description: oxygen-evolving complex protein 16, chloroplast
  misc_feature (72)..(191): Homolog of NCBI NO: 131397 NR Description: Oxygen-evolving enhancer protein 3, chloroplast (OEE3) (16 kDa subunit of oxygen evolving system of photosystem
  misc_feature (77)..(191): Homolog of NCBI NO: 11134057 NR Description: Oxygen-evolving enhancer protein 3-1, chloroplast (OEE3) (16 kDa subunit of oxygen evolving system of photosystem
  misc_feature (77)..(191): Homolog of NCBI NO: 11134066 NR Description: Oxygen-evolving enhancer protein 3-2, chloroplast (OEE3) (16 kDa subunit of oxygen evolving system of photosystem (OEC 16 kDa subunit) (Ferredoxin-NADP reductase binding protein)
  misc_feature (72)..(191): Homolog of NCBI NO: 34810268 NR Description: Chain A, Crystal Structure Of Psbq Polypeptide Of
  misc_feature (77)..(187): Homolog of NCBI NO: 8131595 NR Description: oxygen evolving enhancer protein 3 [Bruguiera
  misc_feature (1)..(192): Homolog of NCBI NO: 18394073 NR Description: PsbQ domain protein family [Arabidopsis thaliana]
MSSFTHATTLLHAHIKTKHKKPSTTTTTTTPLPHNHSPNRRKLISTFLATSTAALLVHGVTSTPQALAQSWGTHSFIKEHFFEPGLSPEDAVARIKQTAEGLHSIREALETMSWRYIMFYIRIKQAYLDQDLRTAFTTLPESRRKEYVKTANELVSNFGEFDRHIRTPKVYESYLYYEKTLKSIDQLVAILA

SEQ ID NO: 57061 - DNA, 1314 bp, Glycine max
  misc_feature (1)..(1314): Ceres Seq. ID no. 15225046
aacaacctaaaaaatattcactaagatttatttcccttattttattcatttattctttgttcctagtctttatcttataatttctcattgcttgcccggtaattcaagatcaacttggaaaatttgcaagatttgggatgaaatctggtcggatcttgctttgtgggatggggattttggtgggtcttatttcaatacaaagctcttcctctctcaatcccatctccctctcttcttcttcttcttcttcttcataacacaaacacaaaacataaacctttcttccaaccaaccttttttccaattcattctttgtttcttcaaaaatcttcaatccattttcaccttttcacaaatggggatggctgcagagtcacagtttcatgtcttggctgttgatgacagtctcatagataggaaactcattgagaggctcctcagaacctcttcttatgaagttactacagttgattctggtagcaaggctttagagtttctggggttgtgtgagaatgatgagagcaacccaagtacaccatatgtttgtcccaacaaccatcaggaggtggaggtgaatcttgttataacagattactgtatgcctggcatgacaggctatgacttgcttaagaaaatcaaggaatcttcatctttgagaaacataccggtggtgattatgtcatctgaaaatgtgccttcaaggattaacagatgtttggaggaaggagcagaagaatttttcttgaagcctgtgaggctgtcagatttaaacaagcttaaaccccatatgaagaaaaccaagttgaaagatcaaaaacaaggaacagtagaaaagcttgaagacttagaagttcaacagcaacagccacaacaacaaatcatcatccaaaatgagcagcaacaagcaccaaaatcccgagatcttcttcagccagagtcagagtcacatccacatgcacaaccaactattgaacaacagcaacaatcactacaacaagccaacaacaatagcaagaggaagaccatggaacagggcctttcacctgagactgacagaacaagaccaagatacagtggcatagccactgtggtatgatcataaatcattggcaaataattttcttgaatttcaaaaatgtaattctcataacttctttcttcttcttttaaaaaaaattaacttaagtgttggttaatataggctctataggagtgtagtagagttgtttcctgtacacattttcctggaaatatttccttccaattttgcttccccccaatataaatgaaaaagaaaaaagaaatattgaattg

SEQ ID NO: 57062 - protein, 246 aa, Glycine max
  peptide (1)..(246): Ceres Seq. ID no. 15225047
  misc_feature (9)..(149): Pfam Name: Response regulator receiver domain Pfam Description: Response regulator receiver domain
  misc_feature (8)..(161): Homolog of NCBI NO: 15218957 NR Description: response regulator 3 [Arabidopsis thaliana]
  misc_feature (8)..(203): Homolog of NCBI NO: 15218550 NR Description: response regulator1 (ATRR1) [Arabidopsis
  misc_feature (7)..(236): Homolog of NCBI NO: 13173408 NR Description: response regulator protein [Dianthus caryophyllus]
  misc_feature (9)..(143): Homolog of NCBI NO: 33330868 NR Description: type-A response regulator [Catharanthus roseus]
  misc_feature (5)..(189): Homolog of NCBI NO: 12060384 NR Description: response regulator 4 [Zea mays]
  misc_feature (5)..(149): Homolog of NCBI NO: 34906626 NR Description: putative response regulator
  misc_feature (5)..(174): Homolog of NCBI NO: 12060386 NR Description: response regulator 5 [Zea mays]
  misc_feature (1)..(201): Homolog of NCBI NO: 12060388 NR Description: response regulator 6 [Zea mays]
  misc_feature (1)..(214): Homolog of NCBI NO: 15227325 NR Description: two-component response regulator 3 protein
  misc_feature (1)..(246): Homolog of NCBI NO: 15230202 NR Description: responce reactor 4 [Arabidopsis thaliana]
MGMAAESQFHVLAVDDSLIDRKLIERLLRTSSYEVTTVDSGSKALEFLGLCENDESNPSTPYVCPNNHQEVEVNLVITDYCMPGMTGYDLLKKIKESSSLRNIPVVIMSSENVPSRINRCLEEGAEEFFLKPVRLSDLNKLKPHMKKTKLKDQKQGTVEKLEDLEVQQQQPQQQIIIQNEQQQAPKSRDLLQPESESHPHAQPTIEQQQQSLQQANNNSKRKTMEQGLSPETDRTRPRYSGIATVV

SEQ ID NO: 57063 - protein, 244 aa, Glycine max
  peptide (1)..(244): Ceres Seq. ID no. 15225048
  misc_feature (7)..(147): Pfam Name: Response regulator receiver domain Pfam Description: Response regulator receiver domain
  misc_feature (6)..(159): Homolog of NCBI NO: 15218957 NR Description: response regulator 3 [Arabidopsis thaliana]
  misc_feature (6)..(201): Homolog of NCBI NO: 15218550 NR Description: response regulator1 (ATRR1) [Arabidopsis
  misc_feature (5)..(234): Homolog of NCBI NO: 13173408 NR Description: response regulator protein [Dianthus caryophyllus]
  misc_feature (7)..(141): Homolog of NCBI NO: 33330868 NR Description: type-A response regulator [Catharanthus roseus]
  misc_feature (3)..(187): Homolog of NCBI NO: 12060384 NR Description: response regulator 4 [Zea mays]
  misc_feature (3)..(147): Homolog of NCBI NO: 34906626 NR Description: putative response regulator
  misc_feature (3)..(172): Homolog of NCBI NO: 12060386 NR Description: response regulator 5 [Zea mays]
  misc_feature (1)..(199): Homolog of NCBI NO: 12060388 NR Description: response regulator 6 [Zea mays]
  misc_feature (1)..(212): Homolog of NCBI NO: 15227325 NR Description: two-component response regulator 3 protein
  misc_feature (1)..(244): Homolog of NCBI NO: 15230202 NR Description: responce reactor 4 [Arabidopsis thaliana]
MAAESQFHVLAVDDSLIDRKLIERLLRTSSYEVTTVDSGSKALEFLGLCENDESNPSTPYVCPNNHQEVEVNLVITDYCMPGMTGYDLLKKIKESSSLRNIPVVIMSSENVPSRINRCLEEGAEEFFLKPVRLSDLNKLKPHMKKTKLKDQKQGTVEKLEDLEVQQQQPQQQIIIQNEQQQAPKSRDLLQPESESHPHAQPTIEQQQQSLQQANNNSKRKTMEQGLSPETDRTRPRYSGIATVV

SEQ ID NO: 57064 - protein, 165 aa, Glycine max
  peptide (1)..(165): Ceres Seq. ID no. 15225049
  misc_feature (1)..(68): Pfam Name: Response regulator receiver domain Pfam Description: Response regulator receiver domain
  misc_feature (1)..(80): Homolog of NCBI NO: 15218957 NR Description: response regulator 3 [Arabidopsis thaliana]
  misc_feature (1)..(122): Homolog of NCBI NO: 15218550 NR Description: response regulator1 (ATRR1) [Arabidopsis
  misc_feature (1)..(155): Homolog of NCBI NO: 13173408 NR Description: response regulator protein [Dianthus caryophyllus]
  misc_feature (1)..(62): Homolog of NCBI NO: 33330868 NR Description: type-A response regulator [Catharanthus roseus]
  misc_feature (1)..(108): Homolog of NCBI NO: 12060384 NR Description: response regulator 4 [Zea mays]
  misc_feature (1)..(68): Homolog of NCBI NO: 34906626 NR Description: putative response regulator
  misc_feature (1)..(93): Homolog of NCBI NO: 12060386 NR Description: response regulator 5 [Zea mays]
  misc_feature (1)..(120): Homolog of NCBI NO: 12060388 NR Description: response regulator 6 [Zea mays]
  misc_feature (1)..(133): Homolog of NCBI NO: 15227325 NR Description: two-component response regulator 3 protein
  misc_feature (1)..(165): Homolog of NCBI NO: 15230202 NR Description: responce reactor 4 [Arabidopsis thaliana]
MPGMTGYDLLKKIKESSSLRNIPVVIMSSENVPSRINRCLEEGAEEFFLKPVRLSDLNKLKPHMKKTKLKDQKQGTVEKLEDLEVQQQQPQQQIIIQNEQQQAPKSRDLLQPESESHPHAQPTIEQQQQSLQQANNNSKRKTMEQGLSPETDRTRPRYSGIATVV

SEQ ID NO: 57065 - DNA, 1163 bp, Glycine max
  misc_feature (1)..(1163): Ceres Seq. ID no. 12608028
atcagtaaccgcgatttcttctccttccctgcttcaactctattcgaaatttcacagtgcggagatcctcctccatggatcgccggaaaagcaacgagacaacgaagtcgtcgacaacctcaaccgtggaattgccaccaccaatctcagcctcagaagcccttatagtcaacgcattatgcgcgcttggcttggccttcgccttctggattgcgaacactgtctactccatcgaactcgttactcatccttctctcacactcttcttcatctggattacagagctccccattgtgacccttctatacagtcgatatcgacaaaatcggaagcaatgcacgtacctgcgagctgttgggagaggggttctaggagtgcctgttggggcactactgaattttttaggagctattgctgtgggggcgcctgttacatttcagtatcttcccaagactgtaaattgggctcttatgatgtctgtgttcacaacaattccagcgtcatgtgttcttggttcatcgtgggctgactggcgacgtatatttgcacaaacaaagccaaaaggatctatagagtacctgatttgtttaccagcacatggagcagttattggagcatggtttggggcttggccaatgcctcttgactgggagaggccatggcaggaatggcccatttctgtgagctatgggaccgtagctggttacctggtggcattggttgcatcattgggctttgttcttgcttgtggtagatcacaacatatcaaaagagaatgaagtgctagtagaagcatctgattatactaattgtgggtgagatgtagaagcataatatcttgatgaactagacatggaagctgtcttctttaggacctgtttgtaggcaatggataatgaattatgatgacaaagggaaaattggtgctataaaactccaggctctcgccatgacatggtccagcatggggttgaatccattatggatctattgtagacagtattaccttgcatttgtaagaggctaatttcgtatgcaaatatgtgacctcctagtcacttggctgcaaatctaactgttgtaccaaggttttctttcagtgatttatgatgataacgatttatttctattttgttttagtaatgttcaagaagtatgctttt

SEQ ID NO: 57066 - protein, 234 aa, Glycine max
  peptide (1)..(234): Ceres Seq. ID no. 12608029
  misc_feature (89)..(227): Homolog of NCBI NO: 32412938 NR Description: hypothetical protein [Neurospora crassa]
  misc_feature (30)..(197): Homolog of NCBI NO: 27894291 NR Description: phosphatidylinositol glycan, class F isoform 2
  misc_feature (97)..(223): Homolog of NCBI NO: 19075814 NR Description: putative short-chain dehydrogenase
  misc_feature (30)..(218): Homolog of NCBI NO: 4505797 NR Description: phosphatidylinositol glycan, class F isoform 1
  misc_feature (30)..(218): Homolog of NCBI NO: 22135636 NR Description: phosphatidylinositol glycan, class F [Mus
  misc_feature (30)..(218): Homolog of NCBI NO: 6679315 NR Description: phosphatidylinositol glycan, class F [Mus
  misc_feature (11)..(219): Homolog of NCBI NO: 30684686 NR Description: expressed protein [Arabidopsis thaliana]
  misc_feature (11)..(231): Homolog of NCBI NO: 25518421 NR Description: hypothetical protein T24D18.15 - Arabidopsis
MDRRKSNETTKSSTTSTVELPPPISASEALIVNALCALGLAFAFWIANTVYSIELVTHPSLTLFFIWITELPIVTLLYSRYRQNRKQCTYLRAVGRGVLGVPVGALLNFLGAIAVGAPVTFQYLPKTVNWALMMSVFTTIPASCVLGSSWADWRRIFAQTKPKGSIEYLICLPAHGAVIGAWFGAWPMPLDWERPWQEWPISVSYGTVAGYLVALVASLGFVLACGRSQHIKRE

SEQ ID NO: 57067 - protein, 175 aa, Glycine max
  peptide (1)..(175): Ceres Seq. ID no. 12608030
SVTAISSPSLLQLYSKFHSAEILLHGSPEKQRDNEVVDNLNRGIATTNLSLRSPYSQRIMRAWLGLRLLDCEHCLLHRTRYSSFSHTLLHLDYRAPHCDPSIQSISTKSEAMHVPASCWERGSRSACWGTTEFFRSYCCGGACYISVSSQDCKLGSYDVCVHNNSSVMCSWFIVG

SEQ ID NO: 57068 - DNA, 1019 bp, Glycine max
  misc_feature (1)..(1019): Ceres Seq. ID no. 15168461
atatatatatatgaatagagatagagcatgaggcaaagtcaacagtgaagaggtgtgacagagagacaaaagaaaagatgtcagggcctcaatgctgttcaaatccaccaagcttgaaccccggtggaggagttgggcatgtggacaaagtgggtggtgttgattcctatttcactggatctcctcactccaaactcgctgttcttatgctctccgatgtttttggatatgaagcgccaaatttaaggaagcttgctgacaaagttggggctgctgggtattatgtagttgttcctgacctcttggatggcgaaccctttaatcctcagaattcggacaggccctttcctgcttggataaaagatcatggaccagtggagaaaggtgctgaagctacaaaacccataattgaagccttaaaaagtaaaggtgtttcagctattgcagctgttggtttttgttggggtgcaaaggttgtggttgaacttgcgaaatccagactgatccaaactgcagtgctattgcatccatcatttgtctccctggatgacatcaagggtgttgatattccaattgctatacttggagccgaggtagaccaagtttctcctccagagcttgtgaaacaatttgaacaagtcctagctgctaaatctggggttgccagttttgttaaaatatttcccaaagtttcacacggttgggctgtgagatataacactgaagatgcagaaaccgtaaaggtggcagaagaggcccaccaggacttgctggactggcttgctaaacatcataagtgagacatcttgctctgttaagactgtacaatggagtacttgagtgaaggatgtaatgtaaaatggtactcaatcaacgtagctgtagtttgcaagaaaataaatgttgtattgttacatgttggaagtggatcttattgctagatgatcctaataatgttgctttccgtgatttgagtttggtggacaattgtgatttgagatcttaataaatcatatttc

SEQ ID NO: 57069 - protein, 240 aa, Glycine max
  peptide (1)..(240): Ceres Seq. ID no. 15168462
  misc_feature (28)..(238): Pfam Name: Dienelactone hydrolase family Pfam Description: Dienelactone hydrolase family
  misc_feature (17)..(238): Homolog of NCBI NO: 31712014 NR Description: RIKEN cDNA 2310016A09 [Mus musculus]
  misc_feature (17)..(238): Homolog of NCBI NO: 38181938 NR Description: Unknown (protein for MGC:76315) [Silurana
  misc_feature (69)..(240): Homolog of NCBI NO: 40253308 NR Description: Endo-1,3;1,4-beta-D-glucanase precursor-like
  misc_feature (5)..(195): Homolog of NCBI NO: 8928122 NR Description: Endo-1,3;1,4-beta-D-glucanase precursor
  misc_feature (6)..(240): Homolog of NCBI NO: 40253306 NR Description: putative Endo-1,3;1,4-beta-D-glucanase precursor
  misc_feature (5)..(240): Homolog of NCBI NO: 40253303 NR Description: putative Endo-1,3;1,4-beta-D-glucanase precursor
  misc_feature (50)..(240): Homolog of NCBI NO: 9294513 NR Description: contains similarity to
  misc_feature (1)..(240): Homolog of NCBI NO: 24899687 NR Description: Unknown protein [Arabidopsis thaliana]
  misc_feature (1)..(240): Homolog of NCBI NO: 18403812 NR Description: expressed protein [Arabidopsis thaliana]
  misc_feature (1)..(240): Homolog of NCBI NO: 18403820 NR Description: expressed protein [Arabidopsis thaliana]
MSGPQCCSNPPSLNPGGGVGHVDKVGGVDSYFTGSPHSKLAVLMLSDVFGYEAPNLRKLADKVGAAGYYVVVPDLLDGEPFNPQNSDRPFPAWIKDHGPVEKGAEATKPIIEALKSKGVSAIAAVGFCWGAKVVVELAKSRLIQTAVLLHPSFVSLDDIKGVDIPIAILGAEVDQVSPPELVKQFEQVLAAKSGVASFVKIFPKVSHGWAVRYNTEDAETVKVAEEAHQDLLDWLAKHHK

SEQ ID NO: 57070 - protein, 197 aa, Glycine max
  peptide (1)..(197): Ceres Seq. ID no. 15168463
  misc_feature (1)..(195): Pfam Name: Dienelactone hydrolase family Pfam Description: Dienelactone hydrolase family
  misc_feature (1)..(195): Homolog of NCBI NO: 31712014 NR Description: RIKEN cDNA 2310016A09 [Mus musculus]
  misc_feature (1)..(195): Homolog of NCBI NO: 38181938 NR Description: Unknown (protein for MGC:76315) [Silurana
  misc_feature (26)..(197): Homolog of NCBI NO: 40253308 NR Description: Endo-1,3;1,4-beta-D-glucanase precursor-like
  misc_feature (1)..(152): Homolog of NCBI NO: 8928122 NR Description: Endo-1,3;1,4-beta-D-glucanase precursor
  misc_feature (1)..(197): Homolog of NCBI NO: 40253306 NR Description: putative Endo-1,3;1,4-beta-D-glucanase precursor
  misc_feature (1)..(197): Homolog of NCBI NO: 40253303 NR Description: putative Endo-1,3;1,4-beta-D-glucanase precursor
  misc_feature (7)..(197): Homolog of NCBI NO: 9294513 NR Description: contains similarity to
  misc_feature (1)..(197): Homolog of NCBI NO: 24899687 NR Description: Unknown protein [Arabidopsis thaliana]
  misc_feature (1)..(197): Homolog of NCBI NO: 18403812 NR Description: expressed protein [Arabidopsis thaliana]
  misc_feature (1)..(197): Homolog of NCBI NO: 18403820 NR Description: expressed protein [Arabidopsis thaliana]
MLSDVFGYEAPNLRKLADKVGAAGYYVVVPDLLDGEPFNPQNSDRPFPAWIKDHGPVEKGAEATKPIIEALKSKGVSAIAAVGFCWGAKVVVELAKSRLIQTAVLLHPSFVSLDDIKGVDIPIAILGAEVDQVSPPELVKQFEQVLAAKSGVASFVKIFPKVSHGWAVRYNTEDAETVKVAEEAHQDLLDWLAKHHK

SEQ ID NO: 57071 - DNA, 1524 bp, Glycine max
  misc_feature (1)..(1524): Ceres Seq. ID no. 15168517
acttgattacatcccctccgttcatggaccaatatgctcaagcttcttcttccatcctcatcctctaaactcatctccagacacattttctcacaactatcacgccccaccaccaccatgtccataaatctacgcacccacgccttcgcgggtaacccgctccgatcccccaaccgggtcgacccgttttcgcccgcctccgcgctcgagaccctcacgacccgaatcctcgacgccgcgcacgtgtcctcaccgtccgtggattttaaggtcttgccttttagaaatgggagggtgctggcttcttcggagagtggtgacacgtggcgcctcgggtggatcgcgctggaggaagtgaagggtctattgggtgcggatttgagcgcggactcgttcgtttatttggggtcagactcggactcagactcggtggtgtactgggcgatcgacgtgtcgagggagagtgggttggtgacggaattcagtggcgtgaggttgtgcttcgtggagctcaggacgctcatggtcgctaccgattgggtggatttgaagaccatggggaacctcgccatcgccggtcatgccagggcacttcttgaatggcataaaatatcacgattttgtggacattgtggagagaaaacagtccctatggaagctgggagacgtaaacagtgctcaaatgaatcatgcaaacagaggatatatccacgacttgacccggtggtcattatgctagtaattgatcgggagaatgaccgtgcccttttgagcaaacaatcgagatttgtacctagaatgtggagctgcttagcaggttttatagagccaggagaaagcttggaggaggctgtaagaagagaaacgtgggaggagactggtattgaagtgggagaagttgtatatcatagctctcagccatggcctgttggaccgaatagcatgccatgtcagctgatggtggggttctttgcatatgcgaaatcccttgaaataaatgtggacaaagaagagttggaagatgctcagtggcacagtagagaatatgtaagaaaggctctgacatttgctgaatacaagaaagcccaacaaactgcggtagcgaaggtagaacaaatgtgtaagggagtagaaaaggctcacagcttgtctaccgatttcaatgtggaaagtggtgaacttgctccaatgtttgttcctggaccctttgcaatagctcatcaccttatttcctcctgggcattcccagatcaaaatgtaaatggcagtgaatgtcattcaaaacaggctagtggttctatgtcaaatttgtaggagtgcaaattatttttttaaaggcacctttgattttacattgttttccatactaaactgatgtgagatataatcaatcaccataagactgactgcattatgttgcattttctttgttgggcgtagaaacataaattgggcagttgaattgtttagggtttttttatgtgtaagaattaaataagatatcaagagatttataacatttac

SEQ ID NO: 57072 - protein, 426 aa, Glycine max
  peptide (1)..(426): Ceres Seq. ID no. 15168518
  misc_feature (229)..(360): Pfam Name: NUDIX domain Pfam Description: NUDIX domain
  misc_feature (183)..(347): Homolog of NCBI NO: 29829616 NR Description: hypothetical protein [Streptomyces avermitilis
  misc_feature (184)..(336): Homolog of NCBI NO: 15963981 NR Description: HYPOTHETICAL PROTEIN [Sinorhizobium meliloti]
  misc_feature (178)..(343): Homolog of NCBI NO: 15887452 NR Description: AGR_C_150p [Agrobacterium tumefaciens]
  misc_feature (180)..(344): Homolog of NCBI NO: 13899267 NR Description: nudix (nucleoside diphosphate linked moiety
  misc_feature (102)..(343): Homolog of NCBI NO: 22988758 NR Description: hypothetical protein [Burkholderia fungorum]
  misc_feature (127)..(344): Homolog of NCBI NO: 21312664 NR Description: RIKEN cDNA 0610016O18 [Mus musculus]
  misc_feature (177)..(347): Homolog of NCBI NO: 23109722 NR Description: hypothetical protein [Novosphingobium
  misc_feature (317)..(404): Homolog of NCBI NO: 5803245 NR Description: hypothetical protein [Oryza sativa (japonica
  misc_feature (29)..(189): Homolog of NCBI NO: 5803245 NR Description: hypothetical protein [Oryza sativa (japonica
  misc_feature (1)..(426): Homolog of NCBI NO: 15241252 NR Description: MutT/nudix family protein [Arabidopsis thaliana]
MLKLLLPSSSSKLISRHIFSQLSRPTTTMSINLRTHAFAGNPLRSPNRVDPFSPASALETLTTRILDAAHVSSPSVDFKVLPFRNGRVLASSESGDTWRLGWIALEEVKGLLGADLSADSFVYLGSDSDSDSVVYWAIDVSRESGLVTEFSGVRLCFVELRTLMVATDWVDLKTMGNLAIAGHARALLEWHKISRFCGHCGEKTVPMEAGRRKQCSNESCKQRIYPRLDPVVIMLVIDRENDRALLSKQSRFVPRMWSCLAGFIEPGESLEEAVRRETWEETGIEVGEVVYHSSQPWPVGPNSMPCQLMVGFFAYAKSLEINVDKEELEDAQWHSREYVRKALTFAEYKKAQQTAVAKVEQMCKGVEKAHSLSTDFNVESGELAPMFVPGPFAIAHHLISSWAFPDQNVNGSECHSKQASGSMSNL

SEQ ID NO: 57073 - protein, 398 aa, Glycine max
  peptide (1)..(398): Ceres Seq. ID no. 15168519
  misc_feature (201)..(332): Pfam Name: NUDIX domain Pfam Description: NUDIX domain
  misc_feature (155)..(319): Homolog of NCBI NO: 29829616 NR Description: hypothetical protein [Streptomyces avermitilis
  misc_feature (156)..(308): Homolog of NCBI NO: 15963981 NR Description: HYPOTHETICAL PROTEIN [Sinorhizobium meliloti]
  misc_feature (150)..(315): Homolog of NCBI NO: 15887452 NR Description: AGR_C_150p [Agrobacterium tumefaciens]
  misc_feature (152)..(316): Homolog of NCBI NO: 13899267 NR Description: nudix (nucleoside diphosphate linked moiety
  misc_feature (74)..(315): Homolog of NCBI NO: 22988758 NR Description: hypothetical protein [Burkholderia fungorum]
  misc_feature (99)..(316): Homolog of NCBI NO: 21312664 NR Description: RIKEN cDNA 0610016O18 [Mus musculus]
  misc_feature (149)..(319): Homolog of NCBI NO: 23109722 NR Description: hypothetical protein [Novosphingobium
  misc_feature (289)..(376): Homolog of NCBI NO: 5803245 NR Description: hypothetical protein [Oryza sativa (japonica
  misc_feature (1)..(161): Homolog of NCBI NO: 5803245 NR Description: hypothetical protein [Oryza sativa (japonica
  misc_feature (1)..(398): Homolog of NCBI NO: 15241252 NR Description: MutT/nudix family protein [Arabidopsis thaliana]
MSINLRTHAFAGNPLRSPNRVDPFSPASALETLTTRILDAAHVSSPSVDFKVLPFRNGRVLASSESGDTWRLGWIALEEVKGLLGADLSADSFVYLGSDSDSDSVVYWAIDVSRESGLVTEFSGVRLCFVELRTLMVATDWVDLKTMGNLAIAGHARALLEWHKISRFCGHCGEKTVPMEAGRRKQCSNESCKQRIYPRLDPVVIMLVIDRENDRALLSKQSRFVPRMWSCLAGFIEPGESLEEAVRRETWEETGIEVGEVVYHSSQPWPVGPNSMPCQLMVGFFAYAKSLEINVDKEELEDAQWHSREYVRKALTFAEYKKAQQTAVAKVEQMCKGVEKAHSLSTDFNVESGELAPMFVPGPFAIAHHLISSWAFPDQNVNGSECHSKQASGSMSNL

SEQ ID NO: 57074 - protein, 263 aa, Glycine max
  peptide (1)..(263): Ceres Seq. ID no. 15168520
  misc_feature (66)..(197): Pfam Name: NUDIX domain Pfam Description: NUDIX domain
  misc_feature (20)..(184): Homolog of NCBI NO: 29829616 NR Description: hypothetical protein [Streptomyces avermitilis
  misc_feature (21)..(173): Homolog of NCBI NO: 15963981 NR Description: HYPOTHETICAL PROTEIN [Sinorhizobium meliloti]
  misc_feature (15)..(180): Homolog of NCBI NO: 15887452 NR Description: AGR_C_150p [Agrobacterium tumefaciens]
  misc_feature (17)..(181): Homolog of NCBI NO: 13899267 NR Description: nudix (nucleoside diphosphate linked moiety
  misc_feature (1)..(180): Homolog of NCBI NO: 22988758 NR Description: hypothetical protein [Burkholderia fungorum]
  misc_feature (1)..(181): Homolog of NCBI NO: 21312664 NR Description: RIKEN cDNA 0610016O18 [Mus musculus]
  misc_feature (14)..(184): Homolog of NCBI NO: 23109722 NR Description: hypothetical protein [Novosphingobium
  misc_feature (154)..(241): Homolog of NCBI NO: 5803245 NR Description: hypothetical protein [Oryza sativa (japonica
  misc_feature (1)..(26): Homolog of NCBI NO: 5803245 NR Description: hypothetical protein [Oryza sativa (japonica
  misc_feature (1)..(263): Homolog of NCBI NO: 15241252 NR Description: MutT/nudix family protein [Arabidopsis thaliana]
MVATDWVDLKTMGNLAIAGHARALLEWHKISRFCGHCGEKTVPMEAGRRKQCSNESCKQRIYPRLDPVVIMLVIDRENDRALLSKQSRFVPRMWSCLAGFIEPGESLEEAVRRETWEETGIEVGEVVYHSSQPWPVGPNSMPCQLMVGFFAYAKSLEINVDKEELEDAQWHSREYVRKALTFAEYKKAQQTAVAKVEQMCKGVEKAHSLSTDFNVESGELAPMFVPGPFAIAHHLISSWAFPDQNVNGSECHSKQASGSMSNL

SEQ ID NO: 57075 - DNA, 1478 bp, Glycine max
  misc_feature (1)..(1478): Ceres Seq. ID no. 15175775
aacctcactgtgaccccttaaggccttcttcaaccttctaaaacaccaccctcttttgcataacttcaccaaaatgtccctctgctacacttccaatttcatctcactgaaccatcaaaagagcttctccttaaccttctcttcagagtcttctcctcacttcatcaacctatttccggttaagcctcagaaaccacaccaccctattaagttcaccgcagaaaggttcaaactttttgcctctctgacatcatctccatccgttgagacctccccatcaagttataggagcaagagccccaaagatgttaacgtcttggtggtgggttcaactgggtacattggaaagttcgtggtgagagagttagttaagagagggtttaatgttacagccatagctagagagaggagtggaattaagggcagtgttgataaggatcagactttgggtcagttgagaggggccaatgtgtgtttctcagacgtgaccaatttggatgtttttgaggaatctctgaacaggttggggaagtcatttgatgttgtggtgtcatgtcttgctagtagaaatggaggtgtgaaggactcttggaagatagattatgaggcaacaaggaatagccttgttgctggaagaaaacgtggggcttcacattttgtgttgctttcagcaatatgtgtgcagaagccgctcctcgagtttcagcgtgccaagttgaagtttgaggatgagttggtgaagttagctgaggaggatggtggattcacttatagcatagtgaggccaactgcatttttcaagagtttggggggtcaggttgagttagtgaaggatgggaaaccttatgttatgtttggagatgggaaactgtgtgcttgtaagcctataagtgagtctgatttggcttcttttattgtggattgtgtgctgagtgaggataagattaaccaggtgttgccaattggagggcctgggaaggcattgactccattggaacaaggggagatgctgtttaggcttttggggaaggagcctaagttcttgaaagttccaatcgggatcatggatttcgccattggggttcttgactttttggttaaggtctttccttcactggaagatgctgctgagtttgggaagattggaaggtactatgcggcggaaagtatgttgcttctggatcccgagaccggagaatacagtgctgagaaaacacctagctatgggaatgatacattggaagagttttttgcaagggttctcagggagggcatggctggtcaagaactaggtgagcaaacaatattttaagatgattgtggttagatatgtatgaacacaataaggcaaatagagcaaccagttttgtttctgtaaatgtatgtattcagctagagtcactgtaatgtttacaagttcaggcattgttgaaagaaattcaagtctctggaaatgaattgttgaagattcattcttc

SEQ ID NO: 57076 - protein, 412 aa, Glycine max
  peptide (1)..(412): Ceres Seq. ID no. 15175776
  misc_feature (81)..(331): Pfam Name: Isoflavone reductase Pfam Description: Isoflavone reductase
  misc_feature (60)..(321): Homolog of NCBI NO: 30685117 NR Description: expressed protein [Arabidopsis thaliana]
  misc_feature (79)..(238): Homolog of NCBI NO: 23130188 NR Description: hypothetical protein [Nostoc punctiforme]
  misc_feature (142)..(412): Homolog of NCBI NO: 21328662 NR Description: conserved hypothetical protein [uncultured
  misc_feature (76)..(412): Homolog of NCBI NO: 22959007 NR Description: hypothetical protein [Rhodobacter sphaeroides]
  misc_feature (81)..(412): Homolog of NCBI NO: 21673889 NR Description: conserved hypothetical protein [Chlorobium
  misc_feature (71)..(412): Homolog of NCBI NO: 33865497 NR Description: conserved hypothetical protein [Synechococcus sp.
  misc_feature (1)..(409): Homolog of NCBI NO: 21553818 NR Description: unknown [Arabidopsis thaliana]
  misc_feature (1)..(409): Homolog of NCBI NO: 26449404 NR Description: unknown protein [Arabidopsis thaliana]
  misc_feature (1)..(409): Homolog of NCBI NO: 15239530 NR Description: isoflavone reductase-related [Arabidopsis
MSLCYTSNFISLNHQKSFSLTFSSESSPHFINLFPVKPQKPHHPIKFTAERFKLFASLTSSPSVETSPSSYRSKSPKDVNVLVVGSTGYIGKFVVRELVKRGFNVTAIARERSGIKGSVDKDQTLGQLRGANVCFSDVTNLDVFEESLNRLGKSFDVVVSCLASRNGGVKDSWKIDYEATRNSLVAGRKRGASHFVLLSAICVQKPLLEFQRAKLKFEDELVKLAEEDGGFTYSIVRPTAFFKSLGGQVELVKDGKPYVMFGDGKLCACKPISESDLASFIVDCVLSEDKINQVLPIGGPGKALTPLEQGEMLFRLLGKEPKFLKVPIGIMDFAIGVLDFLVKVFPSLEDAAEFGKIGRYYAAESMLLLDPETGEYSAEKTPSYGNDTLEEFFARVLREGMAGQELGEQTIF

SEQ ID NO: 57077 - DNA, 1935 bp, Glycine max
  misc_feature (1)..(1935): Ceres Seq. ID no. 15179918
acagtaactgtaaccgttccaaatttctatgccagcgaggcagagagagaaactagagcgagaaagagagagagcgccacgcaccgttcattccttcgtcctcgccgtttctaaccgtcgcagttttccggcgaagtttctccgatttgtttaaccgaaatggcggatctgtccgttctcggttggattctgtgctccgctctgagcctcttcgcgctctacagcctggccttcggcggagcgagccgtaaccgcgcttcgccggagaagaggaatgagttatcggagaccgtgacgacctccgccggagaatgtagatcagagaaacaccacggcgacgctgacgtcatcattgtcggagccggcgtcgccggcgcctctctggcgcacactctcggcaaggatgggcgtcgggtacacgtcattgaaagagacctgagtgagcctgatcgaattgttggagagttgcttcaacccggtggctatctcaaattaattgagctcggacttgaagattttgtggacaaaattgatgctcagcaagtgtttggttatgcccttttcaaggatgggaaacatactcgtctctcttaccccttggagaagtttcactcggatgtctctggcagaagctttcacaatgggcgctttattcagaggttgcgggagaaagctgcctcacttgccaatgtacgattggagcaaggaacagtcacttccctggttgaagagaagggaacaattaaaggtgtgcaatataagaacaaagatggccaggagttgacaacatatgctcctcttaccattgtttgtgatggttgcttctcaaacttacgccgttctctttgtaatcctaaggtggatattccctcatgttttgttggtttagttttagagaactgtgaacttccatgtgcaaatcatggccatgtcatactgggagacccttcgccgattctattctatcctatcagtagtacagagattcgctgtctggtcgatgtacctggtcagaaggttccttctatatcaaacggtgaaatggaaaagtatttgaagacaatggtggctccacagatccccccccagctttatgatgccttcattgctgctgttgacaaaggcaacataaggacaatgccaaacagaagcatgccagcagatcctcatcctacacccggagcccttctgatgggagatgcattcaacatgcgacatccactaactgggggaggaatgactgtagcattgtctgatattgtggtgctgagaaatcttctaagccctttgtctgacctgaatgatgcacccacactctgtaaataccttgaatcattttataccttgcgtaagcctgtggcatccaccataaatacattggcaggtgctctttacaaagtattttgtgcatcccctgatctggcaaggaaggaaatgcgccaagcttgcttcgattatctcagccttggaggcctattctcggaaggaccagtctctttactttctggattaaaccctcgtcccttgagcttggttctccatttctttgctgttgcaatatacggtgttggccgtctattgttaccatttccttcacctaagagagtatggatcggagcccgattaatctcgggtgcatctgcaatcatccttcccataattaaggccgaagggattcgtcagatgtttttccctgccactgttccagcttattacagaactcctccagttgcacaataaattgagggaaggttgaagttcgtagttctgtaagcattttggcttcttttgtgtgtattctttgtagtctgtagcttgtaatgttttaattgaatgtatcatctctgtctctctctctctctctcctttttggtacactagaaattaaatccatgatattaaactaaattacaatccactctgggcacttaaacc

SEQ ID NO: 57078 - protein, 526 aa, Glycine max
  peptide (1)..(526): Ceres Seq. ID no. 15179919
  misc_feature (211)..(409): Pfam Name: Monooxygenase Pfam Description: Monooxygenase
  misc_feature (16)..(523): Homolog of NCBI NO: 7488348 NR Description: squalene monooxygenase (EC 1.14.99.7) -
  misc_feature (16)..(523): Homolog of NCBI NO: 21537043 NR Description: squalene epoxidase-like protein [Arabidopsis
  misc_feature (16)..(523): Homolog of NCBI NO: 18420113 NR Description: squalene monooxygenase (squalene epoxidase) (SE),
  misc_feature (9)..(526): Homolog of NCBI NO: 25404216 NR Description: probable squalene monooxygenase F9K23.3
  misc_feature (9)..(526): Homolog of NCBI NO: 18406296 NR Description: squalene monooxygenase (squalene epoxidase) (SE),
  misc_feature (59)..(523): Homolog of NCBI NO: 27311240 NR Description: Putative Squalene monooxygenase
  misc_feature (6)..(522): Homolog of NCBI NO: 27311241 NR Description: Putative Squalene monooxygenase
  misc_feature (1)..(524): Homolog of NCBI NO: 6685403 NR Description: Squalene monooxygenase (Squalene epoxidase) (SE)
  misc_feature (1)..(525): Homolog of NCBI NO: 27475612 NR Description: squalene monooxygenase 1 [Medicago truncatula]
  misc_feature (3)..(524): Homolog of NCBI NO: 27475610 NR Description: squalene monooxygenase 2 [Medicago truncatula]
MADLSVLGWILCSALSLFALYSLAFGGASRNRASPEKRNELSETVTTSAGECRSEKHHGDADVIIVGAGVAGASLAHTLGKDGRRVHVIERDLSEPDRIVGELLQPGGYLKLIELGLEDFVDKIDAQQVFGYALFKDGKHTRLSYPLEKFHSDVSGRSFHNGRFIQRLREKAASLANVRLEQGTVTSLVEEKGTIKGVQYKNKDGQELTTYAPLTIVCDGCFSNLRRSLCNPKVDIPSCFVGLVLENCELPCANHGHVILGDPSPILFYPISSTEIRCLVDVPGQKVPSISNGEMEKYLKTMVAPQIPPQLYDAFIAAVDKGNIRTMPNRSMPADPHPTPGALLMGDAFNMRHPLTGGGMTVALSDIVVLRNLLSPLSDLNDAPTLCKYLESFYTLRKPVASTINTLAGALYKVFCASPDLARKEMRQACFDYLSLGGLFSEGPVSLLSGLNPRPLSLVLHFFAVAIYGVGRLLLPFPSPKRVWIGARLISGASAIILPIIKAEGIRQMFFPATVPAYYRTPPVAQ

SEQ ID NO: 57079 - DNA, 950 bp, Glycine max
  misc_feature (1)..(950): Ceres Seq. ID no. 12608035
agtaactcaaccttcaaacattttgccttttcagctttcattgcccaaccttgtagtgtggccttgctgttttctcaatgagaaaggcttttactctgcaacgcgcacttttgcgcttctctgttgcgttgttgctggttgccagcttcacttgtgctacttctgttatggcaataactgaagtttcagggaatgaagtgaatacagatgggaagcttgtaaatgaagaactagcaaaaacaagccaacaaggatatgacaaagaagcaaaatttaaaggatttttttcaaaacctattccaaaaccaatttctgttgttaagcctattcctattccactatataagtctataccaaaatcaattcccatagtgaaacctatcccaaagtcaattcctaatgaagaagaaaaatttaaaggactttttccaaagcctattcccatagttaagcctattccgaagtcaattcccattgttaagccaatactaaaaccaattcctgttgttaaacctattcctattccagtatacaagtccataccaaaatctgttcctattgttaagcctgtgccaaagttaattccggttgttaaacccataacaaaacccattcctacttttgagccagaatcttttctaaagccgaagcctttctttgaaaaacctgttcctaaattgccactggagcccaaattcaagaaaccacgtattccacattttccggttcaaaagccaatttcaactccaactccataaaactattttgctcagaaagttattcgatccattatctaacgcctatatatctacactaaatatctcaaaattatcagttgcatctgcataatcatcctatcatatttgtgtactgtattggataacatgtggcggatgtaaatcaatattatattaaaatacaagagtcgtattgattttccatttttattt

SEQ ID NO: 57080 - protein, 226 aa, Glycine max
  peptide (1)..(226): Ceres Seq. ID no. 12608036
  misc_feature (47)..(226): Pfam Name: Extensin-like region Pfam Description: Extensin-like region
  misc_feature (72)..(226): Homolog of NCBI NO: 100798 NR Description: proline-rich protein - wheat
  misc_feature (72)..(226): Homolog of NCBI NO: 100798 NR Description: proline-rich protein - wheat
  misc_feature (72)..(226): Homolog of NCBI NO: 100798 NR Description: proline-rich protein - wheat
  misc_feature (72)..(226): Homolog of NCBI NO: 7489265 NR Description: proline-rich protein GPP1 - potato
  misc_feature (71)..(226): Homolog of NCBI NO: 17570087 NR Description: Predicted CDS, E. gracilis major membrane
  misc_feature (71)..(226): Homolog of NCBI NO: 17570087 NR Description: Predicted CDS, E. gracilis major membrane
  misc_feature (70)..(226): Homolog of NCBI NO: 17570087 NR Description: Predicted CDS, E. gracilis major membrane
  misc_feature (72)..(226): Homolog of NCBI NO: 7489265 NR Description: proline-rich protein GPP1 - potato
  misc_feature (72)..(226): Homolog of NCBI NO: 17570087 NR Description: Predicted CDS, E. gracilis major membrane
  misc_feature (70)..(221): Homolog of NCBI NO: 17570087 NR Description: Predicted CDS, E. gracilis major membrane
MRKAFTLQRALLRFSVALLLVASFTCATSVMAITEVSGNEVNTDGKLVNEELAKTSQQGYDKEAKFKGFFSKPIPKPISVVKPIPIPLYKSIPKSIPIVKPIPKSIPNEEEKFKGLFPKPIPIVKPIPKSIPIVKPILKPIPVVKPIPIPVYKSIPKSVPIVKPVPKLIPVVKPITKPIPTFEPESFLKPKPFFEKPVPKLPLEPKFKKPRIPHFPVQKPISTPTP

SEQ ID NO: 57081 - protein, 196 aa, Glycine max
  peptide (1)..(196): Ceres Seq. ID no. 12608037
  misc_feature (17)..(196): Pfam Name: Extensin-like region Pfam Description: Extensin-like region
  misc_feature (42)..(196): Homolog of NCBI NO: 100798 NR Description: proline-rich protein - wheat
  misc_feature (42)..(196): Homolog of NCBI NO: 100798 NR Description: proline-rich protein - wheat
  misc_feature (42)..(196): Homolog of NCBI NO: 100798 NR Description: proline-rich protein - wheat
  misc_feature (42)..(196): Homolog of NCBI NO: 7489265 NR Description: proline-rich protein GPP1 - potato
  misc_feature (41)..(196): Homolog of NCBI NO: 17570087 NR Description: Predicted CDS, E. gracilis major membrane
  misc_feature (41)..(196): Homolog of NCBI NO: 17570087 NR Description: Predicted CDS, E. gracilis major membrane
  misc_feature (40)..(196): Homolog of NCBI NO: 17570087 NR Description: Predicted CDS, E. gracilis major membrane
  misc_feature (42)..(196): Homolog of NCBI NO: 7489265 NR Description: proline-rich protein GPP1 - potato
  misc_feature (42)..(196): Homolog of NCBI NO: 17570087 NR Description: Predicted CDS, E. gracilis major membrane
  misc_feature (40)..(191): Homolog of NCBI NO: 17570087 NR Description: Predicted CDS, E. gracilis major membrane
MAITEVSGNEVNTDGKLVNEELAKTSQQGYDKEAKFKGFFSKPIPKPISVVKPIPIPLYKSIPKSIPIVKPIPKSIPNEEEKFKGLFPKPIPIVKPIPKSIPIVKPILKPIPVVKPIPIPVYKSIPKSVPIVKPVPKLIPVVKPITKPIPTFEPESFLKPKPFFEKPVPKLPLEPKFKKPRIPHFPVQKPISTPTP

SEQ ID NO: 57082 - DNA, 1401 bp, Glycine max
  misc_feature (1)..(1401): Ceres Seq. ID no. 13595727
ctttattgtgcctagaacatcctaatcgaaaaactattcttaagccgaattcgacaacaccgtacagtacttgcttcgacttactgtattgtgcgttgcattgccccttcatcacatcatcaacaacgttcactggtaaatggtgcgtaattttcttctcattgcaagattaactgcatcgttcacacaccacagaagtaccccaatccaattgggttctctgctgcaacacaaacacaatgcttcaatttttttcttcaattccttcacttcaggaatctcttctgattctgaatcagatgatgaaaaccaccacaaaggtgacacctttactgtgtcttacctcatcaactcatgggggttgtccccaaaacgggccagggaactctccaacaggatcaatttgaaaaacccagatggcccaaacgctgttattgatcttctcaacaactatgggtttgaaaaaacccatcttgcaaaacttgtggagagaaagccctcagtgcttcttgcggatgcagagaatacccttttgcctaaactcaagttcttccgttctattgggatttccaacactgacatgcctaaaatcctaattgctagccataatatgttgttcagaagcttgaacaaatgcctcattccacggtatgagatcctaaagagtgtacttcgtgacaaaggggaagttgttagagctttgaaaaatgccccatttagttttacgtatggtgacatgatgaaacgcttggttccaaacattagggttttgagggaatctggtgtgcctcaaggttccatttcttatctgttgatgcattctaggtctctagcttacagggaccattccaaatttgtggaagctgtcaacactgctaaggaatttgggtttaatcctttgagaagaacttttgtcgtgggtgttgaagttcttgccattaagagatgggaatcaaggtttgaggtttatgagaggtgtggctggaaccgcgaaatagctcttcgagcagttcgaaagtttcccagtgttgtgaagttgtcagaggaagtgtttataaaaaaaatgagttttctagtgaaggatatgggttggccatcagaagatattgctgaatatcctcaagttgtaacgtacaacttggagaagaggattatccctagattctcggtaatcaaaatgttgaaatcaaaaggtctgctcaagaataatttgcactttagtggcattatttgcataaccgaggcgaagtttttgaagaaatttgtcattagttttcagaaagatttgcctttcttgccagatttctacaacagtttggcaaatcaacagaatgtattataggctttgaaggcttttgctggtgattgccctaacttccagcttgtctctttcattggacc

SEQ ID NO: 57083 - protein, 400 aa, Glycine max
  peptide (1)..(400): Ceres Seq. ID no. 15221648
  misc_feature (99)..(373): Pfam Name: mTERF Pfam Description: mTERF
  misc_feature (88)..(383): Homolog of NCBI NO: 21553423 NR Description: unknown [Arabidopsis thaliana]
  misc_feature (88)..(383): Homolog of NCBI NO: 15238313 NR Description: expressed protein [Arabidopsis thaliana]
  misc_feature (63)..(397): Homolog of NCBI NO: 34394750 NR Description: unknown protein [Oryza sativa (japonica
  misc_feature (275)..(386): Homolog of NCBI NO: 26450011 NR Description: unknown protein [Arabidopsis thaliana]
  misc_feature (275)..(386): Homolog of NCBI NO: 15220660 NR Description: expressed protein [Arabidopsis thaliana]
  misc_feature (17)..(303): Homolog of NCBI NO: 26450011 NR Description: unknown protein [Arabidopsis thaliana]
  misc_feature (17)..(303): Homolog of NCBI NO: 15220660 NR Description: expressed protein [Arabidopsis thaliana]
  misc_feature (47)..(392): Homolog of NCBI NO: 25511650 NR Description: T22I11.2 protein - Arabidopsis thaliana
  misc_feature (47)..(392): Homolog of NCBI NO: 15218140 NR Description: hypothetical protein [Arabidopsis thaliana]
  misc_feature (27)..(390): Homolog of NCBI NO: 18415647 NR Description: expressed protein [Arabidopsis thaliana]
MVRNFLLIARLTASFTHHRSTPIQLGSLLQHKHNASIFFFNSFTSGISSDSESDDENHHKGDTFTVSYLINSWGLSPKRARELSNRINLKNPDGPNAVIDLLNNYGFEKTHLAKLVERKPSVLLADAENTLLPKLKFFRSIGISNTDMPKILIASHNMLFRSLNKCLIPRYEILKSVLRDKGEVVRALKNAPFSFTYGDMMKRLVPNIRVLRESGVPQGSISYLLMHSRSLAYRDHSKFVEAVNTAKEFGFNPLRRTFVVGVEVLAIKRWESRFEVYERCGWNREIALRAVRKFPSVVKLSEEVFIKKMSFLVKDMGWPSEDIAEYPQVVTYNLEKRIIPRFSVIKMLKSKGLLKNNLHFSGIICITEAKFLKKFVISFQKDLPFLPDFYNSLANQQNVL

SEQ ID NO: 57084 - protein, 253 aa, Glycine max
  peptide (1)..(253): Ceres Seq. ID no. 15221649
  misc_feature (1)..(226): Pfam Name: mTERF Pfam Description: mTERF
  misc_feature (1)..(236): Homolog of NCBI NO: 21553423 NR Description: unknown [Arabidopsis thaliana]
  misc_feature (1)..(236): Homolog of NCBI NO: 15238313 NR Description: expressed protein [Arabidopsis thaliana]
  misc_feature (1)..(250): Homolog of NCBI NO: 34394750 NR Description: unknown protein [Oryza sativa (japonica
  misc_feature (128)..(239): Homolog of NCBI NO: 26450011 NR Description: unknown protein [Arabidopsis thaliana]
  misc_feature (128)..(239): Homolog of NCBI NO: 15220660 NR Description: expressed protein [Arabidopsis thaliana]
  misc_feature (1)..(156): Homolog of NCBI NO: 26450011 NR Description: unknown protein [Arabidopsis thaliana]
  misc_feature (1)..(156): Homolog of NCBI NO: 15220660 NR Description: expressed protein [Arabidopsis thaliana]
  misc_feature (1)..(245): Homolog of NCBI NO: 25511650 NR Description: T22I11.2 protein - Arabidopsis thaliana
  misc_feature (1)..(245): Homolog of NCBI NO: 15218140 NR Description: hypothetical protein [Arabidopsis thaliana]
  misc_feature (1)..(243): Homolog of NCBI NO: 18415647 NR Description: expressed protein [Arabidopsis thaliana]
MPKILIASHNMLFRSLNKCLIPRYEILKSVLRDKGEVVRALKNAPFSFTYGDMMKRLVPNIRVLRESGVPQGSISYLLMHSRSLAYRDHSKFVEAVNTAKEFGFNPLRRTFVVGVEVLAIKRWESRFEVYERCGWNREIALRAVRKFPSVVKLSEEVFIKKMSFLVKDMGWPSEDIAEYPQVVTYNLEKRIIPRFSVIKMLKSKGLLKNNLHFSGIICITEAKFLKKFVISFQKDLPFLPDFYNSLANQQNVL

SEQ ID NO: 57085 - protein, 243 aa, Glycine max
  peptide (1)..(243): Ceres Seq. ID no. 15221650
  misc_feature (1)..(216): Pfam Name: mTERF Pfam Description: mTERF
  misc_feature (1)..(226): Homolog of NCBI NO: 21553423 NR Description: unknown [Arabidopsis thaliana]
  misc_feature (1)..(226): Homolog of NCBI NO: 15238313 NR Description: expressed protein [Arabidopsis thaliana]
  misc_feature (1)..(240): Homolog of NCBI NO: 34394750 NR Description: unknown protein [Oryza sativa (japonica
  misc_feature (118)..(229): Homolog of NCBI NO: 26450011 NR Description: unknown protein [Arabidopsis thaliana]
  misc_feature (118)..(229): Homolog of NCBI NO: 15220660 NR Description: expressed protein [Arabidopsis thaliana]
  misc_feature (1)..(146): Homolog of NCBI NO: 26450011 NR Description: unknown protein [Arabidopsis thaliana]
  misc_feature (1)..(146): Homolog of NCBI NO: 15220660 NR Description: expressed protein [Arabidopsis thaliana]
  misc_feature (1)..(235): Homolog of NCBI NO: 25511650 NR Description: T22I11.2 protein - Arabidopsis thaliana
  misc_feature (1)..(235): Homolog of NCBI NO: 15218140 NR Description: hypothetical protein [Arabidopsis thaliana]
  misc_feature (1)..(233): Homolog of NCBI NO: 18415647 NR Description: expressed protein [Arabidopsis thaliana]
MLFRSLNKCLIPRYEILKSVLRDKGEVVRALKNAPFSFTYGDMMKRLVPNIRVLRESGVPQGSISYLLMHSRSLAYRDHSKFVEAVNTAKEFGFNPLRRTFVVGVEVLAIKRWESRFEVYERCGWNREIALRAVRKFPSVVKLSEEVFIKKMSFLVKDMGWPSEDIAEYPQVVTYNLEKRIIPRFSVIKMLKSKGLLKNNLHFSGIICITEAKFLKKFVISFQKDLPFLPDFYNSLANQQNVL

SEQ ID NO: 57086 - DNA, 1446 bp, Glycine max
  misc_feature (1)..(1446): Ceres Seq. ID no. 15171743
aaaaagaagaagaggagtgtgtgtgtggaagaagaagaagaaggagcatatggagttccaccgcagcgactcatcatcgtccccgtcttcatccacgcccacacccaacaacgccgatcccaataaaacctcttcttcagacccaatgcattcatggtgggaatccgtctctaaagcccgttcacgaatccacgccctcgccgccatcctcccctcctcctcctccgactccctctcctctctcgccgactccgaccgccctgctctctcactcttgtcctcccccgctgcctacgccgccgtctcctcttccctctccggctcccactccgaccccctctgccactggctctacgacaccttcctctcctccgacccccacctccgcctcgtcgtcctctccttcgtccccctcctctctggcctctacctctcccgaatccactcccctgaaccgccgtccctcgccgggttcgaagccgtcctcctcgccctctacgccgccgagaccaaatcccgaaacggcaaacccctcgtggtcacaatccccgacctctcccacccctccatctaccatgcgcccctccgcaaaccccaatcccaaaccctaaccctagcctcaacaccctcggttggactcatttcgccccctttagaaccccagctcggcgtcaaatccaccaagcgcgcctccatcgtcggcgttgcgctacactccttcttctcccagatctcccacatgcccgcctggtccaagctcgaattctgccaattcgccgcagcctgggccggctccgcccactgtccctgccgcaacgagctcgaccgcgatggcaaaatcgaggatttcgccaccgccattgagaacgttcgaattcgcgatggcgattatctggaagaagggaaaggggagaggattcccttgccgtgggagattctgcagccttcgctcagaatcctggggcactgtttattggggcctttgaactctcaggatgtgaaggatgctgcttcctttgcggtgcggtgcttgtacgcccgtgcttcccacgatttggtgccgcaggcaatactcgccactaggagtctcattcagcttgatgtgaggactagagaggctgccagggcgaatgccgccactaactcgaatgccaatacgcccaccaaggccaagaagccggagattcttctggtttccaagtgaggaatggggaggaggttgctgttgctgtgtactattactgtaggtcttcatactgtaagcacaatttgtgtttgtataatagaaacttcatagatgccaattttattttatcttttattatttttttgcttgttctgggttatagtatacatatatatatttatttattttttctaccgagtgattgggtagctgtattggctttgtttcttgatggaaatatgctgagcttcctttgtgtt

SEQ ID NO: 57087 - protein, 400 aa, Glycine max
  peptide (1)..(400): Ceres Seq. ID no. 15171744
  misc_feature (22)..(79): Pfam Name: Equine herpesvirus glycoprotein gp2 Pfam Description: Equine herpesvirus glycoprotein gp2
  misc_feature (22)..(366): Homolog of NCBI NO: 15242145 NR Description: expressed protein [Arabidopsis thaliana]
  misc_feature (301)..(400): Homolog of NCBI NO: 15237612 NR Description: expressed protein [Arabidopsis thaliana]
  misc_feature (20)..(289): Homolog of NCBI NO: 15237612 NR Description: expressed protein [Arabidopsis thaliana]
KRRRGVCVWKKKKKEHMEFHRSDSSSSPSSSTPTPNNADPNKTSSSDPMHSWWESVSKARSRIHALAAILPSSSSDSLSSLADSDRPALSLLSSPAAYAAVSSSLSGSHSDPLCHWLYDTFLSSDPHLRLVVLSFVPLLSGLYLSRIHSPEPPSLAGFEAVLLALYAAETKSRNGKPLVVTIPDLSHPSIYHAPLRKPQSQTLTLASTPSVGLISPPLEPQLGVKSTKRASIVGVALHSFFSQISHMPAWSKLEFCQFAAAWAGSAHCPCRNELDRDGKIEDFATAIENVRIRDGDYLEEGKGERIPLPWEILQPSLRILGHCLLGPLNSQDVKDAASFAVRCLYARASHDLVPQAILATRSLIQLDVRTREAARANAATNSNANTPTKAKKPEILLVSK

SEQ ID NO: 57088 - protein, 384 aa, Glycine max
  peptide (1)..(384): Ceres Seq. ID no. 15171745
  misc_feature (6)..(63): Pfam Name: Equine herpesvirus glycoprotein gp2 Pfam Description: Equine herpesvirus glycoprotein gp2
  misc_feature (6)..(350): Homolog of NCBI NO: 15242145 NR Description: expressed protein [Arabidopsis thaliana]
  misc_feature (285)..(384): Homolog of NCBI NO: 15237612 NR Description: expressed protein [Arabidopsis thaliana]
  misc_feature (4)..(273): Homolog of NCBI NO: 15237612 NR Description: expressed protein [Arabidopsis thaliana]
MEFHRSDSSSSPSSSTPTPNNADPNKTSSSDPMHSWWESVSKARSRIHALAAILPSSSSDSLSSLADSDRPALSLLSSPAAYAAVSSSLSGSHSDPLCHWLYDTFLSSDPHLRLVVLSFVPLLSGLYLSRIHSPEPPSLAGFEAVLLALYAAETKSRNGKPLVVTIPDLSHPSIYHAPLRKPQSQTLTLASTPSVGLISPPLEPQLGVKSTKRASIVGVALHSFFSQISHMPAWSKLEFCQFAAAWAGSAHCPCRNELDRDGKIEDFATAIENVRIRDGDYLEEGKGERIPLPWEILQPSLRILGHCLLGPLNSQDVKDAASFAVRCLYARASHDLVPQAILATRSLIQLDVRTREAARANAATNSNANTPTKAKKPEILLVSK

SEQ ID NO: 57089 - protein, 352 aa, Glycine max
  peptide (1)..(352): Ceres Seq. ID no. 15171746
  misc_feature (1)..(318): Homolog of NCBI NO: 15242145 NR Description: expressed protein [Arabidopsis thaliana]
  misc_feature (253)..(352): Homolog of NCBI NO: 15237612 NR Description: expressed protein [Arabidopsis thaliana]
  misc_feature (1)..(241): Homolog of NCBI NO: 15237612 NR Description: expressed protein [Arabidopsis thaliana]
MHSWWESVSKARSRIHALAAILPSSSSDSLSSLADSDRPALSLLSSPAAYAAVSSSLSGSHSDPLCHWLYDTFLSSDPHLRLVVLSFVPLLSGLYLSRIHSPEPPSLAGFEAVLLALYAAETKSRNGKPLVVTIPDLSHPSIYHAPLRKPQSQTLTLASTPSVGLISPPLEPQLGVKSTKRASIVGVALHSFFSQISHMPAWSKLEFCQFAAAWAGSAHCPCRNELDRDGKIEDFATAIENVRIRDGDYLEEGKGERIPLPWEILQPSLRILGHCLLGPLNSQDVKDAASFAVRCLYARASHDLVPQAILATRSLIQLDVRTREAARANAATNSNANTPTKAKKPEILLVSK

SEQ ID NO: 57090 - DNA, 1279 bp, Glycine max
  misc_feature (1)..(1279): Ceres Seq. ID no. 15171717
actgttactgggttgggtcaactctaattacaatgagttatccttcactctcattccaattcgcaccattactctcattttctcttacagcattatccttgccaccattaccggtcttttcgaagcgttactctccatcatcatcttcacctatccccaaagccactccctctcacttattgtcactgttgggttccaaaactcagtcctcagccgtgaatcccgtggtagcacgcggcctcaaattatgcttcaaattcctcgttcctttctctccagtgcagcctcgtcaccggaaattgggtttgggcctgcccaaactcactgtcccaagtcagagagaggagaacgagcttatttggtggccgccagagcccgttttggagctggcgcgtctcgccgtcgattctggcggcgaccccgccgctattcatcgccttcttgacccaaccattatcccgcataggtacctgattgtgaaggatcaaaggaagagcgctgtgagctcaccagaactcgctatggcagacgcttcgtttgaactgaacctgtatctgcagtttttgtttgaactcattgttgatcgaggtccatctgttgggttggatgttgccttgaaccggtttgatctgttccatggtcacctttttctagcgctagactctggaagacttggtatcttattccatgcgaaggaatacccagcatatgataagcaagtgttcccgtacaatatgggtttttgtcagagagggtccaatgtgacatatgatgattcaatgaatctgagaaatattctctggctggctccaatgcttggcgattctggtgaattttgggtggcaccaggtgttcttgtagtgctggatgcttgtcccgatggaatcatatacagagatctaatacccgattatgtaaattttgcaaggactatatatgaagatgatcttggggatgttgctgttgatgtgaactacttgaatgttggatctgaaaccagaaattatcaaatattcatatgctgatgttgggttcgagatatggcgcatgttcacttcccagtgatacaccagcttatataaatgaagattgccgaagcttaaacgaataatgtatatgccaacttcatttgtagtgaagattgcatagcatatttcttccaatatgataggttacttgatagctatgtcaggtactgtatatgcttgtgcaattattggctaacatgacaggtgccgcggatgttgacgtgggttcatgcacttgattgattttgcgt

SEQ ID NO: 57091 - protein, 340 aa, Glycine max
  peptide (1)..(340): Ceres Seq. ID no. 15171718
  misc_feature (57)..(340): Homolog of NCBI NO: 33146851 NR Description: unknown protein [Oryza sativa (japonica
  misc_feature (228)..(340): Homolog of NCBI NO: 15241027 NR Description: expressed protein [Arabidopsis thaliana]
  misc_feature (12)..(227): Homolog of NCBI NO: 15241027 NR Description: expressed protein [Arabidopsis thaliana]
  misc_feature (12)..(340): Homolog of NCBI NO: 40823291 NR Description: At5g27710 [Arabidopsis thaliana]
CYWVGSTLITMSYPSLSFQFAPLLSFSLTALSLPPLPVFSKRYSPSSSSPIPKATPSHLLSLLGSKTQSSAVNPVVARGLKLCFKFLVPFSPVQPRHRKLGLGLPKLTVPSQREENELIWWPPEPVLELARLAVDSGGDPAAIHRLLDPTIIPHRYLIVKDQRKSAVSSPELAMADASFELNLYLQFLFELIVDRGPSVGLDVALNRFDLFHGHLFLALDSGRLGILFHAKEYPAYDKQVFPYNMGFCQRGSNVTYDDSMNLRNILWLAPMLGDSGEFWVAPGVLVVLDACPDGIIYRDLIPDYVNFARTIYEDDLGDVAVDVNYLNVGSETRNYQIFIC

SEQ ID NO: 57092 - protein, 330 aa, Glycine max
  peptide (1)..(330): Ceres Seq. ID no. 15171719
  misc_feature (47)..(330): Homolog of NCBI NO: 33146851 NR Description: unknown protein [Oryza sativa (japonica
  misc_feature (218)..(330): Homolog of NCBI NO: 15241027 NR Description: expressed protein [Arabidopsis thaliana]
  misc_feature (2)..(217): Homolog of NCBI NO: 15241027 NR Description: expressed protein [Arabidopsis thaliana]
  misc_feature (2)..(330): Homolog of NCBI NO: 40823291 NR Description: At5g27710 [Arabidopsis thaliana]
MSYPSLSFQFAPLLSFSLTALSLPPLPVFSKRYSPSSSSPIPKATPSHLLSLLGSKTQSSAVNPVVARGLKLCFKFLVPFSPVQPRHRKLGLGLPKLTVPSQREENELIWWPPEPVLELARLAVDSGGDPAAIHRLLDPTIIPHRYLIVKDQRKSAVSSPELAMADASFELNLYLQFLFELIVDRGPSVGLDVALNRFDLFHGHLFLALDSGRLGILFHAKEYPAYDKQVFPYNMGFCQRGSNVTYDDSMNLRNILWLAPMLGDSGEFWVAPGVLVVLDACPDGIIYRDLIPDYVNFARTIYEDDLGDVAVDVNYLNVGSETRNYQIFIC

SEQ ID NO: 57093 - DNA, 1443 bp, Glycine max
  misc_feature (1)..(1443): Ceres Seq. ID no. 14316532
ttttttttctgcaaacaaatcaaccctcaaatttccttttgcttcctagaaagatttagttcccggaagcttctctctttgcacttgcatgatttgatctccgccgtggattcgtgatggtgattttatgaacttcctcctctgccccctctttccttttctgattatcattatttttatatttaactagagagagagactcatccttccttcgagacatgagatgaggccgatgcaactgccaccgccttccgcttccggggccaaccctgcccctgccaccaccaacaacaacaacaaggagcagcgtccccagcgccgccgcaaggacctcacgctgccgctgccgcagcgagacaccaacttggcggtgccacttcctctgccgccatcgacggcgcctgctgcggcggcgagcggcggagcgagccagcaggcggcgcagcaggtgatccctttctcggagctggagagactgaaccgcatcgggagcgggagcggcgggacggtgtacaaggtggtccaccgcacgagcgggcgcgtgtacgcgctgaaggtgatatacggtcaccacgaggagtcggtgcggcggcagatccaccgggaaatccagatcctccgtgacgtggacgatgcgaacgtggtgaagtgtcacgagatgtacgatcagaacagcgaaatccaggtgctgctggagttcatggacggaggttctctggaggggaaacacatcacgcaggagcagcagctggcagatctgtctcggcagattcttagggggctggcgtacctgcaccggcggcacatcgtccacagggacatcaagccgtcgaatctgcttataaactcgcggaagcaggtgaagatcgctgacttcggggtgggtcggatactgaatcagacgatggatccgtgcaattcgtcggtggggacgatcgcctacatgagtccggagaggatcaatacggacataaacgacgggcaatacgacgcgtacgcaggggacatatggagctttggggttagcatactggagttctacatgggaaggttccccttcgcggttgggaggcagggcgattgggccagtctcatgtgcgccatttgtatgtctcagcctcccgaggctcctccttctgcttcccctcacttcaaggacttcatcttgcgctgtcttcagcgcgatccctctcgccgctggtctgcttccaggttgctcgaacaccccttcattgctccgccgctgcccaaccacaatcagactcctccaaacctccatcagctactccctcctccgccaaggcctcttccctcctagtatgatggatccttctacatgcctattgcctattgcctagctagctagccctgtgtgccgctttattttcattttcattttcattttcatacagaatcaaatcttaatattggattttcagccgt

SEQ ID NO: 57094 - protein, 364 aa, Glycine max
  peptide (1)..(364): Ceres Seq. ID no. 14316533
  misc_feature (82)..(337): Pfam Name: Protein kinase domain Pfam Description: Protein kinase domain
  misc_feature (37)..(341): Homolog of NCBI NO: 15221060 NR Description: mitogen-activated protein kinase kinase (MAPKK),
  misc_feature (37)..(341): Homolog of NCBI NO: 15219482 NR Description: mitogen-activated protein kinase kinase (MAPKK),
  misc_feature (1)..(349): Homolog of NCBI NO: 14719279 NR Description: MAP kinase kinase [Zea mays]
  misc_feature (32)..(364): Homolog of NCBI NO: 25287595 NR Description: mitogen-activated protein kinase kinase (EC
  misc_feature (32)..(364): Homolog of NCBI NO: 19698851 NR Description: MAP kinase kinase 5 [Arabidopsis thaliana]
  misc_feature (32)..(364): Homolog of NCBI NO: 15232491 NR Description: mitogen-activated protein kinase kinase (MAPKK),
  misc_feature (1)..(359): Homolog of NCBI NO: 12484128 NR Description: mitogen-activated protein kinase 2 [Nicotiana
  misc_feature (1)..(364): Homolog of NCBI NO: 15217998 NR Description: mitogen-activated protein kinase kinase (MAPKK),
  misc_feature (1)..(359): Homolog of NCBI NO: 33563103 NR Description: mitogen-activated protein kinase kinase [Solanum
  misc_feature (1)..(364): Homolog of NCBI NO: 15528439 NR Description: MEK map kinase kinsae [Medicago sativa subsp. x
MRPMQLPPPSASGANPAPATTNNNNKEQRPQRRRKDLTLPLPQRDTNLAVPLPLPPSTAPAAAASGGASQQAAQQVIPFSELERLNRIGSGSGGTVYKVVHRTSGRVYALKVIYGHHEESVRRQIHREIQILRDVDDANVVKCHEMYDQNSEIQVLLEFMDGGSLEGKHITQEQQLADLSRQILRGLAYLHRRHIVHRDIKPSNLLINSRKQVKIADFGVGRILNQTMDPCNSSVGTIAYMSPERINTDINDGQYDAYAGDIWSFGVSILEFYMGRFPFAVGRQGDWASLMCAICMSQPPEAPPSASPHFKDFILRCLQRDPSRRWSASRLLEHPFIAPPLPNHNQTPPNLHQLLPPPPRPLPS

SEQ ID NO: 57095 - protein, 361 aa, Glycine max
  peptide (1)..(361): Ceres Seq. ID no. 14316534
  misc_feature (79)..(334): Pfam Name: Protein kinase domain Pfam Description: Protein kinase domain
  misc_feature (34)..(338): Homolog of NCBI NO: 15221060 NR Description: mitogen-activated protein kinase kinase (MAPKK),
  misc_feature (34)..(338): Homolog of NCBI NO: 15219482 NR Description: mitogen-activated protein kinase kinase (MAPKK),
  misc_feature (1)..(346): Homolog of NCBI NO: 14719279 NR Description: MAP kinase kinase [Zea mays]
  misc_feature (29)..(361): Homolog of NCBI NO: 25287595 NR Description: mitogen-activated protein kinase kinase (EC
  misc_feature (29)..(361): Homolog of NCBI NO: 19698851 NR Description: MAP kinase kinase 5 [Arabidopsis thaliana]
  misc_feature (29)..(361): Homolog of NCBI NO: 15232491 NR Description: mitogen-activated protein kinase kinase (MAPKK),
  misc_feature (1)..(356): Homolog of NCBI NO: 12484128 NR Description: mitogen-activated protein kinase 2 [Nicotiana
  misc_feature (1)..(361): Homolog of NCBI NO: 15217998 NR Description: mitogen-activated protein kinase kinase (MAPKK),
  misc_feature (1)..(356): Homolog of NCBI NO: 33563103 NR Description: mitogen-activated protein kinase kinase [Solanum
  misc_feature (1)..(361): Homolog of NCBI NO: 15528439 NR Description: MEK map kinase kinsae [Medicago sativa subsp. x
MQLPPPSASGANPAPATTNNNNKEQRPQRRRKDLTLPLPQRDTNLAVPLPLPPSTAPAAAASGGASQQAAQQVIPFSELERLNRIGSGSGGTVYKVVHRTSGRVYALKVIYGHHEESVRRQIHREIQILRDVDDANVVKCHEMYDQNSEIQVLLEFMDGGSLEGKHITQEQQLADLSRQILRGLAYLHRRHIVHRDIKPSNLLINSRKQVKIADFGVGRILNQTMDPCNSSVGTIAYMSPERINTDINDGQYDAYAGDIWSFGVSILEFYMGRFPFAVGRQGDWASLMCAICMSQPPEAPPSASPHFKDFILRCLQRDPSRRWSASRLLEHPFIAPPLPNHNQTPPNLHQLLPPPPRPLPS

SEQ ID NO: 57096 - protein, 219 aa, Glycine max
  peptide (1)..(219): Ceres Seq. ID no. 14316535
  misc_feature (1)..(192): Pfam Name: Protein kinase domain Pfam Description: Protein kinase domain
  misc_feature (1)..(196): Homolog of NCBI NO: 15221060 NR Description: mitogen-activated protein kinase kinase (MAPKK),
  misc_feature (1)..(196): Homolog of NCBI NO: 15219482 NR Description: mitogen-activated protein kinase kinase (MAPKK),
  misc_feature (1)..(204): Homolog of NCBI NO: 14719279 NR Description: MAP kinase kinase [Zea mays]
  misc_feature (1)..(219): Homolog of NCBI NO: 25287595 NR Description: mitogen-activated protein kinase kinase (EC
  misc_feature (1)..(219): Homolog of NCBI NO: 19698851 NR Description: MAP kinase kinase 5 [Arabidopsis thaliana]
  misc_feature (1)..(219): Homolog of NCBI NO: 15232491 NR Description: mitogen-activated protein kinase kinase (MAPKK),
  misc_feature (1)..(214): Homolog of NCBI NO: 12484128 NR Description: mitogen-activated protein kinase 2 [Nicotiana
  misc_feature (1)..(219): Homolog of NCBI NO: 15217998 NR Description: mitogen-activated protein kinase kinase (MAPKK),
  misc_feature (1)..(214): Homolog of NCBI NO: 33563103 NR Description: mitogen-activated protein kinase kinase [Solanum
  misc_feature (1)..(219): Homolog of NCBI NO: 15528439 NR Description: MEK map kinase kinsae [Medicago sativa subsp. x
MYDQNSEIQVLLEFMDGGSLEGKHITQEQQLADLSRQILRGLAYLHRRHIVHRDIKPSNLLINSRKQVKIADFGVGRILNQTMDPCNSSVGTIAYMSPERINTDINDGQYDAYAGDIWSFGVSILEFYMGRFPFAVGRQGDWASLMCAICMSQPPEAPPSASPHFKDFILRCLQRDPSRRWSASRLLEHPFIAPPLPNHNQTPPNLHQLLPPPPRPLPS

SEQ ID NO: 57097 - DNA, 1436 bp, Glycine max
  misc_feature (1)..(1436): Ceres Seq. ID no. 15168352
caccttccctcccctgttcaaaataccattaccatatcaaaaaccttaaccccattaattcataccctccccaccttcccccccgacacataacagctttcgaaccaaacctgttccttcttccttaatggccacaaacatcctccaagcaaaatggaaccaccactccgaagaagacgaagatcacaaagacaatgagcaacaagaagaagaagaagaagataatgaagcattgtcactctgcgatcttccgatcaacctcgaggacccaccgggaaaccaagaacactctcgccccaacgaaacatcgcaagaagaattcaatttccggttatggcgtgctccctttaacaaagagcccgaaatgtgtgcagcggatgaagtcttcttcaagggccaaatcctcccgttgcgcgtctcgttcagctccgaggccgggttgttagccacggtgtcccaatctcaacaacattacggtaagcaattcgttaggtcagaatcgttggatcgcaattctagcgattatcgtagtagtagtaatagtagtagaagtagtagtctcagaagtcaaaactcttccactagcactagcactagctccacaaccacaaacacaacaattcccaaaagtaagcacaaaattcgaaaccaatttcacacgcacccaagtcccaaaccgcaattaagagcatcagctccaacacacaaccaaggtagaaaatccacgtcagcatggggaattttccgtttaggtgttgtccctgctcccgagatagggttacaagatctcaaggttcgaaaccgaaactgcgtcgtcgtcagtcgtaatagtagtaatagtaacagtaacaacaacaacaacagttcgaaaagtgtcaaaacaagtaacaggaacaacaagaagggcagcagcaattacaataatgttttgaaacagttagtgggcaaaggcggtggtctattgagtggttgtgattgttcctttgaaacagtgcaacccaacaacattgtcatgataaaaggtggtaatggtaatagtggtggtggtaccgctaaaagcacgaacatgacagaaagtacaacgcacgccgcgaaagaaaaagtggtcgagtttaagaagcacaagcagcaaaagcagggaaagaaggttacgtcacgtcgccgaacgtttgaatggataaaggagcttcatgcaagccaacctgatgatgaagaggctttgttatcaaacgcatcatgagtggttccgtcgcatgcttaattggagtttactttaagattcttagattagatttagattagattgggtttagattgcctttcatttgaatattaaattttataatattgtagtgcaggtgctgtaacaaaaagttcttgctttctcgcgaggacgaggctgtaatttatttatttttattattttcattttctcc

SEQ ID NO: 57098 - protein, 370 aa, Glycine max
  peptide (1)..(370): Ceres Seq. ID no. 15168353
  misc_feature (236)..(331): Pfam Name: tRNA synthetases class I (I, L, M and V) Pfam Description: tRNA synthetases class I (I, L, M and V)
  misc_feature (232)..(266): Homolog of NCBI NO: 28828651 NR Description: similar to Plasmodium falciparum. Hypothetical
  misc_feature (232)..(266): Homolog of NCBI NO: 28828651 NR Description: similar to Plasmodium falciparum. Hypothetical
  misc_feature (232)..(266): Homolog of NCBI NO: 28828651 NR Description: similar to Plasmodium falciparum. Hypothetical
  misc_feature (232)..(266): Homolog of NCBI NO: 28828651 NR Description: similar to Plasmodium falciparum. Hypothetical
  misc_feature (232)..(267): Homolog of NCBI NO: 28828651 NR Description: similar to Plasmodium falciparum. Hypothetical
  misc_feature (98)..(247): Homolog of NCBI NO: 28828651 NR Description: similar to Plasmodium falciparum. Hypothetical
  misc_feature (77)..(358): Homolog of NCBI NO: 40737007 NR Description: hypothetical protein [Oryza sativa (japonica
  misc_feature (11)..(152): Homolog of NCBI NO: 28393537 NR Description: unknown protein [Arabidopsis thaliana]
  misc_feature (11)..(152): Homolog of NCBI NO: 15240713 NR Description: expressed protein [Arabidopsis thaliana]
  misc_feature (79)..(291): Homolog of NCBI NO: 34393445 NR Description: unknown protein [Oryza sativa (japonica
MATNILQAKWNHHSEEDEDHKDNEQQEEEEEDNEALSLCDLPINLEDPPGNQEHSRPNETSQEEFNFRLWRAPFNKEPEMCAADEVFFKGQILPLRVSFSSEAGLLATVSQSQQHYGKQFVRSESLDRNSSDYRSSSNSSRSSSLRSQNSSTSTSTSSTTTNTTIPKSKHKIRNQFHTHPSPKPQLRASAPTHNQGRKSTSAWGIFRLGVVPAPEIGLQDLKVRNRNCVVVSRNSSNSNSNNNNNSSKSVKTSNRNNKKGSSNYNNVLKQLVGKGGGLLSGCDCSFETVQPNNIVMIKGGNGNSGGGTAKSTNMTESTTHAAKEKVVEFKKHKQQKQGKKVTSRRRTFEWIKELHASQPDDEEALLSNAS

SEQ ID NO: 57099 - protein, 291 aa, Glycine max
  peptide (1)..(291): Ceres Seq. ID no. 15168354
  misc_feature (157)..(252): Pfam Name: tRNA synthetases class I (I, L, M and V) Pfam Description: tRNA synthetases class I (I, L, M and V)
  misc_feature (153)..(187): Homolog of NCBI NO: 28828651 NR Description: similar to Plasmodium falciparum. Hypothetical
  misc_feature (153)..(187): Homolog of NCBI NO: 28828651 NR Description: similar to Plasmodium falciparum. Hypothetical
  misc_feature (153)..(187): Homolog of NCBI NO: 28828651 NR Description: similar to Plasmodium falciparum. Hypothetical
  misc_feature (153)..(187): Homolog of NCBI NO: 28828651 NR Description: similar to Plasmodium falciparum. Hypothetical
  misc_feature (153)..(188): Homolog of NCBI NO: 28828651 NR Description: similar to Plasmodium falciparum. Hypothetical
  misc_feature (19)..(168): Homolog of NCBI NO: 28828651 NR Description: similar to Plasmodium falciparum. Hypothetical
  misc_feature (1)..(279): Homolog of NCBI NO: 40737007 NR Description: hypothetical protein [Oryza sativa (japonica
  misc_feature (1)..(73): Homolog of NCBI NO: 28393537 NR Description: unknown protein [Arabidopsis thaliana]
  misc_feature (1)..(73): Homolog of NCBI NO: 15240713 NR Description: expressed protein [Arabidopsis thaliana]
  misc_feature (1)..(212): Homolog of NCBI NO: 34393445 NR Description: unknown protein [Oryza sativa (japonica
MCAADEVFFKGQILPLRVSFSSEAGLLATVSQSQQHYGKQFVRSESLDRNSSDYRSSSNSSRSSSLRSQNSSTSTSTSSTTTNTTIPKSKHKIRNQFHTHPSPKPQLRASAPTHNQGRKSTSAWGIFRLGVVPAPEIGLQDLKVRNRNCVVVSRNSSNSNSNNNNNSSKSVKTSNRNNKKGSSNYNNVLKQLVGKGGGLLSGCDCSFETVQPNNIVMIKGGNGNSGGGTAKSTNMTESTTHAAKEKVVEFKKHKQQKQGKKVTSRRRTFEWIKELHASQPDDEEALLSNAS

SEQ ID NO: 57100 - DNA, 1292 bp, Glycine max
  misc_feature (1)..(1292): Ceres Seq. ID no. 15168537
acttcccattttattcttcatttcactgacaccacactttatttacatcttcgtatttccctttcctcgaaacttaattagaactcaaaatatagaaaaataagacaacatattaattcgtcgtgttcctcatcatgttcctatttgaggatctctggtccctcccgcgcctcttctcagagtcgcttaatttacagtctttacgcgaatcctttacgagctcgagctgtgacagaacggagtcggagcaatgccgcgacgagtcggcggcgatggttctgaaattcgtggcggtggcgtcgattctggtcgccggattcgggggagtctcgattccgctggtcgggaagtcgcggcggtttcttcgaccggacggcgacgttttcgcggcggcgaaggcgttcgcggcgggggtgattttagcgacggggttcgtccacatgctgagggactcgtgggacgcgcttcgggagccgtgcttggggacgcactcgcgcgcgtgggcgaagtttcccttcaccggtttcttcgccatggtgtcagcgctctttactctactggttgactttttagcgacggaatattacgagcgcagagaggcgcgtgggcgcgtggagcgagggaaggttgttgattatgatgaaggttgtgacgaggcgttgttggaaacgggaatcgtggaggttaaggatcttgggcgagggggaagacactcccactctcacgacggcgatgatgtggaaagtagtgttcgacacgtcgtcgtttcacaggtattggaacttgggattgtatcacattcgatgataattgggttatctctaggagtttcacaaagtccctgtaccatgaaacccctaattgtggcattatccttccatcaattctttgaaggatttgcacttggtggttgcatctcccaagcccaattcaagaccttatcagcaacaataatgtcatgtttttttgcactaacaacgccacttggtgttgctattggagctagtgttgcttcaatttttaacccttacagtccagtagcactcatcactgaaggcatcttggacgccttgtcagctgggattttagtgtatatggctttagtggacttaatagctgcagattttcttagcaagaaaatgcgttgtaactttaggtttcagataatatgttactgtctgcttttccttggggctggattgatgtcttcacttgcaatttgggcatgatactttcctatgttgctgtaaattatttttcaattaatgttgatatataggtttattgttttc

SEQ ID NO: 57101 - protein, 364 aa, Glycine max
  peptide (1)..(364): Ceres Seq. ID no. 15168538
  misc_feature (23)..(193): Homolog of NCBI NO: 7381054 NR Description: Zn and Cd transporter ZNT1 [Thlaspi caerulescens]
  misc_feature (188)..(364): Homolog of NCBI NO: 7381054 NR Description: Zn and Cd transporter ZNT1 [Thlaspi caerulescens]
  misc_feature (28)..(201): Homolog of NCBI NO: 37079196 NR Description: Fe(II) transport protein 3, chloroplast precursor
  misc_feature (170)..(364): Homolog of NCBI NO: 37079196 NR Description: Fe(II) transport protein 3, chloroplast precursor
  misc_feature (188)..(364): Homolog of NCBI NO: 14582255 NR Description: ZIP-like zinc transporter [Thlaspi caerulescens]
  misc_feature (15)..(193): Homolog of NCBI NO: 14582255 NR Description: ZIP-like zinc transporter [Thlaspi caerulescens]
  misc_feature (170)..(364): Homolog of NCBI NO: 18406954 NR Description: metal transporter, putative (IRT3) [Arabidopsis
  misc_feature (1)..(201): Homolog of NCBI NO: 18406954 NR Description: metal transporter, putative (IRT3) [Arabidopsis
  misc_feature (3)..(159): Homolog of NCBI NO: 30682009 NR Description: metal transporter, putative (ZIP4) [Arabidopsis
  misc_feature (190)..(364): Homolog of NCBI NO: 30682009 NR Description: metal transporter, putative (ZIP4) [Arabidopsis
MFLFEDLWSLPRLFSESLNLQSLRESFTSSSCDRTESEQCRDESAAMVLKFVAVASILVAGFGGVSIPLVGKSRRFLRPDGDVFAAAKAFAAGVILATGFVHMLRDSWDALREPCLGTHSRAWAKFPFTGFFAMVSALFTLLVDFLATEYYERREARGRVERGKVVDYDEGCDEALLETGIVEVKDLGRGGRHSHSHDGDDVESSVRHVVVSQVLELGIVSHSMIIGLSLGVSQSPCTMKPLIVALSFHQFFEGFALGGCISQAQFKTLSATIMSCFFALTTPLGVAIGASVASIFNPYSPVALITEGILDALSAGILVYMALVDLIAADFLSKKMRCNFRFQIICYCLLFLGAGLMSSLAIWA

SEQ ID NO: 57102 - protein, 318 aa, Glycine max
  peptide (1)..(318): Ceres Seq. ID no. 15168539
  misc_feature (1)..(147): Homolog of NCBI NO: 7381054 NR Description: Zn and Cd transporter ZNT1 [Thlaspi caerulescens]
  misc_feature (142)..(318): Homolog of NCBI NO: 7381054 NR Description: Zn and Cd transporter ZNT1 [Thlaspi caerulescens]
  misc_feature (1)..(155): Homolog of NCBI NO: 37079196 NR Description: Fe(II) transport protein 3, chloroplast precursor
  misc_feature (124)..(318): Homolog of NCBI NO: 37079196 NR Description: Fe(II) transport protein 3, chloroplast precursor
  misc_feature (142)..(318): Homolog of NCBI NO: 14582255 NR Description: ZIP-like zinc transporter [Thlaspi caerulescens]
  misc_feature (1)..(147): Homolog of NCBI NO: 14582255 NR Description: ZIP-like zinc transporter [Thlaspi caerulescens]
  misc_feature (124)..(318): Homolog of NCBI NO: 18406954 NR Description: metal transporter, putative (IRT3) [Arabidopsis
  misc_feature (1)..(155): Homolog of NCBI NO: 18406954 NR Description: metal transporter, putative (IRT3) [Arabidopsis
  misc_feature (1)..(113): Homolog of NCBI NO: 30682009 NR Description: metal transporter, putative (ZIP4) [Arabidopsis
  misc_feature (144)..(318): Homolog of NCBI NO: 30682009 NR Description: metal transporter, putative (ZIP4) [Arabidopsis
MVLKFVAVASILVAGFGGVSIPLVGKSRRFLRPDGDVFAAAKAFAAGVILATGFVHMLRDSWDALREPCLGTHSRAWAKFPFTGFFAMVSALFTLLVDFLATEYYERREARGRVERGKVVDYDEGCDEALLETGIVEVKDLGRGGRHSHSHDGDDVESSVRHVVVSQVLELGIVSHSMIIGLSLGVSQSPCTMKPLIVALSFHQFFEGFALGGCISQAQFKTLSATIMSCFFALTTPLGVAIGASVASIFNPYSPVALITEGILDALSAGILVYMALVDLIAADFLSKKMRCNFRFQIICYCLLFLGAGLMSSLAIWA

SEQ ID NO: 57103 - protein, 262 aa, Glycine max
  peptide (1)..(262): Ceres Seq. ID no. 15168540
  misc_feature (1)..(91): Homolog of NCBI NO: 7381054 NR Description: Zn and Cd transporter ZNT1 [Thlaspi caerulescens]
  misc_feature (86)..(262): Homolog of NCBI NO: 7381054 NR Description: Zn and Cd transporter ZNT1 [Thlaspi caerulescens]
  misc_feature (1)..(99): Homolog of NCBI NO: 37079196 NR Description: Fe(II) transport protein 3, chloroplast precursor
  misc_feature (68)..(262): Homolog of NCBI NO: 37079196 NR Description: Fe(II) transport protein 3, chloroplast precursor
  misc_feature (86)..(262): Homolog of NCBI NO: 14582255 NR Description: ZIP-like zinc transporter [Thlaspi caerulescens]
  misc_feature (1)..(91): Homolog of NCBI NO: 14582255 NR Description: ZIP-like zinc transporter [Thlaspi caerulescens]
  misc_feature (68)..(262): Homolog of NCBI NO: 18406954 NR Description: metal transporter, putative (IRT3) [Arabidopsis
  misc_feature (1)..(99): Homolog of NCBI NO: 18406954 NR Description: metal transporter, putative (IRT3) [Arabidopsis
  misc_feature (1)..(57): Homolog of NCBI NO: 30682009 NR Description: metal transporter, putative (ZIP4) [Arabidopsis
  misc_feature (88)..(262): Homolog of NCBI NO: 30682009 NR Description: metal transporter, putative (ZIP4) [Arabidopsis
MLRDSWDALREPCLGTHSRAWAKFPFTGFFAMVSALFTLLVDFLATEYYERREARGRVERGKVVDYDEGCDEALLETGIVEVKDLGRGGRHSHSHDGDDVESSVRHVVVSQVLELGIVSHSMIIGLSLGVSQSPCTMKPLIVALSFHQFFEGFALGGCISQAQFKTLSATIMSCFFALTTPLGVAIGASVASIFNPYSPVALITEGILDALSAGILVYMALVDLIAADFLSKKMRCNFRFQIICYCLLFLGAGLMSSLAIWA

SEQ ID NO: 57104 - DNA, 728 bp, Glycine max
  misc_feature (1)..(728): Ceres Seq. ID no. 12563124
gtgccagtcttacccctcttaataccaattttctagggtttatacaattttcgatggcttcttcagatgttgagtaccgttgctttgtcggtgggctcgcttgggccactgacgaccaagctctcgagagagccttctctcagtacggcgaaatcgttgaaacgaagattatcaacgatcgtgagactggaagatccaggggttttggatttgtgaccttcgcctcggagcagtccatgaaagacgccatcgaagggatgaacggccaaaaccttgacggccgtaacatcactgttaacgaagctcagtcccgtggtggcggtggcggcggaggcggtggaggtggtggatatggtggtggtcgcggtggtggatatggtggtggtggtcgcggtggtggagggggatacaaccgtagcggtggcggtggaggctatggcggcggcggtggatatggcggtggcggtggcggtggctatggcggtggcagagaccgtggttatggtggtggtggtgaccgtggttactctcgtggtggtgacggtggtgatggaggctggagaaactagggcttgatgtcgttgattagggtttatgattatgctcagtaattttagttgtgtttgagtttgagtatctttatggttttgtgtcaccgtggttcttgtttttgaccaatatatctggttgtttatagtcgatttaatgaaatgataatcagaaattgg

SEQ ID NO: 57105 - protein, 188 aa, Glycine max
  peptide (1)..(188): Ceres Seq. ID no. 12563125
  misc_feature (27)..(98): Pfam Name: RNA recognition motif. (a.k.a. RRM, RBD, or RNP domain) Pfam Description: RNA recognition motif. (a.k.a. RRM, RBD, or RNP
ASLTPLNTNFLGFIQFSMASSDVEYRCFVGGLAWATDDQALERAFSQYGEIVETKIINDRETGRSRGFGFVTFASEQSMKDAIEGMNGQNLDGRNITVNEAQSRGGGGGGGGGGGGYGGGRGGGYGGGGRGGGGGYNRSGGGGGYGGGGGYGGGGGGGYGGGRDRGYGGGGDRGYSRGGDGGDGGWRN

SEQ ID NO: 57106 - protein, 171 aa, Glycine max
  peptide (1)..(171): Ceres Seq. ID no. 12563126
  misc_feature (10)..(81): Pfam Name: RNA recognition motif. (a.k.a. RRM, RBD, or RNP domain) Pfam Description: RNA recognition motif. (a.k.a. RRM, RBD, or RNP
MASSDVEYRCFVGGLAWATDDQALERAFSQYGEIVETKIINDRETGRSRGFGFVTFASEQSMKDAIEGMNGQNLDGRNITVNEAQSRGGGGGGGGGGGGYGGGRGGGYGGGGRGGGGGYNRSGGGGGYGGGGGYGGGGGGGYGGGRDRGYGGGGDRGYSRGGDGGDGGWRN

SEQ ID NO: 57107 - protein, 110 aa, Glycine max
  peptide (1)..(110): Ceres Seq. ID no. 12563127
  misc_feature (23)..(106): Pfam Name: Herpesvirus latent membrane protein 1 (LMP1) Pfam Description: Herpesvirus latent membrane protein 1 (LMP1)
MKDAIEGMNGQNLDGRNITVNEAQSRGGGGGGGGGGGGYGGGRGGGYGGGGRGGGGGYNRSGGGGGYGGGGGYGGGGGGGYGGGRDRGYGGGGDRGYSRGGDGGDGGWRN

SEQ ID NO: 57108 - DNA, 1192 bp, Glycine max
  misc_feature (1)..(1192): Ceres Seq. ID no. 14312262
ttctttccttcattccaaaccacacccaccacttcttccgatcagatgtccgacgatcactggatcaaggtcgccatggctgacgattctctcgtcgtcgaccttctcctccgcctccaccgccctccaccgccgccaccgccctgtctaaacctccactggacggtgcgtcagcggcgctccagatctgctcacaacaaagcggagtccaccagggccagccccaccacgccgctttcctggagcggcgccacgtcagcaagcggcggcaacctcgatggctatgaggagtacagccgcccaagcaaaccaacccaaacctcaagatctaaggttgctaatcccagcgaaacaaccactaccagaaagaccaggagaaaaaagaccttagctgaactaaaagcggaggaggatttgttgctgaaagaaagaagaaatttgaaaaaagaactggcattcttgcgtctcactgttgagaaacatagagccacaaatgaaagcataaagagaaagaagcttgattttgagtcacggcagaattctagtgctgctgctacggcctctgaggtgtctgggaaagctgtgaatggctcatttcaatttgtaaaagcagagtgtcatccatctaattcagtctcacatgacgattcacctgtttgtgcagcaaatgtttctcccaaagcacaagataatattggtaaccaagaatctacattcgtgctccctgatctaaatttgcctgtcgatgaggatatcagcgccaatatcatgcattatattgaactaagctaataaaggataggatctcgaatgacattccgcatactgataagttagacgaacatcatcttgcaagtatgcctaatagtcgtaatagtataaggtatagcatgtcagtcctaacaaattagattttgctactgtaattgtagatgttaaaccattcactttttccacttggtcaaaactgatgtggaaattgtttttttcttcttttttttttcattcatgaaactgagggtagtgtagaaatcctaacacatcaggcttagttccattctttttttcttcacaggtttctacattatccaaaattctttgtggcaaccctcgaccgtcctttattatagatatattttctgataaatgtaattaggtgttctatagataattcaagaattttggttctttt

SEQ ID NO: 57109 - protein, 263 aa, Glycine max
  peptide (1)..(263): Ceres Seq. ID no. 14312263
  misc_feature (112)..(184): Homolog of NCBI NO: 15218326 NR Description: expressed protein [Arabidopsis thaliana]
  misc_feature (26)..(154): Homolog of NCBI NO: 21537397 NR Description: unknown [Arabidopsis thaliana]
  misc_feature (16)..(154): Homolog of NCBI NO: 18420894 NR Description: expressed protein [Arabidopsis thaliana]
  misc_feature (63)..(177): Homolog of NCBI NO: 15236647 NR Description: expressed protein [Arabidopsis thaliana]
  misc_feature (16)..(112): Homolog of NCBI NO: 25406677 NR Description: hypothetical protein T21F11.6 [imported] -
  misc_feature (112)..(184): Homolog of NCBI NO: 25402801 NR Description: protein F7H2.14 [imported] - Arabidopsis thaliana
  misc_feature (16)..(112): Homolog of NCBI NO: 25402801 NR Description: protein F7H2.14 [imported] - Arabidopsis thaliana
  misc_feature (16)..(177): Homolog of NCBI NO: 22330774 NR Description: expressed protein [Arabidopsis thaliana]
FFPSFQTTPTTSSDQMSDDHWIKVAMADDSLVVDLLLRLHRPPPPPPPCLNLHWTVRQRRSRSAHNKAESTRASPTTPLSWSGATSASGGNLDGYEEYSRPSKPTQTSRSKVANPSETTTTRKTRRKKTLAELKAEEDLLLKERRNLKKELAFLRLTVEKHRATNESIKRKKLDFESRQNSSAAATASEVSGKAVNGSFQFVKAECHPSNSVSHDDSPVCAANVSPKAQDNIGNQESTFVLPDLNLPVDEDISANIMHYIELS

SEQ ID NO: 57110 - protein, 248 aa, Glycine max
  peptide (1)..(248): Ceres Seq. ID no. 14312264
  misc_feature (97)..(169): Homolog of NCBI NO: 15218326 NR Description: expressed protein [Arabidopsis thaliana]
  misc_feature (11)..(139): Homolog of NCBI NO: 21537397 NR Description: unknown [Arabidopsis thaliana]
  misc_feature (1)..(139): Homolog of NCBI NO: 18420894 NR Description: expressed protein [Arabidopsis thaliana]
  misc_feature (48)..(162): Homolog of NCBI NO: 15236647 NR Description: expressed protein [Arabidopsis thaliana]
  misc_feature (1)..(97): Homolog of NCBI NO: 25406677 NR Description: hypothetical protein T21F11.6 [imported] -
  misc_feature (97)..(169): Homolog of NCBI NO: 25402801 NR Description: protein F7H2.14 [imported] - Arabidopsis thaliana
  misc_feature (1)..(97): Homolog of NCBI NO: 25402801 NR Description: protein F7H2.14 [imported] - Arabidopsis thaliana
  misc_feature (1)..(162): Homolog of NCBI NO: 22330774 NR Description: expressed protein [Arabidopsis thaliana]
MSDDHWIKVAMADDSLVVDLLLRLHRPPPPPPPCLNLHWTVRQRRSRSAHNKAESTRASPTTPLSWSGATSASGGNLDGYEEYSRPSKPTQTSRSKVANPSETTTTRKTRRKKTLAELKAEEDLLLKERRNLKKELAFLRLTVEKHRATNESIKRKKLDFESRQNSSAAATASEVSGKAVNGSFQFVKAECHPSNSVSHDDSPVCAANVSPKAQDNIGNQESTFVLPDLNLPVDEDISANIMHYIELS

SEQ ID NO: 57111 - protein, 238 aa, Glycine max
  peptide (1)..(238): Ceres Seq. ID no. 14312265
  misc_feature (87)..(159): Homolog of NCBI NO: 15218326 NR Description: expressed protein [Arabidopsis thaliana]
  misc_feature (1)..(129): Homolog of NCBI NO: 21537397 NR Description: unknown [Arabidopsis thaliana]
  misc_feature (1)..(129): Homolog of NCBI NO: 18420894 NR Description: expressed protein [Arabidopsis thaliana]
  misc_feature (38)..(152): Homolog of NCBI NO: 15236647 NR Description: expressed protein [Arabidopsis thaliana]
  misc_feature (1)..(87): Homolog of NCBI NO: 25406677 NR Description: hypothetical protein T21F11.6 [imported] -
  misc_feature (87)..(159): Homolog of NCBI NO: 25402801 NR Description: protein F7H2.14 [imported] - Arabidopsis thaliana
  misc_feature (1)..(87): Homolog of NCBI NO: 25402801 NR Description: protein F7H2.14 [imported] - Arabidopsis thaliana
  misc_feature (1)..(152): Homolog of NCBI NO: 22330774 NR Description: expressed protein [Arabidopsis thaliana]
MADDSLVVDLLLRLHRPPPPPPPCLNLHWTVRQRRSRSAHNKAESTRASPTTPLSWSGATSASGGNLDGYEEYSRPSKPTQTSRSKVANPSETTTTRKTRRKKTLAELKAEEDLLLKERRNLKKELAFLRLTVEKHRATNESIKRKKLDFESRQNSSAAATASEVSGKAVNGSFQFVKAECHPSNSVSHDDSPVCAANVSPKAQDNIGNQESTFVLPDLNLPVDEDISANIMHYIELS

SEQ ID NO: 57112 - DNA, 1484 bp, Glycine max
  misc_feature (1)..(1484): Ceres Seq. ID no. 14315399
ataatatagttcaggcattatggagagagttgtatactccagggaaacaacctgagaaagtgtgcacctcggtcaaaaaacctgccggcactcgtatctgtgacaccgtgttcaattcggatccaaaaatctgatttatcgggtctcttcccaactcccccacctccaaccaacttccaccagtagtaaacagaaatacaagcataagcaaaagaagacccgcgacacatcgcaacatcgtatcatgtctgcaacaaacgtccccaaagtgctgttacaactacaaccaccctccaaatcgaacccactctgcgtgccggtgataggactcggcaccgccgcggtccacaacgacggtgacacggtgaaggctgcagtcatagaggctatcaaactcggttacagacacttcgacaccgcggcacagtacggatcggagcaggctcttggagaagccattgccgaagcacttcgggttggtctcatagcctcaagagacgagcttttcatcacttccaagttatggtgttgtgataatcatccccatcttgttcttcctgctctacaaaattcgcttcggtctcttaaattagattatttggacctatatttaattcattggccaattactgcaaagcctggaatgtgggagatgccttattctgaagagagccttgttccatttgacttaaagagtgtgtgggcagcaatggaagaatgtcacaaacttggccttaccaaatcaattggagttagcaacttctcttgcaagaaacttgaaaatcttctctcttttgctacaattcctccttctgtcaatcaagtggagatgaatattgcctggcagcaaaagaatcttagagcatactgcaaggcaaagggtataattgtgactgcctactctcctttgggagccaaagggagcaaatgggatatcaatcaaattttggacaatgaattgaccaagcagattgcacaggctcatggcaaaactgcagctcaggtatgtcttagatggttatttgagcaaggtgtgactttcataccaaagagctacaataaagagagattaaaggaaaatttagagatatttgattggtcactcaccaaagatgaccatgaaaagattaatcaagtcaaacaggagcgtatgttcaagtacggaacagcagcattcccgcttcctgatctatttgatggggaaacttagtaatacattatcagcttcaatattccattttccttgggatttaggtttctcgtgtctgtgacacaataaaaggatgaagtgtaatctgtctttagaatacccttaaagaaactcaaaattgaaatcactggtttcactttttgtgggaagtttgtttacagcaatgttatgcttttcttccatgtaattttatgtgctacactgttttatctgttgaaatgtaattgtaattcaagctacaggcatccaataaaaactagactgtttatagttt

SEQ ID NO: 57113 - protein, 321 aa, Glycine max
  peptide (1)..(321): Ceres Seq. ID no. 14315400
  misc_feature (1)..(318): Homolog of NCBI NO: 537296 NR Description: chalcone reductase
  misc_feature (1)..(318): Homolog of NCBI NO: 629623 NR Description: chalcone reductase (EC 1.-.-.-) - alfalfa
  misc_feature (1)..(318): Homolog of NCBI NO: 537298 NR Description: chalcone reductase
  misc_feature (1)..(318): Homolog of NCBI NO: 629622 NR Description: chalcone reductase (EC 1.-.-.-) - alfalfa
  misc_feature (1)..(318): Homolog of NCBI NO: 629624 NR Description: chalcone reductase (EC 1.-.-.-) - alfalfa
MSATNVPKVLLQLQPPSKSNPLCVPVIGLGTAAVHNDGDTVKAAVIEAIKLGYRHFDTAAQYGSEQALGEAIAEALRVGLIASRDELFITSKLWCCDNHPHLVLPALQNSLRSLKLDYLDLYLIHWPITAKPGMWEMPYSEESLVPFDLKSVWAAMEECHKLGLTKSIGVSNFSCKKLENLLSFATIPPSVNQVEMNIAWQQKNLRAYCKAKGIIVTAYSPLGAKGSKWDINQILDNELTKQIAQAHGKTAAQVCLRWLFEQGVTFIPKSYNKERLKENLEIFDWSLTKDDHEKINQVKQERMFKYGTAAFPLPDLFDGET

SEQ ID NO: 57114 - protein, 188 aa, Glycine max
  peptide (1)..(188): Ceres Seq. ID no. 14315401
  misc_feature (1)..(185): Homolog of NCBI NO: 537296 NR Description: chalcone reductase
  misc_feature (1)..(185): Homolog of NCBI NO: 629623 NR Description: chalcone reductase (EC 1.-.-.-) - alfalfa
  misc_feature (1)..(185): Homolog of NCBI NO: 537298 NR Description: chalcone reductase
  misc_feature (1)..(185): Homolog of NCBI NO: 629622 NR Description: chalcone reductase (EC 1.-.-.-) - alfalfa
  misc_feature (1)..(185): Homolog of NCBI NO: 629624 NR Description: chalcone reductase (EC 1.-.-.-) - alfalfa
MWEMPYSEESLVPFDLKSVWAAMEECHKLGLTKSIGVSNFSCKKLENLLSFATIPPSVNQVEMNIAWQQKNLRAYCKAKGIIVTAYSPLGAKGSKWDINQILDNELTKQIAQAHGKTAAQVCLRWLFEQGVTFIPKSYNKERLKENLEIFDWSLTKDDHEKINQVKQERMFKYGTAAFPLPDLFDGET

SEQ ID NO: 57115 - protein, 185 aa, Glycine max
  peptide (1)..(185): Ceres Seq. ID no. 14315402
  misc_feature (1)..(182): Homolog of NCBI NO: 537296 NR Description: chalcone reductase
  misc_feature (1)..(182): Homolog of NCBI NO: 629623 NR Description: chalcone reductase (EC 1.-.-.-) - alfalfa
  misc_feature (1)..(182): Homolog of NCBI NO: 537298 NR Description: chalcone reductase
  misc_feature (1)..(182): Homolog of NCBI NO: 629622 NR Description: chalcone reductase (EC 1.-.-.-) - alfalfa
  misc_feature (1)..(182): Homolog of NCBI NO: 629624 NR Description: chalcone reductase (EC 1.-.-.-) - alfalfa
MPYSEESLVPFDLKSVWAAMEECHKLGLTKSIGVSNFSCKKLENLLSFATIPPSVNQVEMNIAWQQKNLRAYCKAKGIIVTAYSPLGAKGSKWDINQILDNELTKQIAQAHGKTAAQVCLRWLFEQGVTFIPKSYNKERLKENLEIFDWSLTKDDHEKINQVKQERMFKYGTAAFPLPDLFDGET

SEQ ID NO: 57116 - DNA, 1445 bp, Glycine max
  misc_feature (1)..(1445): Ceres Seq. ID no. 15168443
ttagtttgggtggaaatatcatttcccttttctattagaatttttcacttccaccgcattctctgaagaaacctcttgcactgtggacgcagcctccgccgcggggcattaccgccattgaagctgattcatgcttttttcaccgttcctcacaagaccaggtttgaagctattgccattggaaattaggacttcttttttgttactgaaaaattagagtagacaaaaaatgctcagacggaggctatctgttctctcaacatcaatcaccagaagctcaaattatagcaaacccagtctcggatacccatctatccaatctcatccctttcagctccctcactctcccagtgcttatcaaataattagtcctaatgcattcccggattttcaaggttttagagcttacagtcttctgagcttgaatgatctgagagataaggttcccagaaaacagccgacgaggaaggggcgtgggattgggtctggaaagggcaagactgcagggaggggtcacaagggtcagagagccagaaaaggtataaaattggggttcgaaggaggtcagacccctcttcgccgaagattacccaaacgtgggttcaagaacccatttagcctcacttttcagccaataggtttggggaaaattgcaaagtttattaatgctgggaagatagattcttctgaactgattacaatgaaaacactaaaggatgcaggggtactagggaagcaaatgaaagatggagtaagattgatggggcgtggttctgagcagatcaagtggccaattcatctagaggtatcaagggttactgttagggctaaggaagcagttgaagcagctggtgggtctgtgagaagggtgtattacaataagttgggcttgaaggcactggtgaagcctgagtggtttgaaaagaaaggaagattgctgcctaaagcagctagacctcctccaaagcaaaaggataaagttgatagcattggtcggttgcctgccccaacaaagccatttccatttttagttgaagcaagcaaggatcttccagttcagcatcttagttgaataactaacatttttggcaccagtttttaggattttgtaattctgtgtggtgcaaacgtctgactcacaagtttttcatgcagttcttgcaaatgctcaggtagttaattcaagaatgagataaatgaatttccttggggacaaatgaaagggagaatcttgtttattatttaatttcttttaaggatttgatcttcgtcactcagttgaaaagagagccttagtttcttgtgtatgtgtgcttggagtaggatcttagccccttcatgaagggaaaattgcaagaacagtctgcaatgtttaacttttctccggatatggatggtacttgtcaaatgacttggctgaattttaataaatggacgattgttcc

SEQ ID NO: 57117 - protein, 280 aa, Glycine max
  peptide (1)..(280): Ceres Seq. ID no. 15168444
  misc_feature (63)..(161): Pfam Name: Ribosomal protein L15 amino terminal region Pfam Description: Ribosomal protein L15 amino terminal region
  misc_feature (63)..(212): Homolog of NCBI NO: 13470570 NR Description: 50S ribosomal protein L15 [Mesorhizobium loti]
  misc_feature (63)..(211): Homolog of NCBI NO: 15965128 NR Description: PROBABLE 50S RIBOSOMAL PROTEIN L15 [Sinorhizobium
  misc_feature (63)..(212): Homolog of NCBI NO: 27380492 NR Description: 50S ribosomal protein L15 [Bradyrhizobium
  misc_feature (63)..(211): Homolog of NCBI NO: 23014069 NR Description: hypothetical protein [Magnetospirillum
  misc_feature (63)..(212): Homolog of NCBI NO: 22965142 NR Description: hypothetical protein [Rhodopseudomonas palustris]
  misc_feature (63)..(212): Homolog of NCBI NO: 17987059 NR Description: LSU ribosomal protein L15P [Brucella melitensis]
  misc_feature (63)..(211): Homolog of NCBI NO: 22966103 NR Description: hypothetical protein [Rhodospirillum rubrum]
  misc_feature (28)..(254): Homolog of NCBI NO: 32410177 NR Description: hypothetical protein [Neurospora crassa]
  misc_feature (1)..(269): Homolog of NCBI NO: 34015188 NR Description: putative ribosomal protein L15
  misc_feature (1)..(277): Homolog of NCBI NO: 15237756 NR Description: expressed protein [Arabidopsis thaliana]
MLRRRLSVLSTSITRSSNYSKPSLGYPSIQSHPFQLPHSPSAYQIISPNAFPDFQGFRAYSLLSLNDLRDKVPRKQPTRKGRGIGSGKGKTAGRGHKGQRARKGIKLGFEGGQTPLRRRLPKRGFKNPFSLTFQPIGLGKIAKFINAGKIDSSELITMKTLKDAGVLGKQMKDGVRLMGRGSEQIKWPIHLEVSRVTVRAKEAVEAAGGSVRRVYYNKLGLKALVKPEWFEKKGRLLPKAARPPPKQKDKVDSIGRLPAPTKPFPFLVEASKDLPVQHLS

SEQ ID NO: 57118 - DNA, 1195 bp, Glycine max
  misc_feature (1)..(1195): Ceres Seq. ID no. 14316543
atcgtcaaggaaaactaagttcttcagtcttgacttgagtgctttgagttcatggatccaatccaacacaagttcgtcaacgttggtgctctcaagctccacgtcgcagaaaccggaaccggtccaaacgccgtcgtattcctgcacggcttcccggagatatggtactcgtggcggcaccagatgatagctctcgccggtgccggattcagagcggtttccttcgattacagaggttacggtctctccgacccgccacccgaacccgataagacctcttggtccgatcttctcagtgatctccttcatattcttgatgctcttgctctttctaaggtgtttcttgttgggaaagactttggagctcgtcctgcatatctattttcaattcttcaccctgaaagggtcttgggagttgtcacgttgggagttccatatgttcccccaggcccctctcagtatcacaaattccttcctgaaggcttctacattttgagatggcaggaacctggaagggcagaagctgattttggacgctttgatgcaaagactgttgtgcgaaatatttacatcctcttctcaagaagtgaaataccaatagctaatgaaaaccaggagatcatggatttggtggaacctgatactccgcttcccacttggttcacagaggaagatcttgcaacatacggagccttgtatgagaaatctggattccaaactgcattgcagattccatataggtcattaggtgaagtgcttagcttgccagatcctgtggttaaagttccggcatttctgataatgggtggcaaggattatgttctgaaatttccagggattgaagatttaacaaagggtgaaaaagcaaaatggtttgttccaaacttggaggttacatttatcccggagggaacccattttgttcaagaacagtttcccgagaaggtgaatcagcttattcttgacttccttgccaagcacacttgatattggactgtcgtcatgaatggtgtatgtggattgtgaactgtgggaaaatcagacaaagtgcagcacaaaatgatcgattgctgaagctaaatgatgcaaagcttgctggtagagctttgttagatgaatttcttgtacaaagaattcgtgaaatatgcgactgagttgtctagctaataaataaataaccggtttcttagttaac

SEQ ID NO: 57119 - protein, 311 aa, Glycine max
  peptide (1)..(311): Ceres Seq. ID no. 14316544
  misc_feature (53)..(304): Pfam Name: alpha/beta hydrolase fold Pfam Description: alpha/beta hydrolase fold
  misc_feature (1)..(309): Homolog of NCBI NO: 27960680 NR Description: soluble epoxide hydrolase [Euphorbia lagascae]
  misc_feature (4)..(309): Homolog of NCBI NO: 15230367 NR Description: epoxide hydrolase, putative [Arabidopsis
  misc_feature (2)..(310): Homolog of NCBI NO: 37535724 NR Description: putative epoxide hydrolase
  misc_feature (4)..(310): Homolog of NCBI NO: 37535732 NR Description: putative epoxide hydrolase
  misc_feature (1)..(310): Homolog of NCBI NO: 37535722 NR Description: putative epoxide hydrolase
  misc_feature (4)..(310): Homolog of NCBI NO: 37535728 NR Description: putative epoxide hydrolase
  misc_feature (1)..(309): Homolog of NCBI NO: 1354849 NR Description: epoxide hydrolase [Nicotiana tabacum]
MDPIQHKFVNVGALKLHVAETGTGPNAVVFLHGFPEIWYSWRHQMIALAGAGFRAVSFDYRGYGLSDPPPEPDKTSWSDLLSDLLHILDALALSKVFLVGKDFGARPAYLFSILHPERVLGVVTLGVPYVPPGPSQYHKFLPEGFYILRWQEPGRAEADFGRFDAKTVVRNIYILFSRSEIPIANENQEIMDLVEPDTPLPTWFTEEDLATYGALYEKSGFQTALQIPYRSLGEVLSLPDPVVKVPAFLIMGGKDYVLKFPGIEDLTKGEKAKWFVPNLEVTFIPEGTHFVQEQFPEKVNQLILDFLAKHT

SEQ ID NO: 57120 - protein, 267 aa, Glycine max
  peptide (1)..(267): Ceres Seq. ID no. 14316545
  misc_feature (9)..(260): Pfam Name: alpha/beta hydrolase fold Pfam Description: alpha/beta hydrolase fold
  misc_feature (1)..(265): Homolog of NCBI NO: 27960680 NR Description: soluble epoxide hydrolase [Euphorbia lagascae]
  misc_feature (1)..(265): Homolog of NCBI NO: 15230367 NR Description: epoxide hydrolase, putative [Arabidopsis
  misc_feature (1)..(266): Homolog of NCBI NO: 37535724 NR Description: putative epoxide hydrolase
  misc_feature (1)..(266): Homolog of NCBI NO: 37535732 NR Description: putative epoxide hydrolase
  misc_feature (1)..(266): Homolog of NCBI NO: 37535722 NR Description: putative epoxide hydrolase
  misc_feature (1)..(266): Homolog of NCBI NO: 37535728 NR Description: putative epoxide hydrolase
  misc_feature (1)..(265): Homolog of NCBI NO: 1354849 NR Description: epoxide hydrolase [Nicotiana tabacum]
MIALAGAGFRAVSFDYRGYGLSDPPPEPDKTSWSDLLSDLLHILDALALSKVFLVGKDFGARPAYLFSILHPERVLGVVTLGVPYVPPGPSQYHKFLPEGFYILRWQEPGRAEADFGRFDAKTVVRNIYILFSRSEIPIANENQEIMDLVEPDTPLPTWFTEEDLATYGALYEKSGFQTALQIPYRSLGEVLSLPDPVVKVPAFLIMGGKDYVLKFPGIEDLTKGEKAKWFVPNLEVTFIPEGTHFVQEQFPEKVNQLILDFLAKHT

SEQ ID NO: 57121 - DNA, 1031 bp, Glycine max
  misc_feature (1)..(1031): Ceres Seq. ID no. 13594220
atcatgatcaataacagtcttaaaaaaagaagtttgaagacctatttagaaaatttcaaatcgtttagggccagttgagtagtttaacgatttttgaattacacctgaacaccaggtacgtaaaaaataaaacaaaacaaaaacacttcctcttcctcctttcccccgaaaaacccttaaaccacgaccttcatatttgcagtgctagtctgtttatttcttcagctatgtttttgtcaagaacacttggacgaacactctttgctgctgctgccagatcaaaacaatatgccactacagcagctgctgctagcagagaaggacacaacccccttcaggagttttttgaggcagacaggagccctgaagatgacaaacctgttgtttatggtcggagttggaaggcgtgtgaactgcgtctgaagtcttgggatgaccttcataagttgtggtatgtgttgttaaaggaaaagaacatgttgatgactcaacgtcaaatgcttaatgcacagaacctgcgttttcctaacccagagcgcatccctaaggtgaggaagtcaatgtgtcgcatcaagcatgtacttactgagagagcaattgaagaaccagatccgaggaggtctgctgagatgaagagaatgataaatgctctttgatggcttaaaatggacctgttcctttagtagcattactgggtatgttgttagaataggacctctacatttgcggatgtaaggttgctaacttgaagcattgtcctaatatattgtttacgaaggagtttacctgtgaatgatttctatttcttgataaagtgttaagtgggttacatcccaaatattttgctgtcctaatttctatttcctacttttagatgtatcaagcaaacaagtgttatcatattatcgtgttagaggttatgcaaaatgttagggaggaagggttgttcctgctttcatgtaataaaaatgtttttccctgttactttaaagggcaacctttgaaaaatgaatagtataattttacctgcc

SEQ ID NO: 57122 - protein, 142 aa, Glycine max
  peptide (1)..(142): Ceres Seq. ID no. 13594221
  misc_feature (20)..(122): Homolog of NCBI NO: 29826287 NR Description: mitochondrial ribosomal protein L47 isoform a
  misc_feature (20)..(122): Homolog of NCBI NO: 9858831 NR Description: CGI-204 [Homo sapiens]
  misc_feature (29)..(122): Homolog of NCBI NO: 20865861 NR Description: similar to CGI-204 [Mus musculus]
  misc_feature (29)..(122): Homolog of NCBI NO: 23273006 NR Description: 4833424P18Rik protein [Mus musculus]
  misc_feature (29)..(122): Homolog of NCBI NO: 20810578 NR Description: 4833424P18Rik protein [Mus musculus]
  misc_feature (10)..(141): Homolog of NCBI NO: 39595870 NR Description: Hypothetical protein CBG12849 [Caenorhabditis
  misc_feature (1)..(122): Homolog of NCBI NO: 17505324 NR Description: Putative mitochondrial protein of eukaryotic
  misc_feature (1)..(55): Homolog of NCBI NO: 25407010 NR Description: hypothetical protein [imported] - Arabidopsis
  misc_feature (56)..(142): Homolog of NCBI NO: 25407010 NR Description: hypothetical protein [imported] - Arabidopsis
  misc_feature (1)..(142): Homolog of NCBI NO: 15223019 NR Description: ribosomal protein L29p family [Arabidopsis
MFLSRTLGRTLFAAAARSKQYATTAAAASREGHNPLQEFFEADRSPEDDKPVVYGRSWKACELRLKSWDDLHKLWYVLLKEKNMLMTQRQMLNAQNLRFPNPERIPKVRKSMCRIKHVLTERAIEEPDPRRSAEMKRMINAL

SEQ ID NO: 57123 - DNA, 1424 bp, Glycine max
  misc_feature (1)..(1424): Ceres Seq. ID no. 15168576
gcacaagtcccaacctaaacccgcgtctcttcactcttcaattcaatggcttccacgcccttctccactttctgccacttccacaaacccaccctccttttcttagcttccgacgggttcaggctcggtggcgctccggcgatcgccttcggaaaggttcggaagaaccgcaaaatgggaatattccccgtttgcagagctggttctgccgtcgtcttccgcgacctcgacgccgacgactttcgccaccctcttgatcaacagaatacgctgctactgagagcaattccgggattgaacgaactgggaaaagctcttctaggaactgtatctgagcaggttatgctccttgaaaacattgggacatccgtccttgtttctaaaaatcagcttcctgatctttaccacctaatggtcgaagctgccgaaatattaaatgtagatgcccctgatctatatgttcgtcaaagtcctgtgccaaatgcatatacattagctataagtggtaaacgacctttcgttgtcattcatactagccttgtggagctcctgacaaaagcagagttgcaggctgttttggctcatgagctgggtcacctaaaatgtgatcatggtgtgtggcttacatatgcaaatattctaacccttggagcctattctgtacctggtattggcggtatgatagctcagactttggaagagcagctgttccgctggcttcgagcagctgagttgacttgtgatcgtgcagctcttcttgttgctcaagaccctaaggttgtcatctctgtcctcatgaaattagctgggggatgtccatctatggctgatcaactaaatgtggatgcattcctggagcaagctcgctcttatgaaaaagctgcttccagcccaattgggtggtatataaggaatgcacaaacaaggcaactgtcacatcctctgcctgttctacgtgctagcgaaattgatgaatggtcaagaactccagcttataaatctcttttgaaacgaggaattcagatcaaatcttagaacgaaatgtctagcagtgcatgcatggaatttgttgaaagtgcacagcagctcaaggttcttcaagttagtgcgtggtggcagatgttcaaatggtttcaggcggaagtagcatttattatgcatctatctacggctgctgcaaacatgtatgtattcactgtgttatattagtcaacccgtaagtagaattttggtgagttggattattatttcatagaaatattggttttggaaagaaaagaattacctgtacaattctagcttagaaaatttctcggagtagaaaacactattatgtaagttttatgaccgaaaatttttatttgttgtattttacactataagctaagctctttttgaatagtactaaaacattgactgtttcc

SEQ ID NO: 57124 - protein, 329 aa, Glycine max
  peptide (1)..(329): Ceres Seq. ID no. 15168577
  misc_feature (123)..(226): Pfam Name: Peptidase family M48 Pfam Description: Peptidase family M48
  misc_feature (58)..(329): Homolog of NCBI NO: 23130232 NR Description: hypothetical protein [Nostoc punctiforme]
  misc_feature (56)..(321): Homolog of NCBI NO: 23017259 NR Description: hypothetical protein [Thermobifida fusca]
  misc_feature (102)..(322): Homolog of NCBI NO: 23042718 NR Description: hypothetical protein [Trichodesmium erythraeum
  misc_feature (58)..(321): Homolog of NCBI NO: 37523123 NR Description: hypothetical protein glr3554 [Gloeobacter
  misc_feature (61)..(323): Homolog of NCBI NO: 22298181 NR Description: ORF_ID:tll0639~hypothetical protein
  misc_feature (61)..(322): Homolog of NCBI NO: 16330161 NR Description: hypothetical protein [Synechocystis sp. PCC 6803]
  misc_feature (61)..(322): Homolog of NCBI NO: 17227669 NR Description: hypothetical protein [Nostoc sp. PCC 7120]
  misc_feature (51)..(328): Homolog of NCBI NO: 34905986 NR Description: P0518C01.3 [Oryza sativa (japonica
  misc_feature (24)..(323): Homolog of NCBI NO: 21553677 NR Description: unknown [Arabidopsis thaliana]
  misc_feature (24)..(323): Homolog of NCBI NO: 18405231 NR Description: expressed protein [Arabidopsis thaliana]
MASTPFSTFCHFHKPTLLFLASDGFRLGGAPAIAFGKVRKNRKMGIFPVCRAGSAVVFRDLDADDFRHPLDQQNTLLLRAIPGLNELGKALLGTVSEQVMLLENIGTSVLVSKNQLPDLYHLMVEAAEILNVDAPDLYVRQSPVPNAYTLAISGKRPFVVIHTSLVELLTKAELQAVLAHELGHLKCDHGVWLTYANILTLGAYSVPGIGGMIAQTLEEQLFRWLRAAELTCDRAALLVAQDPKVVISVLMKLAGGCPSMADQLNVDAFLEQARSYEKAASSPIGWYIRNAQTRQLSHPLPVLRASEIDEWSRTPAYKSLLKRGIQIKS

SEQ ID NO: 57125 - protein, 286 aa, Glycine max
  peptide (1)..(286): Ceres Seq. ID no. 15168578
  misc_feature (80)..(183): Pfam Name: Peptidase family M48 Pfam Description: Peptidase family M48
  misc_feature (15)..(286): Homolog of NCBI NO: 23130232 NR Description: hypothetical protein [Nostoc punctiforme]
  misc_feature (13)..(278): Homolog of NCBI NO: 23017259 NR Description: hypothetical protein [Thermobifida fusca]
  misc_feature (59)..(279): Homolog of NCBI NO: 23042718 NR Description: hypothetical protein [Trichodesmium erythraeum
  misc_feature (15)..(278): Homolog of NCBI NO: 37523123 NR Description: hypothetical protein glr3554 [Gloeobacter
  misc_feature (18)..(280): Homolog of NCBI NO: 22298181 NR Description: ORF_ID:tll0639~hypothetical protein
  misc_feature (18)..(279): Homolog of NCBI NO: 16330161 NR Description: hypothetical protein [Synechocystis sp. PCC 6803]
  misc_feature (18)..(279): Homolog of NCBI NO: 17227669 NR Description: hypothetical protein [Nostoc sp. PCC 7120]
  misc_feature (8)..(285): Homolog of NCBI NO: 34905986 NR Description: P0518C01.3 [Oryza sativa (japonica
  misc_feature (1)..(280): Homolog of NCBI NO: 21553677 NR Description: unknown [Arabidopsis thaliana]
  misc_feature (1)..(280): Homolog of NCBI NO: 18405231 NR Description: expressed protein [Arabidopsis thaliana]
MGIFPVCRAGSAVVFRDLDADDFRHPLDQQNTLLLRAIPGLNELGKALLGTVSEQVMLLENIGTSVLVSKNQLPDLYHLMVEAAEILNVDAPDLYVRQSPVPNAYTLAISGKRPFVVIHTSLVELLTKAELQAVLAHELGHLKCDHGVWLTYANILTLGAYSVPGIGGMIAQTLEEQLFRWLRAAELTCDRAALLVAQDPKVVISVLMKLAGGCPSMADQLNVDAFLEQARSYEKAASSPIGWYIRNAQTRQLSHPLPVLRASEIDEWSRTPAYKSLLKRGIQIKS

SEQ ID NO: 57126 - protein, 230 aa, Glycine max
  peptide (1)..(230): Ceres Seq. ID no. 15168579
  misc_feature (24)..(127): Pfam Name: Peptidase family M48 Pfam Description: Peptidase family M48
  misc_feature (1)..(230): Homolog of NCBI NO: 23130232 NR Description: hypothetical protein [Nostoc punctiforme]
  misc_feature (1)..(222): Homolog of NCBI NO: 23017259 NR Description: hypothetical protein [Thermobifida fusca]
  misc_feature (3)..(223): Homolog of NCBI NO: 23042718 NR Description: hypothetical protein [Trichodesmium erythraeum
  misc_feature (1)..(222): Homolog of NCBI NO: 37523123 NR Description: hypothetical protein glr3554 [Gloeobacter
  misc_feature (1)..(224): Homolog of NCBI NO: 22298181 NR Description: ORF_ID:tll0639~hypothetical protein
  misc_feature (1)..(223): Homolog of NCBI NO: 16330161 NR Description: hypothetical protein [Synechocystis sp. PCC 6803]
  misc_feature (1)..(223): Homolog of NCBI NO: 17227669 NR Description: hypothetical protein [Nostoc sp. PCC 7120]
  misc_feature (1)..(229): Homolog of NCBI NO: 34905986 NR Description: P0518C01.3 [Oryza sativa (japonica
  misc_feature (1)..(224): Homolog of NCBI NO: 21553677 NR Description: unknown [Arabidopsis thaliana]
  misc_feature (1)..(224): Homolog of NCBI NO: 18405231 NR Description: expressed protein [Arabidopsis thaliana]
MLLENIGTSVLVSKNQLPDLYHLMVEAAEILNVDAPDLYVRQSPVPNAYTLAISGKRPFVVIHTSLVELLTKAELQAVLAHELGHLKCDHGVWLTYANILTLGAYSVPGIGGMIAQTLEEQLFRWLRAAELTCDRAALLVAQDPKVVISVLMKLAGGCPSMADQLNVDAFLEQARSYEKAASSPIGWYIRNAQTRQLSHPLPVLRASEIDEWSRTPAYKSLLKRGIQIKS

SEQ ID NO: 57127 - DNA, 2115 bp, Glycine max
  misc_feature (1)..(2115): Ceres Seq. ID no. 15168584
ataaagaccgagtaattaaaacttttttcaatgaagttggggcccaagaggcaataaaacccagcagcagcgtataagttccggagcggctccgtccgtatcttcccgacctcctttgttttcgacaaaccctccctccctctcaaactgtcacccctttccgtacgtccattcaaacatttcctctttcttatattcttctttttctctcttcactttcaaacacaaaccctaattcactttctaccaattcattcgcaaacaccttttccaatttccaacacacaccaaccatgggctacgaagacaatccgtatcgtgacgaggacggagagcccttgatggactacgacgacattcaatccgatcgcgagccatctcccgagcctcgccgccaggacgacgatttcgatgaggacgtcgacgagtggcgcggccgtgatcggtcgcagacgccggtctatgacaccgatccgtcgcggtcgaagccgcggaagaggctgatcaagaagagcgacgccgggaagcaggcggtggagccggagcttgaggatgaggacgtggaggggtatgttccggaggcgatgttcgacgaggcggacactggaaggaagaggaagaaggggaaggagggtgggagtgggaagaaggagaagaggatgaagggggagaagagttttgggagcagcggtgggaagagtgggtccaaatttgggagtggaaagaaagggtttggtgggaaggcagggaaggatcatgatggtgaagttaaggagatgtgggatacaattgctgggggagattctgaggatgatcaagagggtgtcaggaatgtggatgatgacaacttcatagatgacactggagtggaacctgcttattatggtagtgatgaaccacgttctcctgttgatgctccccaggcggaggagggtgaagaggatgaagaaattaaggatcttttcaagataggtaagaaaaagaagaagaatgagagaagtccagcagaaatagcgtatttagttgagactgtcatggctgagcttgaggttacagctgaggaggatgctgaacttaatagacagggaaagcctgccattaataaactcaagaagttgaatcttctgactgaagtcctctcaaagaaacagcttcaactagagtttttagatcatggagtgctaactttattgaagaattggcttgagccacttcctgatggaagcttgccaaatataaatatacgctcggaagttttgaagatattgaatgattttcctatagatctagagcagtatgatagaagagaacagctgaaaaagagtggtctgggaaaggtcattatgtttttatcaaagtctgatgaagaaatcagtgcaaataggaaactagccaaggagctggttgataagtggagccggcctatatttaataagagtacccggtttgaagacatgagaaatgtggaggatgatagggttccttatcggaggccatcagttaaaaagccggcaaataaatctgcaggaatggaatctagggacagtgatcttgatttggaactttcacagcctaggtctggacagtcctcttctaggcagcatgcatcaaggccggaagcaacacctttggattttgtggtccgtccccagtctaaaattgatccagaagaaattagagcacgagcaaaacaagctgcacaagatcagcagcgtatgaagatgaataagaaattgcagcaattgagggcaccaaaaaagaagcagcttcaggctacaaaactgagcgtggaaggtcgtggtatgatcaaatatttataaatgtgtccacgttgatactggacgggtttgtttgtcctgctgcaagctctcatataatgtgctgcctgcattaatgtggattcttctgaaggtggagatccagtgagctcgataaatggaaatttgaaggagagggatgtcatgaaaatacatccgtatactgcatttgtgtattcatttagtgcagcaggaaacccaaaatacatttgacggttatgcattcgtctattatttcgttttctgttgaataatcatcatgcttgtcatcaatttaatgaatatgtggattttcact

SEQ ID NO: 57128 - protein, 508 aa, Glycine max
  peptide (1)..(508): Ceres Seq. ID no. 15168585
  misc_feature (243)..(504): Pfam Name: IWS1 C-terminus Pfam Description: IWS1 C-terminus
  misc_feature (21)..(385): Homolog of NCBI NO: 7021194 NR Description: unnamed protein product [Homo sapiens]
  misc_feature (234)..(477): Homolog of NCBI NO: 31241925 NR Description: ENSANGP00000012213 [Anopheles gambiae]
  misc_feature (3)..(504): Homolog of NCBI NO: 30352010 NR Description: hypothetical protein 3000008H23 [Mus musculus]
  misc_feature (21)..(504): Homolog of NCBI NO: 24308177 NR Description: hypothetical protein FLJ10006 [Homo sapiens]
  misc_feature (21)..(504): Homolog of NCBI NO: 21739669 NR Description: hypothetical protein [Homo sapiens]
  misc_feature (3)..(504): Homolog of NCBI NO: 16552402 NR Description: unnamed protein product [Homo sapiens]
  misc_feature (47)..(504): Homolog of NCBI NO: 31203501 NR Description: ENSANGP00000010073 [Anopheles gambiae]
  misc_feature (209)..(508): Homolog of NCBI NO: 15234085 NR Description: hypothetical protein [Arabidopsis thaliana]
  misc_feature (111)..(508): Homolog of NCBI NO: 15222574 NR Description: expressed protein [Arabidopsis thaliana]
  misc_feature (75)..(508): Homolog of NCBI NO: 34895776 NR Description: P0434B04.3 [Oryza sativa (japonica
MGYEDNPYRDEDGEPLMDYDDIQSDREPSPEPRRQDDDFDEDVDEWRGRDRSQTPVYDTDPSRSKPRKRLIKKSDAGKQAVEPELEDEDVEGYVPEAMFDEADTGRKRKKGKEGGSGKKEKRMKGEKSFGSSGGKSGSKFGSGKKGFGGKAGKDHDGEVKEMWDTIAGGDSEDDQEGVRNVDDDNFIDDTGVEPAYYGSDEPRSPVDAPQAEEGEEDEEIKDLFKIGKKKKKNERSPAEIAYLVETVMAELEVTAEEDAELNRQGKPAINKLKKLNLLTEVLSKKQLQLEFLDHGVLTLLKNWLEPLPDGSLPNINIRSEVLKILNDFPIDLEQYDRREQLKKSGLGKVIMFLSKSDEEISANRKLAKELVDKWSRPIFNKSTRFEDMRNVEDDRVPYRRPSVKKPANKSAGMESRDSDLDLELSQPRSGQSSSRQHASRPEATPLDFVVRPQSKIDPEEIRARAKQAAQDQQRMKMNKKLQQLRAPKKKQLQATKLSVEGRGMIKYL

SEQ ID NO: 57129 - protein, 492 aa, Glycine max
  peptide (1)..(492): Ceres Seq. ID no. 15168586
  misc_feature (227)..(488): Pfam Name: IWS1 C-terminus Pfam Description: IWS1 C-terminus
  misc_feature (5)..(369): Homolog of NCBI NO: 7021194 NR Description: unnamed protein product [Homo sapiens]
  misc_feature (218)..(461): Homolog of NCBI NO: 31241925 NR Description: ENSANGP00000012213 [Anopheles gambiae]
  misc_feature (1)..(488): Homolog of NCBI NO: 30352010 NR Description: hypothetical protein 3000008H23 [Mus musculus]
  misc_feature (5)..(488): Homolog of NCBI NO: 24308177 NR Description: hypothetical protein FLJ10006 [Homo sapiens]
  misc_feature (5)..(488): Homolog of NCBI NO: 21739669 NR Description: hypothetical protein [Homo sapiens]
  misc_feature (1)..(488): Homolog of NCBI NO: 16552402 NR Description: unnamed protein product [Homo sapiens]
  misc_feature (31)..(488): Homolog of NCBI NO: 31203501 NR Description: ENSANGP00000010073 [Anopheles gambiae]
  misc_feature (193)..(492): Homolog of NCBI NO: 15234085 NR Description: hypothetical protein [Arabidopsis thaliana]
  misc_feature (95)..(492): Homolog of NCBI NO: 15222574 NR Description: expressed protein [Arabidopsis thaliana]
  misc_feature (59)..(492): Homolog of NCBI NO: 34895776 NR Description: P0434B04.3 [Oryza sativa (japonica
MDYDDIQSDREPSPEPRRQDDDFDEDVDEWRGRDRSQTPVYDTDPSRSKPRKRLIKKSDAGKQAVEPELEDEDVEGYVPEAMFDEADTGRKRKKGKEGGSGKKEKRMKGEKSFGSSGGKSGSKFGSGKKGFGGKAGKDHDGEVKEMWDTIAGGDSEDDQEGVRNVDDDNFIDDTGVEPAYYGSDEPRSPVDAPQAEEGEEDEEIKDLFKIGKKKKKNERSPAEIAYLVETVMAELEVTAEEDAELNRQGKPAINKLKKLNLLTEVLSKKQLQLEFLDHGVLTLLKNWLEPLPDGSLPNINIRSEVLKILNDFPIDLEQYDRREQLKKSGLGKVIMFLSKSDEEISANRKLAKELVDKWSRPIFNKSTRFEDMRNVEDDRVPYRRPSVKKPANKSAGMESRDSDLDLELSQPRSGQSSSRQHASRPEATPLDFVVRPQSKIDPEEIRARAKQAAQDQQRMKMNKKLQQLRAPKKKQLQATKLSVEGRGMIKYL

SEQ ID NO: 57130 - protein, 411 aa, Glycine max
  peptide (1)..(411): Ceres Seq. ID no. 15168587
  misc_feature (146)..(407): Pfam Name: IWS1 C-terminus Pfam Description: IWS1 C-terminus
  misc_feature (1)..(288): Homolog of NCBI NO: 7021194 NR Description: unnamed protein product [Homo sapiens]
  misc_feature (137)..(380): Homolog of NCBI NO: 31241925 NR Description: ENSANGP00000012213 [Anopheles gambiae]
  misc_feature (1)..(407): Homolog of NCBI NO: 30352010 NR Description: hypothetical protein 3000008H23 [Mus musculus]
  misc_feature (1)..(407): Homolog of NCBI NO: 24308177 NR Description: hypothetical protein FLJ10006 [Homo sapiens]
  misc_feature (1)..(407): Homolog of NCBI NO: 21739669 NR Description: hypothetical protein [Homo sapiens]
  misc_feature (1)..(407): Homolog of NCBI NO: 16552402 NR Description: unnamed protein product [Homo sapiens]
  misc_feature (1)..(407): Homolog of NCBI NO: 31203501 NR Description: ENSANGP00000010073 [Anopheles gambiae]
  misc_feature (112)..(411): Homolog of NCBI NO: 15234085 NR Description: hypothetical protein [Arabidopsis thaliana]
  misc_feature (14)..(411): Homolog of NCBI NO: 15222574 NR Description: expressed protein [Arabidopsis thaliana]
  misc_feature (1)..(411): Homolog of NCBI NO: 34895776 NR Description: P0434B04.3 [Oryza sativa (japonica
MFDEADTGRKRKKGKEGGSGKKEKRMKGEKSFGSSGGKSGSKFGSGKKGFGGKAGKDHDGEVKEMWDTIAGGDSEDDQEGVRNVDDDNFIDDTGVEPAYYGSDEPRSPVDAPQAEEGEEDEEIKDLFKIGKKKKKNERSPAEIAYLVETVMAELEVTAEEDAELNRQGKPAINKLKKLNLLTEVLSKKQLQLEFLDHGVLTLLKNWLEPLPDGSLPNINIRSEVLKILNDFPIDLEQYDRREQLKKSGLGKVIMFLSKSDEEISANRKLAKELVDKWSRPIFNKSTRFEDMRNVEDDRVPYRRPSVKKPANKSAGMESRDSDLDLELSQPRSGQSSSRQHASRPEATPLDFVVRPQSKIDPEEIRARAKQAAQDQQRMKMNKKLQQLRAPKKKQLQATKLSVEGRGMIKYL

SEQ ID NO: 57131 - DNA, 1271 bp, Glycine max
  misc_feature (1)..(1271): Ceres Seq. ID no. 15171728
aatctcaatctcatcagttaactttacctaatacacaaaccccgttcctccgttcacgcactacctcagtcttctcttctcttttactaaaagaaccaacaatctctagaaccctctcagccaaaaaaaacaatgcagacccaccagaaccctcccacactggattccgacccgcagctcccgcagatcaaaatccaccacccctcctccccgcgccatcaccacccctcctccgccgccacccccacccccaccgccggcgcacgccgcaaaatcggcgtggccgtcgacctctccgacgagagcgcctacgcggtccgctgggccgtgcagcactacatccgccccggggacgccgtgatcctgctccacgtcagccctaccaacgtcctcttcggcgccgactggggctcgatcgacctctccatcaacactgaccccaactccgacgaagacgccgtcagcgccgtcaacagtaacgaccacgccaacgccggcaacagcaaacgcaagctcgaggacgacttcgacgccttcacggcgtcgaaggccgcggatctcgcgaagccgttgagagaatcgcaaattccgttcaagatccatattgtgaaggatcacgacatgaaggagaggctgtgcttggaggtggagaggcttgggttgagcgcggtgattatggggagtagagggtttggcgctgtgaggcgtggcagcgatgggaggcttgggagtgttagtgattactgcgttcatcactgtgtttgtcctgttgtggtggtgcgttatcccgatgataaggatgtggttgcggcggccaccacggcctcggccgtggtggcgctcaaggacggggatgagggcgagacggtgatccagccggtgccgcacaagaaagaggattagttggagccaactcatcacttcaaccctgtctctgaagaatgtttctaatccgaagggattggtggaaatggttgtagagtgctctctttctcttcctgtcaggttgtacttatagagcatttcctgcatatgaactgtggaaagattatggatgattttgtatggcttgatgtgatctcggttccattaggcctttgaagattgtttttggttccgaagtggtatatactctttcatgtagatgtacaagtttgcctgtgactgtttttggggttattttcttcccattctgtatgttgttggaaatcagattatcatgacgagcacttgtttagctatttagataattctatagagctgtgttggtg

SEQ ID NO: 57132 - protein, 256 aa, Glycine max
  peptide (1)..(256): Ceres Seq. ID no. 15171729
  misc_feature (46)..(217): Pfam Name: Universal stress protein family Pfam Description: Universal stress protein family
  misc_feature (138)..(242): Homolog of NCBI NO: 15232490 NR Description: CHP-rich zinc finger protein, putative
  misc_feature (6)..(223): Homolog of NCBI NO: 18423628 NR Description: expressed protein [Arabidopsis thaliana]
  misc_feature (6)..(223): Homolog of NCBI NO: 8885586 NR Description: gene_id:F24B18.5~pir||T05756~similar to unknown
  misc_feature (32)..(246): Homolog of NCBI NO: 30682187 NR Description: expressed protein [Arabidopsis thaliana]
  misc_feature (32)..(246): Homolog of NCBI NO: 25402657 NR Description: protein T23J18.3 [imported] - Arabidopsis
  misc_feature (7)..(251): Homolog of NCBI NO: 34910112 NR Description: B1100D10.31 [Oryza sativa (japonica
  misc_feature (1)..(253): Homolog of NCBI NO: 33146953 NR Description: CHP-rich zinc finger protein-like
  misc_feature (1)..(253): Homolog of NCBI NO: 28971968 NR Description: CHP-rich zinc finger protein-like
  misc_feature (11)..(244): Homolog of NCBI NO: 18416966 NR Description: expressed protein [Arabidopsis thaliana]
  misc_feature (11)..(244): Homolog of NCBI NO: 7486798 NR Description: hypothetical protein M4I22.130 - Arabidopsis
MQTHQNPPTLDSDPQLPQIKIHHPSSPRHHHPSSAATPTPTAGARRKIGVAVDLSDESAYAVRWAVQHYIRPGDAVILLHVSPTNVLFGADWGSIDLSINTDPNSDEDAVSAVNSNDHANAGNSKRKLEDDFDAFTASKAADLAKPLRESQIPFKIHIVKDHDMKERLCLEVERLGLSAVIMGSRGFGAVRRGSDGRLGSVSDYCVHHCVCPVVVVRYPDDKDVVAAATTASAVVALKDGDEGETVIQPVPHKKED

SEQ ID NO: 57133 - protein, 144 aa, Glycine max
  peptide (1)..(144): Ceres Seq. ID no. 15171730
SQSHQLTLPNTQTPFLRSRTTSVFSSLLLKEPTISRTLSAKKNNADPPEPSHTGFRPAAPADQNPPPLLPAPSPPLLRRHPHPHRRRTPQNRRGRRPLRRERLRGPLGRAALHPPRGRRDPAPRQPYQRPLRRRLGLDRPLHQH

SEQ ID NO: 57134 - DNA, 1309 bp, Glycine max
  misc_feature (1)..(1309): Ceres Seq. ID no. 15171739
atatacttcccttctggcaactctccaacagcttcccctttctccccttctccagaacctccgcgtcgtccgatgggaacagaaggttacacttacatggggcgcagtttgaccgaactccgcatcaacgacgattcctcttcctccgccttcagcgactgcaacagtgacagatctggcgaattcgccaccgcttcttcgcagacgcggaggtttctgatcgcctgcgccaccgaaaattccgacgacttgattcgccaactcgtttctgatctccactcctcttccatcgactatcagaaacaagccgccatggaaatccggttactcgcgaagaacaagccggagaatcgcatcaaaatcgcgaaagccggcgcaatcaaaccgctaatttctctcattttgtctccggacctccagctccaggaatacggcgtcaccgcgattttgaacctctcgctctgcgacgagaacaaggaggtgatagcctcctccggcgcgatcaagccgctggtccgcgcgctgggcgcgggaaccccgacggcgaaggagaacgcggcgtgcgcgctgctaagactctcgcaggtggaggagagcaaggcggcgatcgggcggtccggcgcgattccacttctggtgagcctcctggagagtggcgggttccgcgcgaagaaggacgcatcgacagcgctgtactcgctgtgcatggtgaaggagaacaagatcagggcggtgaaggcggggatcatgaaggtgctggtggagctgatggcggacttcgagtcgaacatggtggacaagtcggcgtacgtggtgagcgtgctggtggcggtagcggaggcgagggcggcgctggtggaggaaggaggcgtgccggtgctggtggagatcgtcgaggttgggacgcagcggcagaaggaaatcgttgtggttattctcttacaggtttgcgaggacagcgtggcgtatcgcaccatggtcgctcgcgaaggtgcgattcctcctttggtcgctttgtctcagtccggcaccaatcgtgccaagcaaaaggtattattctcttcaacgccatttccattactcttctccgctcgtgacgtggcacccttcccttcaaaccggtttgatccctttttttatttataaggtgagaatcaaataactcacctcagccaagtcaactaaattaaacccttttgacaccagttcggtttggtaactagttacggaaaactatttttgtaccgatgtgacaaatacaattgttgaagattgaagaaccaaaatgcaatactattatttctttgcc

SEQ ID NO: 57135 - protein, 381 aa, Glycine max
  peptide (1)..(381): Ceres Seq. ID no. 15171740
  misc_feature (155)..(195): Pfam Name: Armadillo/beta-catenin-like repeat Pfam Description: Armadillo/beta-catenin-like repeat
  misc_feature (5)..(351): Homolog of NCBI NO: 30681980 NR Description: expressed protein [Arabidopsis thaliana]
  misc_feature (69)..(350): Homolog of NCBI NO: 28974687 NR Description: arm repeat-containing protein [Nicotiana tabacum]
  misc_feature (73)..(350): Homolog of NCBI NO: 26452478 NR Description: unknown protein [Arabidopsis thaliana]
  misc_feature (44)..(350): Homolog of NCBI NO: 34393600 NR Description: arm repeat-containing protein-like protein
  misc_feature (53)..(350): Homolog of NCBI NO: 8843789 NR Description: phosphoinositide-specific phospholipase C-line
  misc_feature (30)..(350): Homolog of NCBI NO: 26452835 NR Description: unknown protein [Arabidopsis thaliana]
  misc_feature (30)..(350): Homolog of NCBI NO: 15237730 NR Description: expressed protein [Arabidopsis thaliana]
  misc_feature (30)..(350): Homolog of NCBI NO: 21592960 NR Description: unknown [Arabidopsis thaliana]
  misc_feature (30)..(350): Homolog of NCBI NO: 18395805 NR Description: expressed protein [Arabidopsis thaliana]
  misc_feature (30)..(350): Homolog of NCBI NO: 16226454 NR Description: AT3g01400/T13O15_4 [Arabidopsis thaliana]
IYFPSGNSPTASPFSPSPEPPRRPMGTEGYTYMGRSLTELRINDDSSSSAFSDCNSDRSGEFATASSQTRRFLIACATENSDDLIRQLVSDLHSSSIDYQKQAAMEIRLLAKNKPENRIKIAKAGAIKPLISLILSPDLQLQEYGVTAILNLSLCDENKEVIASSGAIKPLVRALGAGTPTAKENAACALLRLSQVEESKAAIGRSGAIPLLVSLLESGGFRAKKDASTALYSLCMVKENKIRAVKAGIMKVLVELMADFESNMVDKSAYVVSVLVAVAEARAALVEEGGVPVLVEIVEVGTQRQKEIVVVILLQVCEDSVAYRTMVAREGAIPPLVALSQSGTNRAKQKVLFSSTPFPLLFSARDVAPFPSNRFDPFFYL

SEQ ID NO: 57136 - protein, 357 aa, Glycine max
  peptide (1)..(357): Ceres Seq. ID no. 15171741
  misc_feature (131)..(171): Pfam Name: Armadillo/beta-catenin-like repeat Pfam Description: Armadillo/beta-catenin-like repeat
  misc_feature (1)..(327): Homolog of NCBI NO: 30681980 NR Description: expressed protein [Arabidopsis thaliana]
  misc_feature (45)..(326): Homolog of NCBI NO: 28974687 NR Description: arm repeat-containing protein [Nicotiana tabacum]
  misc_feature (49)..(326): Homolog of NCBI NO: 26452478 NR Description: unknown protein [Arabidopsis thaliana]
  misc_feature (20)..(326): Homolog of NCBI NO: 34393600 NR Description: arm repeat-containing protein-like protein
  misc_feature (29)..(326): Homolog of NCBI NO: 8843789 NR Description: phosphoinositide-specific phospholipase C-line
  misc_feature (6)..(326): Homolog of NCBI NO: 26452835 NR Description: unknown protein [Arabidopsis thaliana]
  misc_feature (6)..(326): Homolog of NCBI NO: 15237730 NR Description: expressed protein [Arabidopsis thaliana]
  misc_feature (6)..(326): Homolog of NCBI NO: 21592960 NR Description: unknown [Arabidopsis thaliana]
  misc_feature (6)..(326): Homolog of NCBI NO: 18395805 NR Description: expressed protein [Arabidopsis thaliana]
  misc_feature (6)..(326): Homolog of NCBI NO: 16226454 NR Description: AT3g01400/T13O15_4 [Arabidopsis thaliana]
MGTEGYTYMGRSLTELRINDDSSSSAFSDCNSDRSGEFATASSQTRRFLIACATENSDDLIRQLVSDLHSSSIDYQKQAAMEIRLLAKNKPENRIKIAKAGAIKPLISLILSPDLQLQEYGVTAILNLSLCDENKEVIASSGAIKPLVRALGAGTPTAKENAACALLRLSQVEESKAAIGRSGAIPLLVSLLESGGFRAKKDASTALYSLCMVKENKIRAVKAGIMKVLVELMADFESNMVDKSAYVVSVLVAVAEARAALVEEGGVPVLVEIVEVGTQRQKEIVVVILLQVCEDSVAYRTMVAREGAIPPLVALSQSGTNRAKQKVLFSSTPFPLLFSARDVAPFPSNRFDPFFYL

SEQ ID NO: 57137 - protein, 349 aa, Glycine max
  peptide (1)..(349): Ceres Seq. ID no. 15171742
  misc_feature (123)..(163): Pfam Name: Armadillo/beta-catenin-like repeat Pfam Description: Armadillo/beta-catenin-like repeat
  misc_feature (1)..(319): Homolog of NCBI NO: 30681980 NR Description: expressed protein [Arabidopsis thaliana]
  misc_feature (37)..(318): Homolog of NCBI NO: 28974687 NR Description: arm repeat-containing protein [Nicotiana tabacum]
  misc_feature (41)..(318): Homolog of NCBI NO: 26452478 NR Description: unknown protein [Arabidopsis thaliana]
  misc_feature (12)..(318): Homolog of NCBI NO: 34393600 NR Description: arm repeat-containing protein-like protein
  misc_feature (21)..(318): Homolog of NCBI NO: 8843789 NR Description: phosphoinositide-specific phospholipase C-line
  misc_feature (1)..(318): Homolog of NCBI NO: 26452835 NR Description: unknown protein [Arabidopsis thaliana]
  misc_feature (1)..(318): Homolog of NCBI NO: 15237730 NR Description: expressed protein [Arabidopsis thaliana]
  misc_feature (1)..(318): Homolog of NCBI NO: 21592960 NR Description: unknown [Arabidopsis thaliana]
  misc_feature (1)..(318): Homolog of NCBI NO: 18395805 NR Description: expressed protein [Arabidopsis thaliana]
  misc_feature (1)..(318): Homolog of NCBI NO: 16226454 NR Description: AT3g01400/T13O15_4 [Arabidopsis thaliana]
MGRSLTELRINDDSSSSAFSDCNSDRSGEFATASSQTRRFLIACATENSDDLIRQLVSDLHSSSIDYQKQAAMEIRLLAKNKPENRIKIAKAGAIKPLISLILSPDLQLQEYGVTAILNLSLCDENKEVIASSGAIKPLVRALGAGTPTAKENAACALLRLSQVEESKAAIGRSGAIPLLVSLLESGGFRAKKDASTALYSLCMVKENKIRAVKAGIMKVLVELMADFESNMVDKSAYVVSVLVAVAEARAALVEEGGVPVLVEIVEVGTQRQKEIVVVILLQVCEDSVAYRTMVAREGAIPPLVALSQSGTNRAKQKVLFSSTPFPLLFSARDVAPFPSNRFDPFFYL

SEQ ID NO: 57138 - DNA, 1617 bp, Glycine max
  misc_feature (1)..(1617): Ceres Seq. ID no. 13582497
aacacctagaacatcctttccgaaaaaattagtgaataccagtttataaaaacattatggaagcacttatctagaaggcggatgaattatattattaagcttctagcaatcactgctatctcagttttcattcttgagttcctggttaacagcttcactgagaggaagctctatacgtggtgttttttgattgccggggccacagcttcattttatctttttaagtcaattccctggagatctggtataccgatatatgtttgcctagcatgttggtttttgtctcttttcacattgatgccagcagaaattcctgacaataatcaattagtagttagtagtggggttattattatcattataggaatagttgcaagatggctagatttgcatgctggtggaaggaagtattggctcagtatatgcaattgcaagttgaaaagttccaaattttcatctctattttacttacaggctcttttggttgctctatcttcagtgatggtgtatttatcaactgttcacagaactgaaaagcgagagttgcttgcatcgcaccaattgataaattggtctgttgctggtttttcaatggtgctcccgctgttctcagaaaatagcctcttatcccgacttacttcgatatttcttggctttgcacctccattccttcttctctccattggatacgaagctatattctatgctgctcttgctcttgtactgatggcttggatactatttgaaaatacaattctcaacttaaatattgtgaataagtcatctgattccactaaaagtgttacaaatcatctcatccatggatctgataatagatctttgcagttatctgatgtgaggattccattggtctttatggttttattcaatgttgctttttttggaacgggaaattttgcaagtattgctagttttgagatttcatctgtctatcggttcattaccatctttagtcccttcctgatggcagcgctactcatcttcaaattatttatacctttcttgcttgtaatatgcgtattcagtgcgattaccaaactaaaccaagttccaaggttgggatgctattttcttgttatattgttctcagacatgatgaccattcacttcttcttcctggttaggaatacaggaagttggatggaaattggaaatagtatcagtcattttggcatcatgagtgcccaagttgtttttgttctattactctttgccctcacaaatacatacacaaaagacatccactgtaactcagcagtatcatcgactcgtaaggcaaattaggtttcaccaaagtcgctctaaacgagctaccttattgccatggaaatgactactcattcttggtgtttgctttgatggttatgaccaacctggattgagaacgggcggcagtgatctggaactcagggaaaggcgagcaaacattgtgcctcaccatgtaaacaaagaactttcatataaactttttccttatattactgcctcttggtagttgatctgtacaggtcctggtcctggccctggcccgggtgatggaatttttgtttgattgtttactgtggtcaacgtaatgttaatgcacttttttcaccc

SEQ ID NO: 57139 - protein, 407 aa, Glycine max
  peptide (1)..(407): Ceres Seq. ID no. 15222748
  misc_feature (198)..(359): Pfam Name: Phosphatidylinositolglycan class N (PIG-N) Pfam Description: Phosphatidylinositolglycan class N (PIG-N)
  misc_feature (3)..(383): Homolog of NCBI NO: 25143729 NR Description: Putative plasma membrane membrane protein, with
  misc_feature (3)..(383): Homolog of NCBI NO: 7505854 NR Description: hypothetical protein M01B12.2 - Caenorhabditis
  misc_feature (4)..(383): Homolog of NCBI NO: 19112040 NR Description: hypothetical protein [Schizosaccharomyces pombe]
  misc_feature (130)..(394): Homolog of NCBI NO: 40742505 NR Description: hypothetical protein AN7049.2 [Aspergillus
  misc_feature (1)..(391): Homolog of NCBI NO: 20306653 NR Description: phosphatidylinositol glycan, class N [Homo
  misc_feature (1)..(391): Homolog of NCBI NO: 6912500 NR Description: phosphatidylinositol glycan, class N [Homo
  misc_feature (1)..(391): Homolog of NCBI NO: 11360029 NR Description: hypothetical protein DKFZp434H0711.1 - human
  misc_feature (1)..(391): Homolog of NCBI NO: 7305383 NR Description: phosphatidylinositol glycan, class N [Mus
  misc_feature (1)..(152): Homolog of NCBI NO: 15232100 NR Description: phosphatidylinositolglycan family [Arabidopsis
  misc_feature (198)..(394): Homolog of NCBI NO: 15232100 NR Description: phosphatidylinositolglycan family [Arabidopsis
MNYIIKLLAITAISVFILEFLVNSFTERKLYTWCFLIAGATASFYLFKSIPWRSGIPIYVCLACWFLSLFTLMPAEIPDNNQLVVSSGVIIIIIGIVARWLDLHAGGRKYWLSICNCKLKSSKFSSLFYLQALLVALSSVMVYLSTVHRTEKRELLASHQLINWSVAGFSMVLPLFSENSLLSRLTSIFLGFAPPFLLLSIGYEAIFYAALALVLMAWILFENTILNLNIVNKSSDSTKSVTNHLIHGSDNRSLQLSDVRIPLVFMVLFNVAFFGTGNFASIASFEISSVYRFITIFSPFLMAALLIFKLFIPFLLVICVFSAITKLNQVPRLGCYFLVILFSDMMTIHFFFLVRNTGSWMEIGNSISHFGIMSAQVVFVLLLFALTNTYTKDIHCNSAVSSTRKAN

SEQ ID NO: 57140 - protein, 335 aa, Glycine max
  peptide (1)..(335): Ceres Seq. ID no. 15222749
  misc_feature (126)..(287): Pfam Name: Phosphatidylinositolglycan class N (PIG-N) Pfam Description: Phosphatidylinositolglycan class N (PIG-N)
  misc_feature (1)..(311): Homolog of NCBI NO: 25143729 NR Description: Putative plasma membrane membrane protein, with
  misc_feature (1)..(311): Homolog of NCBI NO: 7505854 NR Description: hypothetical protein M01B12.2 - Caenorhabditis
  misc_feature (1)..(311): Homolog of NCBI NO: 19112040 NR Description: hypothetical protein [Schizosaccharomyces pombe]
  misc_feature (58)..(322): Homolog of NCBI NO: 40742505 NR Description: hypothetical protein AN7049.2 [Aspergillus
  misc_feature (1)..(319): Homolog of NCBI NO: 20306653 NR Description: phosphatidylinositol glycan, class N [Homo
  misc_feature (1)..(319): Homolog of NCBI NO: 6912500 NR Description: phosphatidylinositol glycan, class N [Homo
  misc_feature (1)..(319): Homolog of NCBI NO: 11360029 NR Description: hypothetical protein DKFZp434H0711.1 - human
  misc_feature (1)..(319): Homolog of NCBI NO: 7305383 NR Description: phosphatidylinositol glycan, class N [Mus
  misc_feature (1)..(80): Homolog of NCBI NO: 15232100 NR Description: phosphatidylinositolglycan family [Arabidopsis
  misc_feature (126)..(322): Homolog of NCBI NO: 15232100 NR Description: phosphatidylinositolglycan family [Arabidopsis
MPAEIPDNNQLVVSSGVIIIIIGIVARWLDLHAGGRKYWLSICNCKLKSSKFSSLFYLQALLVALSSVMVYLSTVHRTEKRELLASHQLINWSVAGFSMVLPLFSENSLLSRLTSIFLGFAPPFLLLSIGYEAIFYAALALVLMAWILFENTILNLNIVNKSSDSTKSVTNHLIHGSDNRSLQLSDVRIPLVFMVLFNVAFFGTGNFASIASFEISSVYRFITIFSPFLMAALLIFKLFIPFLLVICVFSAITKLNQVPRLGCYFLVILFSDMMTIHFFFLVRNTGSWMEIGNSISHFGIMSAQVVFVLLLFALTNTYTKDIHCNSAVSSTRKAN

SEQ ID NO: 57141 - protein, 267 aa, Glycine max
  peptide (1)..(267): Ceres Seq. ID no. 15222750
  misc_feature (58)..(219): Pfam Name: Phosphatidylinositolglycan class N (PIG-N) Pfam Description: Phosphatidylinositolglycan class N (PIG-N)
  misc_feature (1)..(243): Homolog of NCBI NO: 25143729 NR Description: Putative plasma membrane membrane protein, with
  misc_feature (1)..(243): Homolog of NCBI NO: 7505854 NR Description: hypothetical protein M01B12.2 - Caenorhabditis
  misc_feature (1)..(243): Homolog of NCBI NO: 19112040 NR Description: hypothetical protein [Schizosaccharomyces pombe]
  misc_feature (1)..(254): Homolog of NCBI NO: 40742505 NR Description: hypothetical protein AN7049.2 [Aspergillus
  misc_feature (1)..(251): Homolog of NCBI NO: 20306653 NR Description: phosphatidylinositol glycan, class N [Homo
  misc_feature (1)..(251): Homolog of NCBI NO: 6912500 NR Description: phosphatidylinositol glycan, class N [Homo
  misc_feature (1)..(251): Homolog of NCBI NO: 11360029 NR Description: hypothetical protein DKFZp434H0711.1 - human
  misc_feature (1)..(251): Homolog of NCBI NO: 7305383 NR Description: phosphatidylinositol glycan, class N [Mus
  misc_feature (1)..(12): Homolog of NCBI NO: 15232100 NR Description: phosphatidylinositolglycan family [Arabidopsis
  misc_feature (58)..(254): Homolog of NCBI NO: 15232100 NR Description: phosphatidylinositolglycan family [Arabidopsis
MVYLSTVHRTEKRELLASHQLINWSVAGFSMVLPLFSENSLLSRLTSIFLGFAPPFLLLSIGYEAIFYAALALVLMAWILFENTILNLNIVNKSSDSTKSVTNHLIHGSDNRSLQLSDVRIPLVFMVLFNVAFFGTGNFASIASFEISSVYRFITIFSPFLMAALLIFKLFIPFLLVICVFSAITKLNQVPRLGCYFLVILFSDMMTIHFFFLVRNTGSWMEIGNSISHFGIMSAQVVFVLLLFALTNTYTKDIHCNSAVSSTRKAN

SEQ ID NO: 57142 - DNA, 1102 bp, Glycine max
  misc_feature (1)..(1102): Ceres Seq. ID no. 14312886
agaaagcggagacacattgataaataataaaaaaaaggcgggaaagaaagggtgggtcaaaattttgagagccacacccagctttgaatcctccaacaaaatctccgttccgggtttttgcaatcgggagagtgcgagagagacaatacactacacggttgctgcattattgctttcagaggaactcattgcagtcattgattgtaagcaatggaaaaaatgcctgaacaaggtgccaatgcatcattattgccttctaatggaattggatccaggttctccaatttgaacaagtctttcaaatattctcttagatctttgctcacttcatgctcaaaggaggaattttataaagcattttcaagtttctctaacattgaaaaggaattgctccatcgcctatttcttcaggtcattacttcgttgcatgaaaacttagaggatgggtttgagactgtctgtcttcaaacacaggcaggagctactcttgatgctgtggagaaaattgtagaagaacaagatctggatgtcttgttttcagataggagtaacataatggatgttgctgagaatctgtctatggcaaagaagaatgaaatccaacacttaaagcatatggttcaattgggagaggaacataatcaaatgttgcgcacccgactacaactccttaaggaaggcaatcaagtattgtctggtgcctcacaagctgttgagaagttcaaaagcatgaatttaaattatggggcaaacagcggcgatgagatccatgatgtataacatgtcttgctcatgctctcctgcaaattgactaaggttcattctgtggtgaatcattcccatgcttttatgttgtagcaatgcttctaaagattatattaattcacgagtaaatctacatcttagtccttgatattaaagtgtcatgtattttagaagctaagattttagaaatcgtgtattagttcctgaatttttaaaacaccaagtgaatgttaaacattgtatgagtgactttcgttcttttaaatgagccttctgggtcatcctttcaaacactttcataactgattggatcatgcatcatgaactagatattttc

SEQ ID NO: 57143 - protein, 189 aa, Glycine max
  peptide (1)..(189): Ceres Seq. ID no. 14312887
  misc_feature (52)..(173): Homolog of NCBI NO: 7487713 NR Description: hypothetical protein T5K18.130 - Arabidopsis
  misc_feature (15)..(175): Homolog of NCBI NO: 34905298 NR Description: P0577B11.20 [Oryza sativa (japonica
  misc_feature (20)..(173): Homolog of NCBI NO: 18415295 NR Description: expressed protein [Arabidopsis thaliana]
MEKMPEQGANASLLPSNGIGSRFSNLNKSFKYSLRSLLTSCSKEEFYKAFSSFSNIEKELLHRLFLQVITSLHENLEDGFETVCLQTQAGATLDAVEKIVEEQDLDVLFSDRSNIMDVAENLSMAKKNEIQHLKHMVQLGEEHNQMLRTRLQLLKEGNQVLSGASQAVEKFKSMNLNYGANSGDEIHDV

SEQ ID NO: 57144 - protein, 186 aa, Glycine max
  peptide (1)..(186): Ceres Seq. ID no. 14312888
  misc_feature (49)..(170): Homolog of NCBI NO: 7487713 NR Description: hypothetical protein T5K18.130 - Arabidopsis
  misc_feature (12)..(172): Homolog of NCBI NO: 34905298 NR Description: P0577B11.20 [Oryza sativa (japonica
  misc_feature (17)..(170): Homolog of NCBI NO: 18415295 NR Description: expressed protein [Arabidopsis thaliana]
MPEQGANASLLPSNGIGSRFSNLNKSFKYSLRSLLTSCSKEEFYKAFSSFSNIEKELLHRLFLQVITSLHENLEDGFETVCLQTQAGATLDAVEKIVEEQDLDVLFSDRSNIMDVAENLSMAKKNEIQHLKHMVQLGEEHNQMLRTRLQLLKEGNQVLSGASQAVEKFKSMNLNYGANSGDEIHDV

SEQ ID NO: 57145 - protein, 95 aa, Glycine max
  peptide (1)..(95): Ceres Seq. ID no. 14312889
ESGDTLINNKKKAGKKGWVKILRATPSFESSNKISVPGFCNRESARETIHYTVAALLLSEELIAVIDCKQWKKCLNKVPMHHYCLLMELDPGSPI

SEQ ID NO: 57146 - DNA, 941 bp, Glycine max
  misc_feature (1)..(941): Ceres Seq. ID no. 14312901
aaaaaaaaacatggaaaggatatagattatagaatacagaggcaccgacgtagcgacggtcaaggtccacaatccacaatccgcaaccgaataacccactacccacagatttctctctctctctctctgttggattggatcctaatatctgtgttccactttcagaggttgctccttcattcacgcccttgctctcttcaaatctattttcttcctctgctctatctatctcttgttatttttccctctcacgccaatcaccatgccttctccttcagatcaccaccgcccccaaccaaaacctaatcccaacctcctttctctgttcctcaaaccaatcatcatgctccttctcacctccctcttcttcctcttcctcggcttcgctgccttcctcctcctcaacctcttcctcctcggcggcgccttccaccgccttcgcttccgcccctccgttaccaccgcacccacctcctccaacggcctcccccctcgcgaaatcaacaagctcccccgctttcgtgtcgccaatggatccgagacccgacccgactccaattgcgtcgtctgcctggacgcattccataacgcccaatggtgccgaaagcttgctgcgtgcgggcacgtgtttcaccgcaggtgcgtcgacacgtggctccttaaggtcgccgcatgccccacgtgccgcacacccgtgggattcaatgccggtgctacggtacatgacccgcctcagcggtctgaccatttgcatacctgcggaactgactccaatgctctcaccacccttttatagcttgtaagttttcgtttttaagcctttcccaaaccatgtaaggatatcaagtaattgtttttttaatctatgtatatgaattgtagcaatagttttttctcccatttcgacgactattgggaagaaatgaaccaacttaattcac

SEQ ID NO: 57147 - protein, 177 aa, Glycine max
  peptide (1)..(177): Ceres Seq. ID no. 14312902
  misc_feature (100)..(141): Pfam Name: Zinc finger, C3HC4 type (RING finger) Pfam Description: Zinc finger, C3HC4 type (RING finger)
  misc_feature (73)..(145): Homolog of NCBI NO: 23490777 NR Description: 23281-24001-related [Plasmodium yoelii yoelii]
  misc_feature (26)..(148): Homolog of NCBI NO: 21593762 NR Description: unknown [Arabidopsis thaliana]
  misc_feature (26)..(148): Homolog of NCBI NO: 15238323 NR Description: zinc finger (C3HC4-type RING finger) protein
  misc_feature (70)..(145): Homolog of NCBI NO: 33146607 NR Description: putative NEP1-interacting protein 2
  misc_feature (70)..(145): Homolog of NCBI NO: 29367571 NR Description: unknown [Oryza sativa (japonica cultivar-group)]
  misc_feature (5)..(145): Homolog of NCBI NO: 15227929 NR Description: RING zinc finger protein -related [Arabidopsis
  misc_feature (10)..(170): Homolog of NCBI NO: 15226289 NR Description: zinc finger (C3HC4-type RING finger) protein
  misc_feature (2)..(145): Homolog of NCBI NO: 15234713 NR Description: zinc finger (C3HC4-type RING finger) protein
  misc_feature (2)..(145): Homolog of NCBI NO: 15224210 NR Description: zinc finger (C3HC4-type RING finger) protein
  misc_feature (1)..(145): Homolog of NCBI NO: 21617980 NR Description: putative RING zinc finger protein [Arabidopsis
MPSPSDHHRPQPKPNPNLLSLFLKPIIMLLLTSLFFLFLGFAAFLLLNLFLLGGAFHRLRFRPSVTTAPTSSNGLPPREINKLPRFRVANGSETRPDSNCVVCLDAFHNAQWCRKLAACGHVFHRRCVDTWLLKVAACPTCRTPVGFNAGATVHDPPQRSDHLHTCGTDSNALTTLL

SEQ ID NO: 57148 - protein, 150 aa, Glycine max
  peptide (1)..(150): Ceres Seq. ID no. 14312903
  misc_feature (73)..(114): Pfam Name: Zinc finger, C3HC4 type (RING finger) Pfam Description: Zinc finger, C3HC4 type (RING finger)
  misc_feature (46)..(118): Homolog of NCBI NO: 23490777 NR Description: 23281-24001-related [Plasmodium yoelii yoelii]
  misc_feature (1)..(121): Homolog of NCBI NO: 21593762 NR Description: unknown [Arabidopsis thaliana]
  misc_feature (1)..(121): Homolog of NCBI NO: 15238323 NR Description: zinc finger (C3HC4-type RING finger) protein
  misc_feature (43)..(118): Homolog of NCBI NO: 33146607 NR Description: putative NEP1-interacting protein 2
  misc_feature (43)..(118): Homolog of NCBI NO: 29367571 NR Description: unknown [Oryza sativa (japonica cultivar-group)]
  misc_feature (1)..(118): Homolog of NCBI NO: 15227929 NR Description: RING zinc finger protein -related [Arabidopsis
  misc_feature (1)..(143): Homolog of NCBI NO: 15226289 NR Description: zinc finger (C3HC4-type RING finger) protein
  misc_feature (1)..(118): Homolog of NCBI NO: 15234713 NR Description: zinc finger (C3HC4-type RING finger) protein
  misc_feature (1)..(118): Homolog of NCBI NO: 15224210 NR Description: zinc finger (C3HC4-type RING finger) protein
  misc_feature (1)..(118): Homolog of NCBI NO: 21617980 NR Description: putative RING zinc finger protein [Arabidopsis
MLLLTSLFFLFLGFAAFLLLNLFLLGGAFHRLRFRPSVTTAPTSSNGLPPREINKLPRFRVANGSETRPDSNCVVCLDAFHNAQWCRKLAACGHVFHRRCVDTWLLKVAACPTCRTPVGFNAGATVHDPPQRSDHLHTCGTDSNALTTLL

SEQ ID NO: 57149 - protein, 101 aa, Glycine max
  peptide (1)..(101): Ceres Seq. ID no. 14312904
KKKHGKDIDYRIQRHRRSDGQGPQSTIRNRITHYPQISLSLSLLDWILISVFHFQRLLLHSRPCSLQIYFLPLLYLSLVIFPSHANHHAFSFRSPPPPTKT

SEQ ID NO: 57150 - DNA, 1006 bp, Glycine max
  misc_feature (1)..(1006): Ceres Seq. ID no. 14315461
acagtatatgcaaacaaagcctccaccaatgtcgctgctgccgccgccgaaacctcaccggagctccggtaactcccctggcgacagcattccagactggatctccgaatcaatcaacggcggctccctccgccgcgtcgacctcaactccggcaccaacggctgggcgtcgccgccaggctccgtgttctccctccgctccgaaagttactttcagaaccgccaaaaatgtcccgccggcgactacctcctctcgccggcgggcatggactggctcaaatccgccgcgaaactcgaccacgtgctctcacgcgcggacaaccgcgtgatgcacgcgctgcgaagatgtcaaaccctaggtcgctccctaaagagcttcgtcttcgcggtgaacctccagatcccgggcgcgaaggagcaccacagcgcggtgttctacttcgcgaccgaggaaccggatccggtccgaaccggttcactcttaaaccggttcgtgcacggcgacgacgcgtttcggaaccagcggttcaagctggtgaaccggatcgcgaaggggccgtggatcgtgaagaaggccgtggggagccacagcgcgtgcttgttagggaaagcgttgaattgcgcttactacaaaggttcgaattacctcgaaattgacgtcgatatcggaagcagcgcgatcgcgaacgcgattctgcacctcgcgttggggtgcgtgacgacggtgacgatcgatatggggtttgtggtggaggcacaggcggaggatgagttgccggagcggttgatcggtgcgattagggtttgccagatggagatggcgtcggccacggtggttgaggcgttgcacgtgccgcgcggggttgggtgggccaaggtgaatcatcataagtctgcggatgagcttgctttggatgattagatatttgtttagtgatagtagtacgaagtttatgatttttttttatattttaattattcttcaatggattttaatttcttgttc

SEQ ID NO: 57151 - protein, 306 aa, Glycine max
  peptide (1)..(306): Ceres Seq. ID no. 14315462
  misc_feature (53)..(299): Homolog of NCBI NO: 21618178 NR Description: unknown [Arabidopsis thaliana]
  misc_feature (22)..(299): Homolog of NCBI NO: 25406892 NR Description: hypothetical protein [imported] - Arabidopsis
  misc_feature (22)..(299): Homolog of NCBI NO: 18390605 NR Description: expressed protein [Arabidopsis thaliana]
  misc_feature (31)..(145): Homolog of NCBI NO: 15238675 NR Description: expressed protein [Arabidopsis thaliana]
  misc_feature (161)..(279): Homolog of NCBI NO: 15238675 NR Description: expressed protein [Arabidopsis thaliana]
  misc_feature (29)..(302): Homolog of NCBI NO: 15238674 NR Description: hypothetical protein [Arabidopsis thaliana]
  misc_feature (29)..(280): Homolog of NCBI NO: 15238672 NR Description: expressed protein [Arabidopsis thaliana]
  misc_feature (17)..(300): Homolog of NCBI NO: 21592409 NR Description: unknown [Arabidopsis thaliana]
  misc_feature (17)..(300): Homolog of NCBI NO: 22655107 NR Description: putative protein [Arabidopsis thaliana]
  misc_feature (17)..(300): Homolog of NCBI NO: 15238248 NR Description: expressed protein [Arabidopsis thaliana]
QYMQTKPPPMSLLPPPKPHRSSGNSPGDSIPDWISESINGGSLRRVDLNSGTNGWASPPGSVFSLRSESYFQNRQKCPAGDYLLSPAGMDWLKSAAKLDHVLSRADNRVMHALRRCQTLGRSLKSFVFAVNLQIPGAKEHHSAVFYFATEEPDPVRTGSLLNRFVHGDDAFRNQRFKLVNRIAKGPWIVKKAVGSHSACLLGKALNCAYYKGSNYLEIDVDIGSSAIANAILHLALGCVTTVTIDMGFVVEAQAEDELPERLIGAIRVCQMEMASATVVEALHVPRGVGWAKVNHHKSADELALDD

SEQ ID NO: 57152 - protein, 304 aa, Glycine max
  peptide (1)..(304): Ceres Seq. ID no. 14315463
  misc_feature (51)..(297): Homolog of NCBI NO: 21618178 NR Description: unknown [Arabidopsis thaliana]
  misc_feature (20)..(297): Homolog of NCBI NO: 25406892 NR Description: hypothetical protein [imported] - Arabidopsis
  misc_feature (20)..(297): Homolog of NCBI NO: 18390605 NR Description: expressed protein [Arabidopsis thaliana]
  misc_feature (29)..(143): Homolog of NCBI NO: 15238675 NR Description: expressed protein [Arabidopsis thaliana]
  misc_feature (159)..(277): Homolog of NCBI NO: 15238675 NR Description: expressed protein [Arabidopsis thaliana]
  misc_feature (27)..(300): Homolog of NCBI NO: 15238674 NR Description: hypothetical protein [Arabidopsis thaliana]
  misc_feature (27)..(278): Homolog of NCBI NO: 15238672 NR Description: expressed protein [Arabidopsis thaliana]
  misc_feature (15)..(298): Homolog of NCBI NO: 21592409 NR Description: unknown [Arabidopsis thaliana]
  misc_feature (15)..(298): Homolog of NCBI NO: 22655107 NR Description: putative protein [Arabidopsis thaliana]
  misc_feature (15)..(298): Homolog of NCBI NO: 15238248 NR Description: expressed protein [Arabidopsis thaliana]
MQTKPPPMSLLPPPKPHRSSGNSPGDSIPDWISESINGGSLRRVDLNSGTNGWASPPGSVFSLRSESYFQNRQKCPAGDYLLSPAGMDWLKSAAKLDHVLSRADNRVMHALRRCQTLGRSLKSFVFAVNLQIPGAKEHHSAVFYFATEEPDPVRTGSLLNRFVHGDDAFRNQRFKLVNRIAKGPWIVKKAVGSHSACLLGKALNCAYYKGSNYLEIDVDIGSSAIANAILHLALGCVTTVTIDMGFVVEAQAEDELPERLIGAIRVCQMEMASATVVEALHVPRGVGWAKVNHHKSADELALDD

SEQ ID NO: 57153 - protein, 297 aa, Glycine max
  peptide (1)..(297): Ceres Seq. ID no. 14315464
  misc_feature (44)..(290): Homolog of NCBI NO: 21618178 NR Description: unknown [Arabidopsis thaliana]
  misc_feature (13)..(290): Homolog of NCBI NO: 25406892 NR Description: hypothetical protein [imported] - Arabidopsis
  misc_feature (13)..(290): Homolog of NCBI NO: 18390605 NR Description: expressed protein [Arabidopsis thaliana]
  misc_feature (22)..(136): Homolog of NCBI NO: 15238675 NR Description: expressed protein [Arabidopsis thaliana]
  misc_feature (152)..(270): Homolog of NCBI NO: 15238675 NR Description: expressed protein [Arabidopsis thaliana]
  misc_feature (20)..(293): Homolog of NCBI NO: 15238674 NR Description: hypothetical protein [Arabidopsis thaliana]
  misc_feature (20)..(271): Homolog of NCBI NO: 15238672 NR Description: expressed protein [Arabidopsis thaliana]
  misc_feature (8)..(291): Homolog of NCBI NO: 21592409 NR Description: unknown [Arabidopsis thaliana]
  misc_feature (8)..(291): Homolog of NCBI NO: 22655107 NR Description: putative protein [Arabidopsis thaliana]
  misc_feature (8)..(291): Homolog of NCBI NO: 15238248 NR Description: expressed protein [Arabidopsis thaliana]
MSLLPPPKPHRSSGNSPGDSIPDWISESINGGSLRRVDLNSGTNGWASPPGSVFSLRSESYFQNRQKCPAGDYLLSPAGMDWLKSAAKLDHVLSRADNRVMHALRRCQTLGRSLKSFVFAVNLQIPGAKEHHSAVFYFATEEPDPVRTGSLLNRFVHGDDAFRNQRFKLVNRIAKGPWIVKKAVGSHSACLLGKALNCAYYKGSNYLEIDVDIGSSAIANAILHLALGCVTTVTIDMGFVVEAQAEDELPERLIGAIRVCQMEMASATVVEALHVPRGVGWAKVNHHKSADELALDD

SEQ ID NO: 57154 - DNA, 759 bp, Glycine max
  misc_feature (1)..(759): Ceres Seq. ID no. 14302702
aaactcaaagatgtcataaggtcactcaaggtatcatcaataggcatagttatattaatgtgtgatgtgttagaggatatgcgcattggtgaagattgaaattagaagcaagaatgaggagggcatgcaggaaaatatggcgatcggtgccttgcacgagcaggaaaagcttgcgaaatgactctaggaaggacatggaggagattctgagggctaagctttcaactattaaggaagagccagaattgtgtgatgagaacttagcatcaccaagacatgtgtgtatggccaagaaacaagggaagaaggttcaaggaagtattcaacatctcgggagataagtatgtcacatttgatggattagcaagagcatgtgctaaggctggtgggttcccagagccagagatcattcactacaaccctaaagattttgattttgggaaaaagaaatcatttccattccgtgaccagcatttctttgcatcagttgagaaagcaaagagcgtgcttggattggaacctgaatttggacttgtagagggtctagcagactcgtacaacctggactttggtagaggaacatatcggaaagaggctgatttctcaacagatgacataattcttggcaagagtcttgttagcgtataaacttttctatttcaattttaagtatttcacttgtatttagaaaagctgttcggatttgctacattatgaagtcgtgaaatattcatgagcttttcgttcagtattttttcc

SEQ ID NO: 57155 - protein, 123 aa, Glycine max
  peptide (1)..(123): Ceres Seq. ID no. 14302703
  misc_feature (14)..(116): Homolog of NCBI NO: 23128166 NR Description: hypothetical protein [Nostoc punctiforme]
  misc_feature (14)..(116): Homolog of NCBI NO: 23040971 NR Description: hypothetical protein [Trichodesmium erythraeum
  misc_feature (14)..(119): Homolog of NCBI NO: 16330056 NR Description: hypothetical protein [Synechocystis sp. PCC 6803]
  misc_feature (14)..(116): Homolog of NCBI NO: 17232323 NR Description: mRNA-binding protein [Nostoc sp. PCC 7120]
  misc_feature (7)..(116): Homolog of NCBI NO: 34398360 NR Description: 38 kDa ribosome-associated protein precursor
  misc_feature (13)..(121): Homolog of NCBI NO: 21593201 NR Description: putative RNA-binding protein [Arabidopsis
  misc_feature (13)..(121): Homolog of NCBI NO: 25456171 NR Description: probable RNA binding protein [imported] -
  misc_feature (13)..(121): Homolog of NCBI NO: 25454619 NR Description: hypothetical protein g5bf [imported] -
  misc_feature (13)..(121): Homolog of NCBI NO: 17064988 NR Description: g5bf protein [Arabidopsis thaliana]
  misc_feature (13)..(121): Homolog of NCBI NO: 15217485 NR Description: RNA-binding protein -related [Arabidopsis
MCVWPRNKGRRFKEVFNISGDKYVTFDGLARACAKAGGFPEPEIIHYNPKDFDFGKKKSFPFRDQHFFASVEKAKSVLGLEPEFGLVEGLADSYNLDFGRGTYRKEADFSTDDIILGKSLVSV

SEQ ID NO: 57156 - protein, 75 aa, Glycine max
  peptide (1)..(75): Ceres Seq. ID no. 14302704
MRRACRKIWRSVPCTSRKSLRNDSRKDMEEILRAKLSTIKEEPELCDENLASPRHVCMAKKQGKKVQGSIQHLGR

SEQ ID NO: 57157 - DNA, 951 bp, Glycine max
  misc_feature (1)..(951): Ceres Seq. ID no. 14315076
aaagaaaccaaagtctatttttttttttgtttctgagcctcccctcccctctctctaagatccccaaattgcttgtgaatgctagaaaccctagacagattcgattggatgcgctcccatttcacatcaagggcgagcgcattcggttcttgcaagcaagcctggtactaccgctgcctcggcctcgacccctgaatttgaaccattcatcaccacctttcttcattcattcacggttttccttttcgactcgatttgttgttttttttgttttgtttccttgacgatgttgacgatgagcaagcagaagaagaaccagaacgcgaagaggctgttgataagcatcaatgtgctggggagcgcggggcccattaggttcgtggtgaacgaggaggagcttgtggcggcggtcatcgacaccgcacttaagtcctacgcgcgtgagggcaggcttcccgtcctgggaaacaacaccaccggtttcgtgctttattgcccccatcttggatctgatgctttgagtccttgggagagaattggatcacatggggtgaggaatttcgtgctgtttaagaagccagagggtgtggcggatgtagatggaagtacagcactttctcgcagcagcagggggagtgggagctggaaggcttggttcaacaagtccctcaacctcaagatttctacccactaatgaataaatctctcggggaattgaacatgatgccttttgtggtgaatgccactaataatatccataatacgtagtatttcttttggttgtttttgttctcgctagccagagaaccctctctttaggaaattgttcaactttgacatttaggttttgattttgatggaatacaataagttttgattcctcacttccttgccattttttattcaattaaattaaacttaagatggtgaatgtgagctaatattccaagt

SEQ ID NO: 57158 - protein, 135 aa, Glycine max
  peptide (1)..(135): Ceres Seq. ID no. 14315077
  misc_feature (15)..(114): Homolog of NCBI NO: 10279678 NR Description: hypothetical protein [Catharanthus roseus]
  misc_feature (9)..(60): Homolog of NCBI NO: 9757983 NR Description: gb|AAC00605.1~gene_id:K12B20.21~similar to
  misc_feature (9)..(121): Homolog of NCBI NO: 21553538 NR Description: unknown [Arabidopsis thaliana]
  misc_feature (9)..(121): Homolog of NCBI NO: 15240321 NR Description: expressed protein [Arabidopsis thaliana]
  misc_feature (7)..(135): Homolog of NCBI NO: 25372856 NR Description: T26J12.8 protein - Arabidopsis thaliana
  misc_feature (1)..(119): Homolog of NCBI NO: 16226338 NR Description: At1g70780/F5A18_4 [Arabidopsis thaliana]
  misc_feature (7)..(135): Homolog of NCBI NO: 15220659 NR Description: expressed protein [Arabidopsis thaliana]
  misc_feature (1)..(135): Homolog of NCBI NO: 18409673 NR Description: expressed protein [Arabidopsis thaliana]
  misc_feature (1)..(135): Homolog of NCBI NO: 13359433 NR Description: putative senescence-associated protein [Pisum
MLTMSKQKKNQNAKRLLISINVLGSAGPIRFVVNEEELVAAVIDTALKSYAREGRLPVLGNNTTGFVLYCPHLGSDALSPWERIGSHGVRNFVLFKKPEGVADVDGSTALSRSSRGSGSWKAWFNKSLNLKISTH

SEQ ID NO: 57159 - protein, 132 aa, Glycine max
  peptide (1)..(132): Ceres Seq. ID no. 14315078
  misc_feature (12)..(111): Homolog of NCBI NO: 10279678 NR Description: hypothetical protein [Catharanthus roseus]
  misc_feature (6)..(57): Homolog of NCBI NO: 9757983 NR Description: gb|AAC00605.1~gene_id:K12B20.21~similar to
  misc_feature (6)..(118): Homolog of NCBI NO: 21553538 NR Description: unknown [Arabidopsis thaliana]
  misc_feature (6)..(118): Homolog of NCBI NO: 15240321 NR Description: expressed protein [Arabidopsis thaliana]
  misc_feature (4)..(132): Homolog of NCBI NO: 25372856 NR Description: T26J12.8 protein - Arabidopsis thaliana
  misc_feature (1)..(116): Homolog of NCBI NO: 16226338 NR Description: At1g70780/F5A18_4 [Arabidopsis thaliana]
  misc_feature (4)..(132): Homolog of NCBI NO: 15220659 NR Description: expressed protein [Arabidopsis thaliana]
  misc_feature (1)..(132): Homolog of NCBI NO: 18409673 NR Description: expressed protein [Arabidopsis thaliana]
  misc_feature (1)..(132): Homolog of NCBI NO: 13359433 NR Description: putative senescence-associated protein [Pisum
MSKQKKNQNAKRLLISINVLGSAGPIRFVVNEEELVAAVIDTALKSYAREGRLPVLGNNTTGFVLYCPHLGSDALSPWERIGSHGVRNFVLFKKPEGVADVDGSTALSRSSRGSGSWKAWFNKSLNLKISTH

SEQ ID NO: 57160 - protein, 93 aa, Glycine max
  peptide (1)..(93): Ceres Seq. ID no. 14315079
RNQSLFFFLFLSLPSPLSKIPKLLVNARNPRQIRLDALPFHIKGERIRFLQASLVLPLPRPRPLNLNHSSPPFFIHSRFSFSTRFVVFFVLFP

SEQ ID NO: 57161 - DNA, 1311 bp, Glycine max
  misc_feature (1)..(1311): Ceres Seq. ID no. 14315440
attcaaaacctcttccccttctcatctatcctcctcctaaaaattggtcaaaatctatccaatctctttgcatattccttcttatcatcatcttcttcttcttctctgttgcctctagaattgaaaagttcttcttcctgcccatagtctttgacacccttttccaacctctagattttttcttccctctataattatctccttcacagaaaccttcttatcccacatatcatcaattaccttgttcctctcaaagtttgattctttttctcttgaattggattgttataatttttgttcatacttacatgttatgcagttatgaatgattgagagacaacacaaatgtcttctccagtgatctccgagatcctcctctctggcttcaccataaactcttccctaagacgcaggacacacttggtgcaatctttctctgttgttttcctccactggttctacgttttctcatgaactaaataaattaacctcgtacatagtataaacatagtacgtaccagtgttcttttttcaaattcaatcattaaacctagctagcagattagggttattattgttcaaatagcagactactgcatggcttctcctggtggaagtggaacctattcatctggttccagttctcttcaaaactctggttctgaaggagacagagacatcatggaacagaggaagaggaagagaatgttgtccaatagggaatcggcacgtagatcgaggataaggaaacagcagcacctggaaggtctgagtgcccaattggatcagcttaaaaaggagaacgcacaaatcaacacaaacataagcatcacgacgcagatgtacctcaacgtggaagctgagaacgcgattctgagggctcaaatgggggaactgagcaacagattgaactctctgaacgaaatgataagtttcattaactccaccaacaacaactgcttgatgatgttcgatgaggcacaggagacgaccactcagttgttcaatgattgtggcttcatggattatgcttggaatggaataccaatcatggcttccgctgacaatgaaatgttgatcatgtattgatcttgagttgtagcacaacacccacgtcttctcttgttttaattttttttttttttttttattgtaatagtgatgtctattgttttcagtttatgttatgtttagggttgtcttgtcttgtgcgtatttcaagagggggattcttttttcttctcgaaaatgtaaaatatcgaccttttattttccagatagtgattttcgttcatttccactttttatttt

SEQ ID NO: 57162 - protein, 163 aa, Glycine max
  peptide (1)..(163): Ceres Seq. ID no. 14315441
  misc_feature (28)..(92): Pfam Name: bZIP transcription factor Pfam Description: bZIP transcription factor
  misc_feature (1)..(130): Homolog of NCBI NO: 16580130 NR Description: bZIP transcription factor BZI-2 [Nicotiana
  misc_feature (1)..(154): Homolog of NCBI NO: 4457221 NR Description: putative bZIP DNA-binding protein [Capsicum
  misc_feature (1)..(154): Homolog of NCBI NO: 24460973 NR Description: bZIP transcription factor [Capsicum chinense]
MASPGGSGTYSSGSSSLQNSGSEGDRDIMEQRKRKRMLSNRESARRSRIRKQQHLEGLSAQLDQLKKENAQINTNISITTQMYLNVEAENAILRAQMGELSNRLNSLNEMISFINSTNNNCLMMFDEAQETTTQLFNDCGFMDYAWNGIPIMASADNEMLIMY

SEQ ID NO: 57163 - protein, 135 aa, Glycine max
  peptide (1)..(135): Ceres Seq. ID no. 14315442
  misc_feature (1)..(64): Pfam Name: bZIP transcription factor Pfam Description: bZIP transcription factor
  misc_feature (1)..(102): Homolog of NCBI NO: 16580130 NR Description: bZIP transcription factor BZI-2 [Nicotiana
  misc_feature (1)..(126): Homolog of NCBI NO: 4457221 NR Description: putative bZIP DNA-binding protein [Capsicum
  misc_feature (1)..(126): Homolog of NCBI NO: 24460973 NR Description: bZIP transcription factor [Capsicum chinense]
MEQRKRKRMLSNRESARRSRIRKQQHLEGLSAQLDQLKKENAQINTNISITTQMYLNVEAENAILRAQMGELSNRLNSLNEMISFINSTNNNCLMMFDEAQETTTQLFNDCGFMDYAWNGIPIMASADNEMLIMY

SEQ ID NO: 57164 - protein, 127 aa, Glycine max
  peptide (1)..(127): Ceres Seq. ID no. 14315443
  misc_feature (1)..(56): Pfam Name: bZIP transcription factor Pfam Description: bZIP transcription factor
  misc_feature (1)..(94): Homolog of NCBI NO: 16580130 NR Description: bZIP transcription factor BZI-2 [Nicotiana
  misc_feature (1)..(118): Homolog of NCBI NO: 4457221 NR Description: putative bZIP DNA-binding protein [Capsicum
  misc_feature (1)..(118): Homolog of NCBI NO: 24460973 NR Description: bZIP transcription factor [Capsicum chinense]
MLSNRESARRSRIRKQQHLEGLSAQLDQLKKENAQINTNISITTQMYLNVEAENAILRAQMGELSNRLNSLNEMISFINSTNNNCLMMFDEAQETTTQLFNDCGFMDYAWNGIPIMASADNEMLIMY

SEQ ID NO: 57165 - DNA, 1149 bp, Glycine max
  misc_feature (1)..(1149): Ceres Seq. ID no. 14316316
atattcctttcttttttgtttcctcaaaataaaaaataaaactttttattatctgcaggttttgcatttgtgtttctgatttttgtgtacctaatcccaatccgtttcttttcaatcttctcttcgaccccatttcctagatctgcttgtttcttccatcatcaactaatcatggttcttcacagagaactcgatcatctcttttcatcccctttcgttgaccctcccaaagatgatgcgaaatccagtggcatgtcaattgaaaagaagattgagttcctcgagagtttgactggaaaggtcacaaatcggaggtctcggaggtggttaaatgatcgtctcttgatggaactagtaccacgtttaaatgcagaggaaattagaggcttgtttgctccaccaccttggggtgatgaagttccaccttcaacattttccatgacgaacatggaggagtgggacagattcaggaatattgacatggataaagaggttaatataatccattccctggaaaactctatagaaaagaggaaaggtcacattgatgctgacaagatggcagtgttgaatggttggcatagaatcgattgtagaacaagagatgcgcttcgccgtagttgtctttctgagctcattgagggttatgaggaatgtgtacgagctttcataacagaaagcacagatggagatattcttgaactacaaattcaggatccttttcatagattgttactgcatggagtttgtgagttctacaatctggcgtcggatacagtgtcaggttataatggcgtggagtcgtcaaggattacaaagataaagaggaagaaaaagggttctcctgtgctcccaaatatcaccctgtcccattttctgaagatgtccaaggaaggaagttggtagtttcttcaggcagtgttgttcatacaataaaactgaaccttagtgttgtcccagggtgaacaatgtgcaatatttcgtatttattcagaatatcactgtaaattagttcgatgacctgtattttaattggtttataccatcggtctacgcaagttgttgattgttggtttacattgttgtagctgattattctgattttaacaaatactatatcttaaggttgaattttcagaagatctatac

SEQ ID NO: 57166 - protein, 244 aa, Glycine max
  peptide (1)..(244): Ceres Seq. ID no. 14316317
  misc_feature (13)..(197): Homolog of NCBI NO: 25372999 NR Description: hypothetical protein F15K9.15 [imported] -
  misc_feature (13)..(244): Homolog of NCBI NO: 18379075 NR Description: expressed protein [Arabidopsis thaliana]
MVLHRELDHLFSSPFVDPPKDDAKSSGMSIEKKIEFLESLTGKVTNRRSRRWLNDRLLMELVPRLNAEEIRGLFAPPPWGDEVPPSTFSMTNMEEWDRFRNIDMDKEVNIIHSLENSIEKRKGHIDADKMAVLNGWHRIDCRTRDALRRSCLSELIEGYEECVRAFITESTDGDILELQIQDPFHRLLLHGVCEFYNLASDTVSGYNGVESSRITKIKRKKKGSPVLPNITLSHFLKMSKEGSW

SEQ ID NO: 57167 - protein, 217 aa, Glycine max
  peptide (1)..(217): Ceres Seq. ID no. 14316318
  misc_feature (1)..(170): Homolog of NCBI NO: 25372999 NR Description: hypothetical protein F15K9.15 [imported] -
  misc_feature (1)..(217): Homolog of NCBI NO: 18379075 NR Description: expressed protein [Arabidopsis thaliana]
MSIEKKIEFLESLTGKVTNRRSRRWLNDRLLMELVPRLNAEEIRGLFAPPPWGDEVPPSTFSMTNMEEWDRFRNIDMDKEVNIIHSLENSIEKRKGHIDADKMAVLNGWHRIDCRTRDALRRSCLSELIEGYEECVRAFITESTDGDILELQIQDPFHRLLLHGVCEFYNLASDTVSGYNGVESSRITKIKRKKKGSPVLPNITLSHFLKMSKEGSW

SEQ ID NO: 57168 - protein, 186 aa, Glycine max
  peptide (1)..(186): Ceres Seq. ID no. 14316319
  misc_feature (1)..(139): Homolog of NCBI NO: 25372999 NR Description: hypothetical protein F15K9.15 [imported] -
  misc_feature (1)..(186): Homolog of NCBI NO: 18379075 NR Description: expressed protein [Arabidopsis thaliana]
MELVPRLNAEEIRGLFAPPPWGDEVPPSTFSMTNMEEWDRFRNIDMDKEVNIIHSLENSIEKRKGHIDADKMAVLNGWHRIDCRTRDALRRSCLSELIEGYEECVRAFITESTDGDILELQIQDPFHRLLLHGVCEFYNLASDTVSGYNGVESSRITKIKRKKKGSPVLPNITLSHFLKMSKEGSW

SEQ ID NO: 57169 - DNA, 1341 bp, Glycine max
  misc_feature (1)..(1341): Ceres Seq. ID no. 14315469
gaaattttccggaaatagaaaacataatttctctctctgtgttgggtgtgtctctgtttctctctctctctccgttgttgttgttgatccatggaagaggaacttcagaacccagaagaaagttgaaacctttgggctaaactccgatacccaattggctgaaagctccaatgcggtgttgttggaggaggagaccctccttgaagaaggaaaatcgtggatctgatgatggtggggacatgggtgatgaagatggtttcaggtggttgtagggttgttgtggggggcaacgatccggtggtggtgcggcagcagcatagacgacgatgcagcttcacttctcgcctagcatgagaagcatcacgatatcgagcaaaaatgggtttattgacttgatgaagatcaaggtcgcagcttgccacatttcctatcgaaccctcttccacaccatcctcatcctcgctttcttgttgccctttgtctttattctcactgctcttgttacccttgaaggtgtcaacaagtgctcctcattcgattgtttaggtaggcggttgggaccaaagcttcttggtagggttgatgatccggcgcagagactagttagagatttttacaatatccttaacgaagtaaagactagggaaattccatctgctctagagcttccggattcatttgatcaactggtttctgatatgaagagcaatcaatatgatgcgaaaacgtttgcattcatgttaaggggaatgatgcagaaatttgagagagaaatcagagaatctaaattttcagagctgatgaataaacattttgcagcaagttcagttcctaaagggattcattgtctgtctttgcgtttgactgatgaatattcgtcaaatgcccatgcacgcaaacaactgcctcctccagaattactacctacactgtctgacaactcttaccatcattttattgtttcaacggataacatcttggctgcttcggtagttgttacttctactgtgcagtcatctcagaaacctgagaatatagtcttccatgtcatcactgacaaaaaaacttatgctggtatgcactcatggtttgctctaaatccagccactcctgctatagttgaggtcagaggcattcaccagtttgactggttgacgagagaaaatgttccagtacttgaagcagtagaaaatcaaaatgggatcaggaatgataactggggttattgatttttcaattagcaaaatgtcaggttgatgttgttctggctggtttaataataactacattgatttctttgtaactcggttctctttttcagttcaaaggatcttatatatg

SEQ ID NO: 57170 - protein, 300 aa, Glycine max
  peptide (1)..(300): Ceres Seq. ID no. 14315470
  misc_feature (90)..(289): Homolog of NCBI NO: 14517362 NR Description: AT3g61130/T20K12_30 [Arabidopsis thaliana]
  misc_feature (76)..(293): Homolog of NCBI NO: 38423965 NR Description: putative glycosyltransferase
  misc_feature (109)..(275): Homolog of NCBI NO: 34910786 NR Description: P0042A10.22 [Oryza sativa (japonica
  misc_feature (28)..(288): Homolog of NCBI NO: 11358146 NR Description: hypothetical protein T20N10.140 - Arabidopsis
  misc_feature (28)..(288): Homolog of NCBI NO: 22331857 NR Description: glycosyltransferase family 8 [Arabidopsis
  misc_feature (1)..(295): Homolog of NCBI NO: 15239707 NR Description: glycosyltransferase family 8 [Arabidopsis
  misc_feature (24)..(295): Homolog of NCBI NO: 6714484 NR Description: unknown protein [Arabidopsis thaliana]
  misc_feature (1)..(295): Homolog of NCBI NO: 11358133 NR Description: hypothetical protein T20K14_80 - Arabidopsis
  misc_feature (1)..(295): Homolog of NCBI NO: 30685369 NR Description: glycosyltransferase family 8 [Arabidopsis
  misc_feature (1)..(295): Homolog of NCBI NO: 30678270 NR Description: glycosyltransferase family 8 [Arabidopsis
MQLHFSPSMRSITISSKNGFIDLMKIKVAACHISYRTLFHTILILAFLLPFVFILTALVTLEGVNKCSSFDCLGRRLGPKLLGRVDDPAQRLVRDFYNILNEVKTREIPSALELPDSFDQLVSDMKSNQYDAKTFAFMLRGMMQKFEREIRESKFSELMNKHFAASSVPKGIHCLSLRLTDEYSSNAHARKQLPPPELLPTLSDNSYHHFIVSTDNILAASVVVTSTVQSSQKPENIVFHVITDKKTYAGMHSWFALNPATPAIVEVRGIHQFDWLTRENVPVLEAVENQNGIRNDNWGY

SEQ ID NO: 57171 - protein, 292 aa, Glycine max
  peptide (1)..(292): Ceres Seq. ID no. 14315471
  misc_feature (82)..(281): Homolog of NCBI NO: 14517362 NR Description: AT3g61130/T20K12_30 [Arabidopsis thaliana]
  misc_feature (68)..(285): Homolog of NCBI NO: 38423965 NR Description: putative glycosyltransferase
  misc_feature (101)..(267): Homolog of NCBI NO: 34910786 NR Description: P0042A10.22 [Oryza sativa (japonica
  misc_feature (20)..(280): Homolog of NCBI NO: 11358146 NR Description: hypothetical protein T20N10.140 - Arabidopsis
  misc_feature (20)..(280): Homolog of NCBI NO: 22331857 NR Description: glycosyltransferase family 8 [Arabidopsis
  misc_feature (1)..(287): Homolog of NCBI NO: 15239707 NR Description: glycosyltransferase family 8 [Arabidopsis
  misc_feature (16)..(287): Homolog of NCBI NO: 6714484 NR Description: unknown protein [Arabidopsis thaliana]
  misc_feature (1)..(287): Homolog of NCBI NO: 11358133 NR Description: hypothetical protein T20K14_80 - Arabidopsis
  misc_feature (1)..(287): Homolog of NCBI NO: 30685369 NR Description: glycosyltransferase family 8 [Arabidopsis
  misc_feature (1)..(287): Homolog of NCBI NO: 30678270 NR Description: glycosyltransferase family 8 [Arabidopsis
MRSITISSKNGFIDLMKIKVAACHISYRTLFHTILILAFLLPFVFILTALVTLEGVNKCSSFDCLGRRLGPKLLGRVDDPAQRLVRDFYNILNEVKTREIPSALELPDSFDQLVSDMKSNQYDAKTFAFMLRGMMQKFEREIRESKFSELMNKHFAASSVPKGIHCLSLRLTDEYSSNAHARKQLPPPELLPTLSDNSYHHFIVSTDNILAASVVVTSTVQSSQKPENIVFHVITDKKTYAGMHSWFALNPATPAIVEVRGIHQFDWLTRENVPVLEAVENQNGIRNDNWGY

SEQ ID NO: 57172 - protein, 277 aa, Glycine max
  peptide (1)..(277): Ceres Seq. ID no. 14315472
  misc_feature (67)..(266): Homolog of NCBI NO: 14517362 NR Description: AT3g61130/T20K12_30 [Arabidopsis thaliana]
  misc_feature (53)..(270): Homolog of NCBI NO: 38423965 NR Description: putative glycosyltransferase
  misc_feature (86)..(252): Homolog of NCBI NO: 34910786 NR Description: P0042A10.22 [Oryza sativa (japonica
  misc_feature (5)..(265): Homolog of NCBI NO: 11358146 NR Description: hypothetical protein T20N10.140 - Arabidopsis
  misc_feature (5)..(265): Homolog of NCBI NO: 22331857 NR Description: glycosyltransferase family 8 [Arabidopsis
  misc_feature (1)..(272): Homolog of NCBI NO: 15239707 NR Description: glycosyltransferase family 8 [Arabidopsis
  misc_feature (1)..(272): Homolog of NCBI NO: 6714484 NR Description: unknown protein [Arabidopsis thaliana]
  misc_feature (1)..(272): Homolog of NCBI NO: 11358133 NR Description: hypothetical protein T20K14_80 - Arabidopsis
  misc_feature (1)..(272): Homolog of NCBI NO: 30685369 NR Description: glycosyltransferase family 8 [Arabidopsis
  misc_feature (1)..(272): Homolog of NCBI NO: 30678270 NR Description: glycosyltransferase family 8 [Arabidopsis
MKIKVAACHISYRTLFHTILILAFLLPFVFILTALVTLEGVNKCSSFDCLGRRLGPKLLGRVDDPAQRLVRDFYNILNEVKTREIPSALELPDSFDQLVSDMKSNQYDAKTFAFMLRGMMQKFEREIRESKFSELMNKHFAASSVPKGIHCLSLRLTDEYSSNAHARKQLPPPELLPTLSDNSYHHFIVSTDNILAASVVVTSTVQSSQKPENIVFHVITDKKTYAGMHSWFALNPATPAIVEVRGIHQFDWLTRENVPVLEAVENQNGIRNDNWGY

SEQ ID NO: 57173 - DNA, 2083 bp, Glycine max
  misc_feature (1)..(2083): Ceres Seq. ID no. 14315473
catacgcgcacactgagtcataacgctaatggactcgttctctttcaccactgttccatagagcaactcaaaaccacacacacaaaaaaacatgaatccccgttttgcccctctctctttctcaatcccttctcttcgaaaaacaccttctctcattggtgctaaccacacctccgctcgcttctgctcccgataaataataccacacaaaaaaaatcccaacttttttttttcttcttcttcttttatttcaattcaattcatttttttttgtgattttttctggttattgttattaatttctgtgagaagtgcacaatttgtttccatggatccaaccgtagcgaagcctggctttctcagaaacgttctggttcggttactcctcttcggcgttttcatcgtcgtcgtacggttcgcttacgtcatcaccctcgccggtgagtcctgcaccgtcggcgacttctgcttcttctctccgtcgatcaacctcgcaatcgccggcaccagatcaggcgccctcgcagcgcgcggaggagccgccgggccgccggagcgctatgccagcaaggactggatcaacggcgtccggttctactcgtcggctttccaggacatgatctccggtggcttcctctcgccggcggcgaaggcgctctgcgtggagacgccgaccggccgcgacgtcctcgcgctgcgcgagatcggcgtcatcgacgccgtcgggatctcgaagaaggcgtctccgccgcttgtgaaatccggcgaggctcgccggattccgttccccgatggctcgttcgacttcgtgttcgccggcgacggcgctttagaaaaatcgccgcggccggcggagttcgccgccgaaatctctcggacgctcaaacccgaagggtttgccgcgttccatgtaaaggccaatgacacttacagttacaattcattcgttgatttgttgaatttttgttgcaacgtggtgaaaataaacgacatgttagggtttgattcatccatacctcacataagagagatcgtggtgaagaaagtgcgtcacacaattgattctgaatccaattcaaactccaattccaatggaaaagaatgctctgttccggagtacaaggaaaagctggtgagaaatgcagaggctttgattgaagaggagccactgaagccatggctgactctaaagaaaaacgtgaagaacataaagtacctatcttcaatggttgatataagcttcaaggataggtatgtgtatgttgatgttggagctagaagctatggttccagcattggacgttggtttaggaaacagtacccgaaacagaacaagacctttcatgtgtatgcaattgaggctgataaaacgtttcatcaggagtatgaaacgaaaaagggtgttactttgttgccttatgctgcatgggtgaggaatgagagtttggtgtttgagattaaccgcgacccgggggagaaggagaaggagaaggagaaggagaaggttaagggtaagggaaggggaatggggaggattcaaccattgaaatcttcaggtggttttgatggtggtgaggttgagaagattcctgggttcgatttcgcagactggttgaagaacacggtttcggagaatgatttcgttgtgatgaagatggatgtggagggtactgagtttgatttgattccaagattgtttgaaactggggctatctgtttggtggatgagatttttcttgagtgccattacaataggtggcagaggtgttgccctggacagaggagccccaagtatgagaaaacttatgatcagtgcttgcagctcttcacttctctcagacaaagtggagttcttgttcatcaatggttttaattaactttgtagaattgcctgatggatgatgggtcaaaccctatatgcatgttcttagcttctgcatgtttcttctttttagttttcttatttttttcccaagccaatagagaagagagagagtgagagtgagagttctttattttttaaaatttctctacttgtaacagttgcaactgaaagtgaaaattaaaaccatccctttacaac

SEQ ID NO: 57174 - protein, 514 aa, Glycine max
  peptide (1)..(514): Ceres Seq. ID no. 14315474
  misc_feature (83)..(222): Homolog of NCBI NO: 15236844 NR Description: hypothetical protein [Arabidopsis thaliana]
  misc_feature (63)..(161): Homolog of NCBI NO: 19881630 NR Description: Hypothetical protein [Oryza sativa]
  misc_feature (78)..(209): Homolog of NCBI NO: 7486528 NR Description: hypothetical protein F6I7.10 - Arabidopsis
  misc_feature (78)..(209): Homolog of NCBI NO: 22328908 NR Description: expressed protein [Arabidopsis thaliana]
  misc_feature (78)..(241): Homolog of NCBI NO: 25403245 NR Description: protein F21J9.14 [imported] - Arabidopsis
  misc_feature (78)..(241): Homolog of NCBI NO: 15221752 NR Description: hypothetical protein [Arabidopsis thaliana]
  misc_feature (423)..(472): Homolog of NCBI NO: 15231806 NR Description: expressed protein [Arabidopsis thaliana]
  misc_feature (10)..(362): Homolog of NCBI NO: 15231806 NR Description: expressed protein [Arabidopsis thaliana]
  misc_feature (71)..(514): Homolog of NCBI NO: 34898214 NR Description: P0034A04.18 [Oryza sativa (japonica
  misc_feature (1)..(514): Homolog of NCBI NO: 15241038 NR Description: expressed protein [Arabidopsis thaliana]
MDPTVAKPGFLRNVLVRLLLFGVFIVVVRFAYVITLAGESCTVGDFCFFSPSINLAIAGTRSGALAARGGAAGPPERYASKDWINGVRFYSSAFQDMISGGFLSPAAKALCVETPTGRDVLALREIGVIDAVGISKKASPPLVKSGEARRIPFPDGSFDFVFAGDGALEKSPRPAEFAAEISRTLKPEGFAAFHVKANDTYSYNSFVDLLNFCCNVVKINDMLGFDSSIPHIREIVVKKVRHTIDSESNSNSNSNGKECSVPEYKEKLVRNAEALIEEEPLKPWLTLKKNVKNIKYLSSMVDISFKDRYVYVDVGARSYGSSIGRWFRKQYPKQNKTFHVYAIEADKTFHQEYETKKGVTLLPYAAWVRNESLVFEINRDPGEKEKEKEKEKVKGKGRGMGRIQPLKSSGGFDGGEVEKIPGFDFADWLKNTVSENDFVVMKMDVEGTEFDLIPRLFETGAICLVDEIFLECHYNRWQRCCPGQRSPKYEKTYDQCLQLFTSLRQSGVLVHQWF

SEQ ID NO: 57175 - protein, 418 aa, Glycine max
  peptide (1)..(418): Ceres Seq. ID no. 14315475
  misc_feature (1)..(126): Homolog of NCBI NO: 15236844 NR Description: hypothetical protein [Arabidopsis thaliana]
  misc_feature (1)..(65): Homolog of NCBI NO: 19881630 NR Description: Hypothetical protein [Oryza sativa]
  misc_feature (1)..(113): Homolog of NCBI NO: 7486528 NR Description: hypothetical protein F6I7.10 - Arabidopsis
  misc_feature (1)..(113): Homolog of NCBI NO: 22328908 NR Description: expressed protein [Arabidopsis thaliana]
  misc_feature (1)..(145): Homolog of NCBI NO: 25403245 NR Description: protein F21J9.14 [imported] - Arabidopsis
  misc_feature (1)..(145): Homolog of NCBI NO: 15221752 NR Description: hypothetical protein [Arabidopsis thaliana]
  misc_feature (327)..(376): Homolog of NCBI NO: 15231806 NR Description: expressed protein [Arabidopsis thaliana]
  misc_feature (1)..(266): Homolog of NCBI NO: 15231806 NR Description: expressed protein [Arabidopsis thaliana]
  misc_feature (1)..(418): Homolog of NCBI NO: 34898214 NR Description: P0034A04.18 [Oryza sativa (japonica
  misc_feature (1)..(418): Homolog of NCBI NO: 15241038 NR Description: expressed protein [Arabidopsis thaliana]
MISGGFLSPAAKALCVETPTGRDVLALREIGVIDAVGISKKASPPLVKSGEARRIPFPDGSFDFVFAGDGALEKSPRPAEFAAEISRTLKPEGFAAFHVKANDTYSYNSFVDLLNFCCNVVKINDMLGFDSSIPHIREIVVKKVRHTIDSESNSNSNSNGKECSVPEYKEKLVRNAEALIEEEPLKPWLTLKKNVKNIKYLSSMVDISFKDRYVYVDVGARSYGSSIGRWFRKQYPKQNKTFHVYAIEADKTFHQEYETKKGVTLLPYAAWVRNESLVFEINRDPGEKEKEKEKEKVKGKGRGMGRIQPLKSSGGFDGGEVEKIPGFDFADWLKNTVSENDFVVMKMDVEGTEFDLIPRLFETGAICLVDEIFLECHYNRWQRCCPGQRSPKYEKTYDQCLQLFTSLRQSGVLVHQWF

SEQ ID NO: 57176 - protein, 293 aa, Glycine max
  peptide (1)..(293): Ceres Seq. ID no. 14315476
  misc_feature (1)..(20): Homolog of NCBI NO: 25403245 NR Description: protein F21J9.14 [imported] - Arabidopsis
  misc_feature (1)..(20): Homolog of NCBI NO: 15221752 NR Description: hypothetical protein [Arabidopsis thaliana]
  misc_feature (202)..(251): Homolog of NCBI NO: 15231806 NR Description: expressed protein [Arabidopsis thaliana]
  misc_feature (1)..(141): Homolog of NCBI NO: 15231806 NR Description: expressed protein [Arabidopsis thaliana]
  misc_feature (1)..(293): Homolog of NCBI NO: 34898214 NR Description: P0034A04.18 [Oryza sativa (japonica
  misc_feature (1)..(293): Homolog of NCBI NO: 15241038 NR Description: expressed protein [Arabidopsis thaliana]
MLGFDSSIPHIREIVVKKVRHTIDSESNSNSNSNGKECSVPEYKEKLVRNAEALIEEEPLKPWLTLKKNVKNIKYLSSMVDISFKDRYVYVDVGARSYGSSIGRWFRKQYPKQNKTFHVYAIEADKTFHQEYETKKGVTLLPYAAWVRNESLVFEINRDPGEKEKEKEKEKVKGKGRGMGRIQPLKSSGGFDGGEVEKIPGFDFADWLKNTVSENDFVVMKMDVEGTEFDLIPRLFETGAICLVDEIFLECHYNRWQRCCPGQRSPKYEKTYDQCLQLFTSLRQSGVLVHQWF

SEQ ID NO: 57177 - DNA, 1225 bp, Glycine max
  misc_feature (1)..(1225): Ceres Seq. ID no. 14315477
aaaaaaacgtgtcatgtgcctctctccttttcccccaaaatctgcttcagttcacgttcacgcttcgctacctgcgcctattcattgtctcttctcttcccctgctcaacgtttttcttctcccttcccccacccacctccactcttttcatttctattctcttcccaaacagaacgaccatcggaacaaacggcattttgtcaaacagttacgagactcagcattattcataggtgatagtactggcagtgattaagattgcaattgcacaatcagaatattttttatatacaatgttttcaaggtgactgacaacaattaagattgcaattgcaccaaggggacaaaacaaaacaatgagcagcgttttgcaagggaaacgcaagcgccaggacttggcttcaaggctctcggcctcaatgaataatgaggagggtcgtgtctacaacatcattcgcgggaggaaggagatggggatatggcaaggggacatcaaacgagaagccaacatccccgatagtttgttgaagaaatccatcaagatgcttatcaccaagaaactcgtcaaggaggttgtgaacgtgcagaacaggtccaagaagttgttgatggcatcggatttcgaaccctccaatgagatcagtggtggagagtggtacaccgaaggcaaactcgacacagaatttattgacaagctgtctgaggcttgctttagtagtattcgtcgcctgaaggtcgcgacttgtgagggcatccttgagtggattaggaaggcgggtggtggagtcagtaaagggcagatggagcagattttgaagaagttggttatggagaataaggtgcaggaagtgactagtgatggctctggggattttgagtctgttcctgttggtgaagtttgttatagattggtgaagaaggctgctggtgttggtgccatggcttctattccttgtggggtttgtcctaggattaattcttgtacacccgatggtgttatctcccctacaacttgtcaatattatcagaaatggttggacttctaaatgtgtcccattcaaatccaagtccttttttagtttgggattttacataccttttagttttgaattccatcttttttatttttttatttttcatatggcactttctagagtctttattgattttctgttcaatgtgatacttaaaagaattaattgattttccttttgcatttaaggg

SEQ ID NO: 57178 - protein, 229 aa, Glycine max
  peptide (1)..(229): Ceres Seq. ID no. 14315478
  misc_feature (8)..(228): Pfam Name: RNA polymerase Rpc34 subunit Pfam Description: RNA polymerase Rpc34 subunit
  misc_feature (15)..(123): Homolog of NCBI NO: 26325236 NR Description: unnamed protein product [Mus musculus]
  misc_feature (144)..(229): Homolog of NCBI NO: 33598952 NR Description: DNA-directed RNA polymerase III 39 kDa
  misc_feature (15)..(123): Homolog of NCBI NO: 33598952 NR Description: DNA-directed RNA polymerase III 39 kDa
  misc_feature (144)..(229): Homolog of NCBI NO: 39794390 NR Description: Unknown (protein for MGC:76106) [Silurana
  misc_feature (10)..(123): Homolog of NCBI NO: 39794390 NR Description: Unknown (protein for MGC:76106) [Silurana
  misc_feature (8)..(228): Homolog of NCBI NO: 24648960 NR Description: CG5380-PA [Drosophila melanogaster]
  misc_feature (123)..(229): Homolog of NCBI NO: 30353810 NR Description: Unknown (protein for MGC:56299) [Danio rerio]
  misc_feature (2)..(123): Homolog of NCBI NO: 30353810 NR Description: Unknown (protein for MGC:56299) [Danio rerio]
  misc_feature (12)..(228): Homolog of NCBI NO: 31240289 NR Description: ENSANGP00000015349 [Anopheles gambiae]
  misc_feature (8)..(229): Homolog of NCBI NO: 15237811 NR Description: hypothetical protein [Arabidopsis thaliana]
MSSVLQGKRKRQDLASRLSASMNNEEGRVYNIIRGRKEMGIWQGDIKREANIPDSLLKKSIKMLITKKLVKEVVNVQNRSKKLLMASDFEPSNEISGGEWYTEGKLDTEFIDKLSEACFSSIRRLKVATCEGILEWIRKAGGGVSKGQMEQILKKLVMENKVQEVTSDGSGDFESVPVGEVCYRLVKKAAGVGAMASIPCGVCPRINSCTPDGVISPTTCQYYQKWLDF

SEQ ID NO: 57179 - protein, 208 aa, Glycine max
  peptide (1)..(208): Ceres Seq. ID no. 14315479
  misc_feature (1)..(207): Pfam Name: RNA polymerase Rpc34 subunit Pfam Description: RNA polymerase Rpc34 subunit
  misc_feature (1)..(102): Homolog of NCBI NO: 26325236 NR Description: unnamed protein product [Mus musculus]
  misc_feature (123)..(208): Homolog of NCBI NO: 33598952 NR Description: DNA-directed RNA polymerase III 39 kDa
  misc_feature (1)..(102): Homolog of NCBI NO: 33598952 NR Description: DNA-directed RNA polymerase III 39 kDa
  misc_feature (123)..(208): Homolog of NCBI NO: 39794390 NR Description: Unknown (protein for MGC:76106) [Silurana
  misc_feature (1)..(102): Homolog of NCBI NO: 39794390 NR Description: Unknown (protein for MGC:76106) [Silurana
  misc_feature (1)..(207): Homolog of NCBI NO: 24648960 NR Description: CG5380-PA [Drosophila melanogaster]
  misc_feature (102)..(208): Homolog of NCBI NO: 30353810 NR Description: Unknown (protein for MGC:56299) [Danio rerio]
  misc_feature (1)..(102): Homolog of NCBI NO: 30353810 NR Description: Unknown (protein for MGC:56299) [Danio rerio]
  misc_feature (1)..(207): Homolog of NCBI NO: 31240289 NR Description: ENSANGP00000015349 [Anopheles gambiae]
  misc_feature (1)..(208): Homolog of NCBI NO: 15237811 NR Description: hypothetical protein [Arabidopsis thaliana]
MNNEEGRVYNIIRGRKEMGIWQGDIKREANIPDSLLKKSIKMLITKKLVKEVVNVQNRSKKLLMASDFEPSNEISGGEWYTEGKLDTEFIDKLSEACFSSIRRLKVATCEGILEWIRKAGGGVSKGQMEQILKKLVMENKVQEVTSDGSGDFESVPVGEVCYRLVKKAAGVGAMASIPCGVCPRINSCTPDGVISPTTCQYYQKWLDF

SEQ ID NO: 57180 - protein, 191 aa, Glycine max
  peptide (1)..(191): Ceres Seq. ID no. 14315480
  misc_feature (1)..(190): Pfam Name: RNA polymerase Rpc34 subunit Pfam Description: RNA polymerase Rpc34 subunit
  misc_feature (1)..(85): Homolog of NCBI NO: 26325236 NR Description: unnamed protein product [Mus musculus]
  misc_feature (106)..(191): Homolog of NCBI NO: 33598952 NR Description: DNA-directed RNA polymerase III 39 kDa
  misc_feature (1)..(85): Homolog of NCBI NO: 33598952 NR Description: DNA-directed RNA polymerase III 39 kDa
  misc_feature (106)..(191): Homolog of NCBI NO: 39794390 NR Description: Unknown (protein for MGC:76106) [Silurana
  misc_feature (1)..(85): Homolog of NCBI NO: 39794390 NR Description: Unknown (protein for MGC:76106) [Silurana
  misc_feature (1)..(190): Homolog of NCBI NO: 24648960 NR Description: CG5380-PA [Drosophila melanogaster]
  misc_feature (85)..(191): Homolog of NCBI NO: 30353810 NR Description: Unknown (protein for MGC:56299) [Danio rerio]
  misc_feature (1)..(85): Homolog of NCBI NO: 30353810 NR Description: Unknown (protein for MGC:56299) [Danio rerio]
  misc_feature (1)..(190): Homolog of NCBI NO: 31240289 NR Description: ENSANGP00000015349 [Anopheles gambiae]
  misc_feature (1)..(191): Homolog of NCBI NO: 15237811 NR Description: hypothetical protein [Arabidopsis thaliana]
MGIWQGDIKREANIPDSLLKKSIKMLITKKLVKEVVNVQNRSKKLLMASDFEPSNEISGGEWYTEGKLDTEFIDKLSEACFSSIRRLKVATCEGILEWIRKAGGGVSKGQMEQILKKLVMENKVQEVTSDGSGDFESVPVGEVCYRLVKKAAGVGAMASIPCGVCPRINSCTPDGVISPTTCQYYQKWLDF

SEQ ID NO: 57181 - DNA, 1440 bp, Glycine max
  misc_feature (1)..(1440): Ceres Seq. ID no. 14312907
aactctcagcgcccagcctacagcctccaggtgtgttttgttttgcagatccaacactctctctatttatatccaactgtaccatctcccacttccttattctcaaccctttttatcttttcatcaattcaattcaaaccacgccttcccctgttcacaaccttgcccacacactgcattgttctaattaaacatgtcaccctcactgttaccaccatcacaacacaaccaccatttctaactcaacaacaaccaaaaaaaaaaagattctggagcatcatttcttggattctggttcgcgttggtcacatccatcaaacacccctatactctttcttggcgtgcgtcaggtattcatttttacggcaaccctgacagagtaataagacagttaccgtgttgtacgtgtccttcaaacgtcacccacttcaacacataaaccatcgtttttcccaccagatttatattcattcgtcgtatttaaacccaccacaccaaccaaccatacattatcgttgcaattgttgttacaagcttaggttagggtctgtttggtgataatttagaatcttagatggggaattgccaagctgcggaagcggctacggttgtgattcagcatcctgggaacaagatcgagagggtttattggtcgcttagcgcacacgaggttatgaactcgaatcctgggcactatgttgcgcttgtcgtgtcctcgcccacgctcaaggccgagaatggcgctccgatgaagcagcttaagcttctccgacccgacgatactttgcatattggccaggtttatcggttgatcagcttcgaagatgtgttgaaggagtttgcttccaagaaatgtggtaaacttgggaaattgctcaaggagacgggtagtcatgggattcagatgaagcacaaggactctagagctacaaatcctagcccaaattccaaaaccgaattcggttccattaagggtttctccatttttgtcaaactcactgaccatgaaacttgcggaatgttgatgttgtgtgtggtccaatatatctatcctcttcagcaaaattgcttccttttcgtgtattgattattatatatgtttttataaacacgctctggcacgagcagcgtctgcgatcagttataaacccctcgagaaaataatgctatatgttatctacaaactccacagtccacagcagatgagataacctatctaggctacaagataaaaacaaaagtcctgcactcaattcaaatcttagatccgacatgccccagatagtgcctagctccactaggcaccattaacagattaatgtttgtatgtagcttggttgttttgcttggatggaatcacgggtcaatggtgtaatcactttatcccttgcttttttcattcaattctgcctttaattcaaaagacagggtatttgttct

SEQ ID NO: 57182 - protein, 170 aa, Glycine max
  peptide (1)..(170): Ceres Seq. ID no. 14312908
  misc_feature (1)..(56): Homolog of NCBI NO: 34904920 NR Description: OSJNBa0077M12.2 [Oryza sativa (japonica
  misc_feature (1)..(99): Homolog of NCBI NO: 25402604 NR Description: protein T10O24.15 [imported] - Arabidopsis
  misc_feature (1)..(99): Homolog of NCBI NO: 15218556 NR Description: expressed protein [Arabidopsis thaliana]
  misc_feature (1)..(104): Homolog of NCBI NO: 21553451 NR Description: unknown [Arabidopsis thaliana]
  misc_feature (1)..(104): Homolog of NCBI NO: 18406580 NR Description: expressed protein [Arabidopsis thaliana]
  misc_feature (1)..(99): Homolog of NCBI NO: 15240611 NR Description: expressed protein [Arabidopsis thaliana]
  misc_feature (1)..(100): Homolog of NCBI NO: 15241996 NR Description: expressed protein [Arabidopsis thaliana]
  misc_feature (1)..(19): Homolog of NCBI NO: 37533268 NR Description: hypothetical protein [Oryza sativa (japonica
  misc_feature (18)..(93): Homolog of NCBI NO: 37533268 NR Description: hypothetical protein [Oryza sativa (japonica
  misc_feature (1)..(125): Homolog of NCBI NO: 15240787 NR Description: expressed protein [Arabidopsis thaliana]
MGNCQAAEAATVVIQHPGNKIERVYWSLSAHEVMNSNPGHYVALVVSSPTLKAENGAPMKQLKLLRPDDTLHIGQVYRLISFEDVLKEFASKKCGKLGKLLKETGSHGIQMKHKDSRATNPSPNSKTEFGSIKGFSIFVKLTDHETCGMLMLCVVQYIYPLQQNCFLFVY

SEQ ID NO: 57183 - protein, 137 aa, Glycine max
  peptide (1)..(137): Ceres Seq. ID no. 14312909
  misc_feature (1)..(23): Homolog of NCBI NO: 34904920 NR Description: OSJNBa0077M12.2 [Oryza sativa (japonica
  misc_feature (1)..(66): Homolog of NCBI NO: 25402604 NR Description: protein T10O24.15 [imported] - Arabidopsis
  misc_feature (1)..(66): Homolog of NCBI NO: 15218556 NR Description: expressed protein [Arabidopsis thaliana]
  misc_feature (1)..(71): Homolog of NCBI NO: 21553451 NR Description: unknown [Arabidopsis thaliana]
  misc_feature (1)..(71): Homolog of NCBI NO: 18406580 NR Description: expressed protein [Arabidopsis thaliana]
  misc_feature (1)..(66): Homolog of NCBI NO: 15240611 NR Description: expressed protein [Arabidopsis thaliana]
  misc_feature (1)..(67): Homolog of NCBI NO: 15241996 NR Description: expressed protein [Arabidopsis thaliana]
  misc_feature (1)..(60): Homolog of NCBI NO: 37533268 NR Description: hypothetical protein [Oryza sativa (japonica
  misc_feature (1)..(92): Homolog of NCBI NO: 15240787 NR Description: expressed protein [Arabidopsis thaliana]
MNSNPGHYVALVVSSPTLKAENGAPMKQLKLLRPDDTLHIGQVYRLISFEDVLKEFASKKCGKLGKLLKETGSHGIQMKHKDSRATNPSPNSKTEFGSIKGFSIFVKLTDHETCGMLMLCVVQYIYPLQQNCFLFVY

SEQ ID NO: 57184 - protein, 124 aa, Glycine max
  peptide (1)..(124): Ceres Seq. ID no. 14312910
NSQRPAYSLQVCFVLQIQHSLYLYPTVPSPTSLFSTLFIFSSIQFKPRLPLFTTLPTHCIVLIKHVTLTVTTITTQPPFLTQQQPKKKRFWSIISWILVRVGHIHQTPLYSFLACVRYSFLRQP

SEQ ID NO: 57185 - DNA, 1860 bp, Glycine max
  misc_feature (1)..(1860): Ceres Seq. ID no. 15172549
ggcgatgtaaacagagtggagcagctccaactgccaaccaactctcctttgacttctccgctttctttctttccttctttctatttccttcttttcattcactctttcacattcactccctttcttccttccttccgtcattcccttcaaacccttccattctcctcaccatggcttcgccctttctccccgccaaaaccaattccgccaccctctccttctccgccgcagtccccggccgccgcctccacttcgcggcgtctccgtcgcattcccctcgacggaggtcctccctgacggtgaagtcgaagatcagggagatcttcatgcccgccctcagctccaccatgacggagggaaaaatcgtctcgtgggtcaagtccgagggcgacgtcctctccaaaggtgacagcgtcgtcgtcgtcgagtccgacaaggccgacatggacgtcgagacgttctacaatggcatcctcgccgtcatcgttgtcgccgagggccagaccgcccccgtcggtgcccccatcggcctccttgcggagaccgaggccgaagttgccgaggccatggcagccgccaattctgctccaactccacctcccaaagcttccgatacttctccggcgccggcaccggcgccggaagtctctgattcaccacgtaaggcggttgcaacaccgtatgccaagaagctcgcgaagcagcacaaagtgaacataggttcggttgtcgggactggtccgtttggaagagtcactcctgctgacgtggagaaggccgccggtattttgccggcggagagcaatgtagctccggcggcggtggattcggctccaccgaaagctgctgctgcggctccggcggcatcctcggcttcaattccaggttctagtgttgtggcctttacgacaatgcaatctgcggttgcgaagaacatggtggagagtctctctgtgccgacgttccgtgttgggtacccagttaccactgatgcacttgatgctctgtatgagaaggtgagaaaaaagggtgtgaccatgacagcgattctggccaaggcagctgcaatggcactcgttcagcacccagtggtgaatgcctcgtgcaaagatgggaagaactttgcctataatagtaacattaacattgctgttgctgtggcaaccaatggtggtttgattacaccggttcttcaggatgcagataagttggacttgtatcttttgtcccaaaaatggaaagaactagtggaaaaagctcgtgccaagcaattgcaacctcatgaatataattcaggaactttcacactttcaaatttgggaatgtttggagttgacaggtttgacgccatacttcctccaggccagggggctatcatggcggttggagcatcaaaacctactgtcctagcagataaggatggtttctttactgtaaaaagtaaaatgctggtaaatgtaactgctgatcaccgaataatctatggggctgacttggctgcattccttcagacattctcaaaaatcattgagaaccctgaatgcctaacattgtagtcattcaacactttgacataattatctatcttcgatcatccacaagggattacgagttgatagctttcactgagcagactctagcgaaatatacctcattatgtgattatcttgtaatttcacagttttattgttatatatttccagggtctttctgaaggaacattttcttgattttcaatgggaggaacaactttgattttttttcccgctgaaggaaattgtaaaccaatatctatggcaagaaacaaggagagtgaattatgcttatgacttaccaataaaaaaacctagtattctttcc

SEQ ID NO: 57186 - protein, 517 aa, Glycine max
  peptide (1)..(517): Ceres Seq. ID no. 15172550
  misc_feature (293)..(517): Pfam Name: 2-oxoacid dehydrogenases acyltransferase Pfam Description: 2-oxoacid dehydrogenases acyltransferase
  misc_feature (104)..(517): Homolog of NCBI NO: 23041883 NR Description: hypothetical protein [Trichodesmium erythraeum
  misc_feature (104)..(517): Homolog of NCBI NO: 17231098 NR Description: dihydrolipoamide S-acetyltransferase [Nostoc sp.
  misc_feature (104)..(517): Homolog of NCBI NO: 22298842 NR Description: dihydrolipoamide S-acetyltransferase
  misc_feature (104)..(517): Homolog of NCBI NO: 23123757 NR Description: hypothetical protein [Nostoc punctiforme]
  misc_feature (98)..(516): Homolog of NCBI NO: 25286434 NR Description: protein F12K21.24 [imported] - Arabidopsis
  misc_feature (98)..(516): Homolog of NCBI NO: 21536525 NR Description: dihydrolipoamide S-acetyltransferase, putative
  misc_feature (98)..(516): Homolog of NCBI NO: 15218630 NR Description: dihydrolipoamide S-acetyltransferase -related
  misc_feature (161)..(517): Homolog of NCBI NO: 21954074 NR Description: putative dihydrolipoamide S-acetyltransferase
  misc_feature (98)..(517): Homolog of NCBI NO: 9279589 NR Description: dihydrolipoamide S-acetyltransferase [Arabidopsis
  misc_feature (58)..(517): Homolog of NCBI NO: 15230922 NR Description: dihydrolipoamide S-acetyltransferase [Arabidopsis
RCKQSGAAPTANQLSFDFSAFFLSFFLFPSFHSLFHIHSLSSFLPSFPSNPSILLTMASPFLPAKTNSATLSFSAAVPGRRLHFAASPSHSPRRRSSLTVKSKIREIFMPALSSTMTEGKIVSWVKSEGDVLSKGDSVVVVESDKADMDVETFYNGILAVIVVAEGQTAPVGAPIGLLAETEAEVAEAMAAANSAPTPPPKASDTSPAPAPAPEVSDSPRKAVATPYAKKLAKQHKVNIGSVVGTGPFGRVTPADVEKAAGILPAESNVAPAAVDSAPPKAAAAAPAASSASIPGSSVVAFTTMQSAVAKNMVESLSVPTFRVGYPVTTDALDALYEKVRKKGVTMTAILAKAAAMALVQHPVVNASCKDGKNFAYNSNINIAVAVATNGGLITPVLQDADKLDLYLLSQKWKELVEKARAKQLQPHEYNSGTFTLSNLGMFGVDRFDAILPPGQGAIMAVGASKPTVLADKDGFFTVKSKMLVNVTADHRIIYGADLAAFLQTFSKIIENPECLTL

SEQ ID NO: 57187 - protein, 461 aa, Glycine max
  peptide (1)..(461): Ceres Seq. ID no. 15172551
  misc_feature (237)..(461): Pfam Name: 2-oxoacid dehydrogenases acyltransferase Pfam Description: 2-oxoacid dehydrogenases acyltransferase
  misc_feature (48)..(461): Homolog of NCBI NO: 23041883 NR Description: hypothetical protein [Trichodesmium erythraeum
  misc_feature (48)..(461): Homolog of NCBI NO: 17231098 NR Description: dihydrolipoamide S-acetyltransferase [Nostoc sp.
  misc_feature (48)..(461): Homolog of NCBI NO: 22298842 NR Description: dihydrolipoamide S-acetyltransferase
  misc_feature (48)..(461): Homolog of NCBI NO: 23123757 NR Description: hypothetical protein [Nostoc punctiforme]
  misc_feature (42)..(460): Homolog of NCBI NO: 25286434 NR Description: protein F12K21.24 [imported] - Arabidopsis
  misc_feature (42)..(460): Homolog of NCBI NO: 21536525 NR Description: dihydrolipoamide S-acetyltransferase, putative
  misc_feature (42)..(460): Homolog of NCBI NO: 15218630 NR Description: dihydrolipoamide S-acetyltransferase -related
  misc_feature (105)..(461): Homolog of NCBI NO: 21954074 NR Description: putative dihydrolipoamide S-acetyltransferase
  misc_feature (42)..(461): Homolog of NCBI NO: 9279589 NR Description: dihydrolipoamide S-acetyltransferase [Arabidopsis
  misc_feature (2)..(461): Homolog of NCBI NO: 15230922 NR Description: dihydrolipoamide S-acetyltransferase [Arabidopsis
MASPFLPAKTNSATLSFSAAVPGRRLHFAASPSHSPRRRSSLTVKSKIREIFMPALSSTMTEGKIVSWVKSEGDVLSKGDSVVVVESDKADMDVETFYNGILAVIVVAEGQTAPVGAPIGLLAETEAEVAEAMAAANSAPTPPPKASDTSPAPAPAPEVSDSPRKAVATPYAKKLAKQHKVNIGSVVGTGPFGRVTPADVEKAAGILPAESNVAPAAVDSAPPKAAAAAPAASSASIPGSSVVAFTTMQSAVAKNMVESLSVPTFRVGYPVTTDALDALYEKVRKKGVTMTAILAKAAAMALVQHPVVNASCKDGKNFAYNSNINIAVAVATNGGLITPVLQDADKLDLYLLSQKWKELVEKARAKQLQPHEYNSGTFTLSNLGMFGVDRFDAILPPGQGAIMAVGASKPTVLADKDGFFTVKSKMLVNVTADHRIIYGADLAAFLQTFSKIIENPECLTL

SEQ ID NO: 57188 - protein, 409 aa, Glycine max
  peptide (1)..(409): Ceres Seq. ID no. 15172552
  misc_feature (185)..(409): Pfam Name: 2-oxoacid dehydrogenases acyltransferase Pfam Description: 2-oxoacid dehydrogenases acyltransferase
  misc_feature (1)..(409): Homolog of NCBI NO: 23041883 NR Description: hypothetical protein [Trichodesmium erythraeum
  misc_feature (1)..(409): Homolog of NCBI NO: 17231098 NR Description: dihydrolipoamide S-acetyltransferase [Nostoc sp.
  misc_feature (1)..(409): Homolog of NCBI NO: 22298842 NR Description: dihydrolipoamide S-acetyltransferase
  misc_feature (1)..(409): Homolog of NCBI NO: 23123757 NR Description: hypothetical protein [Nostoc punctiforme]
  misc_feature (1)..(408): Homolog of NCBI NO: 25286434 NR Description: protein F12K21.24 [imported] - Arabidopsis
  misc_feature (1)..(408): Homolog of NCBI NO: 21536525 NR Description: dihydrolipoamide S-acetyltransferase, putative
  misc_feature (1)..(408): Homolog of NCBI NO: 15218630 NR Description: dihydrolipoamide S-acetyltransferase -related
  misc_feature (53)..(409): Homolog of NCBI NO: 21954074 NR Description: putative dihydrolipoamide S-acetyltransferase
  misc_feature (1)..(409): Homolog of NCBI NO: 9279589 NR Description: dihydrolipoamide S-acetyltransferase [Arabidopsis
  misc_feature (1)..(409): Homolog of NCBI NO: 15230922 NR Description: dihydrolipoamide S-acetyltransferase [Arabidopsis
MPALSSTMTEGKIVSWVKSEGDVLSKGDSVVVVESDKADMDVETFYNGILAVIVVAEGQTAPVGAPIGLLAETEAEVAEAMAAANSAPTPPPKASDTSPAPAPAPEVSDSPRKAVATPYAKKLAKQHKVNIGSVVGTGPFGRVTPADVEKAAGILPAESNVAPAAVDSAPPKAAAAAPAASSASIPGSSVVAFTTMQSAVAKNMVESLSVPTFRVGYPVTTDALDALYEKVRKKGVTMTAILAKAAAMALVQHPVVNASCKDGKNFAYNSNINIAVAVATNGGLITPVLQDADKLDLYLLSQKWKELVEKARAKQLQPHEYNSGTFTLSNLGMFGVDRFDAILPPGQGAIMAVGASKPTVLADKDGFFTVKSKMLVNVTADHRIIYGADLAAFLQTFSKIIENPECLTL

SEQ ID NO: 57189 - DNA, 1138 bp, Glycine max
  misc_feature (1)..(1138): Ceres Seq. ID no. 14315410
actggaatatttttcacgtttgatttgaccattaaattggagataggatttttgtgcgggccaagaaagatacattcatcgttcaacaatcttcaaacaaacaaaaaataaagtgtcttagaaatgacacgatccttggcaatggcttcttcatcaatgttatgtccgaagctggggagttgtgcagtgtcacatacaaagttccaagcttttcatctctcttcaatgttctctccactgggtcgaggccttgtctcaccttggagtggtttaaagcatctgggtatctcagctaaagcaaagcctcttattcacatagatagaaagggtgggtgtaagggtaaggtggtttatgcttctctctttggggttggagctcctgaggctttggtaattggggtcgttgctttgttggtttttggccctaaaggtcttgctgaggttgctagaaatctgggaaaaacattgcgtacatttcaacccaccattaaagagcttcaggatgtttcaagggaatttaagagtactcttgaacgggagattggtcttgatgacaatttaagtccaacccagaacacatacaattccaacatacgcaataccacaccaacttcatcatccacttccactgttgaccctaatggcacgccagatcctactaaagcatacagctctgaggagtatcttaagattacagaggagcagctgaaggcatctgctgcacaacagcaggggcaaacaccttccaaggaaggtgacaatgagcctcaaatccagccttctggttagtcttttttgtggaacataggcactttttttttttttctccctctttccaccctctttgttcttcacctttctttgatatgtcaacagctgaggaaacagctactactgtacctccacctcagaagccagaaagtgagacgtaaactctgggttcataagcatagggagttaaaataatttgtccaattatcgcttcaatgcccggaagtgggcagtactattggcacaagagatgagaagggtcaggcaattttgttaccagctagtcattagaatcatgtaaaatgtaaagaacaaaaccattaacgattagtatgtttccaaattaattgtagttatatttgtcatc

SEQ ID NO: 57190 - protein, 221 aa, Glycine max
  peptide (1)..(221): Ceres Seq. ID no. 14315411
  misc_feature (83)..(175): Pfam Name: mttA/Hcf106 family Pfam Description: mttA/Hcf106 family
  misc_feature (79)..(170): Homolog of NCBI NO: 15241912 NR Description: Tha4 protein - like [Arabidopsis thaliana]
  misc_feature (80)..(162): Homolog of NCBI NO: 37522572 NR Description: hypothetical protein gsr3003 [Gloeobacter
  misc_feature (79)..(168): Homolog of NCBI NO: 16329622 NR Description: hypothetical protein [Synechocystis sp. PCC 6803]
  misc_feature (79)..(139): Homolog of NCBI NO: 22298928 NR Description: ORF_ID:tsl1385~hypothetical protein
  misc_feature (79)..(168): Homolog of NCBI NO: 23129516 NR Description: hypothetical protein [Nostoc punctiforme]
  misc_feature (75)..(220): Homolog of NCBI NO: 7542514 NR Description: HCF106C precursor protein [Zea mays]
  misc_feature (75)..(214): Homolog of NCBI NO: 7489747 NR Description: HCF106 protein precursor, chloroplast - maize
  misc_feature (5)..(221): Homolog of NCBI NO: 15237156 NR Description: HCF106 (gb|AAD32652.1) [Arabidopsis thaliana]
  misc_feature (1)..(219): Homolog of NCBI NO: 15277532 NR Description: HCF106 [Pisum sativum]
MTRSLAMASSSMLCPKLGSCAVSHTKFQAFHLSSMFSPLGRGLVSPWSGLKHLGISAKAKPLIHIDRKGGCKGKVVYASLFGVGAPEALVIGVVALLVFGPKGLAEVARNLGKTLRTFQPTIKELQDVSREFKSTLEREIGLDDNLSPTQNTYNSNIRNTTPTSSSTSTVDPNGTPDPTKAYSSEEYLKITEEQLKASAAQQQGQTPSKEGDNEPQIQPSG

SEQ ID NO: 57191 - protein, 215 aa, Glycine max
  peptide (1)..(215): Ceres Seq. ID no. 14315412
  misc_feature (77)..(169): Pfam Name: mttA/Hcf106 family Pfam Description: mttA/Hcf106 family
  misc_feature (73)..(164): Homolog of NCBI NO: 15241912 NR Description: Tha4 protein - like [Arabidopsis thaliana]
  misc_feature (74)..(156): Homolog of NCBI NO: 37522572 NR Description: hypothetical protein gsr3003 [Gloeobacter
  misc_feature (73)..(162): Homolog of NCBI NO: 16329622 NR Description: hypothetical protein [Synechocystis sp. PCC 6803]
  misc_feature (73)..(133): Homolog of NCBI NO: 22298928 NR Description: ORF_ID:tsl1385~hypothetical protein
  misc_feature (73)..(162): Homolog of NCBI NO: 23129516 NR Description: hypothetical protein [Nostoc punctiforme]
  misc_feature (69)..(214): Homolog of NCBI NO: 7542514 NR Description: HCF106C precursor protein [Zea mays]
  misc_feature (69)..(208): Homolog of NCBI NO: 7489747 NR Description: HCF106 protein precursor, chloroplast - maize
  misc_feature (1)..(215): Homolog of NCBI NO: 15237156 NR Description: HCF106 (gb|AAD32652.1) [Arabidopsis thaliana]
  misc_feature (1)..(213): Homolog of NCBI NO: 15277532 NR Description: HCF106 [Pisum sativum]
MASSSMLCPKLGSCAVSHTKFQAFHLSSMFSPLGRGLVSPWSGLKHLGISAKAKPLIHIDRKGGCKGKVVYASLFGVGAPEALVIGVVALLVFGPKGLAEVARNLGKTLRTFQPTIKELQDVSREFKSTLEREIGLDDNLSPTQNTYNSNIRNTTPTSSSTSTVDPNGTPDPTKAYSSEEYLKITEEQLKASAAQQQGQTPSKEGDNEPQIQPSG

SEQ ID NO: 57192 - protein, 210 aa, Glycine max
  peptide (1)..(210): Ceres Seq. ID no. 14315413
  misc_feature (72)..(164): Pfam Name: mttA/Hcf106 family Pfam Description: mttA/Hcf106 family
  misc_feature (68)..(159): Homolog of NCBI NO: 15241912 NR Description: Tha4 protein - like [Arabidopsis thaliana]
  misc_feature (69)..(151): Homolog of NCBI NO: 37522572 NR Description: hypothetical protein gsr3003 [Gloeobacter
  misc_feature (68)..(157): Homolog of NCBI NO: 16329622 NR Description: hypothetical protein [Synechocystis sp. PCC 6803]
  misc_feature (68)..(128): Homolog of NCBI NO: 22298928 NR Description: ORF_ID:tsl1385~hypothetical protein
  misc_feature (68)..(157): Homolog of NCBI NO: 23129516 NR Description: hypothetical protein [Nostoc punctiforme]
  misc_feature (64)..(209): Homolog of NCBI NO: 7542514 NR Description: HCF106C precursor protein [Zea mays]
  misc_feature (64)..(203): Homolog of NCBI NO: 7489747 NR Description: HCF106 protein precursor, chloroplast - maize
  misc_feature (1)..(210): Homolog of NCBI NO: 15237156 NR Description: HCF106 (gb|AAD32652.1) [Arabidopsis thaliana]
  misc_feature (1)..(208): Homolog of NCBI NO: 15277532 NR Description: HCF106 [Pisum sativum]
MLCPKLGSCAVSHTKFQAFHLSSMFSPLGRGLVSPWSGLKHLGISAKAKPLIHIDRKGGCKGKVVYASLFGVGAPEALVIGVVALLVFGPKGLAEVARNLGKTLRTFQPTIKELQDVSREFKSTLEREIGLDDNLSPTQNTYNSNIRNTTPTSSSTSTVDPNGTPDPTKAYSSEEYLKITEEQLKASAAQQQGQTPSKEGDNEPQIQPSG

SEQ ID NO: 57193 - DNA, 1255 bp, Glycine max
  misc_feature (1)..(1255): Ceres Seq. ID no. 14312882
aaaaaagcccatgttatcttgttcttttcctccactatgttttttttttttgcaattatctttcttatttaaaagatgaagcaagcaaacagaatcccctcttttgatcttggtttcaatattcatcatcaaatcactggtcctccttttatagaaatcttagatctgcttttaacacaaggttttggtggagaagaagaagcaaagacgacggtgtataaatacaagagtagaagaagaagaagaagcaattagagggagagttagtgagcaaggtggatcgaaggcaagggaagaggtctctccctcctcatgaggagaaaaaagaagctttcaactttcctattattcatccaacaccatctcaaaatcgaaaggaacaagcttcaccatcacccttttcactcctcatgagtaacaacaaaaacaacaccttcttccccaccccacatggccaaataagcacttctgaatttgttaatagccaaaatccgccccaggctacaaatcaaggcattgatgatattaggaaaaagcactatagaggagttaggcagagaccatggggcaaatgggcagcagaaataagagaccctaagaaagcagctagagtgtggcttggcacctttgacacggcagaggctgcagctatggcttatgatgctgctgcattgaggttcaaaggaaacaaagccaaactcaattttcctgaacgtgttgttatgccaatacaaccacaaacaaataacaataattccacttcttcatcagctcctactacacaatcatcttcttctcttccaccaccacaatctctacataataatagttctctttcagcagaagggtttccaaatcttgaggagtatgcaaggttgctgagttgtagcgatgatgatgattttcaacgtgttgcattggggctctaccagcatcacaataatgaggattttatttgtggttcatcacaaccaccaccagtgccgttttttgtgtcctcttcttcttcttcttctgcaatgacatcgtcatattctgattttttgggccaaggagggagtactggttttgatgaagggaacaagagggggtcgtagttttatgtctctgaattttgagcactgcatgcaggttgcttccacaacaattaaggaagttcaaatctctcatctcttatatgttcttttgtttttattattccaattacaaaataacacctgaggtataaaatctataatactcatctttcgtcttt

SEQ ID NO: 57194 - protein, 228 aa, Glycine max
  peptide (1)..(228): Ceres Seq. ID no. 14312883
  misc_feature (41)..(103): Pfam Name: AP2 domain Pfam Description: AP2 domain
  misc_feature (41)..(161): Homolog of NCBI NO: 33519168 NR Description: AP2 domain-containing protein AP29
  misc_feature (38)..(145): Homolog of NCBI NO: 34908616 NR Description: P0677H08.8 [Oryza sativa (japonica
  misc_feature (1)..(133): Homolog of NCBI NO: 15226153 NR Description: AP2 domain transcription factor family
  misc_feature (40)..(109): Homolog of NCBI NO: 34221731 NR Description: putative AP2 domain transcription factor
  misc_feature (24)..(109): Homolog of NCBI NO: 15240610 NR Description: putative protein; protein id: At5g50080.1
  misc_feature (1)..(157): Homolog of NCBI NO: 38347164 NR Description: OSJNBa0039C07.10 [Oryza sativa (japonica
  misc_feature (19)..(209): Homolog of NCBI NO: 15238232 NR Description: AP2 domain transcription factor, putative
  misc_feature (37)..(187): Homolog of NCBI NO: 15240604 NR Description: AP2 domain transcription factor family
  misc_feature (1)..(141): Homolog of NCBI NO: 15240379 NR Description: AP2 domain transcription factor family
  misc_feature (1)..(153): Homolog of NCBI NO: 15240754 NR Description: AP2 domain transcription factor, putative
MSNNKNNTFFPTPHGQISTSEFVNSQNPPQATNQGIDDIRKKHYRGVRQRPWGKWAAEIRDPKKAARVWLGTFDTAEAAAMAYDAAALRFKGNKAKLNFPERVVMPIQPQTNNNNSTSSSAPTTQSSSSLPPPQSLHNNSSLSAEGFPNLEEYARLLSCSDDDDFQRVALGLYQHHNNEDFICGSSQPPPVPFFVSSSSSSSAMTSSYSDFLGQGGSTGFDEGNKRGS

SEQ ID NO: 57195 - protein, 148 aa, Glycine max
  peptide (1)..(148): Ceres Seq. ID no. 14312884
  misc_feature (1)..(81): Homolog of NCBI NO: 33519168 NR Description: AP2 domain-containing protein AP29
  misc_feature (1)..(65): Homolog of NCBI NO: 34908616 NR Description: P0677H08.8 [Oryza sativa (japonica
  misc_feature (1)..(53): Homolog of NCBI NO: 15226153 NR Description: AP2 domain transcription factor family
  misc_feature (1)..(29): Homolog of NCBI NO: 34221731 NR Description: putative AP2 domain transcription factor
  misc_feature (1)..(29): Homolog of NCBI NO: 15240610 NR Description: putative protein; protein id: At5g50080.1
  misc_feature (1)..(77): Homolog of NCBI NO: 38347164 NR Description: OSJNBa0039C07.10 [Oryza sativa (japonica
  misc_feature (1)..(129): Homolog of NCBI NO: 15238232 NR Description: AP2 domain transcription factor, putative
  misc_feature (1)..(107): Homolog of NCBI NO: 15240604 NR Description: AP2 domain transcription factor family
  misc_feature (1)..(61): Homolog of NCBI NO: 15240379 NR Description: AP2 domain transcription factor family
  misc_feature (1)..(73): Homolog of NCBI NO: 15240754 NR Description: AP2 domain transcription factor, putative
MAYDAAALRFKGNKAKLNFPERVVMPIQPQTNNNNSTSSSAPTTQSSSSLPPPQSLHNNSSLSAEGFPNLEEYARLLSCSDDDDFQRVALGLYQHHNNEDFICGSSQPPPVPFFVSSSSSSSAMTSSYSDFLGQGGSTGFDEGNKRGS

SEQ ID NO: 57196 - protein, 124 aa, Glycine max
  peptide (1)..(124): Ceres Seq. ID no. 14312885
  misc_feature (1)..(32): Homolog of NCBI NO: 30683059 NR Description: AP2 domain protein RAP2.2 [Arabidopsis thaliana]
  misc_feature (1)..(32): Homolog of NCBI NO: 18400321 NR Description: AP2 domain protein RAP2.2 [Arabidopsis thaliana]
  misc_feature (1)..(57): Homolog of NCBI NO: 33519168 NR Description: AP2 domain-containing protein AP29
  misc_feature (1)..(41): Homolog of NCBI NO: 34908616 NR Description: P0677H08.8 [Oryza sativa (japonica
  misc_feature (1)..(29): Homolog of NCBI NO: 15226153 NR Description: AP2 domain transcription factor family
  misc_feature (1)..(53): Homolog of NCBI NO: 38347164 NR Description: OSJNBa0039C07.10 [Oryza sativa (japonica
  misc_feature (1)..(105): Homolog of NCBI NO: 15238232 NR Description: AP2 domain transcription factor, putative
  misc_feature (1)..(83): Homolog of NCBI NO: 15240604 NR Description: AP2 domain transcription factor family
  misc_feature (1)..(37): Homolog of NCBI NO: 15240379 NR Description: AP2 domain transcription factor family
  misc_feature (1)..(49): Homolog of NCBI NO: 15240754 NR Description: AP2 domain transcription factor, putative
MPIQPQTNNNNSTSSSAPTTQSSSSLPPPQSLHNNSSLSAEGFPNLEEYARLLSCSDDDDFQRVALGLYQHHNNEDFICGSSQPPPVPFFVSSSSSSSAMTSSYSDFLGQGGSTGFDEGNKRGS

SEQ ID NO: 57197 - DNA, 1495 bp, Glycine max
  misc_feature (1)..(1495): Ceres Seq. ID no. 14312152
atcttcaacttgttcaactctctcaaaaccaaataaaatctttcacaactcaaaactcaagctccaaattttcactttacacctttgaattcattttttcacacatggacgagatcgacgtgcctccgttcttcgtgtgccctatttcattagagctcatgaaggaccccgtgacggtctccaccggcatcacctacgaccgcgacagcatcgagaagtggctcttcgccgaggtgaagaacgacacgtgtcccgtcacgaagcagcccctcctcccggacctcactccgaaccacacgctccgcagactcatccaagcctggtgcaccgtcaacgcctcccacggcgtccagagaatccccacaccaaaaccaccggtcgacaaaaccctcatcgagaaactcctccgcaacacctcggcttcggactccccgagcctccagctccggtccctccgaaccctcaagtccattgcctcggaatcccaatcaaacaaacgctgcatcgaatctgcagaaggcgcagttaatttcctagcaacaattataaccaccaccaccaccaccaccaccaacctactcgatgatgacatcgagttggaaataaaaacaagtacagcccacgaagcattgagccttttacacagcattcagctgtcagagtccggtttgaaggctctgttgaaccatccagaatttataaactctctaaccaagatgatgcaaagagggatctacgagtcacgcgcctacgctgttttcttgctgaattccttgtccgaggtggcggatccggcgcagttgattaacctaaaaactgatttgttcactgaattggttcaggttcttaaggatcaggtttcggagaaggtctcgaaggcgaccctgcaggcattgattcaggtgtgttcgtggggcagaaatagggtgaaggctgtggaggctggagctgtgccggttctggtggagcttcttctcgaatgcaacgagagaaaaccgatagaaatggtgctggttttgttggagattttatgtcagagtgctgacgggagggcggggctgttggcccacgcggcgggggtggtgatcgtggcgaagaagattctgagggtttcaacgatggcgaacgatagggcggcgaagattctgctttcggtgtgcagattttcccccacgccgggcttggtgcaggagatggtgcagcttggggtggtggcaaagctttgtctggtgctgcaggtggatagtgggaacaaagcaaaagagatagctagggagattctcaaattgcatgctagggcttggaggaattcgccttgcatctcacaatttgcttgcttcgtttccaatgagttcgtgaaagaaagaaaatccactttgtttttgttttgttcgtgacaccattggatgtaatcgattatttaagaaactaattccttctgtgagatctagtttgcggtgaaagaaaaccgaaagtaaatcacagttgagttttc

SEQ ID NO: 57198 - protein, 464 aa, Glycine max
  peptide (1)..(464): Ceres Seq. ID no. 14312153
  misc_feature (39)..(114): Pfam Name: U-box domain Pfam Description: U-box domain
  misc_feature (38)..(434): Homolog of NCBI NO: 26451730 NR Description: unknown protein [Arabidopsis thaliana]
  misc_feature (38)..(434): Homolog of NCBI NO: 15222819 NR Description: expressed protein [Arabidopsis thaliana]
  misc_feature (38)..(439): Homolog of NCBI NO: 38346713 NR Description: OSJNBa0086O06.11 [Oryza sativa (japonica
  misc_feature (38)..(444): Homolog of NCBI NO: 18402223 NR Description: expressed protein [Arabidopsis thaliana]
  misc_feature (190)..(440): Homolog of NCBI NO: 15231222 NR Description: expressed protein [Arabidopsis thaliana]
  misc_feature (39)..(441): Homolog of NCBI NO: 34908566 NR Description: P0505D12.10 [Oryza sativa (japonica
  misc_feature (35)..(326): Homolog of NCBI NO: 15231222 NR Description: expressed protein [Arabidopsis thaliana]
  misc_feature (37)..(440): Homolog of NCBI NO: 21741126 NR Description: OSJNBa0070M12.4 [Oryza sativa (japonica
  misc_feature (36)..(440): Homolog of NCBI NO: 30686609 NR Description: expressed protein [Arabidopsis thaliana]
  misc_feature (36)..(440): Homolog of NCBI NO: 25408431 NR Description: hypothetical protein At2g35930 [imported] -
LQLVQLSQNQIKSFTTQNSSSKFSLYTFEFIFSHMDEIDVPPFFVCPISLELMKDPVTVSTGITYDRDSIEKWLFAEVKNDTCPVTKQPLLPDLTPNHTLRRLIQAWCTVNASHGVQRIPTPKPPVDKTLIEKLLRNTSASDSPSLQLRSLRTLKSIASESQSNKRCIESAEGAVNFLATIITTTTTTTTNLLDDDIELEIKTSTAHEALSLLHSIQLSESGLKALLNHPEFINSLTKMMQRGIYESRAYAVFLLNSLSEVADPAQLINLKTDLFTELVQVLKDQVSEKVSKATLQALIQVCSWGRNRVKAVEAGAVPVLVELLLECNERKPIEMVLVLLEILCQSADGRAGLLAHAAGVVIVAKKILRVSTMANDRAAKILLSVCRFSPTPGLVQEMVQLGVVAKLCLVLQVDSGNKAKEIAREILKLHARAWRNSPCISQFACFVSNEFVKERKSTLFLFCS

SEQ ID NO: 57199 - protein, 430 aa, Glycine max
  peptide (1)..(430): Ceres Seq. ID no. 14312154
  misc_feature (5)..(80): Pfam Name: U-box domain Pfam Description: U-box domain
  misc_feature (4)..(400): Homolog of NCBI NO: 26451730 NR Description: unknown protein [Arabidopsis thaliana]
  misc_feature (4)..(400): Homolog of NCBI NO: 15222819 NR Description: expressed protein [Arabidopsis thaliana]
  misc_feature (4)..(405): Homolog of NCBI NO: 38346713 NR Description: OSJNBa0086O06.11 [Oryza sativa (japonica
  misc_feature (4)..(410): Homolog of NCBI NO: 18402223 NR Description: expressed protein [Arabidopsis thaliana]
  misc_feature (156)..(406): Homolog of NCBI NO: 15231222 NR Description: expressed protein [Arabidopsis thaliana]
  misc_feature (5)..(407): Homolog of NCBI NO: 34908566 NR Description: P0505D12.10 [Oryza sativa (japonica
  misc_feature (1)..(292): Homolog of NCBI NO: 15231222 NR Description: expressed protein [Arabidopsis thaliana]
  misc_feature (3)..(406): Homolog of NCBI NO: 21741126 NR Description: OSJNBa0070M12.4 [Oryza sativa (japonica
  misc_feature (2)..(406): Homolog of NCBI NO: 30686609 NR Description: expressed protein [Arabidopsis thaliana]
  misc_feature (2)..(406): Homolog of NCBI NO: 25408431 NR Description: hypothetical protein At2g35930 [imported] -
MDEIDVPPFFVCPISLELMKDPVTVSTGITYDRDSIEKWLFAEVKNDTCPVTKQPLLPDLTPNHTLRRLIQAWCTVNASHGVQRIPTPKPPVDKTLIEKLLRNTSASDSPSLQLRSLRTLKSIASESQSNKRCIESAEGAVNFLATIITTTTTTTTNLLDDDIELEIKTSTAHEALSLLHSIQLSESGLKALLNHPEFINSLTKMMQRGIYESRAYAVFLLNSLSEVADPAQLINLKTDLFTELVQVLKDQVSEKVSKATLQALIQVCSWGRNRVKAVEAGAVPVLVELLLECNERKPIEMVLVLLEILCQSADGRAGLLAHAAGVVIVAKKILRVSTMANDRAAKILLSVCRFSPTPGLVQEMVQLGVVAKLCLVLQVDSGNKAKEIAREILKLHARAWRNSPCISQFACFVSNEFVKERKSTLFLFCS

SEQ ID NO: 57200 - protein, 412 aa, Glycine max
  peptide (1)..(412): Ceres Seq. ID no. 14312155
  misc_feature (1)..(62): Pfam Name: U-box domain Pfam Description: U-box domain
  misc_feature (1)..(382): Homolog of NCBI NO: 26451730 NR Description: unknown protein [Arabidopsis thaliana]
  misc_feature (1)..(382): Homolog of NCBI NO: 15222819 NR Description: expressed protein [Arabidopsis thaliana]
  misc_feature (1)..(387): Homolog of NCBI NO: 38346713 NR Description: OSJNBa0086O06.11 [Oryza sativa (japonica
  misc_feature (1)..(392): Homolog of NCBI NO: 18402223 NR Description: expressed protein [Arabidopsis thaliana]
  misc_feature (138)..(388): Homolog of NCBI NO: 15231222 NR Description: expressed protein [Arabidopsis thaliana]
  misc_feature (1)..(389): Homolog of NCBI NO: 34908566 NR Description: P0505D12.10 [Oryza sativa (japonica
  misc_feature (1)..(274): Homolog of NCBI NO: 15231222 NR Description: expressed protein [Arabidopsis thaliana]
  misc_feature (1)..(388): Homolog of NCBI NO: 21741126 NR Description: OSJNBa0070M12.4 [Oryza sativa (japonica
  misc_feature (1)..(388): Homolog of NCBI NO: 30686609 NR Description: expressed protein [Arabidopsis thaliana]
  misc_feature (1)..(388): Homolog of NCBI NO: 25408431 NR Description: hypothetical protein At2g35930 [imported] -
MKDPVTVSTGITYDRDSIEKWLFAEVKNDTCPVTKQPLLPDLTPNHTLRRLIQAWCTVNASHGVQRIPTPKPPVDKTLIEKLLRNTSASDSPSLQLRSLRTLKSIASESQSNKRCIESAEGAVNFLATIITTTTTTTTNLLDDDIELEIKTSTAHEALSLLHSIQLSESGLKALLNHPEFINSLTKMMQRGIYESRAYAVFLLNSLSEVADPAQLINLKTDLFTELVQVLKDQVSEKVSKATLQALIQVCSWGRNRVKAVEAGAVPVLVELLLECNERKPIEMVLVLLEILCQSADGRAGLLAHAAGVVIVAKKILRVSTMANDRAAKILLSVCRFSPTPGLVQEMVQLGVVAKLCLVLQVDSGNKAKEIAREILKLHARAWRNSPCISQFACFVSNEFVKERKSTLFLFCS

SEQ ID NO: 57201 - DNA, 1754 bp, Glycine max
  misc_feature (1)..(1754): Ceres Seq. ID no. 15171626
acacgcaactatttctgactacgttttgctctacgcctctccctctctctcaaaaatcgttctcttcgattttagggttttgttttgctgctgcctccgttccccccttctcataaacaacgcgttttctcttctgcttcgtatctattctttgcttttggttttggttgattcaaggccttcacagcattcgttgcggcattttaatcaatttatccaagcaggactgaatgaactaatggagtctaaaggtgggaaaaagaagtctagtagtagtagtagtaaatcattgttctacgaagctcccctcggatacagcattgaagacgttagaccaaacggtggaatcaagaaattcagatctgctgcttactccaactgcgctcgcaaaccttcctgatatccatccagattgatagttcattgcatgcaaccatagttttattaggttttttcttctttgttttcaattaggtttttgctgctctccttcaaactccgtctttccgaatcctctctttgtgattgtgttctgttctgcttcctaccgcgatagtttctcttctgaagcatggccatggcggtttctgcaattggttttgaaggtttcgagaagaggctggaaatatcctttttccagccgggactttttgctgaccctgagggaatgggtttaagagctcttgcaaagtcccagttggatgagatacttacaccggctgcttgcaccattgtttcatctctcagaaatgatcatgtcgactcctatgttctgtctgagtccagtctctttgtttatgcctacaagatcatcatcaaaacctgtggtactacaaagctactgcttgcaatcccacccatattgaaatttgctgaaatgctttccctcaatgttagatctgtgaattacaccaggggaagtttcatctttcccggtgctcagccctatccccatcgcaacttttctgaggaagttgctattcttgatggctactttggcaagcttagtgcaggaagcaatgcttatattttgggtggccaagacaaatcacagaactggcatgtctactctgcttctgcagattctgtaactccatgcgacaatgtttacactctagagatgtgcatgactggcctggatagagagaaagcacaggttttctacaaagaacaatctgcttcagctgccattatgactgttaattctggcattagaaaaattcttccagattctgagatttgtgactttgactttgagccatgtggttattcaatgaactctgttgaaggtgctgctgtttctaccattcatgttaccccagaagatggtttcagttatgcaagctttgagactgttgggtatgacttcaaagtggtgaatctgaacgaaatggttaagagggtattggcatgttttctcccaactgagttctctgttgcagttcatgtggatggtgcaagcaagttgtttgatcagacgtgttttctggatgttaagggatactgtcgcgaagagaggagccacgaagggcttggaatgggtggttctcttgtctaccaaaaatttgccaagacttgtgactgtggttcacctagatcaactctgaagtgctggaaagaggaagatgaagaagagtagttttcttaagtgtctttattatgtccttgcgaaaataagtccggttttccagacagtgattgtttttctttggtgttttttcccttttatgttagaccattgttagggcgtttgg

SEQ ID NO: 57202 - protein, 355 aa, Glycine max
  peptide (1)..(355): Ceres Seq. ID no. 15171627
  misc_feature (5)..(335): Pfam Name: Adenosylmethionine decarboxylase Pfam Description: Adenosylmethionine decarboxylase
MAMAVSAIGFEGFEKRLEISFFQPGLFADPEGMGLRALAKSQLDEILTPAACTIVSSLRNDHVDSYVLSESSLFVYAYKIIIKTCGTTKLLLAIPPILKFAEMLSLNVRSVNYTRGSFIFPGAQPYPHRNFSEEVAILDGYFGKLSAGSNAYILGGQDKSQNWHVYSASADSVTPCDNVYTLEMCMTGLDREKAQVFYKEQSASAAIMTVNSGIRKILPDSEICDFDFEPCGYSMNSVEGAAVSTIHVTPEDGFSYASFETVGYDFKVVNLNEMVKRVLACFLPTEFSVAVHVDGASKLFDQTCFLDVKGYCREERSHEGLGMGGSLVYQKFAKTCDCGSPRSTLKCWKEEDEEE

SEQ ID NO: 57203 - protein, 353 aa, Glycine max
  peptide (1)..(353): Ceres Seq. ID no. 15171628
  misc_feature (3)..(333): Pfam Name: Adenosylmethionine decarboxylase Pfam Description: Adenosylmethionine decarboxylase
MAVSAIGFEGFEKRLEISFFQPGLFADPEGMGLRALAKSQLDEILTPAACTIVSSLRNDHVDSYVLSESSLFVYAYKIIIKTCGTTKLLLAIPPILKFAEMLSLNVRSVNYTRGSFIFPGAQPYPHRNFSEEVAILDGYFGKLSAGSNAYILGGQDKSQNWHVYSASADSVTPCDNVYTLEMCMTGLDREKAQVFYKEQSASAAIMTVNSGIRKILPDSEICDFDFEPCGYSMNSVEGAAVSTIHVTPEDGFSYASFETVGYDFKVVNLNEMVKRVLACFLPTEFSVAVHVDGASKLFDQTCFLDVKGYCREERSHEGLGMGGSLVYQKFAKTCDCGSPRSTLKCWKEEDEEE

SEQ ID NO: 57204 - protein, 323 aa, Glycine max
  peptide (1)..(323): Ceres Seq. ID no. 15171629
  misc_feature (1)..(303): Pfam Name: Adenosylmethionine decarboxylase Pfam Description: Adenosylmethionine decarboxylase
MGLRALAKSQLDEILTPAACTIVSSLRNDHVDSYVLSESSLFVYAYKIIIKTCGTTKLLLAIPPILKFAEMLSLNVRSVNYTRGSFIFPGAQPYPHRNFSEEVAILDGYFGKLSAGSNAYILGGQDKSQNWHVYSASADSVTPCDNVYTLEMCMTGLDREKAQVFYKEQSASAAIMTVNSGIRKILPDSEICDFDFEPCGYSMNSVEGAAVSTIHVTPEDGFSYASFETVGYDFKVVNLNEMVKRVLACFLPTEFSVAVHVDGASKLFDQTCFLDVKGYCREERSHEGLGMGGSLVYQKFAKTCDCGSPRSTLKCWKEEDEEE

SEQ ID NO: 57205 - DNA, 1134 bp, Glycine max
  misc_feature (1)..(1134): Ceres Seq. ID no. 14315438
atgttctttgtttgattgaggcttctgaacagtttctgacaccgaaattcagccacaaagttgaccatcttgggatggatgagaatatcatcatgttccaccatttccccacattgatacaacaaggagattccaacaattgaaaactccttatcatctttctcttgcaacatcgtttcgcggttcctttgccgtgatttcaattgttgcataagaaaacatcactcactacttctttcctctcctttttcattcaatttctctgattgacacaattgccgcccagatcagtgattgacccaattgagaaaaaaaccttaaaagttccgggttttttttttctttaattgttgctggttttgcaggtggcccagttgggaattcaagatggttctgtgatttaacaagtgccctcttgaaatactacccgagtgagatacttcgatttaactccctctgttgatggctgaaactcaattgaagtgattcactggactactttatcatcttggtctgaggttgaagctatttaatttctgaatttccgtgagtttcttaatccctgagtatggccgggagccaagatcagttagagatcaagtttcggttgagtgatggtacggatattggccccaaaagttattctgctgctactagtattgtaacactaaaagaaagtgttcttgctcaatggccaaaagataaggagtatggaccaagaactgtaaaagatttgaagttaattagtgctggaaaagtattggagaacaacaaaacagtgggagactgtcagagtccattgtgtgatctacctggtggagttacaacaatgcatgtggttgtgcaaccaccttctgtggaggaagatatgaaagtagcaagcgaagcaaagcagagcaaatgtgtttgtgtgatattatagtgtccagattgaatagaaggtgtcatctatttaggtggttaaaagttacacttgtattcattttaaaagtaatctatggctttcaaaagatttcctcatacacaaactgtttcgttgcatgcctcattgtctaattgatgtaaatgctgattgaaatgagaactctaaaattattctcgtgcttcagctagatgcaaagtgcacctagagtt

SEQ ID NO: 57206 - protein, 117 aa, Glycine max
  peptide (1)..(117): Ceres Seq. ID no. 14315439
  misc_feature (8)..(95): Pfam Name: Ubiquitin family Pfam Description: Ubiquitin family
  misc_feature (2)..(117): Homolog of NCBI NO: 38347220 NR Description: OSJNBa0055C08.14 [Oryza sativa (japonica
  misc_feature (5)..(117): Homolog of NCBI NO: 15234839 NR Description: ubiquitin family [Arabidopsis thaliana]
  misc_feature (1)..(99): Homolog of NCBI NO: 25402954 NR Description: protein F2E2.12 [imported] - Arabidopsis thaliana
  misc_feature (3)..(117): Homolog of NCBI NO: 15218145 NR Description: expressed protein [Arabidopsis thaliana]
  misc_feature (3)..(117): Homolog of NCBI NO: 21592966 NR Description: ubiquitin-fusion protein, putative [Arabidopsis
  misc_feature (5)..(117): Homolog of NCBI NO: 4097587 NR Description: NTGP5 [Nicotiana tabacum]
  misc_feature (1)..(117): Homolog of NCBI NO: 15219188 NR Description: ubiquitin family [Arabidopsis thaliana]
  misc_feature (1)..(99): Homolog of NCBI NO: 11358132 NR Description: hypothetical protein T20K14_70 - Arabidopsis
  misc_feature (1)..(117): Homolog of NCBI NO: 15232032 NR Description: ubiquitin family [Arabidopsis thaliana]
  misc_feature (1)..(115): Homolog of NCBI NO: 18417680 NR Description: expressed protein [Arabidopsis thaliana]
MAGSQDQLEIKFRLSDGTDIGPKSYSAATSIVTLKESVLAQWPKDKEYGPRTVKDLKLISAGKVLENNKTVGDCQSPLCDLPGGVTTMHVVVQPPSVEEDMKVASEAKQSKCVCVIL

SEQ ID NO: 57207 - DNA, 1468 bp, Glycine max
  misc_feature (1)..(1468): Ceres Seq. ID no. 14312817
cacatttagctaccacgaaacctaatttcaatttctctgtgaagagtcattttccgatgaaacgcaccgttcggcccctcttcgcgctcctcctcctcctcgtattcgccgccacgctcacctcacgcgccgtcctccgccgcggcatcctctccatcgagctcgaatcccgcgtccggatccgccgccatattccgccgccgccgcagctcaacgccacgctcctccaccacgcagccgtcgaaattggcgaggagaagttcaagcaggagatccagagcctccttgatggcaacttcggcagccacgcgcgccaccgcaccttcgtctcctggcgccgcttcatccaccacgaccgcggcagcgccggagtcaccgccgccaaactcccggcgactatccggtcgccgctcttctaccgctcctggctcgacttccggaaggtcctccacgactggttccggaagcgacgattccaacccggtatcatgtccgggttgactcggtcaattaagcttccaattgattcacacaacaacaacaacaaactacaaaccaataacaaaaacaaatactcttcctgtgccgtagttggaaacagcggaattttgttgaatagagactatggtagtgaaattgattcccatgagtttgtgataaggttgaacaatgctagagttgatcactttgagaccaaggttggaaaaaaaactagcatttcattcatgaatagtaacatcttgcatttgtgtgctagaaggggagggtgtttctgccacccttatggtgaccgtgttccgattgttatgtacatttgtcaagccttgcatttcatggactacactgtgtgcaatgcttctcacaaggctcctttgttggtgactgatcctaggtttgatgtgttgtgtgcgaggattgtgaagtactattcgttgaagaggtttgtggaggagagtgggaagggtttggagaagtggggagaggctcatgatggttctctttttcactactcttcagggatgcaggctgtgatgctggctttggggatttgtgatagggttagcatttttgggtttgggaaatcgacttctgctaagcaccattaccacactaaccagaaggctgagcttcacttgcatgactatgaggctgagtatgcgttttatagggaccttgtggatgggaaaaggcctataccctttcttgaggataggtttaaggttcctcctgttgtcatgtatcaatgatgggtgctgaactgctgctgctgctgcaagtggtggtggagggcctctgtgaattgttgttctgttattgtaatacttgtgaaatgcacagatagtggaaagcaaaatactgattcaagattcgtttttgttgtttgtgttgtactgtccaacatgaagcctcaaggcaacaccaagtgtaaattttgttggttagatcaatacagttctttgactccatc

SEQ ID NO: 57208 - protein, 414 aa, Glycine max
  peptide (1)..(414): Ceres Seq. ID no. 14312818
  misc_feature (132)..(396): Pfam Name: Glycosyltransferase family 29 (sialyltransferase) Pfam Description: Glycosyltransferase family 29
  misc_feature (323)..(383): Homolog of NCBI NO: 26343773 NR Description: unnamed protein product [Mus musculus]
  misc_feature (323)..(383): Homolog of NCBI NO: 5902082 NR Description: sialyltransferase 4B
  misc_feature (135)..(242): Homolog of NCBI NO: 26343773 NR Description: unnamed protein product [Mus musculus]
  misc_feature (135)..(320): Homolog of NCBI NO: 5902082 NR Description: sialyltransferase 4B
  misc_feature (323)..(383): Homolog of NCBI NO: 13928968 NR Description: sialyltransferase 5 [Rattus norvegicus]
  misc_feature (135)..(242): Homolog of NCBI NO: 13928968 NR Description: sialyltransferase 5 [Rattus norvegicus]
  misc_feature (301)..(413): Homolog of NCBI NO: 28416597 NR Description: At1g08280 [Arabidopsis thaliana]
  misc_feature (154)..(414): Homolog of NCBI NO: 21743080 NR Description: OSJNBb0002J11.10 [Oryza sativa (japonica
  misc_feature (19)..(413): Homolog of NCBI NO: 34908454 NR Description: P0683F02.18 [Oryza sativa (japonica
  misc_feature (19)..(413): Homolog of NCBI NO: 15223174 NR Description: sialyltransferase family [Arabidopsis thaliana]
HLATTKPNFNFSVKSHFPMKRTVRPLFALLLLLVFAATLTSRAVLRRGILSIELESRVRIRRHIPPPPQLNATLLHHAAVEIGEEKFKQEIQSLLDGNFGSHARHRTFVSWRRFIHHDRGSAGVTAAKLPATIRSPLFYRSWLDFRKVLHDWFRKRRFQPGIMSGLTRSIKLPIDSHNNNNKLQTNNKNKYSSCAVVGNSGILLNRDYGSEIDSHEFVIRLNNARVDHFETKVGKKTSISFMNSNILHLCARRGGCFCHPYGDRVPIVMYICQALHFMDYTVCNASHKAPLLVTDPRFDVLCARIVKYYSLKRFVEESGKGLEKWGEAHDGSLFHYSSGMQAVMLALGICDRVSIFGFGKSTSAKHHYHTNQKAELHLHDYEAEYAFYRDLVDGKRPIPFLEDRFKVPPVVMYQ

SEQ ID NO: 57209 - protein, 396 aa, Glycine max
  peptide (1)..(396): Ceres Seq. ID no. 14312819
  misc_feature (114)..(378): Pfam Name: Glycosyltransferase family 29 (sialyltransferase) Pfam Description: Glycosyltransferase family 29
  misc_feature (305)..(365): Homolog of NCBI NO: 26343773 NR Description: unnamed protein product [Mus musculus]
  misc_feature (305)..(365): Homolog of NCBI NO: 5902082 NR Description: sialyltransferase 4B
  misc_feature (117)..(224): Homolog of NCBI NO: 26343773 NR Description: unnamed protein product [Mus musculus]
  misc_feature (117)..(302): Homolog of NCBI NO: 5902082 NR Description: sialyltransferase 4B
  misc_feature (305)..(365): Homolog of NCBI NO: 13928968 NR Description: sialyltransferase 5 [Rattus norvegicus]
  misc_feature (117)..(224): Homolog of NCBI NO: 13928968 NR Description: sialyltransferase 5 [Rattus norvegicus]
  misc_feature (283)..(395): Homolog of NCBI NO: 28416597 NR Description: At1g08280 [Arabidopsis thaliana]
  misc_feature (136)..(396): Homolog of NCBI NO: 21743080 NR Description: OSJNBb0002J11.10 [Oryza sativa (japonica
  misc_feature (1)..(395): Homolog of NCBI NO: 34908454 NR Description: P0683F02.18 [Oryza sativa (japonica
  misc_feature (1)..(395): Homolog of NCBI NO: 15223174 NR Description: sialyltransferase family [Arabidopsis thaliana]
MKRTVRPLFALLLLLVFAATLTSRAVLRRGILSIELESRVRIRRHIPPPPQLNATLLHHAAVEIGEEKFKQEIQSLLDGNFGSHARHRTFVSWRRFIHHDRGSAGVTAAKLPATIRSPLFYRSWLDFRKVLHDWFRKRRFQPGIMSGLTRSIKLPIDSHNNNNKLQTNNKNKYSSCAVVGNSGILLNRDYGSEIDSHEFVIRLNNARVDHFETKVGKKTSISFMNSNILHLCARRGGCFCHPYGDRVPIVMYICQALHFMDYTVCNASHKAPLLVTDPRFDVLCARIVKYYSLKRFVEESGKGLEKWGEAHDGSLFHYSSGMQAVMLALGICDRVSIFGFGKSTSAKHHYHTNQKAELHLHDYEAEYAFYRDLVDGKRPIPFLEDRFKVPPVVMYQ

SEQ ID NO: 57210 - protein, 252 aa, Glycine max
  peptide (1)..(252): Ceres Seq. ID no. 14312820
  misc_feature (1)..(234): Pfam Name: Glycosyltransferase family 29 (sialyltransferase) Pfam Description: Glycosyltransferase family 29
  misc_feature (161)..(221): Homolog of NCBI NO: 26343773 NR Description: unnamed protein product [Mus musculus]
  misc_feature (161)..(221): Homolog of NCBI NO: 5902082 NR Description: sialyltransferase 4B
  misc_feature (1)..(80): Homolog of NCBI NO: 26343773 NR Description: unnamed protein product [Mus musculus]
  misc_feature (1)..(158): Homolog of NCBI NO: 5902082 NR Description: sialyltransferase 4B
  misc_feature (161)..(221): Homolog of NCBI NO: 13928968 NR Description: sialyltransferase 5 [Rattus norvegicus]
  misc_feature (1)..(80): Homolog of NCBI NO: 13928968 NR Description: sialyltransferase 5 [Rattus norvegicus]
  misc_feature (139)..(251): Homolog of NCBI NO: 28416597 NR Description: At1g08280 [Arabidopsis thaliana]
  misc_feature (1)..(252): Homolog of NCBI NO: 21743080 NR Description: OSJNBb0002J11.10 [Oryza sativa (japonica
  misc_feature (1)..(251): Homolog of NCBI NO: 34908454 NR Description: P0683F02.18 [Oryza sativa (japonica
  misc_feature (1)..(251): Homolog of NCBI NO: 15223174 NR Description: sialyltransferase family [Arabidopsis thaliana]
MSGLTRSIKLPIDSHNNNNKLQTNNKNKYSSCAVVGNSGILLNRDYGSEIDSHEFVIRLNNARVDHFETKVGKKTSISFMNSNILHLCARRGGCFCHPYGDRVPIVMYICQALHFMDYTVCNASHKAPLLVTDPRFDVLCARIVKYYSLKRFVEESGKGLEKWGEAHDGSLFHYSSGMQAVMLALGICDRVSIFGFGKSTSAKHHYHTNQKAELHLHDYEAEYAFYRDLVDGKRPIPFLEDRFKVPPVVMYQ

SEQ ID NO: 57211 - DNA, 1341 bp, Glycine max
  misc_feature (1)..(1341): Ceres Seq. ID no. 14312163
gcttcgttgcttggttggttcaattgtatcagtatatactcagaagccatgatattagttgatggcattccattttctacccattcatctcaccctcagggaaaggatattctacttgatttgttggaaaatcccattctggtatcagcctcaaactctttgaaggctaactcagagaggaagttctcagtatctgatgagtctagtccagagagatcaaaatgggtttatatattccagagagaatatgctaccgttgaccccgcccttgttgattttgttggcaccgatgaagcaacaacgtgtgttggccttgttattcggaaccaaaagaatggaatgacgtcagttgcccatatggattcaccaaaaattgtagaaatgggcctctcccaaatgttatcatcactcgtcgacaacagtttggagactgagtttgatgtgcatcttattggggggtttgaagatgtctcactgcaagtctggccagggtcttctgctttgttagagaattttcaatatatagtttccactcagtgaaagagtaattgtagctggatctattgaacttttttgcagcatgcaaatggtagcacagtatcagaaagccctgcagatttggatggttattcctttcctctgtgtttaaagattgttcacactttatggtcaagagaggagaagtttcacatccgaactatctgtgttcttggacataataccagaagggattctgatggaaacacatacccctttttcaatggatttgtggcggagactacaacaggaatcatcatcccagctatctttgatagaacttctagatgtccagatgaaattgtcagaagaatacgagtatccgtgtcttatgaagatgccaactggaacggaaagttactagaaacatatgattctggcattgactgtttcaaaatcgctccttgtcgctggactcttcgccaaaatcatattgcttcatcacttctgaactattctgattccgaaattctttcaatatgttctacatcacctactgctgaagcctcagattttgtggagaatttaaaaaggcagtggaattatttgatcgagcatccacactggacagaaacctttcccaagaaacagcctcgcacttttgcaaggagttcttctgatggaaggtggataaggtgttgatgacattccaaggttgcgtaggctaatccttgtcaataattagattgccttattaaaatggtcatctctcattaaacgtttcatttctcattcctgttaagttatcaaattgcagccatctttagttttgaactaatatgatatttaattatcattgtgctg

SEQ ID NO: 57212 - protein, 179 aa, Glycine max
  peptide (1)..(179): Ceres Seq. ID no. 14312164
  misc_feature (76)..(156): Homolog of NCBI NO: 33150674 NR Description: N-terminal asparagine amidohydrolase [Homo
  misc_feature (76)..(156): Homolog of NCBI NO: 27735049 NR Description: N-terminal Asn amidase [Homo sapiens]
  misc_feature (64)..(156): Homolog of NCBI NO: 38382972 NR Description: Unknown (protein for MGC:77869) [Danio rerio]
  misc_feature (114)..(160): Homolog of NCBI NO: 7486430 NR Description: hypothetical protein At2g44420 [imported] -
  misc_feature (17)..(160): Homolog of NCBI NO: 21554202 NR Description: unknown [Arabidopsis thaliana]
  misc_feature (17)..(160): Homolog of NCBI NO: 18406532 NR Description: expressed protein [Arabidopsis thaliana]
ASLLGWFNCISIYSEAMILVDGIPFSTHSSHPQGKDILLDLLENPILVSASNSLKANSERKFSVSDESSPERSKWVYIFQREYATVDPALVDFVGTDEATTCVGLVIRNQKNGMTSVAHMDSPKIVEMGLSQMLSSLVDNSLETEFDVHLIGGFEDVSLQVWPGSSALLENFQYIVSTQ

SEQ ID NO: 57213 - protein, 163 aa, Glycine max
  peptide (1)..(163): Ceres Seq. ID no. 14312165
  misc_feature (60)..(140): Homolog of NCBI NO: 33150674 NR Description: N-terminal asparagine amidohydrolase [Homo
  misc_feature (60)..(140): Homolog of NCBI NO: 27735049 NR Description: N-terminal Asn amidase [Homo sapiens]
  misc_feature (48)..(140): Homolog of NCBI NO: 38382972 NR Description: Unknown (protein for MGC:77869) [Danio rerio]
  misc_feature (98)..(144): Homolog of NCBI NO: 7486430 NR Description: hypothetical protein At2g44420 [imported] -
  misc_feature (1)..(144): Homolog of NCBI NO: 21554202 NR Description: unknown [Arabidopsis thaliana]
  misc_feature (1)..(144): Homolog of NCBI NO: 18406532 NR Description: expressed protein [Arabidopsis thaliana]
MILVDGIPFSTHSSHPQGKDILLDLLENPILVSASNSLKANSERKFSVSDESSPERSKWVYIFQREYATVDPALVDFVGTDEATTCVGLVIRNQKNGMTSVAHMDSPKIVEMGLSQMLSSLVDNSLETEFDVHLIGGFEDVSLQVWPGSSALLENFQYIVSTQ

SEQ ID NO: 57214 - DNA, 1372 bp, Glycine max
  misc_feature (1)..(1372): Ceres Seq. ID no. 15171606
aaaaaaaaaaaaattttaacctcaccctctttacccacaccctctctctctctctctctgtcacgcacagagaaaaactcagacacccacgttcacacttcgcacacaccatctctcactgttctttcttcttcctctttttcttttttttttttcttttctcttaatggaatgatggaacacaacatcatcgtcaacaacaacgtgatcgcaccgtttgtcataaaaacctacaatatggtgaacgatcccaccaccgataaactcatcacgtggggcccagccaacaacagcttcatcgtcctcgatcccctcgacttctcccactccctcctccctactttcttcaagcacaacaacttctccagcttcgttcgccaactcaacacctatggtttcagaaaggtggatccggatcggtgggagttcgcgaacgagtggttcctgcgaggacaaaagcacttattgaggaacatcgtgcggaagaagcacggtggagctgggaggaccaattccaattcgcattattcgcatcccttgaagctggaggagttggacgacgaggctatggtgatggagatagcgaggttgaaggaggagcaaaaagcgttggaggaagagcttcatgaaatgaacaagaggttagagacaacagaaaaacgaccacaacaaatgatggcttttctgtgtaaggttgtcgaggacccgcagattctttctcggattctccgagaaagagaaaagaaacacctgggagagaaaaagcgacgcctcattccgcctccgccgccgacggcagcgacgtcgtcgtcgtcgtcctccggcatcaagacagagttcgaagaagacgaaggtaattataatatcaagtcttcgtcgccggagacagggttggaaatcgacaacaatagtaacaatatttgttcgccgccgccgctggggtgttggggtgaacagggttgttatgggtacaattgcgcctccgtgccggcacctttgacggtggtagcgccggcgtttccgacgatgggaggagggtatttgaggcgtggggggttttggggggaaatggcggcggaggggaatgcggtgccgccttatccgttttcgttgttggaagggggcttttagatttagttttaggttatgaaatgaatgaattattactgccacaaaatttcatcttggattttctgtcgtattgaaagttctatccttttttgtgcgttgattctgtgtaaagaaaaaaggttgggaaaaagagtaaaaaggtagtgggaaaattgttagatatttatagttgtgttcggtttcaggttttttttttcataaatattgtttttaaataaatgctttgcggatggtgtagacc

SEQ ID NO: 57215 - protein, 376 aa, Glycine max
  peptide (1)..(376): Ceres Seq. ID no. 15171607
  misc_feature (71)..(248): Pfam Name: HSF-type DNA-binding Pfam Description: HSF-type DNA-binding
  misc_feature (68)..(245): Homolog of NCBI NO: 27261140 NR Description: HSF3 DNA-binding domain/VP16 activation domain
  misc_feature (68)..(245): Homolog of NCBI NO: 25296101 NR Description: heat shock transcription factor HSF3
  misc_feature (65)..(247): Homolog of NCBI NO: 29126355 NR Description: putative heat shock transcription factor
  misc_feature (72)..(307): Homolog of NCBI NO: 37534406 NR Description: putative auxin-induced protein
  misc_feature (72)..(262): Homolog of NCBI NO: 15225255 NR Description: heat shock transcription factor family
  misc_feature (72)..(310): Homolog of NCBI NO: 729774 NR Description: HEAT SHOCK FACTOR PROTEIN HSF30 (HEAT SHOCK
  misc_feature (70)..(248): Homolog of NCBI NO: 34910182 NR Description: putative heat shock transcription factor
  misc_feature (72)..(273): Homolog of NCBI NO: 33087081 NR Description: heat stress protein [Oryza sativa (japonica
  misc_feature (72)..(273): Homolog of NCBI NO: 28971956 NR Description: putative heat shock transcription factor
  misc_feature (66)..(376): Homolog of NCBI NO: 15230127 NR Description: heat shock transcription factor family
KKKKILTSPSLPTPSLSLSLSRTEKNSDTHVHTSHTPSLTVLSSSSFSFFFFFSLNGMMEHNIIVNNNVIAPFVIKTYNMVNDPTTDKLITWGPANNSFIVLDPLDFSHSLLPTFFKHNNFSSFVRQLNTYGFRKVDPDRWEFANEWFLRGQKHLLRNIVRKKHGGAGRTNSNSHYSHPLKLEELDDEAMVMEIARLKEEQKALEEELHEMNKRLETTEKRPQQMMAFLCKVVEDPQILSRILREREKKHLGEKKRRLIPPPPPTAATSSSSSSGIKTEFEEDEGNYNIKSSSPETGLEIDNNSNNICSPPPLGCWGEQGCYGYNCASVPAPLTVVAPAFPTMGGGYLRRGGFWGEMAAEGNAVPPYPFSLLEGGF

SEQ ID NO: 57216 - protein, 319 aa, Glycine max
  peptide (1)..(319): Ceres Seq. ID no. 15171608
  misc_feature (14)..(191): Pfam Name: HSF-type DNA-binding Pfam Description: HSF-type DNA-binding
  misc_feature (11)..(188): Homolog of NCBI NO: 30686034 NR Description: heat shock transcription factor 3 (HSF3)
  misc_feature (11)..(188): Homolog of NCBI NO: 25296101 NR Description: heat shock transcription factor HSF3
  misc_feature (8)..(190): Homolog of NCBI NO: 29126355 NR Description: putative heat shock transcription factor
  misc_feature (15)..(250): Homolog of NCBI NO: 37534406 NR Description: putative auxin-induced protein
  misc_feature (15)..(205): Homolog of NCBI NO: 15225255 NR Description: heat shock transcription factor family
  misc_feature (15)..(253): Homolog of NCBI NO: 729774 NR Description: HEAT SHOCK FACTOR PROTEIN HSF30 (HEAT SHOCK
  misc_feature (13)..(191): Homolog of NCBI NO: 34910182 NR Description: putative heat shock transcription factor
  misc_feature (15)..(216): Homolog of NCBI NO: 33087081 NR Description: heat stress protein [Oryza sativa (japonica
  misc_feature (15)..(216): Homolog of NCBI NO: 28971956 NR Description: putative heat shock transcription factor
  misc_feature (9)..(319): Homolog of NCBI NO: 15230127 NR Description: heat shock transcription factor family
MMEHNIIVNNNVIAPFVIKTYNMVNDPTTDKLITWGPANNSFIVLDPLDFSHSLLPTFFKHNNFSSFVRQLNTYGFRKVDPDRWEFANEWFLRGQKHLLRNIVRKKHGGAGRTNSNSHYSHPLKLEELDDEAMVMEIARLKEEQKALEEELHEMNKRLETTEKRPQQMMAFLCKVVEDPQILSRILREREKKHLGEKKRRLIPPPPPTAATSSSSSSGIKTEFEEDEGNYNIKSSSPETGLEIDNNSNNICSPPPLGCWGEQGCYGYNCASVPAPLTVVAPAFPTMGGGYLRRGGFWGEMAAEGNAVPPYPFSLLEGGF

SEQ ID NO: 57217 - protein, 318 aa, Glycine max
  peptide (1)..(318): Ceres Seq. ID no. 15171609
  misc_feature (13)..(190): Pfam Name: HSF-type DNA-binding Pfam Description: HSF-type DNA-binding
  misc_feature (10)..(187): Homolog of NCBI NO: 27261140 NR Description: HSF3 DNA-binding domain/VP16 activation domain
  misc_feature (10)..(187): Homolog of NCBI NO: 25296101 NR Description: heat shock transcription factor HSF3
  misc_feature (7)..(189): Homolog of NCBI NO: 29126355 NR Description: putative heat shock transcription factor
  misc_feature (14)..(249): Homolog of NCBI NO: 37534406 NR Description: putative auxin-induced protein
  misc_feature (14)..(204): Homolog of NCBI NO: 15225255 NR Description: heat shock transcription factor family
  misc_feature (14)..(252): Homolog of NCBI NO: 729774 NR Description: HEAT SHOCK FACTOR PROTEIN HSF30 (HEAT SHOCK
  misc_feature (12)..(190): Homolog of NCBI NO: 34910182 NR Description: putative heat shock transcription factor
  misc_feature (14)..(215): Homolog of NCBI NO: 33087081 NR Description: heat stress protein [Oryza sativa (japonica
  misc_feature (14)..(215): Homolog of NCBI NO: 28971956 NR Description: putative heat shock transcription factor
  misc_feature (8)..(318): Homolog of NCBI NO: 15230127 NR Description: heat shock transcription factor family
MEHNIIVNNNVIAPFVIKTYNMVNDPTTDKLITWGPANNSFIVLDPLDFSHSLLPTFFKHNNFSSFVRQLNTYGFRKVDPDRWEFANEWFLRGQKHLLRNIVRKKHGGAGRTNSNSHYSHPLKLEELDDEAMVMEIARLKEEQKALEEELHEMNKRLETTEKRPQQMMAFLCKVVEDPQILSRILREREKKHLGEKKRRLIPPPPPTAATSSSSSSGIKTEFEEDEGNYNIKSSSPETGLEIDNNSNNICSPPPLGCWGEQGCYGYNCASVPAPLTVVAPAFPTMGGGYLRRGGFWGEMAAEGNAVPPYPFSLLEGGF

SEQ ID NO: 57218 - DNA, 1282 bp, Glycine max
  misc_feature (1)..(1282): Ceres Seq. ID no. 12608114
attacctaccactgtcactatgaatgctctcttttgtttttcaccttctttttttttttttgtgtgttcatcttcaacttcatcctaaccttttacacatcatattttcggcttagaacaaccaaaagcaagttcacattgtcttgtcttttcgggtagtggctgtagaggaaacactcctgttttgtgcgcatattgatattggaatagtctttctctgaaccccatttttgcaaaaaggaagaaagagaaagagagagagagagagagagaagagatatacactgccaagaagaagaacatgaaaattcagtgcgatgtgtgtgagaaagccccggcaaccgtgatttgctgcgcagatgaggcagctttgtgtgccaaatgtgacgttgaagttcatgctgcaaacaagcttgcaagcaagcaccagaggcttctccttcaatctttatctaacaagcttcccagatgtgacatatgtcaagataagccagctttcatattttgtgttgaggacagagcactcttctgtaaagactgtgatgaacctattcatttagccagtagcctttctgcaaaccaccagcgcttccttgctactggtatccgggtggctttgggttctaattgcaccaaaggcaatgaaaaaggtcacgtggaaccatctaaaccaaaagcacaagaagttcctgcgaaaattccttctcagcaagtgcctagcttcacatcctcttgggcagttgatgacttgttggaattaacagactttgaatcaccagacaaagttcagaagcaatcccttgagtttggagaacttgaatggctagcagatgtaggcctttttggtgaacagtttcctcatgaagctttagcggcggctgaagttcctcagcttccaatgactagcagtgttggctcacacaaagcccccaaatccttgttgtcttacaaaaagcctaggattgaagtcctagatgaagatgatgatgagcacttcaccgtaccagatctcggataaagcacatggtcatgtaaacaattgcctgaatcagtaggcagtaggttgacgagttgtatatgcatactaggtgcagatgttaatgaactcttcaatgtgcctggtctagctgaagctcaggaccatgaggactattgcatgaatctgtagattgatgagctgtatatgcatacttctcttaggacagtaagtaatgaagtatgttaactagcttgtggagttgataaatatctcattttaggagctatgaatggtttgattttt

SEQ ID NO: 57219 - protein, 238 aa, Glycine max
  peptide (1)..(238): Ceres Seq. ID no. 12608115
  misc_feature (1)..(47): Pfam Name: B-box zinc finger Pfam Description: B-box zinc finger
  misc_feature (1)..(139): Homolog of NCBI NO: 15222289 NR Description: CONSTANS B-box zinc finger family protein
  misc_feature (1)..(152): Homolog of NCBI NO: 34903708 NR Description: putative zinc-finger protein
  misc_feature (1)..(130): Homolog of NCBI NO: 18412037 NR Description: CONSTANS B-box zinc finger family protein
  misc_feature (1)..(130): Homolog of NCBI NO: 17433085 NR Description: Zinc finger protein constans-like 7
  misc_feature (1)..(198): Homolog of NCBI NO: 3618310 NR Description: zinc finger protein [Oryza sativa (japonica
  misc_feature (1)..(192): Homolog of NCBI NO: 3618314 NR Description: zinc finger protein [Oryza sativa (japonica
  misc_feature (1)..(162): Homolog of NCBI NO: 30679541 NR Description: salt-tolerance protein [Arabidopsis thaliana]
  misc_feature (1)..(238): Homolog of NCBI NO: 25408150 NR Description: hypothetical protein At2g31380 [imported] -
  misc_feature (1)..(238): Homolog of NCBI NO: 18402646 NR Description: salt tolerance-like protein
  misc_feature (1)..(238): Homolog of NCBI NO: 15221367 NR Description: salt-tolerance protein
MKIQCDVCEKAPATVICCADEAALCAKCDVEVHAANKLASKHQRLLLQSLSNKLPRCDICQDKPAFIFCVEDRALFCKDCDEPIHLASSLSANHQRFLATGIRVALGSNCTKGNEKGHVEPSKPKAQEVPAKIPSQQVPSFTSSWAVDDLLELTDFESPDKVQKQSLEFGELEWLADVGLFGEQFPHEALAAAEVPQLPMTSSVGSHKAPKSLLSYKKPRIEVLDEDDDEHFTVPDLG

SEQ ID NO: 57220 - DNA, 1068 bp, Glycine max
  misc_feature (1)..(1068): Ceres Seq. ID no. 14305778
acattaaagtccacgcacatagatttgctttcacatccatcacctacaccaccaaaaccaaatcaagccgtgaagacgtgaaagaaaaaacaaatttatcttactctacaattattttaaacaaatttaattctctaatcttatcttagggaacatattcattgtgcttcaaattggctaagaaaataaaattaaaaataattaataaagtattaaattctgccctctttcgtatcctacactatccgcaaagggcgagaatccgcgacgtcgttttcaaacacggcttccatagtgaaggactgattcaataattgacgagtggtttgtttggtttgataggcatagacgacaaccaagtacagagaagtaaagagagttttgctttttgaaatggcagcgtcgtcgtcgtcggagaagcaagtggtgctgataggcatagacgacagcgagcagagcacgtacgcgctgaattgggctttggatcacttcttcccgagcccaatcttcaagctcgttctcatccactcaaggcccaccgccacctccgccgtgggcttcgccggccctggagccgctgagatcttgcctattgtagattccgatttgagaaagattgccgccagagtcctcgaaaccgccaaacaactttgcttcaacaaatccgtgaatgatgtgacagcggaagtggtggaaggtgatcctagaaatgttctttgtgatgctgtggataagtaccgtgctgcaatattggttgtgggcagccatggttatggggctataaaaagggcggttttaggtagtgtcagtgactactgtgctcatcatgctcactgcactgtgatgatcgtgaaaaagccaaaaatcaaacactgatctgtaatggctgcgtctatatagtacaacaataaacataaccggccctttcagccaaagaaaaaaaataatgttcacagaaattcgtaactatgcttgttgtatggatactacatattgtccttatggtttgatacgttgaggtacagcttatttttaaagatggaagtatggaaccatcaaaaagttatt

SEQ ID NO: 57221 - protein, 160 aa, Glycine max
  peptide (1)..(160): Ceres Seq. ID no. 14305779
  misc_feature (12)..(154): Pfam Name: Universal stress protein family Pfam Description: Universal stress protein family
  misc_feature (1)..(117): Homolog of NCBI NO: 15239780 NR Description: hypothetical protein [Arabidopsis thaliana]
  misc_feature (1)..(157): Homolog of NCBI NO: 30681955 NR Description: ethylene-responsive protein -related [Arabidopsis
  misc_feature (6)..(157): Homolog of NCBI NO: 25402571 NR Description: hypothetical protein [imported] - Arabidopsis
  misc_feature (1)..(157): Homolog of NCBI NO: 18399413 NR Description: ethylene-responsive protein -related [Arabidopsis
  misc_feature (6)..(157): Homolog of NCBI NO: 30681321 NR Description: ER6 protein -related [Arabidopsis thaliana]
  misc_feature (2)..(159): Homolog of NCBI NO: 20067187 NR Description: putative universal stress protein USP1
  misc_feature (1)..(159): Homolog of NCBI NO: 22831145 NR Description: universal stress protein USP1-like protein
  misc_feature (9)..(159): Homolog of NCBI NO: 21555580 NR Description: unknown [Arabidopsis thaliana]
  misc_feature (9)..(159): Homolog of NCBI NO: 18407428 NR Description: expressed protein [Arabidopsis thaliana]
  misc_feature (14)..(160): Homolog of NCBI NO: 38016525 NR Description: fiber protein Fb19 [Gossypium barbadense]
MAASSSSEKQVVLIGIDDSEQSTYALNWALDHFFPSPIFKLVLIHSRPTATSAVGFAGPGAAEILPIVDSDLRKIAARVLETAKQLCFNKSVNDVTAEVVEGDPRNVLCDAVDKYRAAILVVGSHGYGAIKRAVLGSVSDYCAHHAHCTVMIVKKPKIKH

SEQ ID NO: 57222 - DNA, 921 bp, Glycine max
  misc_feature (1)..(921): Ceres Seq. ID no. 14316363
aatcttgttcacgttacacgttttccatctctcttcttcctttttctcttcctttcttttagttctgttattgcaattttgccaggcctataatgcaaagttaaccaacatttgattccattctttctgtttccttcttcaaatatctttgtatcttgttttgcaagtaaaacaagaacaaccttatttgtatatattttagaaacttcattatttgacagtatattcacccatagttgaatttcaatggggaaaggaggtggttgctttccaagcaaaacaaaggcaccaatttctggagcagaaaaggatccaattattgttgaaagtctaattccaacaaatgatccaagtagcacaagccaagaggtggaagcaccagcaccagcaccagcagcagtgaaaaagctgaaaattttcattgtgttctactcaacttatggccatgtggagtcattggcaaggtccttgaagaaaggggttgattcaattgaaggcgttgaaggggtgttgtaccgcgtgctggagacgctgccaaaggaggttctggaactcatgaaggcacctgagaaggatgagacagtgccactcatatctgaagacaagttggtggaggctgatggcttgctgtttggttttccaacaaggtatggcagcatggcggcgcagatgaaggtgtttttcgattcgaccggtcagttgtggagagagcagaagctggcaggggtgcctgctggcttctttgtcagcactggcactcagggtggaggccaagaaaccacagcgtaagaaggccttttattttctgccttcattgatgcatgcataaataagagccttgctcttcattttattttctttaatggaacttcagaattttatctatgtatataaataaattgatagaatttaattagaaag

SEQ ID NO: 57223 - protein, 180 aa, Glycine max
  peptide (1)..(180): Ceres Seq. ID no. 14316364
  misc_feature (56)..(180): Homolog of NCBI NO: 15239652 NR Description: quinone reductase, putative [Arabidopsis
  misc_feature (56)..(180): Homolog of NCBI NO: 30687535 NR Description: quinone reductase family [Arabidopsis thaliana]
  misc_feature (55)..(180): Homolog of NCBI NO: 2564066 NR Description: LEDI-3 protein [Lithospermum erythrorhizon]
  misc_feature (56)..(179): Homolog of NCBI NO: 21068664 NR Description: putative quinone oxidoreductase [Cicer arietinum]
  misc_feature (55)..(179): Homolog of NCBI NO: 34910128 NR Description: putative 1,4-benzoquinone reductase
  misc_feature (56)..(180): Homolog of NCBI NO: 12484052 NR Description: quinone-oxidoreductase QR2 [Triphysaria
  misc_feature (56)..(180): Homolog of NCBI NO: 5031275 NR Description: unknown [Prunus armeniaca]
  misc_feature (1)..(180): Homolog of NCBI NO: 18087679 NR Description: putative reductase [Oryza sativa]
  misc_feature (12)..(180): Homolog of NCBI NO: 15234512 NR Description: quinone reductase family [Arabidopsis thaliana]
  misc_feature (12)..(180): Homolog of NCBI NO: 21593010 NR Description: minor allergen [Arabidopsis thaliana]
MGKGGGCFPSKTKAPISGAEKDPIIVESLIPTNDPSSTSQEVEAPAPAPAAVKKLKIFIVFYSTYGHVESLARSLKKGVDSIEGVEGVLYRVLETLPKEVLELMKAPEKDETVPLISEDKLVEADGLLFGFPTRYGSMAAQMKVFFDSTGQLWREQKLAGVPAGFFVSTGTQGGGQETTA

SEQ ID NO: 57224 - DNA, 1061 bp, Glycine max
  misc_feature (1)..(1061): Ceres Seq. ID no. 14305871
aacattctatgttctgtgccattcctccctctcacttcaccccaccactcaaacaaaggaacccatctcttcaccgtcttccttctcctagaaagcccaaagcctccaccctaagaatttcctctcttggcgctggtttcttcgatgacatcgtccaaattgctcataacaaggttctgattgcagctggtgtctctgtggcgattggtcagctttctaagccattcacttctgtttttctgtatggcaaagggtttgatatcagagcagttgttcaagctggagggttcccttcatcacactcttctgcaacagtggctagtgcaacattatttggccttgagagaggcttctccgatcctatttttggtcttgcagttgtgtatgccggtctcattatgtatgatgctcagggtgtaagaagagaagtagggattcatgccaagacattgaacaaaatactgctccaaatgcaagccaactctttacattccaaagatagagataatttgattaactctcaaccaggactatcaaaacctctaaaagttggtcttgataagtcccttttgtcccaagaagccacttctttggaaccacaagaaacaaatagaggtctattggttaaatcaggaagcaaaataaggcaaacagatgcagatgaaatctcatcaaagttggccattgatggtataccccaactaaaagaatctattggtcatacagagattgaagtcatagctggtgctttactaggctttttggtggctttggctgtgtataatttcaagtaaaatcttgctttttgatgaataatttcatagcatatcttacaacaagtagattattaaattgaaaatcaagctgagttggaaattaaaaggccaagttgacaacaggtttaggttatcatttagcaaaacatttaaggtttgtatatgacctaacagaacaggacattagttaaagatgaaaacccatccaaacagggggttacacacgtacttctcttttcctatgtattgcggtgccttatataaaatttatcaattattgatttt

SEQ ID NO: 57225 - protein, 263 aa, Glycine max
  peptide (1)..(263): Ceres Seq. ID no. 14305872
  misc_feature (52)..(189): Pfam Name: Divergent PAP2 family Pfam Description: Divergent PAP2 family
  misc_feature (217)..(259): Homolog of NCBI NO: 23099802 NR Description: hypothetical protein [Oceanobacillus iheyensis
  misc_feature (56)..(166): Homolog of NCBI NO: 23099802 NR Description: hypothetical protein [Oceanobacillus iheyensis
  misc_feature (233)..(257): Homolog of NCBI NO: 23112372 NR Description: hypothetical protein [Desulfitobacterium
  misc_feature (52)..(175): Homolog of NCBI NO: 23112372 NR Description: hypothetical protein [Desulfitobacterium
  misc_feature (233)..(260): Homolog of NCBI NO: 15615964 NR Description: BH3402~unknown conserved protein [Bacillus
  misc_feature (51)..(154): Homolog of NCBI NO: 15615964 NR Description: BH3402~unknown conserved protein [Bacillus
  misc_feature (234)..(259): Homolog of NCBI NO: 15672981 NR Description: hypothetical protein [Lactococcus lactis subsp.
  misc_feature (52)..(175): Homolog of NCBI NO: 15672981 NR Description: hypothetical protein [Lactococcus lactis subsp.
  misc_feature (20)..(189): Homolog of NCBI NO: 11994410 NR Description: emb|CAB71107.1~gene_id:MBK21.6~similar to unknown
  misc_feature (20)..(189): Homolog of NCBI NO: 18399713 NR Description: expressed protein [Arabidopsis thaliana]
HSMFCAIPPSHFTPPLKQRNPSLHRLPSPRKPKASTLRISSLGAGFFDDIVQIAHNKVLIAAGVSVAIGQLSKPFTSVFLYGKGFDIRAVVQAGGFPSSHSSATVASATLFGLERGFSDPIFGLAVVYAGLIMYDAQGVRREVGIHAKTLNKILLQMQANSLHSKDRDNLINSQPGLSKPLKVGLDKSLLSQEATSLEPQETNRGLLVKSGSKIRQTDADEISSKLAIDGIPQLKESIGHTEIEVIAGALLGFLVALAVYNFK

SEQ ID NO: 57226 - protein, 261 aa, Glycine max
  peptide (1)..(261): Ceres Seq. ID no. 14305873
  misc_feature (50)..(187): Pfam Name: Divergent PAP2 family Pfam Description: Divergent PAP2 family
  misc_feature (215)..(257): Homolog of NCBI NO: 23099802 NR Description: hypothetical protein [Oceanobacillus iheyensis
  misc_feature (54)..(164): Homolog of NCBI NO: 23099802 NR Description: hypothetical protein [Oceanobacillus iheyensis
  misc_feature (231)..(255): Homolog of NCBI NO: 23112372 NR Description: hypothetical protein [Desulfitobacterium
  misc_feature (50)..(173): Homolog of NCBI NO: 23112372 NR Description: hypothetical protein [Desulfitobacterium
  misc_feature (231)..(258): Homolog of NCBI NO: 15615964 NR Description: BH3402~unknown conserved protein [Bacillus
  misc_feature (49)..(152): Homolog of NCBI NO: 15615964 NR Description: BH3402~unknown conserved protein [Bacillus
  misc_feature (232)..(257): Homolog of NCBI NO: 15672981 NR Description: hypothetical protein [Lactococcus lactis subsp.
  misc_feature (50)..(173): Homolog of NCBI NO: 15672981 NR Description: hypothetical protein [Lactococcus lactis subsp.
  misc_feature (18)..(187): Homolog of NCBI NO: 11994410 NR Description: emb|CAB71107.1~gene_id:MBK21.6~similar to unknown
  misc_feature (18)..(187): Homolog of NCBI NO: 18399713 NR Description: expressed protein [Arabidopsis thaliana]
MFCAIPPSHFTPPLKQRNPSLHRLPSPRKPKASTLRISSLGAGFFDDIVQIAHNKVLIAAGVSVAIGQLSKPFTSVFLYGKGFDIRAVVQAGGFPSSHSSATVASATLFGLERGFSDPIFGLAVVYAGLIMYDAQGVRREVGIHAKTLNKILLQMQANSLHSKDRDNLINSQPGLSKPLKVGLDKSLLSQEATSLEPQETNRGLLVKSGSKIRQTDADEISSKLAIDGIPQLKESIGHTEIEVIAGALLGFLVALAVYNFK

SEQ ID NO: 57227 - protein, 131 aa, Glycine max
  peptide (1)..(131): Ceres Seq. ID no. 14305874
  misc_feature (1)..(57): Pfam Name: Divergent PAP2 family Pfam Description: Divergent PAP2 family
  misc_feature (85)..(127): Homolog of NCBI NO: 23099802 NR Description: hypothetical protein [Oceanobacillus iheyensis
  misc_feature (1)..(34): Homolog of NCBI NO: 23099802 NR Description: hypothetical protein [Oceanobacillus iheyensis
  misc_feature (101)..(125): Homolog of NCBI NO: 23112372 NR Description: hypothetical protein [Desulfitobacterium
  misc_feature (1)..(43): Homolog of NCBI NO: 23112372 NR Description: hypothetical protein [Desulfitobacterium
  misc_feature (101)..(128): Homolog of NCBI NO: 15615964 NR Description: BH3402~unknown conserved protein [Bacillus
  misc_feature (1)..(22): Homolog of NCBI NO: 15615964 NR Description: BH3402~unknown conserved protein [Bacillus
  misc_feature (102)..(127): Homolog of NCBI NO: 15672981 NR Description: hypothetical protein [Lactococcus lactis subsp.
  misc_feature (1)..(43): Homolog of NCBI NO: 15672981 NR Description: hypothetical protein [Lactococcus lactis subsp.
  misc_feature (1)..(57): Homolog of NCBI NO: 11994410 NR Description: emb|CAB71107.1~gene_id:MBK21.6~similar to unknown
  misc_feature (1)..(57): Homolog of NCBI NO: 18399713 NR Description: expressed protein [Arabidopsis thaliana]
MYDAQGVRREVGIHAKTLNKILLQMQANSLHSKDRDNLINSQPGLSKPLKVGLDKSLLSQEATSLEPQETNRGLLVKSGSKIRQTDADEISSKLAIDGIPQLKESIGHTEIEVIAGALLGFLVALAVYNFK

SEQ ID NO: 57228 - DNA, 672 bp, Glycine max
  misc_feature (1)..(672): Ceres Seq. ID no. 14316515
attccaacttatcatactatcacattattatcaaccttataatcttcctcttagcaccaaccatgactacccagtttctcattctctcccttctcatctcatgccacgtcctcactgcaaccctagccgaagaaaccggctttgtaggttcactagaccgcaaggcattaggtctagataaaaaagacaaggtcagtcatttccggttctacttccacgagaggttcaccggaagcaacgccacctcggtcaccgtcgttcctccgctgccccagtacaactccaccaccaacttcgggttggtggggatcaccgacaacgccttgaccgtgggacccgaacccgggtccaaggtggtcggaaagatcgaggggttgtacgcgggcacctcacaatcggagttcaatttattgattgttgtgaattttgccttgaccgaaggaaagtataatggcagcaccatcaccgtggtggggcggaaccgcctctccctcaagattagggagatgcctgtgattggaggaagtggggtttttaaatttgccactgggtatgttgaaaccagcactctctatgttgatgctgataggtctaccattgagtacaacatttatgtttcacattactgatcaatttgtggtaactttatgttacaaaacttcttctatgtac

SEQ ID NO: 57229 - protein, 208 aa, Glycine max
  peptide (1)..(208): Ceres Seq. ID no. 14316516
  misc_feature (60)..(207): Pfam Name: Dirigent-like protein Pfam Description: Dirigent-like protein
  misc_feature (21)..(207): Homolog of NCBI NO: 15219966 NR Description: disease resistance response protein-related
  misc_feature (21)..(207): Homolog of NCBI NO: 15238982 NR Description: disease resistance response protein-related
  misc_feature (21)..(208): Homolog of NCBI NO: 15231318 NR Description: disease resistance response protein-related/
  misc_feature (21)..(207): Homolog of NCBI NO: 15218836 NR Description: disease resistance response protein-related/
  misc_feature (21)..(207): Homolog of NCBI NO: 15238980 NR Description: disease resistance response protein-related
  misc_feature (26)..(208): Homolog of NCBI NO: 15231302 NR Description: disease resistance response protein-related/
  misc_feature (25)..(208): Homolog of NCBI NO: 15222673 NR Description: disease resistance response protein-related/
  misc_feature (25)..(208): Homolog of NCBI NO: 22135914 NR Description: unknown protein [Arabidopsis thaliana]
  misc_feature (31)..(208): Homolog of NCBI NO: 15217886 NR Description: disease resistance response protein-related/
  misc_feature (26)..(208): Homolog of NCBI NO: 15239779 NR Description: disease resistance response protein-related/
SNLSYYHIIINLIIFLLAPTMTTQFLILSLLISCHVLTATLAEETGFVGSLDRKALGLDKKDKVSHFRFYFHERFTGSNATSVTVVPPLPQYNSTTNFGLVGITDNALTVGPEPGSKVVGKIEGLYAGTSQSEFNLLIVVNFALTEGKYNGSTITVVGRNRLSLKIREMPVIGGSGVFKFATGYVETSTLYVDADRSTIEYNIYVSHY

SEQ ID NO: 57230 - protein, 188 aa, Glycine max
  peptide (1)..(188): Ceres Seq. ID no. 14316517
  misc_feature (40)..(187): Pfam Name: Dirigent-like protein Pfam Description: Dirigent-like protein
  misc_feature (1)..(187): Homolog of NCBI NO: 15219966 NR Description: disease resistance response protein-related
  misc_feature (1)..(187): Homolog of NCBI NO: 15238982 NR Description: disease resistance response protein-related
  misc_feature (1)..(188): Homolog of NCBI NO: 15231318 NR Description: disease resistance response protein-related/
  misc_feature (1)..(187): Homolog of NCBI NO: 15218836 NR Description: disease resistance response protein-related/
  misc_feature (1)..(187): Homolog of NCBI NO: 15238980 NR Description: disease resistance response protein-related
  misc_feature (6)..(188): Homolog of NCBI NO: 15231302 NR Description: disease resistance response protein-related/
  misc_feature (5)..(188): Homolog of NCBI NO: 15222673 NR Description: disease resistance response protein-related/
  misc_feature (5)..(188): Homolog of NCBI NO: 22135914 NR Description: unknown protein [Arabidopsis thaliana]
  misc_feature (11)..(188): Homolog of NCBI NO: 15217886 NR Description: disease resistance response protein-related/
  misc_feature (6)..(188): Homolog of NCBI NO: 15239779 NR Description: disease resistance response protein-related/
MTTQFLILSLLISCHVLTATLAEETGFVGSLDRKALGLDKKDKVSHFRFYFHERFTGSNATSVTVVPPLPQYNSTTNFGLVGITDNALTVGPEPGSKVVGKIEGLYAGTSQSEFNLLIVVNFALTEGKYNGSTITVVGRNRLSLKIREMPVIGGSGVFKFATGYVETSTLYVDADRSTIEYNIYVSHY

SEQ ID NO: 57231 - DNA, 1012 bp, Glycine max
  misc_feature (1)..(1012): Ceres Seq. ID no. 14315448
acagactcaggaaccaatagacaaatatctattaacaaaacaacgcaacgcttctctttctttctttctatccctacttcgcctctgtttcatttggcccattgtttctcacaagccacactctttgtttgaagcttaaactccctctaagccccatccttaatttactcaatctcatcaatgtttcatcatctggagttcttcttttgagggctttagcagattccattccttgagtctcatgctggatatgccaatccttttatcctcatttctgatatccttgtttgcatgatcacatcttttccaaggattttaaaaccatgggtagaggtagaggaaagggtaaaaaactaactgttaccaattttgaggatcctgcaagtggtgaggatgaaaaagttcccacgcaaaagagaagagggaggccacaaaaaccactaaaggatgactttgatgaagaagaggtagagaaaatagaagatgacagtgacaatgttaagaatggagtctctaacaaagagatgaaaagtcccactgcaacagaaaatggaaggaaaagaaagcgaaactcacaggtaaaagagaaattagactcagttgaggaagaaaatggcattggcaatggatcaaacaccactgatgagttgacaaagaccaatggttttaggcataatggaagcaggcgcaaaagcacgccccgtcgagctgctgaagcaggtgttcagtgcaagtaaggatcataaaagttgtgcattagctttcttccttttcatattatcagttaaaatcatgagaagataggaagtgcggtgtagtatcatttattttatttacttgttttgtttctttgttctcacttttagtttcctttttcctcggtgagtctgatttgaggggttccatttggtgataccctatcattaattcctttttctttatttcaatcatgaatttgagagtttacaatgctggctgttgtcttataatgctataacacttcgaatttctc

SEQ ID NO: 57232 - protein, 137 aa, Glycine max
  peptide (1)..(137): Ceres Seq. ID no. 14315449
  misc_feature (1)..(137): Homolog of NCBI NO: 33088054 NR Description: unknown [Setaria italica]
  misc_feature (1)..(136): Homolog of NCBI NO: 21537173 NR Description: unknown [Arabidopsis thaliana]
  misc_feature (1)..(136): Homolog of NCBI NO: 18405905 NR Description: expressed protein [Arabidopsis thaliana]
  misc_feature (1)..(136): Homolog of NCBI NO: 15230905 NR Description: expressed protein [Arabidopsis thaliana]
MGRGRGKGKKLTVTNFEDPASGEDEKVPTQKRRGRPQKPLKDDFDEEEVEKIEDDSDNVKNGVSNKEMKSPTATENGRKRKRNSQVKEKLDSVEEENGIGNGSNTTDELTKTNGFRHNGSRRKSTPRRAAEAGVQCK

SEQ ID NO: 57233 - protein, 70 aa, Glycine max
  peptide (1)..(70): Ceres Seq. ID no. 14315450
  misc_feature (1)..(70): Homolog of NCBI NO: 33088054 NR Description: unknown [Setaria italica]
  misc_feature (1)..(69): Homolog of NCBI NO: 21537173 NR Description: unknown [Arabidopsis thaliana]
  misc_feature (1)..(69): Homolog of NCBI NO: 18405905 NR Description: expressed protein [Arabidopsis thaliana]
  misc_feature (1)..(69): Homolog of NCBI NO: 15230905 NR Description: expressed protein [Arabidopsis thaliana]
MKSPTATENGRKRKRNSQVKEKLDSVEEENGIGNGSNTTDELTKTNGFRHNGSRRKSTPRRAAEAGVQCK

SEQ ID NO: 57234 - DNA, 1274 bp, Glycine max
  misc_feature (1)..(1274): Ceres Seq. ID no. 15171735
gaatcagacaagagaagttgataagaacaaacaaaacaacaaccaaaccgtttattttttcttttttcttctctcaacactctcacttcctatctaatttttttcgttccgtcgtttcatcctcgcgagcgtgcatttgcattgcattgctctctctctcacaaaacgacgacgacgacgtcgccaccgcgcaccgttttggttttcctttctcttccgtcgtttgcttccgcaaatagcctttcgcatgggaaacgctaacggcagagaagacggatccattccccccgccgccgccgatccctccgccgccgcacgtggaactcacgcgccgccggtctctctccctccggttcgcgccttctcctccgattcaatggccaatagcccgccgcacagccctcgccgctccagatcgccgatcctcttcggtcctcaggttcctctagctccattacaacgaggtaatggccctccttttctcaatcaaatgtggcagaatgagtctcatggtattgttaatcaccctcctgagcaagggatccctgtcatgattacatggaactatggtggtaacaatgtggctgtggagggatcttgggataactggacatctaggaaggcattacagcgagctggcaaggatcactcattccttatagtccttccaccaggtatatatcattacaggttcattgctgatggtgaagagagatttatcccagagctacctaatgtagctgatgagatggggcatgtctgcaatcttcttgatgttaatgattatgtgccagaaaaccccgatggtgtgtctgagtttgaagcaccaccctcccccgaatccagttatggccaagcatttccagctgaagaagactttgcaaaagagccaatggctgttccttcgcaactgcatcttactgtcctaggtatggaaaactctgacataggttcctcttcaaagccccaacatgttgtgctaaatcatgtcttcatagagaaaaatttggcctcaaagtctgttgttgccctgggactcactcacaggttccagtccaaatatgtgacagttgtcctttacaaaccgctcaagaggtgaaatatataacgcttgtcaattatataaacctttttttcttttttttggtagcctcagtctgtaaagatgaaaatttaaataatactcctcaacgggtggtatatgaaggtcttgtgtctatatatgcttgaggcttctgttcgaattggtaaattaaactttttgtttttcaatt

SEQ ID NO: 57235 - protein, 283 aa, Glycine max
  peptide (1)..(283): Ceres Seq. ID no. 15171736
  misc_feature (194)..(281): Pfam Name: 5'-AMP-activated protein kinase, beta subunit, Pfam Description: 5'-AMP-activated protein kinase, beta subunit,
  misc_feature (60)..(283): Homolog of NCBI NO: 11935162 NR Description: SNF1-related kinase complex anchoring protein
  misc_feature (2)..(283): Homolog of NCBI NO: 22324436 NR Description: AKIN beta1-like protein [Oryza sativa (japonica
  misc_feature (1)..(283): Homolog of NCBI NO: 32364488 NR Description: AKIN beta2 [Medicago truncatula]
  misc_feature (20)..(283): Homolog of NCBI NO: 15234895 NR Description: kinase like protein [Arabidopsis thaliana]
  misc_feature (1)..(283): Homolog of NCBI NO: 6686784 NR Description: AKIN beta2 [Arabidopsis thaliana]
  misc_feature (37)..(241): Homolog of NCBI NO: 29725558 NR Description: SNF1 kinase complex anchoring protein
  misc_feature (1)..(283): Homolog of NCBI NO: 6686782 NR Description: AKIN gamma [Arabidopsis thaliana]
  misc_feature (1)..(283): Homolog of NCBI NO: 15242175 NR Description: AMPKBI (5'-AMP-activated protein kinase, beta
  misc_feature (1)..(283): Homolog of NCBI NO: 5702015 NR Description: GAL83 protein [Solanum tuberosum]
  misc_feature (1)..(283): Homolog of NCBI NO: 32364486 NR Description: AKIN beta1 [Medicago truncatula]
MGNANGREDGSIPPAAADPSAAARGTHAPPVSLPPVRAFSSDSMANSPPHSPRRSRSPILFGPQVPLAPLQRGNGPPFLNQMWQNESHGIVNHPPEQGIPVMITWNYGGNNVAVEGSWDNWTSRKALQRAGKDHSFLIVLPPGIYHYRFIADGEERFIPELPNVADEMGHVCNLLDVNDYVPENPDGVSEFEAPPSPESSYGQAFPAEEDFAKEPMAVPSQLHLTVLGMENSDIGSSSKPQHVVLNHVFIEKNLASKSVVALGLTHRFQSKYVTVVLYKPLKR

SEQ ID NO: 57236 - protein, 240 aa, Glycine max
  peptide (1)..(240): Ceres Seq. ID no. 15171737
  misc_feature (151)..(238): Pfam Name: 5'-AMP-activated protein kinase, beta subunit, Pfam Description: 5'-AMP-activated protein kinase, beta subunit,
  misc_feature (17)..(240): Homolog of NCBI NO: 11935162 NR Description: SNF1-related kinase complex anchoring protein
  misc_feature (1)..(240): Homolog of NCBI NO: 22324436 NR Description: AKIN beta1-like protein [Oryza sativa (japonica
  misc_feature (1)..(240): Homolog of NCBI NO: 32364488 NR Description: AKIN beta2 [Medicago truncatula]
  misc_feature (1)..(240): Homolog of NCBI NO: 15234895 NR Description: kinase like protein [Arabidopsis thaliana]
  misc_feature (1)..(240): Homolog of NCBI NO: 6686784 NR Description: AKIN beta2 [Arabidopsis thaliana]
  misc_feature (1)..(198): Homolog of NCBI NO: 29725558 NR Description: SNF1 kinase complex anchoring protein
  misc_feature (1)..(240): Homolog of NCBI NO: 6686782 NR Description: AKIN gamma [Arabidopsis thaliana]
  misc_feature (1)..(240): Homolog of NCBI NO: 15242175 NR Description: AMPKBI (5'-AMP-activated protein kinase, beta
  misc_feature (1)..(240): Homolog of NCBI NO: 5702015 NR Description: GAL83 protein [Solanum tuberosum]
  misc_feature (1)..(240): Homolog of NCBI NO: 32364486 NR Description: AKIN beta1 [Medicago truncatula]
MANSPPHSPRRSRSPILFGPQVPLAPLQRGNGPPFLNQMWQNESHGIVNHPPEQGIPVMITWNYGGNNVAVEGSWDNWTSRKALQRAGKDHSFLIVLPPGIYHYRFIADGEERFIPELPNVADEMGHVCNLLDVNDYVPENPDGVSEFEAPPSPESSYGQAFPAEEDFAKEPMAVPSQLHLTVLGMENSDIGSSSKPQHVVLNHVFIEKNLASKSVVALGLTHRFQSKYVTVVLYKPLKR

SEQ ID NO: 57237 - protein, 202 aa, Glycine max
  peptide (1)..(202): Ceres Seq. ID no. 15171738
  misc_feature (113)..(200): Pfam Name: 5'-AMP-activated protein kinase, beta subunit, Pfam Description: 5'-AMP-activated protein kinase, beta subunit,
  misc_feature (1)..(202): Homolog of NCBI NO: 11935162 NR Description: SNF1-related kinase complex anchoring protein
  misc_feature (1)..(202): Homolog of NCBI NO: 22324436 NR Description: AKIN beta1-like protein [Oryza sativa (japonica
  misc_feature (1)..(202): Homolog of NCBI NO: 32364488 NR Description: AKIN beta2 [Medicago truncatula]
  misc_feature (1)..(202): Homolog of NCBI NO: 15234895 NR Description: kinase like protein [Arabidopsis thaliana]
  misc_feature (1)..(202): Homolog of NCBI NO: 6686784 NR Description: AKIN beta2 [Arabidopsis thaliana]
  misc_feature (1)..(160): Homolog of NCBI NO: 29725558 NR Description: SNF1 kinase complex anchoring protein
  misc_feature (1)..(202): Homolog of NCBI NO: 6686782 NR Description: AKIN gamma [Arabidopsis thaliana]
  misc_feature (1)..(202): Homolog of NCBI NO: 15242175 NR Description: AMPKBI (5'-AMP-activated protein kinase, beta
  misc_feature (1)..(202): Homolog of NCBI NO: 5702015 NR Description: GAL83 protein [Solanum tuberosum]
  misc_feature (1)..(202): Homolog of NCBI NO: 32364486 NR Description: AKIN beta1 [Medicago truncatula]
MWQNESHGIVNHPPEQGIPVMITWNYGGNNVAVEGSWDNWTSRKALQRAGKDHSFLIVLPPGIYHYRFIADGEERFIPELPNVADEMGHVCNLLDVNDYVPENPDGVSEFEAPPSPESSYGQAFPAEEDFAKEPMAVPSQLHLTVLGMENSDIGSSSKPQHVVLNHVFIEKNLASKSVVALGLTHRFQSKYVTVVLYKPLKR

SEQ ID NO: 57238 - DNA, 1345 bp, Glycine max
  misc_feature (1)..(1345): Ceres Seq. ID no. 15178206
cacctttcttctctcttgctataatcattttcaaccaaacccaaacccaaacccctttctctcataaacaaagcaacaaaggttcatcccagttaggagttaggacctctcttcctttttcatttcctcgaatcccaaacaccacaaaaaccaaaacccacctaaaaaatgcaatcattcccctccactctcgcatgctttactttttcaacgtcactagtactagtactactcttatttctactacctttttctcgggccggtttactctccgaaccggtaagcgaccccaaccagccactcgaaccgggctccaacacggtccctgccttccccgtccagacccaggccctcacctgccgcctcgacctctccgacgagctattcggcggagtcaaggacgcctgcggcaaagacctcgaccggagccgctgctgccccgtcctcgccgcctggctcttcgccgcccacgcccgcaccgccctcgacgtctccgccgccccgcctccatcctccggcgaccttccgatgatgcccgacgactcacaaaaatgcgtcaactcgctccaggactcgcttctctcccgcaacatacgaatccctcagtccaacgccacgtgcgacgccattctctgcttctgcggcatcaggctccaccaaatcacgtcgctgacttgcaacgctgcgtttaacgtctcgctttctcacagaaacgccactccaaccgccgcggttcgcaacctggagaataattgtcgtaactcctcttacgctggttgcactaaatgcctcggtgccctacaaaaggtgaaggggtataaaaatgagacgaagggaagtgatagagtgaagaaaatgttcaaccgggactgtcaattgatggggttaacgtggcttcttgcaaagaacaaaacggcgtacatacccaccgtttcggcggtgctgcgtgcgatgatgtacagtgcgcaccctcacgagtccaagtgtagtcccgaccaggagaacatgccgctggccgttgattcgcttcagttcgagagcggccacgcgccatcgcggccgtccaagttttgcgtgacgattttgcccctcttggttctcttattttccgcttttgttgtgtagaaagaaagggtgggcccacttggtggggttagtgtctgtcctcttctctttctctctctctcgctatcacgtgaaacttagctactcgacaaaacatgcaaacaaacgggggtagtttgttttttacttgagagggtttttctggctgtaaattttcagagtccattgacatgtttgtgtgtacagtgtcaccaacttacatagaaagaagtggttcttt

SEQ ID NO: 57239 - protein, 318 aa, Glycine max
  peptide (1)..(318): Ceres Seq. ID no. 15178207
  misc_feature (14)..(201): Homolog of NCBI NO: 18401752 NR Description: expressed protein [Arabidopsis thaliana]
  misc_feature (99)..(296): Homolog of NCBI NO: 18401752 NR Description: expressed protein [Arabidopsis thaliana]
  misc_feature (19)..(306): Homolog of NCBI NO: 34394002 NR Description: unknown protein [Oryza sativa (japonica
  misc_feature (18)..(313): Homolog of NCBI NO: 18417127 NR Description: expressed protein [Arabidopsis thaliana]
  misc_feature (18)..(313): Homolog of NCBI NO: 21593735 NR Description: unknown [Arabidopsis thaliana]
MQSFPSTLACFTFSTSLVLVLLLFLLPFSRAGLLSEPVSDPNQPLEPGSNTVPAFPVQTQALTCRLDLSDELFGGVKDACGKDLDRSRCCPVLAAWLFAAHARTALDVSAAPPPSSGDLPMMPDDSQKCVNSLQDSLLSRNIRIPQSNATCDAILCFCGIRLHQITSLTCNAAFNVSLSHRNATPTAAVRNLENNCRNSSYAGCTKCLGALQKVKGYKNETKGSDRVKKMFNRDCQLMGLTWLLAKNKTAYIPTVSAVLRAMMYSAHPHESKCSPDQENMPLAVDSLQFESGHAPSRPSKFCVTILPLLVLLFSAFVV

SEQ ID NO: 57240 - protein, 229 aa, Glycine max
  peptide (1)..(229): Ceres Seq. ID no. 15178208
PFFSLAIIIFNQTQTQTPFSHKQSNKGSSQLGVRTSLPFSFPRIPNTTKTKTHLKNAIIPLHSRMLYFFNVTSTSTTLISTTFFSGRFTLRTGKRPQPATRTGLQHGPCLPRPDPGPHLPPRPLRRAIRRSQGRLRQRPRPEPLLPRPRRLALRRPRPHRPRRLRRPASILRRPSDDARRLTKMRQLAPGLASLPQHTNPSVQRHVRRHSLLLRHQAPPNHVADLQRCV

SEQ ID NO: 57241 - protein, 198 aa, Glycine max
  peptide (1)..(198): Ceres Seq. ID no. 15178209
  misc_feature (1)..(81): Homolog of NCBI NO: 18401752 NR Description: expressed protein [Arabidopsis thaliana]
  misc_feature (1)..(176): Homolog of NCBI NO: 18401752 NR Description: expressed protein [Arabidopsis thaliana]
  misc_feature (1)..(186): Homolog of NCBI NO: 34394002 NR Description: unknown protein [Oryza sativa (japonica
  misc_feature (1)..(193): Homolog of NCBI NO: 18417127 NR Description: expressed protein [Arabidopsis thaliana]
  misc_feature (1)..(193): Homolog of NCBI NO: 21593735 NR Description: unknown [Arabidopsis thaliana]
MMPDDSQKCVNSLQDSLLSRNIRIPQSNATCDAILCFCGIRLHQITSLTCNAAFNVSLSHRNATPTAAVRNLENNCRNSSYAGCTKCLGALQKVKGYKNETKGSDRVKKMFNRDCQLMGLTWLLAKNKTAYIPTVSAVLRAMMYSAHPHESKCSPDQENMPLAVDSLQFESGHAPSRPSKFCVTILPLLVLLFSAFVV

SEQ ID NO: 57242 - DNA, 1773 bp, Glycine max
  misc_feature (1)..(1773): Ceres Seq. ID no. 15177414
aaaattcagagcgtgcaaattgcaaaatgcagaaattgctcaacgatttcccccaaaaaatgagtttcacgggaagcgggaagaagacccaccgcaaaaatttcaaaccacaaagacagcattaatattcttcctttcatttccagttcttcttcttaaaccccttattctccttctctcttgcactgtcttacaatttgaattttccaatggcaacttctgagaacaacagcagcgcgcgtccccaacgcgaagcgaagaagagggccgcagctgcaatatcccaaattcatggcaacgccgccaagaagaaacgcgtcgttttaggcgacgtcactaacgtttcctcaagcgacgtcgccgtttccgtttccaaaaaacccgttcagacacataaaaatgttaaactcgagaaaccggccgcgccggttgccacgccggagaaggttgaggaaagacacgacccgcaactctgtgggccctacgtttctgatatatacgaataccttcgcggaatggaggtggatcctagtaagagaccattgatggattatgttcagaagattcagagggatgttaatgctaacatgcgcggtgttcttgtggattggttggtggaagttgcagaagaatacaaacttgtttcggacacgctttatttctctgttgcttatattgataggtttttgtcgttgaatattttgtcgagacagaggttgcaattgctgggggttgcttcaatgctcattgcttcgaaatacgaagagattaagccgcccgaggtggaggatttttgttacattacggataacacatactctaaggaagaggttgtgaacatggaggctgaaatattgaaggctttgaaatttgaattgggtggtcctacagtgaagacattcttgaggagattctccagagttggtcaagagggtgttgatacttctgatctccagtttgagttccttagctgctaccttgccgagctcagtttgttggattataattgtataaagtttttgccatctttggtggctgcatcagttgtattcctagcaagatttatgtttagcacaaagacacatccttggaattcggcactccatcaactcactagatataaacctgctgacttgaaggaatgtgttctaaacttacatgacttgtacctcagtaggagaggggcctctttgcaagctgtgagagagaaatacaaacagcataagttcaaatgtgtggcaacaacaccatctcctcccgagatacctctttctttttttgaatttgaggggcagattcttaggcaattgtaatttggctattcttggtatggctctggtttcaactattggcaggaaagtgtttcctaacactagagatgagagtttcagacattttgttgcacttgtttgtagagagagagaggtgcttgccagaaatgcagcgacaacatactatgctggcctcactgactttgtgattgagcttgtgtgaaaatgagataaatcccattagttgagaattaggttattttttgacaattagaagttctttgtaagatttccttgaaggatttatgatttctatgtatagggaaatgctatacgttttcattgtagttgttccattctaagatgtccaaactctgatattcagaaatcaatttttcagctgtaaacaagtgttggattggttactttaacccaaccatttttgtccgtggtctaaacaaatgtctgtgatagaatataattgagtttgtctgtgtagtct

SEQ ID NO: 57243 - protein, 367 aa, Glycine max
  peptide (1)..(367): Ceres Seq. ID no. 15177415
  misc_feature (95)..(224): Pfam Name: Cyclin, N-terminal domain Pfam Description: Cyclin, N-terminal domain
  misc_feature (1)..(358): Homolog of NCBI NO: 40538955 NR Description: putative A-type cyclin [Oryza sativa (japonica
  misc_feature (4)..(358): Homolog of NCBI NO: 30694019 NR Description: cyclin family [Arabidopsis thaliana]
  misc_feature (4)..(358): Homolog of NCBI NO: 15220147 NR Description: cyclin, putative [Arabidopsis thaliana]
  misc_feature (5)..(358): Homolog of NCBI NO: 15239172 NR Description: cyclin, putative [Arabidopsis thaliana]
  misc_feature (1)..(358): Homolog of NCBI NO: 7438513 NR Description: cyclin A-type (clone 59) - common tobacco
  misc_feature (1)..(358): Homolog of NCBI NO: 7438516 NR Description: cyclin A-type - Madagascar periwinkle
  misc_feature (5)..(361): Homolog of NCBI NO: 7242793 NR Description: cyclin A3.1 [Pisum sativum]
MATSENNSSARPQREAKKRAAAAISQIHGNAAKKKRVVLGDVTNVSSSDVAVSVSKKPVQTHKNVKLEKPAAPVATPEKVEERHDPQLCGPYVSDIYEYLRGMEVDPSKRPLMDYVQKIQRDVNANMRGVLVDWLVEVAEEYKLVSDTLYFSVAYIDRFLSLNILSRQRLQLLGVASMLIASKYEEIKPPEVEDFCYITDNTYSKEEVVNMEAEILKALKFELGGPTVKTFLRRFSRVGQEGVDTSDLQFEFLSCYLAELSLLDYNCIKFLPSLVAASVVFLARFMFSTKTHPWNSALHQLTRYKPADLKECVLNLHDLYLSRRGASLQAVREKYKQHKFKCVATTPSPPEIPLSFFEFEGQILRQL

SEQ ID NO: 57244 - protein, 265 aa, Glycine max
  peptide (1)..(265): Ceres Seq. ID no. 15177416
  misc_feature (1)..(122): Pfam Name: Cyclin, N-terminal domain Pfam Description: Cyclin, N-terminal domain
  misc_feature (1)..(256): Homolog of NCBI NO: 40538955 NR Description: putative A-type cyclin [Oryza sativa (japonica
  misc_feature (1)..(256): Homolog of NCBI NO: 30694019 NR Description: cyclin family [Arabidopsis thaliana]
  misc_feature (1)..(256): Homolog of NCBI NO: 15220147 NR Description: cyclin, putative [Arabidopsis thaliana]
  misc_feature (1)..(256): Homolog of NCBI NO: 15239172 NR Description: cyclin, putative [Arabidopsis thaliana]
  misc_feature (1)..(256): Homolog of NCBI NO: 7438513 NR Description: cyclin A-type (clone 59) - common tobacco
  misc_feature (1)..(256): Homolog of NCBI NO: 7438516 NR Description: cyclin A-type - Madagascar periwinkle
  misc_feature (1)..(259): Homolog of NCBI NO: 7242793 NR Description: cyclin A3.1 [Pisum sativum]
MEVDPSKRPLMDYVQKIQRDVNANMRGVLVDWLVEVAEEYKLVSDTLYFSVAYIDRFLSLNILSRQRLQLLGVASMLIASKYEEIKPPEVEDFCYITDNTYSKEEVVNMEAEILKALKFELGGPTVKTFLRRFSRVGQEGVDTSDLQFEFLSCYLAELSLLDYNCIKFLPSLVAASVVFLARFMFSTKTHPWNSALHQLTRYKPADLKECVLNLHDLYLSRRGASLQAVREKYKQHKFKCVATTPSPPEIPLSFFEFEGQILRQL

SEQ ID NO: 57245 - protein, 255 aa, Glycine max
  peptide (1)..(255): Ceres Seq. ID no. 15177417
  misc_feature (1)..(112): Pfam Name: Cyclin, N-terminal domain Pfam Description: Cyclin, N-terminal domain
  misc_feature (1)..(246): Homolog of NCBI NO: 40538955 NR Description: putative A-type cyclin [Oryza sativa (japonica
  misc_feature (1)..(246): Homolog of NCBI NO: 30694019 NR Description: cyclin family [Arabidopsis thaliana]
  misc_feature (1)..(246): Homolog of NCBI NO: 15220147 NR Description: cyclin, putative [Arabidopsis thaliana]
  misc_feature (1)..(246): Homolog of NCBI NO: 15239172 NR Description: cyclin, putative [Arabidopsis thaliana]
  misc_feature (1)..(246): Homolog of NCBI NO: 7438513 NR Description: cyclin A-type (clone 59) - common tobacco
  misc_feature (1)..(246): Homolog of NCBI NO: 7438516 NR Description: cyclin A-type - Madagascar periwinkle
  misc_feature (1)..(249): Homolog of NCBI NO: 7242793 NR Description: cyclin A3.1 [Pisum sativum]
MDYVQKIQRDVNANMRGVLVDWLVEVAEEYKLVSDTLYFSVAYIDRFLSLNILSRQRLQLLGVASMLIASKYEEIKPPEVEDFCYITDNTYSKEEVVNMEAEILKALKFELGGPTVKTFLRRFSRVGQEGVDTSDLQFEFLSCYLAELSLLDYNCIKFLPSLVAASVVFLARFMFSTKTHPWNSALHQLTRYKPADLKECVLNLHDLYLSRRGASLQAVREKYKQHKFKCVATTPSPPEIPLSFFEFEGQILRQL

SEQ ID NO: 57246 - DNA, 1379 bp, Glycine max
  misc_feature (1)..(1379): Ceres Seq. ID no. 15168355
gattgccctagttggcacctttccgtaagaagcacaagttctctctttttctttccaccgtcaccactcaccatgcaatgcaaataacccaattaagaaaccaaccaaccaacgaggcttgttctgttgtgttgtttgcttagtacgttaatggcaaaccaggtggttcctcgtgaatctcacccttatgcctttcatgtctctggccctcgcaagttcacttcccttaattggagggaccttatcatttccagttggaaggatgcaaattataagagaactgtcattgcctgctttatacaggcagtatacttgcttgaacttgatagacaggagaagagaacacaaggaaatgctcttgccccaaattggtggattcccttcaaatacaagcttaaacaaacactaattgatgaaagagatggatccatttttggcacaattcttgaatgggatagatctgctgcattggctgacttaataccaattagaccaagtggtgcccccagagctgtcttagcactcagaggaacattactcaaaagccctacaatgcgaagagatatcgaagatgacctacgttttgttgcttgggaaagcttgaagggctctgtgaggtttaaagcagctttggaggtactaaaatcgatttgtggtaaatacggaagcaacaacgtatgcattgcagggcattccttgggggctggttttgctcttcaagtgggaaaagaactagcaaaagaagggacttatgtggaggcacatttgtttaatccaccttctgtttcactagccatgagtctcaaaactattggagaaaaggctgagtttgtgtggaataggcttaaatccatgcttccttatagtggtgaggctcaaatcagcaatgatgtagacaaaacttcttcaagtgtaggattgaagagtaggatgcctcaactatctggttctggtttgaaagatgcaagtttgggggtagcaaaatgggttccttatttgtatgttaacaatggtgactatatctgctgctattacaatgatggtgctggcacaagcacaaaggtgaatgtaggaactacaaatggacaagtttcagcaaagttgtttgttgtctctaaggagaaacagaagtttcttgaggctcatggcctggaacaatggtggtcaagtgatgcagaacttcagcaggttatccatagtagcaatctcataagcaggcagcttcgatctttgtacactgctgctccttcccaagtaaacttataagcaggtggtgaaatgtaatttaaaataaaataaaaaaacaagatttgtattcctacatgttttcactgaaatttgatatttgtagtatgttgtaattcatactattttattat

SEQ ID NO: 57247 - protein, 371 aa, Glycine max
  peptide (1)..(371): Ceres Seq. ID no. 15168356
  misc_feature (15)..(253): Homolog of NCBI NO: 15237913 NR Description: hypothetical protein [Arabidopsis thaliana]
  misc_feature (15)..(224): Homolog of NCBI NO: 10177082 NR Description: gene_id:MOP9.4~pir||T04290~similar to unknown
  misc_feature (15)..(295): Homolog of NCBI NO: 18396010 NR Description: lipase (class 3) family [Arabidopsis thaliana]
  misc_feature (15)..(295): Homolog of NCBI NO: 30689345 NR Description: expressed protein [Arabidopsis thaliana]
  misc_feature (33)..(226): Homolog of NCBI NO: 34901136 NR Description: contains EST AU161031(C53313)~similar to Oryza
  misc_feature (13)..(82): Homolog of NCBI NO: 34904536 NR Description: B1066G12.13 [Oryza sativa (japonica
  misc_feature (122)..(362): Homolog of NCBI NO: 34904536 NR Description: B1066G12.13 [Oryza sativa (japonica
  misc_feature (12)..(367): Homolog of NCBI NO: 34910916 NR Description: OSJNBb0063G05.3 [Oryza sativa (japonica
  misc_feature (9)..(367): Homolog of NCBI NO: 34909578 NR Description: P0046E05.21 [Oryza sativa (japonica
  misc_feature (11)..(363): Homolog of NCBI NO: 15241306 NR Description: hypothetical protein [Arabidopsis thaliana]
MANQVVPRESHPYAFHVSGPRKFTSLNWRDLIISSWKDANYKRTVIACFIQAVYLLELDRQEKRTQGNALAPNWWIPFKYKLKQTLIDERDGSIFGTILEWDRSAALADLIPIRPSGAPRAVLALRGTLLKSPTMRRDIEDDLRFVAWESLKGSVRFKAALEVLKSICGKYGSNNVCIAGHSLGAGFALQVGKELAKEGTYVEAHLFNPPSVSLAMSLKTIGEKAEFVWNRLKSMLPYSGEAQISNDVDKTSSSVGLKSRMPQLSGSGLKDASLGVAKWVPYLYVNNGDYICCYYNDGAGTSTKVNVGTTNGQVSAKLFVVSKEKQKFLEAHGLEQWWSSDAELQQVIHSSNLISRQLRSLYTAAPSQVNL

SEQ ID NO: 57248 - protein, 237 aa, Glycine max
  peptide (1)..(237): Ceres Seq. ID no. 15168357
  misc_feature (1)..(161): Homolog of NCBI NO: 7486138 NR Description: hypothetical protein F25I24.160 - Arabidopsis
  misc_feature (1)..(119): Homolog of NCBI NO: 15237913 NR Description: hypothetical protein [Arabidopsis thaliana]
  misc_feature (1)..(90): Homolog of NCBI NO: 10177082 NR Description: gene_id:MOP9.4~pir||T04290~similar to unknown
  misc_feature (1)..(161): Homolog of NCBI NO: 18396010 NR Description: lipase (class 3) family [Arabidopsis thaliana]
  misc_feature (1)..(161): Homolog of NCBI NO: 30689345 NR Description: expressed protein [Arabidopsis thaliana]
  misc_feature (1)..(92): Homolog of NCBI NO: 34901136 NR Description: contains EST AU161031(C53313)~similar to Oryza
  misc_feature (1)..(228): Homolog of NCBI NO: 34904536 NR Description: B1066G12.13 [Oryza sativa (japonica
  misc_feature (1)..(233): Homolog of NCBI NO: 34910916 NR Description: OSJNBb0063G05.3 [Oryza sativa (japonica
  misc_feature (1)..(233): Homolog of NCBI NO: 34909578 NR Description: P0046E05.21 [Oryza sativa (japonica
  misc_feature (1)..(229): Homolog of NCBI NO: 15241306 NR Description: hypothetical protein [Arabidopsis thaliana]
MRRDIEDDLRFVAWESLKGSVRFKAALEVLKSICGKYGSNNVCIAGHSLGAGFALQVGKELAKEGTYVEAHLFNPPSVSLAMSLKTIGEKAEFVWNRLKSMLPYSGEAQISNDVDKTSSSVGLKSRMPQLSGSGLKDASLGVAKWVPYLYVNNGDYICCYYNDGAGTSTKVNVGTTNGQVSAKLFVVSKEKQKFLEAHGLEQWWSSDAELQQVIHSSNLISRQLRSLYTAAPSQVNL

SEQ ID NO: 57249 - DNA, 728 bp, Glycine max
  misc_feature (1)..(728): Ceres Seq. ID no. 14315067
attcaaaccctagatcagttttaattagtttcctagttttattcatagtgtgcaagaatgggaaacagcttaaggtgttgtttggcttgtgttcttccatgtggagctctagacttgattcgaatagtccatttgaatggctatgtggaagagattacacgtccaatcacagcaggagaggttctcaaagcaaaccctaaccatgttctaagcaaacctagctctcaaggcgtcgttcgccggattttgatcctttcaccggagaccgagctcaagaggggcagcatctacttcttgatcccggaatcttcgctgccggagaagaaacggctagccggaaagggaagaaatgttggtggtgataatgatataaaaaagaaaccatcaacattgaaagggaacaagggtagtagtgatgatgattattcttcactatcacaagggtgcctcaataaagccactcacaaaggttctaaagagaagaaatcgtcgtgccgggatcgccggaaaggccgcatcggaatatggaggcctcatttggagagtatattggaagattagtcggttttttgtgtcgctggccggtggccggaatccaacatggctggaaaaaagaagaggagaaaaagaagaagaaatatgttaaattattgaaatatagcaacaggactttttttttttttttgttcccttttgttttataaatgtatgtgggaatttgatgggag

SEQ ID NO: 57250 - protein, 167 aa, Glycine max
  peptide (1)..(167): Ceres Seq. ID no. 14315068
  misc_feature (42)..(166): Homolog of NCBI NO: 18396990 NR Description: expressed protein [Arabidopsis thaliana]
  misc_feature (25)..(146): Homolog of NCBI NO: 34896398 NR Description: hypothetical protein [Oryza sativa (japonica
  misc_feature (1)..(121): Homolog of NCBI NO: 18396990 NR Description: expressed protein [Arabidopsis thaliana]
  misc_feature (1)..(167): Homolog of NCBI NO: 34907910 NR Description: P0439E11.22 [Oryza sativa (japonica
  misc_feature (140)..(167): Homolog of NCBI NO: 34909702 NR Description: B1131G08.9 [Oryza sativa (japonica
  misc_feature (3)..(97): Homolog of NCBI NO: 34909702 NR Description: B1131G08.9 [Oryza sativa (japonica
  misc_feature (1)..(167): Homolog of NCBI NO: 34896112 NR Description: P0701D05.10 [Oryza sativa (japonica
  misc_feature (1)..(167): Homolog of NCBI NO: 15227725 NR Description: hypothetical protein [Arabidopsis thaliana]
  misc_feature (1)..(167): Homolog of NCBI NO: 18390706 NR Description: expressed protein [Arabidopsis thaliana]
MGNSLRCCLACVLPCGALDLIRIVHLNGYVEEITRPITAGEVLKANPNHVLSKPSSQGVVRRILILSPETELKRGSIYFLIPESSLPEKKRLAGKGRNVGGDNDIKKKPSTLKGNKGSSDDDYSSLSQGCLNKATHKGSKEKKSSCRDRRKGRIGIWRPHLESILED

SEQ ID NO: 57251 - DNA, 1078 bp, Glycine max
  misc_feature (1)..(1078): Ceres Seq. ID no. 14312258
gccactaccatttccaacaacatagccatgccctccatgaagacctcatcgtccaaaacctccgagtcctcgactcagttcgactcgccccactcgcctctccgatccttcccgctcttcgacaacgccgaccccttccactcgccgcaaaatgacaactcccgcgccatcgtcatcgtcgagacaacttcgactcaattcgcccaggccgcgccccccgcgccggagtccgagcaccggaacccgcctccggaggccgtggtcacccgccccgtttggccggagacgaagtcgtcggccaccgttggtcggacgcgaccgaggccggtggcgccgcccagttcggtggtgccgaagagagaaatgatggcgaaaaaagttgcattagggtttcggttaagcgaagtagtgctgtgtctgatttcgttttcggttatggccgcggacaaaactcgtggttggagcggtgattcttttgatcgctacaaggaatacaggtattgtttgtctgtgaatgtaatcgcatttgtatacgctgcgtttcaagcgtgtgatctggcgtatcaggtagtaacgggaagacgcataatcaatcaccacctgcgttaccactttgatttcttcatggatcaggttttggcgtatcttttggtatcggctgcatcatctgctgctacacgcgttgatgactggcaatcgaattggggaaaagatgatttcacagagatggcgagtgcttcaattgcgttgacctttcttgcttttgttgcctttgctattagctcgttaatctctggctacaacctctgcactctgttctcatagcaacattttaacctcgtataagctgtctttccattgtacacacaactacacactttttttttcttctttctattcctctattcttactgctgtggaggaatgcattcatgagtgttggtgccagtgatttttttttactgtacagatagacttgtatacgtacaattgagggaatactgttcgtcttaaatccgaaggatggagaaggaaatttttgtgttcaccttaaaatacaattaaatgattgtatttt

SEQ ID NO: 57252 - protein, 274 aa, Glycine max
  peptide (1)..(274): Ceres Seq. ID no. 14312259
  misc_feature (123)..(257): Pfam Name: Domain of unknown function (DUF588) Pfam Description: Domain of unknown function (DUF588)
  misc_feature (121)..(269): Homolog of NCBI NO: 28876007 NR Description: hypothetical protein [Oryza sativa (japonica
  misc_feature (90)..(271): Homolog of NCBI NO: 18404766 NR Description: expressed integral membrane protein common family
  misc_feature (90)..(271): Homolog of NCBI NO: 7460052 NR Description: hypothetical protein At2g38480 [imported] -
  misc_feature (90)..(271): Homolog of NCBI NO: 21553786 NR Description: unknown [Arabidopsis thaliana]
  misc_feature (161)..(270): Homolog of NCBI NO: 2598569 NR Description: MtN24 [Medicago truncatula]
  misc_feature (180)..(269): Homolog of NCBI NO: 15227628 NR Description: expressed protein [Arabidopsis thaliana]
  misc_feature (10)..(214): Homolog of NCBI NO: 15227628 NR Description: expressed protein [Arabidopsis thaliana]
  misc_feature (41)..(274): Homolog of NCBI NO: 15242642 NR Description: expressed protein [Arabidopsis thaliana]
  misc_feature (75)..(271): Homolog of NCBI NO: 15241975 NR Description: hypothetical protein [Arabidopsis thaliana]
  misc_feature (10)..(269): Homolog of NCBI NO: 27754604 NR Description: unknown protein [Arabidopsis thaliana]
ATTISNNIAMPSMKTSSSKTSESSTQFDSPHSPLRSFPLFDNADPFHSPQNDNSRAIVIVETTSTQFAQAAPPAPESEHRNPPPEAVVTRPVWPETKSSATVGRTRPRPVAPPSSVVPKREMMAKKVALGFRLSEVVLCLISFSVMAADKTRGWSGDSFDRYKEYRYCLSVNVIAFVYAAFQACDLAYQVVTGRRIINHHLRYHFDFFMDQVLAYLLVSAASSAATRVDDWQSNWGKDDFTEMASASIALTFLAFVAFAISSLISGYNLCTLFS

SEQ ID NO: 57253 - protein, 265 aa, Glycine max
  peptide (1)..(265): Ceres Seq. ID no. 14312260
  misc_feature (114)..(248): Pfam Name: Domain of unknown function (DUF588) Pfam Description: Domain of unknown function (DUF588)
  misc_feature (112)..(260): Homolog of NCBI NO: 28876007 NR Description: hypothetical protein [Oryza sativa (japonica
  misc_feature (81)..(262): Homolog of NCBI NO: 18404766 NR Description: expressed integral membrane protein common family
  misc_feature (81)..(262): Homolog of NCBI NO: 7460052 NR Description: hypothetical protein At2g38480 [imported] -
  misc_feature (81)..(262): Homolog of NCBI NO: 21553786 NR Description: unknown [Arabidopsis thaliana]
  misc_feature (152)..(261): Homolog of NCBI NO: 2598569 NR Description: MtN24 [Medicago truncatula]
  misc_feature (171)..(260): Homolog of NCBI NO: 15227628 NR Description: expressed protein [Arabidopsis thaliana]
  misc_feature (1)..(205): Homolog of NCBI NO: 15227628 NR Description: expressed protein [Arabidopsis thaliana]
  misc_feature (32)..(265): Homolog of NCBI NO: 15242642 NR Description: expressed protein [Arabidopsis thaliana]
  misc_feature (66)..(262): Homolog of NCBI NO: 15241975 NR Description: hypothetical protein [Arabidopsis thaliana]
  misc_feature (1)..(260): Homolog of NCBI NO: 27754604 NR Description: unknown protein [Arabidopsis thaliana]
MPSMKTSSSKTSESSTQFDSPHSPLRSFPLFDNADPFHSPQNDNSRAIVIVETTSTQFAQAAPPAPESEHRNPPPEAVVTRPVWPETKSSATVGRTRPRPVAPPSSVVPKREMMAKKVALGFRLSEVVLCLISFSVMAADKTRGWSGDSFDRYKEYRYCLSVNVIAFVYAAFQACDLAYQVVTGRRIINHHLRYHFDFFMDQVLAYLLVSAASSAATRVDDWQSNWGKDDFTEMASASIALTFLAFVAFAISSLISGYNLCTLFS

SEQ ID NO: 57254 - protein, 262 aa, Glycine max
  peptide (1)..(262): Ceres Seq. ID no. 14312261
  misc_feature (111)..(245): Pfam Name: Domain of unknown function (DUF588) Pfam Description: Domain of unknown function (DUF588)
  misc_feature (109)..(257): Homolog of NCBI NO: 28876007 NR Description: hypothetical protein [Oryza sativa (japonica
  misc_feature (78)..(259): Homolog of NCBI NO: 18404766 NR Description: expressed integral membrane protein common family
  misc_feature (78)..(259): Homolog of NCBI NO: 7460052 NR Description: hypothetical protein At2g38480 [imported] -
  misc_feature (78)..(259): Homolog of NCBI NO: 21553786 NR Description: unknown [Arabidopsis thaliana]
  misc_feature (149)..(258): Homolog of NCBI NO: 2598569 NR Description: MtN24 [Medicago truncatula]
  misc_feature (168)..(257): Homolog of NCBI NO: 15227628 NR Description: expressed protein [Arabidopsis thaliana]
  misc_feature (1)..(202): Homolog of NCBI NO: 15227628 NR Description: expressed protein [Arabidopsis thaliana]
  misc_feature (29)..(262): Homolog of NCBI NO: 15242642 NR Description: expressed protein [Arabidopsis thaliana]
  misc_feature (63)..(259): Homolog of NCBI NO: 15241975 NR Description: hypothetical protein [Arabidopsis thaliana]
  misc_feature (1)..(257): Homolog of NCBI NO: 27754604 NR Description: unknown protein [Arabidopsis thaliana]
MKTSSSKTSESSTQFDSPHSPLRSFPLFDNADPFHSPQNDNSRAIVIVETTSTQFAQAAPPAPESEHRNPPPEAVVTRPVWPETKSSATVGRTRPRPVAPPSSVVPKREMMAKKVALGFRLSEVVLCLISFSVMAADKTRGWSGDSFDRYKEYRYCLSVNVIAFVYAAFQACDLAYQVVTGRRIINHHLRYHFDFFMDQVLAYLLVSAASSAATRVDDWQSNWGKDDFTEMASASIALTFLAFVAFAISSLISGYNLCTLFS

SEQ ID NO: 57255 - DNA, 1005 bp, Glycine max
  misc_feature (1)..(1005): Ceres Seq. ID no. 14312224
acaacaattgaagcctctctgtcattttcacctcactgttctctatctctgcacgaacgacacaattgaacccttaaacgacaatggcgtggggacagtgccgttgctgcgtttggtgactgatgatgctgcgcgtcgtcgtcgtggacggaggtcgcatggggtggaatctggtgcggccgtgtgcattgtgatcaatcaatcataatgaggaaagaggattgtttgattttgtgattgaaatcgaaagagaaagaaagagagaaatttgttgtgatggctgaattagtggcccgaacaggtcgacatcagcagcgatacgaacacggttatcgccttattgccgggtgtgttccatttaggtataaagatgactgtggagactcttgttccgagaagattgttgaagtgcttatgattaattcgactagtggaccaggtcttttgtttccaaagggaggttgggagaatgatgaaactgttgaggaggctgcagttagagaagctattgaagaagcaggagttcgaggagacctaatggattttcttgggtactatgaatttaggagtaagaccctccaagatgagtgtagtccagaaggtttatgcaaagcagcaatgtttgcattgtttgtgaaagaggaacttgagtcatggcctgagcaaagcaccagaaaaaggagttgggtggctgtatcagaggcactagcaaactgtcgacatgcatggatgagggatgccctgcattgtttctgtaaatggcatgaggagtgcaagggaggatcaagcctgaactgactaaatatttgtagggggcaatgataaaaaagattagtgacatttattttaggaaagatatttcttatcaggattacatagggtgtggttgagtgtctctttttttttttttttttttgtgttcaaagctattttagaaagtatatttgaaaaccttttttcagaaagataagttatttgatgaaattctgagagcagttttaaaag

SEQ ID NO: 57256 - protein, 173 aa, Glycine max
  peptide (1)..(173): Ceres Seq. ID no. 14312225
  misc_feature (20)..(163): Pfam Name: NUDIX domain Pfam Description: NUDIX domain
  misc_feature (1)..(87): Homolog of NCBI NO: 38605803 NR Description: OSJNBb0014D23.5 [Oryza sativa (japonica
  misc_feature (1)..(159): Homolog of NCBI NO: 25367539 NR Description: unknown protein [imported] - Arabidopsis thaliana
  misc_feature (1)..(159): Homolog of NCBI NO: 22330598 NR Description: MutT/nudix family protein [Arabidopsis thaliana]
  misc_feature (1)..(159): Homolog of NCBI NO: 15221055 NR Description: MutT/nudix family protein [Arabidopsis thaliana]
  misc_feature (1)..(165): Homolog of NCBI NO: 25518008 NR Description: F13K23.14 protein - Arabidopsis thaliana
  misc_feature (1)..(165): Homolog of NCBI NO: 18391450 NR Description: MutT/nudix family protein [Arabidopsis thaliana]
  misc_feature (1)..(161): Homolog of NCBI NO: 15231598 NR Description: MutT/nudix family protein [Arabidopsis thaliana]
  misc_feature (1)..(169): Homolog of NCBI NO: 34900054 NR Description: MutT-like protein~contains ESTs
  misc_feature (1)..(169): Homolog of NCBI NO: 38175436 NR Description: MutT-like protein [Oryza sativa (japonica
  misc_feature (1)..(165): Homolog of NCBI NO: 18399682 NR Description: MutT/nudix family protein [Arabidopsis thaliana]
MAELVARTGRHQQRYEHGYRLIAGCVPFRYKDDCGDSCSEKIVEVLMINSTSGPGLLFPKGGWENDETVEEAAVREAIEEAGVRGDLMDFLGYYEFRSKTLQDECSPEGLCKAAMFALFVKEELESWPEQSTRKRSWVAVSEALANCRHAWMRDALHCFCKWHEECKGGSSLN

SEQ ID NO: 57257 - protein, 127 aa, Glycine max
  peptide (1)..(127): Ceres Seq. ID no. 14312226
  misc_feature (1)..(117): Pfam Name: NUDIX domain Pfam Description: NUDIX domain
  misc_feature (1)..(41): Homolog of NCBI NO: 38605803 NR Description: OSJNBb0014D23.5 [Oryza sativa (japonica
  misc_feature (1)..(113): Homolog of NCBI NO: 25367539 NR Description: unknown protein [imported] - Arabidopsis thaliana
  misc_feature (1)..(113): Homolog of NCBI NO: 22330598 NR Description: MutT/nudix family protein [Arabidopsis thaliana]
  misc_feature (1)..(113): Homolog of NCBI NO: 15221055 NR Description: MutT/nudix family protein [Arabidopsis thaliana]
  misc_feature (1)..(119): Homolog of NCBI NO: 25518008 NR Description: F13K23.14 protein - Arabidopsis thaliana
  misc_feature (1)..(119): Homolog of NCBI NO: 18391450 NR Description: MutT/nudix family protein [Arabidopsis thaliana]
  misc_feature (1)..(115): Homolog of NCBI NO: 15231598 NR Description: MutT/nudix family protein [Arabidopsis thaliana]
  misc_feature (1)..(123): Homolog of NCBI NO: 34900054 NR Description: MutT-like protein~contains ESTs
  misc_feature (1)..(123): Homolog of NCBI NO: 38175436 NR Description: MutT-like protein [Oryza sativa (japonica
  misc_feature (1)..(119): Homolog of NCBI NO: 18399682 NR Description: MutT/nudix family protein [Arabidopsis thaliana]
MINSTSGPGLLFPKGGWENDETVEEAAVREAIEEAGVRGDLMDFLGYYEFRSKTLQDECSPEGLCKAAMFALFVKEELESWPEQSTRKRSWVAVSEALANCRHAWMRDALHCFCKWHEECKGGSSLN

SEQ ID NO: 57258 - protein, 86 aa, Glycine max
  peptide (1)..(86): Ceres Seq. ID no. 14312227
  misc_feature (1)..(76): Pfam Name: NUDIX domain Pfam Description: NUDIX domain
  misc_feature (4)..(69): Homolog of NCBI NO: 38605803 NR Description: OSJNBb0014D23.5 [Oryza sativa (japonica
  misc_feature (1)..(72): Homolog of NCBI NO: 25367539 NR Description: unknown protein [imported] - Arabidopsis thaliana
  misc_feature (1)..(72): Homolog of NCBI NO: 22330598 NR Description: MutT/nudix family protein [Arabidopsis thaliana]
  misc_feature (1)..(72): Homolog of NCBI NO: 15221055 NR Description: MutT/nudix family protein [Arabidopsis thaliana]
  misc_feature (1)..(78): Homolog of NCBI NO: 25518008 NR Description: F13K23.14 protein - Arabidopsis thaliana
  misc_feature (1)..(78): Homolog of NCBI NO: 18391450 NR Description: MutT/nudix family protein [Arabidopsis thaliana]
  misc_feature (1)..(74): Homolog of NCBI NO: 15231598 NR Description: MutT/nudix family protein [Arabidopsis thaliana]
  misc_feature (1)..(82): Homolog of NCBI NO: 34900054 NR Description: MutT-like protein~contains ESTs
  misc_feature (1)..(82): Homolog of NCBI NO: 38175436 NR Description: MutT-like protein [Oryza sativa (japonica
  misc_feature (1)..(78): Homolog of NCBI NO: 18399682 NR Description: MutT/nudix family protein [Arabidopsis thaliana]
MDFLGYYEFRSKTLQDECSPEGLCKAAMFALFVKEELESWPEQSTRKRSWVAVSEALANCRHAWMRDALHCFCKWHEECKGGSSLN

SEQ ID NO: 57259 - DNA, 1504 bp, Glycine max
  misc_feature (1)..(1504): Ceres Seq. ID no. 14314308
atctaacaataaattctcaaaaaataaaaaagctttttttcactgtttggaaattgtggggttgggtatctcaactttcaatttctcattagattctgaacagtgaagcttccatttttgcctttttttttataattatttccaatctattctcaactgatctgattaataataaaaatgaaaaagtaaaaaagtatcggaggttaatataattaggagaaaatggaatttaaaaagagaaagaaagggtggaaattgtaggtgtggtgtgtttcacatttgaagtaacactgaaaagaaaggaaagtgaagttgagagtttaagaagaacaagaaatgggggttggttcccaggatgccatcaagcagttccaggcattcattgaccaagttgaggagcctttgcgaacaacgtttcagaatgttcatcaaggatttgtcactgcaactttaatgcggtttctaaaagcaagggactgggatccttacaaggcacagaaaatgttggttgattgtttaaattggagggtgcaaaatgagattgacaatatattatctaaaccaattgttcctgctgatttatacagagcggtgcgtgattcacaactcataggattatcaggttactcaagagagggtctgcctgtctttgcaattggtgttgggcttagcacatttgacaaagcatctgtccattattatgtgcagtcacacattcaaattaatgaatatcgtgagcgtatagtcttgccttctgcatcagagaagcaagggcgacctattaccacttgtataaaggtcttagacatgactggtctgaagttatcagccctgaatcagattaagttgttaactattatatcatccattgatgatctgaactaccctgagaagacaaatacttattacattgtaaatgctccatacatattttcagcttgttggaaggttgtgaagctacttttacaagagaggacaagaagaaaaatacaggtgttaccaggttgtggacgagatgagctgttgactatcatggattactcgtctctaccacatttctgtagaagagaaggttctggatcatccagacattctgagagtggtagtgaaaattgctattccttggatcatcccttccatcaagggctctacaaccacatcaagcagcaagccagactccgtgaagctgttgaacccatcaagcagggatcgtttcatgtagattttccagtacctccagatgatgaagttgagatcgccaagactatagagtcggagttacacaagtttgagaacggaaatgatgtctaatacgttcttttaggatctactgttgagaccttaaaatcagagatcttttgcttagtacaaccaatgtaggaagaagactccacattagaattacttctatcaggattcggcagaattagttagcattgtttatgtatgttaaaagagaaattaaggggtagtcaacttaatgcaaatcccagctttacatcgt

SEQ ID NO: 57260 - protein, 324 aa, Glycine max
  peptide (1)..(324): Ceres Seq. ID no. 14314309
  misc_feature (135)..(239): Pfam Name: CRAL/TRIO domain Pfam Description: CRAL/TRIO domain
MGVGSQDAIKQFQAFIDQVEEPLRTTFQNVHQGFVTATLMRFLKARDWDPYKAQKMLVDCLNWRVQNEIDNILSKPIVPADLYRAVRDSQLIGLSGYSREGLPVFAIGVGLSTFDKASVHYYVQSHIQINEYRERIVLPSASEKQGRPITTCIKVLDMTGLKLSALNQIKLLTIISSIDDLNYPEKTNTYYIVNAPYIFSACWKVVKLLLQERTRRKIQVLPGCGRDELLTIMDYSSLPHFCRREGSGSSRHSESGSENCYSLDHPFHQGLYNHIKQQARLREAVEPIKQGSFHVDFPVPPDDEVEIAKTIESELHKFENGNDV

SEQ ID NO: 57261 - protein, 285 aa, Glycine max
  peptide (1)..(285): Ceres Seq. ID no. 14314310
  misc_feature (96)..(200): Pfam Name: CRAL/TRIO domain Pfam Description: CRAL/TRIO domain
MRFLKARDWDPYKAQKMLVDCLNWRVQNEIDNILSKPIVPADLYRAVRDSQLIGLSGYSREGLPVFAIGVGLSTFDKASVHYYVQSHIQINEYRERIVLPSASEKQGRPITTCIKVLDMTGLKLSALNQIKLLTIISSIDDLNYPEKTNTYYIVNAPYIFSACWKVVKLLLQERTRRKIQVLPGCGRDELLTIMDYSSLPHFCRREGSGSSRHSESGSENCYSLDHPFHQGLYNHIKQQARLREAVEPIKQGSFHVDFPVPPDDEVEIAKTIESELHKFENGNDV

SEQ ID NO: 57262 - protein, 269 aa, Glycine max
  peptide (1)..(269): Ceres Seq. ID no. 14314311
  misc_feature (80)..(184): Pfam Name: CRAL/TRIO domain Pfam Description: CRAL/TRIO domain
MLVDCLNWRVQNEIDNILSKPIVPADLYRAVRDSQLIGLSGYSREGLPVFAIGVGLSTFDKASVHYYVQSHIQINEYRERIVLPSASEKQGRPITTCIKVLDMTGLKLSALNQIKLLTIISSIDDLNYPEKTNTYYIVNAPYIFSACWKVVKLLLQERTRRKIQVLPGCGRDELLTIMDYSSLPHFCRREGSGSSRHSESGSENCYSLDHPFHQGLYNHIKQQARLREAVEPIKQGSFHVDFPVPPDDEVEIAKTIESELHKFENGNDV

SEQ ID NO: 57263 - DNA, 1199 bp, Glycine max
  misc_feature (1)..(1199): Ceres Seq. ID no. 14312148
agaagtcactagcagcacacaaaaaaaaacacattccctcaaattcctctcttgtccacaaacatgaagctatctgcgaaacccatttcgagtccaggtcgcacagacaagttccctcccccactcatgaggtttctcagaagcaatgcgggcagcagaagcagaaggtccaggtcaagccctatgttcgtacgaaagaaaaacaccaccttcgaaacccacacccaggaaccctcttcccccaaggtcacgtgcatgggccaggtccgagtcaaacgcgcttccaaacaacccaccacccaacccgacttagctcccactcggtgccgccgccgccgccgccgctgctgctgcttctggatccgaaggcccaacaacccctgccgctgcaatcccctctggcccaactggcccttcttccgtcgaaagcccaccaagctcaaacaagactcccagtccgagcccaatttctacgcccacgaagaatcggaattaccgttccaagagagagtcaatgtggataaggatagtgattttgcttccaattccagcactcccccgagaaacgctctgcttttaactcgctgtagatccgctccgtacagatcctcctctttggctagtaggttctggagttcccccgtcaaggaccaagaaacggaactacaacacacttccgagggaccccaaacggaacccgaattagggtttctaacagaaaaaattgcttcactcaccgaaccagaaaggttgaggaagttgaaacagaaacagagtctgtgttacgtcctactgtactcactaggtgcaaatcggaaccggcgagaaccggacacagacttgaccctctggtaaataatttgttgaaaaaaagaaggttggaatttgattaattaatcccattatttttaattcgtacctatctccatattttgcttccttcctactactcttcatttaaatatagtcttttttatatgtaattgaattgaatgtgtttgagtctttgacacctagtcgttggtaacataaaaaggtatgagcgtgtagaaaatagaaagtagaaagagaggggaacgtatagaagtgatttcaggtacttattttctgtcctcgtagttaatgcatttcttgtcattacactacacaagcctgaagcctgaatttcttttttctctgccaacgatgttaagaacctg

SEQ ID NO: 57264 - protein, 263 aa, Glycine max
  peptide (1)..(263): Ceres Seq. ID no. 14312149
  misc_feature (22)..(72): Pfam Name: Protamine P1 Pfam Description: Protamine P1
  misc_feature (164)..(213): Homolog of NCBI NO: 15229495 NR Description: hypothetical protein [Arabidopsis thaliana]
  misc_feature (1)..(71): Homolog of NCBI NO: 15229495 NR Description: hypothetical protein [Arabidopsis thaliana]
  misc_feature (26)..(238): Homolog of NCBI NO: 15228086 NR Description: expressed protein [Arabidopsis thaliana]
  misc_feature (4)..(163): Homolog of NCBI NO: 15228086 NR Description: expressed protein [Arabidopsis thaliana]
  misc_feature (1)..(256): Homolog of NCBI NO: 15242640 NR Description: expressed protein [Arabidopsis thaliana]
MKLSAKPISSPGRTDKFPPPLMRFLRSNAGSRSRRSRSSPMFVRKKNTTFETHTQEPSSPKVTCMGQVRVKRASKQPTTQPDLAPTRCRRRRRRCCCFWIRRPNNPCRCNPLWPNWPFFRRKPTKLKQDSQSEPNFYAHEESELPFQERVNVDKDSDFASNSSTPPRNALLLTRCRSAPYRSSSLASRFWSSPVKDQETELQHTSEGPQTEPELGFLTEKIASLTEPERLRKLKQKQSLCYVLLYSLGANRNRREPDTDLTLW

SEQ ID NO: 57265 - protein, 242 aa, Glycine max
  peptide (1)..(242): Ceres Seq. ID no. 14312150
  misc_feature (1)..(51): Pfam Name: Protamine P1 Pfam Description: Protamine P1
  misc_feature (143)..(192): Homolog of NCBI NO: 15229495 NR Description: hypothetical protein [Arabidopsis thaliana]
  misc_feature (1)..(50): Homolog of NCBI NO: 15229495 NR Description: hypothetical protein [Arabidopsis thaliana]
  misc_feature (5)..(217): Homolog of NCBI NO: 15228086 NR Description: expressed protein [Arabidopsis thaliana]
  misc_feature (1)..(142): Homolog of NCBI NO: 15228086 NR Description: expressed protein [Arabidopsis thaliana]
  misc_feature (1)..(235): Homolog of NCBI NO: 15242640 NR Description: expressed protein [Arabidopsis thaliana]
MRFLRSNAGSRSRRSRSSPMFVRKKNTTFETHTQEPSSPKVTCMGQVRVKRASKQPTTQPDLAPTRCRRRRRRCCCFWIRRPNNPCRCNPLWPNWPFFRRKPTKLKQDSQSEPNFYAHEESELPFQERVNVDKDSDFASNSSTPPRNALLLTRCRSAPYRSSSLASRFWSSPVKDQETELQHTSEGPQTEPELGFLTEKIASLTEPERLRKLKQKQSLCYVLLYSLGANRNRREPDTDLTLW

SEQ ID NO: 57266 - protein, 223 aa, Glycine max
  peptide (1)..(223): Ceres Seq. ID no. 14312151
  misc_feature (124)..(173): Homolog of NCBI NO: 15229495 NR Description: hypothetical protein [Arabidopsis thaliana]
  misc_feature (1)..(31): Homolog of NCBI NO: 15229495 NR Description: hypothetical protein [Arabidopsis thaliana]
  misc_feature (1)..(198): Homolog of NCBI NO: 15228086 NR Description: expressed protein [Arabidopsis thaliana]
  misc_feature (1)..(123): Homolog of NCBI NO: 15228086 NR Description: expressed protein [Arabidopsis thaliana]
  misc_feature (1)..(216): Homolog of NCBI NO: 15242640 NR Description: expressed protein [Arabidopsis thaliana]
MFVRKKNTTFETHTQEPSSPKVTCMGQVRVKRASKQPTTQPDLAPTRCRRRRRRCCCFWIRRPNNPCRCNPLWPNWPFFRRKPTKLKQDSQSEPNFYAHEESELPFQERVNVDKDSDFASNSSTPPRNALLLTRCRSAPYRSSSLASRFWSSPVKDQETELQHTSEGPQTEPELGFLTEKIASLTEPERLRKLKQKQSLCYVLLYSLGANRNRREPDTDLTLW

SEQ ID NO: 57267 - DNA, 716 bp, Glycine max
  misc_feature (1)..(716): Ceres Seq. ID no. 15170388
atttgtattagaggctctagcttatgagatggatccaatggttgtgccagaaggatatgtgtttgtaatgggcgacaatcggaataaaagctttgattctcataactggggtcccctgccggttgagaacattgttggtaggtccatgtttcggtactggcctccatccaaggcatctgacactgatacccatcgtaaactcccacctggtaacaaacctgtggcaatttcttgacatgattcccgcagctttgtgaaggtgatgaaggtttccagatacggtcgtttgttctaaattgttagcttgagctgactttgcacacagtttgggatgaatatcttattcattgatacaaatttgtcgatgacctaataataccattaagcgttcattagtgccatctgagatgtatttctattgctgaagtgcggggagaaaaaaaagaattaaaaaagcatgatgattttgcccccccccaaaaaaaaaaatgaaacatggtgattgatttgttttgtattctttaaggtatgcatagcgtatgaatgctagaaactggaggaaagatttgacatggagctaattgactccctgtgagttccataatcaagcttcctcccattttgaatctgtctgtaatgccattcagtcatacatgaaattgtatggacttgcctattttaaaataataaagtaagaatgcaatttcactctttcc

SEQ ID NO: 57268 - protein, 77 aa, Glycine max
  peptide (1)..(77): Ceres Seq. ID no. 15170389
  misc_feature (1)..(54): Homolog of NCBI NO: 33865530 NR Description: leader peptidase I [Synechococcus sp. WH 8102]
  misc_feature (1)..(54): Homolog of NCBI NO: 23112452 NR Description: hypothetical protein [Desulfitobacterium
  misc_feature (1)..(61): Homolog of NCBI NO: 30687572 NR Description: chloroplast thylakoidal processing peptidase
  misc_feature (1)..(61): Homolog of NCBI NO: 25082936 NR Description: chloroplast thylakoidal processing peptidase,
  misc_feature (1)..(61): Homolog of NCBI NO: 9294054 NR Description: contains similarity to signal peptidase (leader
  misc_feature (1)..(57): Homolog of NCBI NO: 31415933 NR Description: putative chloroplast thylakoidal processing
  misc_feature (1)..(67): Homolog of NCBI NO: 21553622 NR Description: chloroplast thylakoidal processing peptidase,
  misc_feature (1)..(67): Homolog of NCBI NO: 15222236 NR Description: chloroplast thylakoidal processing peptidase
  misc_feature (1)..(77): Homolog of NCBI NO: 30684587 NR Description: signal peptidase I -related [Arabidopsis
  misc_feature (1)..(77): Homolog of NCBI NO: 25408074 NR Description: probable signal peptidase I [imported] -
FVLEALAYEMDPMVVPEGYVFVMGDNRNKSFDSHNWGPLPVENIVGRSMFRYWPPSKASDTDTHRKLPPGNKPVAIS

SEQ ID NO: 57269 - protein, 68 aa, Glycine max
  peptide (1)..(68): Ceres Seq. ID no. 15170390
  misc_feature (1)..(45): Homolog of NCBI NO: 33865530 NR Description: leader peptidase I [Synechococcus sp. WH 8102]
  misc_feature (1)..(45): Homolog of NCBI NO: 23112452 NR Description: hypothetical protein [Desulfitobacterium
  misc_feature (1)..(52): Homolog of NCBI NO: 30687572 NR Description: chloroplast thylakoidal processing peptidase
  misc_feature (1)..(52): Homolog of NCBI NO: 25082936 NR Description: chloroplast thylakoidal processing peptidase,
  misc_feature (1)..(52): Homolog of NCBI NO: 9294054 NR Description: contains similarity to signal peptidase (leader
  misc_feature (1)..(48): Homolog of NCBI NO: 31415933 NR Description: putative chloroplast thylakoidal processing
  misc_feature (1)..(58): Homolog of NCBI NO: 21553622 NR Description: chloroplast thylakoidal processing peptidase,
  misc_feature (1)..(58): Homolog of NCBI NO: 15222236 NR Description: chloroplast thylakoidal processing peptidase
  misc_feature (1)..(68): Homolog of NCBI NO: 30684587 NR Description: signal peptidase I -related [Arabidopsis
  misc_feature (1)..(68): Homolog of NCBI NO: 25408074 NR Description: probable signal peptidase I [imported] -
MDPMVVPEGYVFVMGDNRNKSFDSHNWGPLPVENIVGRSMFRYWPPSKASDTDTHRKLPPGNKPVAIS

SEQ ID NO: 57270 - protein, 65 aa, Glycine max
  peptide (1)..(65): Ceres Seq. ID no. 15170391
  misc_feature (1)..(42): Homolog of NCBI NO: 33865530 NR Description: leader peptidase I [Synechococcus sp. WH 8102]
  misc_feature (1)..(42): Homolog of NCBI NO: 23112452 NR Description: hypothetical protein [Desulfitobacterium
  misc_feature (1)..(49): Homolog of NCBI NO: 30687572 NR Description: chloroplast thylakoidal processing peptidase
  misc_feature (1)..(49): Homolog of NCBI NO: 25082936 NR Description: chloroplast thylakoidal processing peptidase,
  misc_feature (1)..(49): Homolog of NCBI NO: 9294054 NR Description: contains similarity to signal peptidase (leader
  misc_feature (1)..(45): Homolog of NCBI NO: 31415933 NR Description: putative chloroplast thylakoidal processing
  misc_feature (1)..(55): Homolog of NCBI NO: 21553622 NR Description: chloroplast thylakoidal processing peptidase,
  misc_feature (1)..(55): Homolog of NCBI NO: 15222236 NR Description: chloroplast thylakoidal processing peptidase
  misc_feature (1)..(65): Homolog of NCBI NO: 30684587 NR Description: signal peptidase I -related [Arabidopsis
  misc_feature (1)..(65): Homolog of NCBI NO: 25408074 NR Description: probable signal peptidase I [imported] -
MVVPEGYVFVMGDNRNKSFDSHNWGPLPVENIVGRSMFRYWPPSKASDTDTHRKLPPGNKPVAIS

SEQ ID NO: 57271 - DNA, 1700 bp, Glycine max
  misc_feature (1)..(1700): Ceres Seq. ID no. 14311755
gtaaagtatcttccatttgaaaacaacccccattcattcattcactcactcaccaacaccaccaaacaaagccttgctggtggcggacactccgaggggcctctctctcctctccctctccacaataaaacccaaaaaactcacacaacccgacccacaacacaagagaaaaagcgcactgctcgctcgtgttctgtttctctctgtttctccgttctctgtttttttttcagatctcgaaaaatgcagagcgcggctttcactttctctccctctctccctctccgcaacccttcccctaactcttggaggagaccctctctttctctccgtctccacgccaaacacagcaacaacaacaacaacagtaacagcaccgaaggcgttaactccaatggcgtctcttccacttccttcactcgccgatcttggactcttcttccttcttcttctttcaaattcaggcctcttccttcttcacctcctcgcgccgccgaaaacgccgttcccgaaagcgcagcagcacccgtcgaaaacccgctcttcaaaactctcgaactcggcgccttgtttggcttatggtacctcttcaacatctacttcaacatctacaacaaacaggtgttgaaggcgtttcattatccggtaactgtgactgttgttcagtttgccgttgggactgtgctagtggcatttatgtggggtttgaatctctataagaggccgaaactcagtggtgctatgcttggagcgattttgccgctggctgcagtgcatactttggggaaccttttcactaatatgagtcttgggaaggtggccgtgtctttcactcacactatcaaagccatggagcctttcttttcagtcatcctttctgccatgttccttggagagtttcctacaccgtgggtggttggttcccttgtgcctattgttggtggagttgcactggcgtctgttaccgaggcctctttcaattgggctggattttggagtgcaatggcatctaatgtgacaaatcaatctcgtaatgttcttagcaaaaaggccatggttaagaaagaggattctatggacaacattactctcttctctataataactgtaatgtccttcttcttgttagcacctgtggctatcttcatggagggtgtcaaatttacccctgcttacttgcaatctgctggggtgaatgttagacaactttacatcagatctcttcttgctgctctctgtttccatgcgtatcaacaagtttcgtatatgatattgcaaagggtatcacctgttacccactctgtgggtaattgtgtgaagcgggttgtggtcattgtgagctctgtcatcttcttccaaacacctgtctcacctgtgaatgcttttgggactgctatagctcttgctggagttttcctctattcaagggtgaagcgtattaaggcaaagccaaaaacagcttaattttcaatggtaaaattttgttagttccattgaggaagccaaatagttgcaatctgcaattctgaatttctttgtaggtgagatagggaatgaggattatctttattgatcctcagtcctcacatttcctttttatttcttctccttaagttaccttgtggatttcattatttatgtttgagtaagtgcctaatggttctgctccatgaaaaaattatcctcttctgaattttgct

SEQ ID NO: 57272 - protein, 487 aa, Glycine max
  peptide (1)..(487): Ceres Seq. ID no. 14311756
  misc_feature (196)..(321): Pfam Name: Integral membrane protein DUF6 Pfam Description: Integral membrane protein DUF6
  misc_feature (82)..(487): Homolog of NCBI NO: 29647427 NR Description: putative phosphoenolpyruvate/phosphate
  misc_feature (164)..(487): Homolog of NCBI NO: 13991929 NR Description: phosphoenolpyruvate/phosphate translocator [Oryza
  misc_feature (82)..(487): Homolog of NCBI NO: 9295275 NR Description: phosphoenolpyruvate/phosphate translocator
  misc_feature (82)..(487): Homolog of NCBI NO: 7489170 NR Description: phosphate/phosphoenolpyruvate translocator
  misc_feature (82)..(487): Homolog of NCBI NO: 7546829 NR Description: phosphate/phosphoenolpyruvate translocator
  misc_feature (82)..(487): Homolog of NCBI NO: 1778141 NR Description: phosphate/phosphoenolpyruvate translocator
  misc_feature (82)..(487): Homolog of NCBI NO: 21554233 NR Description: phosphate/phosphoenolpyruvate translocator
  misc_feature (82)..(487): Homolog of NCBI NO: 15242801 NR Description: triose phosphate/phosphate translocator, putative
  misc_feature (82)..(487): Homolog of NCBI NO: 1706110 NR Description: Triose phosphate/phosphate translocator,
  misc_feature (82)..(486): Homolog of NCBI NO: 7489171 NR Description: phosphate/phosphoenolpyruvate translocator
VKYLPFENNPHSFIHSLTNTTKQSLAGGGHSEGPLSPLPLHNKTQKTHTTRPTTQEKKRTARSCSVSLCFSVLCFFFRSRKMQSAAFTFSPSLPLRNPSPNSWRRPSLSLRLHAKHSNNNNNSNSTEGVNSNGVSSTSFTRRSWTLLPSSSFKFRPLPSSPPRAAENAVPESAAAPVENPLFKTLELGALFGLWYLFNIYFNIYNKQVLKAFHYPVTVTVVQFAVGTVLVAFMWGLNLYKRPKLSGAMLGAILPLAAVHTLGNLFTNMSLGKVAVSFTHTIKAMEPFFSVILSAMFLGEFPTPWVVGSLVPIVGGVALASVTEASFNWAGFWSAMASNVTNQSRNVLSKKAMVKKEDSMDNITLFSIITVMSFFLLAPVAIFMEGVKFTPAYLQSAGVNVRQLYIRSLLAALCFHAYQQVSYMILQRVSPVTHSVGNCVKRVVVIVSSVIFFQTPVSPVNAFGTAIALAGVFLYSRVKRIKAKPKTA

SEQ ID NO: 57273 - protein, 406 aa, Glycine max
  peptide (1)..(406): Ceres Seq. ID no. 14311757
  misc_feature (115)..(240): Pfam Name: Integral membrane protein DUF6 Pfam Description: Integral membrane protein DUF6
  misc_feature (1)..(406): Homolog of NCBI NO: 29647427 NR Description: putative phosphoenolpyruvate/phosphate
  misc_feature (83)..(406): Homolog of NCBI NO: 13991929 NR Description: phosphoenolpyruvate/phosphate translocator [Oryza
  misc_feature (1)..(406): Homolog of NCBI NO: 9295275 NR Description: phosphoenolpyruvate/phosphate translocator
  misc_feature (1)..(406): Homolog of NCBI NO: 7489170 NR Description: phosphate/phosphoenolpyruvate translocator
  misc_feature (1)..(406): Homolog of NCBI NO: 7546829 NR Description: phosphate/phosphoenolpyruvate translocator
  misc_feature (1)..(406): Homolog of NCBI NO: 1778141 NR Description: phosphate/phosphoenolpyruvate translocator
  misc_feature (1)..(406): Homolog of NCBI NO: 21554233 NR Description: phosphate/phosphoenolpyruvate translocator
  misc_feature (1)..(406): Homolog of NCBI NO: 15242801 NR Description: triose phosphate/phosphate translocator, putative
  misc_feature (1)..(406): Homolog of NCBI NO: 1706110 NR Description: Triose phosphate/phosphate translocator,
  misc_feature (1)..(405): Homolog of NCBI NO: 7489171 NR Description: phosphate/phosphoenolpyruvate translocator
MQSAAFTFSPSLPLRNPSPNSWRRPSLSLRLHAKHSNNNNNSNSTEGVNSNGVSSTSFTRRSWTLLPSSSFKFRPLPSSPPRAAENAVPESAAAPVENPLFKTLELGALFGLWYLFNIYFNIYNKQVLKAFHYPVTVTVVQFAVGTVLVAFMWGLNLYKRPKLSGAMLGAILPLAAVHTLGNLFTNMSLGKVAVSFTHTIKAMEPFFSVILSAMFLGEFPTPWVVGSLVPIVGGVALASVTEASFNWAGFWSAMASNVTNQSRNVLSKKAMVKKEDSMDNITLFSIITVMSFFLLAPVAIFMEGVKFTPAYLQSAGVNVRQLYIRSLLAALCFHAYQQVSYMILQRVSPVTHSVGNCVKRVVVIVSSVIFFQTPVSPVNAFGTAIALAGVFLYSRVKRIKAKPKTA

SEQ ID NO: 57274 - protein, 255 aa, Glycine max
  peptide (1)..(255): Ceres Seq. ID no. 14311758
  misc_feature (1)..(89): Pfam Name: Integral membrane protein DUF6 Pfam Description: Integral membrane protein DUF6
  misc_feature (1)..(255): Homolog of NCBI NO: 29647427 NR Description: putative phosphoenolpyruvate/phosphate
  misc_feature (1)..(255): Homolog of NCBI NO: 13991929 NR Description: phosphoenolpyruvate/phosphate translocator [Oryza
  misc_feature (1)..(255): Homolog of NCBI NO: 9295275 NR Description: phosphoenolpyruvate/phosphate translocator
  misc_feature (1)..(255): Homolog of NCBI NO: 7489170 NR Description: phosphate/phosphoenolpyruvate translocator
  misc_feature (1)..(255): Homolog of NCBI NO: 7546829 NR Description: phosphate/phosphoenolpyruvate translocator
  misc_feature (1)..(255): Homolog of NCBI NO: 1778141 NR Description: phosphate/phosphoenolpyruvate translocator
  misc_feature (1)..(255): Homolog of NCBI NO: 21554233 NR Description: phosphate/phosphoenolpyruvate translocator
  misc_feature (1)..(255): Homolog of NCBI NO: 15242801 NR Description: triose phosphate/phosphate translocator, putative
  misc_feature (1)..(255): Homolog of NCBI NO: 1706110 NR Description: Triose phosphate/phosphate translocator,
  misc_feature (1)..(254): Homolog of NCBI NO: 7489171 NR Description: phosphate/phosphoenolpyruvate translocator
MWGLNLYKRPKLSGAMLGAILPLAAVHTLGNLFTNMSLGKVAVSFTHTIKAMEPFFSVILSAMFLGEFPTPWVVGSLVPIVGGVALASVTEASFNWAGFWSAMASNVTNQSRNVLSKKAMVKKEDSMDNITLFSIITVMSFFLLAPVAIFMEGVKFTPAYLQSAGVNVRQLYIRSLLAALCFHAYQQVSYMILQRVSPVTHSVGNCVKRVVVIVSSVIFFQTPVSPVNAFGTAIALAGVFLYSRVKRIKAKPKTA

SEQ ID NO: 57275 - DNA, 585 bp, Glycine max
  misc_feature (1)..(585): Ceres Seq. ID no. 13638213
ccttcactctcttctccgatctcaaaatgcccgccgtttatggagctcgcttgaccaccttcgaagactccgagaaggagagtgaatacggttacgttcgcaaggtatcaggaccagtcgtcgttgcagatggcatggctggggctgctatgtatgaactcgtgcgtgttggtcatgataatctcattggtgaaattattcgtctcgaagggaattctgctaccatccaagtttatgaggaaactgctggcttgatggttaatgatccggtgttacggactcacaagcctttatccgtggagttgggacctggaatactggggaatattttcgatggaattcagaggcctttgaaaactattgctaaacgatctggtgatgtctatattcctcgtggtgtctctgttccagcactcgacaaagatacactttgggaatttcaacctaagaaaattggtgaaggcgaccttttaactggtggagatatggtagctttgtttagtttaattaattaacctaattaatgaaattcgaagtttatctctatgaacaatgtagacttggtccacattttgtggctggtgt

SEQ ID NO: 57276 - protein, 170 aa, Glycine max
  peptide (1)..(170): Ceres Seq. ID no. 13638214
  misc_feature (32)..(94): Pfam Name: ATP synthase alpha/beta family, beta-barrel domain Pfam Description: ATP synthase alpha/beta family, beta-barrel
  misc_feature (9)..(165): Homolog of NCBI NO: 1929027 NR Description: BV-70/5 [Beta vulgaris]
  misc_feature (9)..(164): Homolog of NCBI NO: 27884018 NR Description: vacuolar H+-ATPase A2 subunit isoform
  misc_feature (9)..(164): Homolog of NCBI NO: 27883932 NR Description: vacuolar H+-ATPase A1 subunit isoform
  misc_feature (9)..(164): Homolog of NCBI NO: 13235340 NR Description: putative vacuolar ATP Synthase subunit A
  misc_feature (9)..(164): Homolog of NCBI NO: 15982954 NR Description: V-ATPase catalytic subunit A [Prunus persica]
  misc_feature (9)..(164): Homolog of NCBI NO: 12585490 NR Description: Vacuolar ATP synthase catalytic subunit A A subunit) (Vacuolar proton pump alpha subunit) (V-ATPase 69 kDa
  misc_feature (9)..(164): Homolog of NCBI NO: 137460 NR Description: Vacuolar ATP synthase catalytic subunit A A subunit) (Vacuolar proton pump alpha subunit) (V-ATPase 69 kDa
  misc_feature (9)..(164): Homolog of NCBI NO: 401322 NR Description: Vacuolar ATP synthase catalytic subunit A A subunit) (Vacuolar proton pump alpha subunit) (V-ATPase 69 kDa
  misc_feature (9)..(164): Homolog of NCBI NO: 2506211 NR Description: Vacuolar ATP synthase catalytic subunit A A subunit) (Vacuolar proton pump alpha subunit) (V-ATPase 69 kDa
  misc_feature (9)..(164): Homolog of NCBI NO: 3169287 NR Description: vacuolar H+-ATPase catalytic subunit [Gossypium
FTLFSDLKMPAVYGARLTTFEDSEKESEYGYVRKVSGPVVVADGMAGAAMYELVRVGHDNLIGEIIRLEGNSATIQVYEETAGLMVNDPVLRTHKPLSVELGPGILGNIFDGIQRPLKTIAKRSGDVYIPRGVSVPALDKDTLWEFQPKKIGEGDLLTGGDMVALFSLIN

SEQ ID NO: 57277 - protein, 162 aa, Glycine max
  peptide (1)..(162): Ceres Seq. ID no. 13638215
  misc_feature (24)..(86): Pfam Name: ATP synthase alpha/beta family, beta-barrel domain Pfam Description: ATP synthase alpha/beta family, beta-barrel
  misc_feature (1)..(157): Homolog of NCBI NO: 1929027 NR Description: BV-70/5 [Beta vulgaris]
  misc_feature (1)..(156): Homolog of NCBI NO: 27884018 NR Description: vacuolar H+-ATPase A2 subunit isoform
  misc_feature (1)..(156): Homolog of NCBI NO: 27883932 NR Description: vacuolar H+-ATPase A1 subunit isoform
  misc_feature (1)..(156): Homolog of NCBI NO: 13235340 NR Description: putative vacuolar ATP Synthase subunit A
  misc_feature (1)..(156): Homolog of NCBI NO: 15982954 NR Description: V-ATPase catalytic subunit A [Prunus persica]
  misc_feature (1)..(156): Homolog of NCBI NO: 12585490 NR Description: Vacuolar ATP synthase catalytic subunit A A subunit) (Vacuolar proton pump alpha subunit) (V-ATPase 69 kDa
  misc_feature (1)..(156): Homolog of NCBI NO: 137460 NR Description: Vacuolar ATP synthase catalytic subunit A A subunit) (Vacuolar proton pump alpha subunit) (V-ATPase 69 kDa
  misc_feature (1)..(156): Homolog of NCBI NO: 401322 NR Description: Vacuolar ATP synthase catalytic subunit A A subunit) (Vacuolar proton pump alpha subunit) (V-ATPase 69 kDa
  misc_feature (1)..(156): Homolog of NCBI NO: 2506211 NR Description: Vacuolar ATP synthase catalytic subunit A A subunit) (Vacuolar proton pump alpha subunit) (V-ATPase 69 kDa
  misc_feature (1)..(156): Homolog of NCBI NO: 3169287 NR Description: vacuolar H+-ATPase catalytic subunit [Gossypium
MPAVYGARLTTFEDSEKESEYGYVRKVSGPVVVADGMAGAAMYELVRVGHDNLIGEIIRLEGNSATIQVYEETAGLMVNDPVLRTHKPLSVELGPGILGNIFDGIQRPLKTIAKRSGDVYIPRGVSVPALDKDTLWEFQPKKIGEGDLLTGGDMVALFSLIN

SEQ ID NO: 57278 - protein, 126 aa, Glycine max
  peptide (1)..(126): Ceres Seq. ID no. 13638216
  misc_feature (1)..(50): Pfam Name: ATP synthase alpha/beta family, beta-barrel domain Pfam Description: ATP synthase alpha/beta family, beta-barrel
  misc_feature (1)..(121): Homolog of NCBI NO: 1929027 NR Description: BV-70/5 [Beta vulgaris]
  misc_feature (1)..(120): Homolog of NCBI NO: 27884018 NR Description: vacuolar H+-ATPase A2 subunit isoform
  misc_feature (1)..(120): Homolog of NCBI NO: 27883932 NR Description: vacuolar H+-ATPase A1 subunit isoform
  misc_feature (1)..(120): Homolog of NCBI NO: 13235340 NR Description: putative vacuolar ATP Synthase subunit A
  misc_feature (1)..(120): Homolog of NCBI NO: 15982954 NR Description: V-ATPase catalytic subunit A [Prunus persica]
  misc_feature (1)..(120): Homolog of NCBI NO: 12585490 NR Description: Vacuolar ATP synthase catalytic subunit A A subunit) (Vacuolar proton pump alpha subunit) (V-ATPase 69 kDa
  misc_feature (1)..(120): Homolog of NCBI NO: 137460 NR Description: Vacuolar ATP synthase catalytic subunit A A subunit) (Vacuolar proton pump alpha subunit) (V-ATPase 69 kDa
  misc_feature (1)..(120): Homolog of NCBI NO: 401322 NR Description: Vacuolar ATP synthase catalytic subunit A A subunit) (Vacuolar proton pump alpha subunit) (V-ATPase 69 kDa
  misc_feature (1)..(120): Homolog of NCBI NO: 2506211 NR Description: Vacuolar ATP synthase catalytic subunit A A subunit) (Vacuolar proton pump alpha subunit) (V-ATPase 69 kDa
  misc_feature (1)..(120): Homolog of NCBI NO: 3169287 NR Description: vacuolar H+-ATPase catalytic subunit [Gossypium
MAGAAMYELVRVGHDNLIGEIIRLEGNSATIQVYEETAGLMVNDPVLRTHKPLSVELGPGILGNIFDGIQRPLKTIAKRSGDVYIPRGVSVPALDKDTLWEFQPKKIGEGDLLTGGDMVALFSLIN

SEQ ID NO: 57279 - DNA, 1146 bp, Glycine max
  misc_feature (1)..(1146): Ceres Seq. ID no. 15171359
acatccaaatgtcttctttcctcttagcttcgcttgcacttttgttttgcatctcctccttggagaagagctttgcctttcaagcaacaaaggaaagcaacaatcttcgtcaatatcattttgttcacctcaactctctatttccatcatcttcttgcagctcttctgccaaaggatgctcctcatccacagatgcatcatgcatatatgacgtcaaatacggtgacaattccatctcccgcggcttcttgagtcaggagcgccttaccatcaccgccaccgacatcgtccacgacttcctctttggctgtggccaagacaacgagggcctcttcaggggcaccgccggcctcatgggcctcagccgccaccccatttcctttgtccaacaaacctcctcaatttacaacaaaattttctcctactgtctcccctccacccccagctcccttggccacctcaccttcggcgcttccgccgccaccaatgctaacctcaaatacactcccttttccacaatctccggcgaaaactccttctacggtctcgacatcgtcggcatctccgttggcggcaccaaactccctgctgtctcctcctccaccttctccgccggtggctccatcatcgactccggcaccgtgatcacgcggttgcctccgaccgcgtacgccgcgctccggtcggcatttcggcagtttatgatgaagtaccccgttgcctatgggacccgcctacttgacacgtgttatgatttcagtgggtataaggagatttcagttccgaggatagattttgaatttgccggtggcgtcaaggtggagttgccattggtggggatactctatggggaaagtgcgcaacaactgtgtttggcttttgctgcaaatgggaatggcaatgatattacgatatttgggaatgtgcaacaaaagacactagaggtcgtgtatgatgttgagggtgggaggatagggtttggtgctgctgggtgcaactgaagttagtttgattaatagtggtgttaattaaacatgctttgggcttgttagggaggaagaaatcttaattggctctggcatttttaattactattgttgttgttactggaaagtactctaaaacatatgaaaaaataaataaagc

SEQ ID NO: 57280 - protein, 332 aa, Glycine max
  peptide (1)..(332): Ceres Seq. ID no. 15171360
  misc_feature (51)..(327): Pfam Name: Eukaryotic aspartyl protease Pfam Description: Eukaryotic aspartyl protease
  misc_feature (53)..(331): Homolog of NCBI NO: 34912520 NR Description: chloroplast nucleoid DNA-binding protein
  misc_feature (46)..(331): Homolog of NCBI NO: 21595063 NR Description: putative aspartyl protease [Arabidopsis thaliana]
  misc_feature (46)..(331): Homolog of NCBI NO: 25406599 NR Description: probable aspartyl proteinase, 105611-106921
  misc_feature (46)..(331): Homolog of NCBI NO: 18412482 NR Description: aspartyl protease -related [Arabidopsis thaliana]
  misc_feature (44)..(331): Homolog of NCBI NO: 15238250 NR Description: nucleoid DNA-binding protein cnd41 - like protein
  misc_feature (44)..(331): Homolog of NCBI NO: 24417232 NR Description: unknown [Arabidopsis thaliana]
  misc_feature (51)..(332): Homolog of NCBI NO: 24430421 NR Description: 41 kD chloroplast nucleoid DNA binding protein
  misc_feature (51)..(332): Homolog of NCBI NO: 7489168 NR Description: nucleoid DNA-binding protein cnd41, chloroplast -
  misc_feature (49)..(332): Homolog of NCBI NO: 22326716 NR Description: nucleoid DNA-binding protein cnd41 - like protein
  misc_feature (49)..(332): Homolog of NCBI NO: 11358588 NR Description: nucleoid DNA-binding protein cnd41-like protein -
IQMSSFLLASLALLFCISSLEKSFAFQATKESNNLRQYHFVHLNSLFPSSSCSSSAKGCSSSTDASCIYDVKYGDNSISRGFLSQERLTITATDIVHDFLFGCGQDNEGLFRGTAGLMGLSRHPISFVQQTSSIYNKIFSYCLPSTPSSLGHLTFGASAATNANLKYTPFSTISGENSFYGLDIVGISVGGTKLPAVSSSTFSAGGSIIDSGTVITRLPPTAYAALRSAFRQFMMKYPVAYGTRLLDTCYDFSGYKEISVPRIDFEFAGGVKVELPLVGILYGESAQQLCLAFAANGNGNDITIFGNVQQKTLEVVYDVEGGRIGFGAAGCN

SEQ ID NO: 57281 - protein, 330 aa, Glycine max
  peptide (1)..(330): Ceres Seq. ID no. 15171361
  misc_feature (49)..(325): Pfam Name: Eukaryotic aspartyl protease Pfam Description: Eukaryotic aspartyl protease
  misc_feature (51)..(329): Homolog of NCBI NO: 34912520 NR Description: chloroplast nucleoid DNA-binding protein
  misc_feature (44)..(329): Homolog of NCBI NO: 21595063 NR Description: putative aspartyl protease [Arabidopsis thaliana]
  misc_feature (44)..(329): Homolog of NCBI NO: 25406599 NR Description: probable aspartyl proteinase, 105611-106921
  misc_feature (44)..(329): Homolog of NCBI NO: 18412482 NR Description: aspartyl protease -related [Arabidopsis thaliana]
  misc_feature (42)..(329): Homolog of NCBI NO: 15238250 NR Description: nucleoid DNA-binding protein cnd41 - like protein
  misc_feature (42)..(329): Homolog of NCBI NO: 24417232 NR Description: unknown [Arabidopsis thaliana]
  misc_feature (49)..(330): Homolog of NCBI NO: 24430421 NR Description: 41 kD chloroplast nucleoid DNA binding protein
  misc_feature (49)..(330): Homolog of NCBI NO: 7489168 NR Description: nucleoid DNA-binding protein cnd41, chloroplast -
  misc_feature (47)..(330): Homolog of NCBI NO: 22326716 NR Description: nucleoid DNA-binding protein cnd41 - like protein
  misc_feature (47)..(330): Homolog of NCBI NO: 11358588 NR Description: nucleoid DNA-binding protein cnd41-like protein -
MSSFLLASLALLFCISSLEKSFAFQATKESNNLRQYHFVHLNSLFPSSSCSSSAKGCSSSTDASCIYDVKYGDNSISRGFLSQERLTITATDIVHDFLFGCGQDNEGLFRGTAGLMGLSRHPISFVQQTSSIYNKIFSYCLPSTPSSLGHLTFGASAATNANLKYTPFSTISGENSFYGLDIVGISVGGTKLPAVSSSTFSAGGSIIDSGTVITRLPPTAYAALRSAFRQFMMKYPVAYGTRLLDTCYDFSGYKEISVPRIDFEFAGGVKVELPLVGILYGESAQQLCLAFAANGNGNDITIFGNVQQKTLEVVYDVEGGRIGFGAAGCN

SEQ ID NO: 57282 - protein, 215 aa, Glycine max
  peptide (1)..(215): Ceres Seq. ID no. 15171362
  misc_feature (1)..(210): Pfam Name: Eukaryotic aspartyl protease Pfam Description: Eukaryotic aspartyl protease
  misc_feature (1)..(214): Homolog of NCBI NO: 34912520 NR Description: chloroplast nucleoid DNA-binding protein
  misc_feature (1)..(214): Homolog of NCBI NO: 21595063 NR Description: putative aspartyl protease [Arabidopsis thaliana]
  misc_feature (1)..(214): Homolog of NCBI NO: 25406599 NR Description: probable aspartyl proteinase, 105611-106921
  misc_feature (1)..(214): Homolog of NCBI NO: 18412482 NR Description: aspartyl protease -related [Arabidopsis thaliana]
  misc_feature (1)..(214): Homolog of NCBI NO: 15238250 NR Description: nucleoid DNA-binding protein cnd41 - like protein
  misc_feature (1)..(214): Homolog of NCBI NO: 24417232 NR Description: unknown [Arabidopsis thaliana]
  misc_feature (1)..(215): Homolog of NCBI NO: 24430421 NR Description: 41 kD chloroplast nucleoid DNA binding protein
  misc_feature (1)..(215): Homolog of NCBI NO: 7489168 NR Description: nucleoid DNA-binding protein cnd41, chloroplast -
  misc_feature (1)..(215): Homolog of NCBI NO: 22326716 NR Description: nucleoid DNA-binding protein cnd41 - like protein
  misc_feature (1)..(215): Homolog of NCBI NO: 11358588 NR Description: nucleoid DNA-binding protein cnd41-like protein -
MGLSRHPISFVQQTSSIYNKIFSYCLPSTPSSLGHLTFGASAATNANLKYTPFSTISGENSFYGLDIVGISVGGTKLPAVSSSTFSAGGSIIDSGTVITRLPPTAYAALRSAFRQFMMKYPVAYGTRLLDTCYDFSGYKEISVPRIDFEFAGGVKVELPLVGILYGESAQQLCLAFAANGNGNDITIFGNVQQKTLEVVYDVEGGRIGFGAAGCN

SEQ ID NO: 57283 - DNA, 1474 bp, Glycine max
  misc_feature (1)..(1474): Ceres Seq. ID no. 14314312
aatttggaaatgtaaaaaaaaattgggtgtttccgatagtagtagttgtagcggtcaagccgagccgatccgatgacgcgagccactcacacactgggggttcccccaacaacacgcgcccctccccggcgaccgtaccgtattatccctcaccattcccactctttcgccttgccgtttcgctttctctctcttcttcttcttctttctctttctctttctctttctcttttccctttctctttatctctcttccaaccctaattccctttttccgatgccggacttccacgactccctcctcaccaccacgccgccgccatcgcgccccgtccccgtccgcgaggactgctggtccgaggaggcctcctccacgctcgtcgacgcctggggccgccgctacctcgagctcaaccgcggcaacctccgccaaaaggactggcaggacgtcgccgacgccgtcaacgcgctccacggccacaccaaaaagacgcaccgcaccgacgtccagtgcaaaaaccgcatcgacaccattaagaagaagtacaagatcgagaaggctagggtttcggcctccaacggtactctctcttcctcttggcctttctacgagcgcttggacgctctaatcggccctaattttagcgcgaagaaatcaacctcttcgccgtctccgtcgccgccggtggctcttcctttgctgccgcatcggaagaaccagaaccaaaaccagaacccttcctcttctcctgcgattgcggtgccgccgacggccgtcgctctgccgcagaagcgctcctcggcagcggcgatggacgagggttacttcagaaggaattactccgccgtggctgccgcggcggcggcagcggaggctgatgaggacgatgaggaggaagacgaggaggaggcggaggatttggaggaggaggaggaggaagaatgtgaagaggaagggagagggagcgaagtggaggaaggggataaggagagggaagggatgaggaggttggcgaaggcgatagagaggtttggggaagtttatgagagagtggaggcgcagaagctgaggcagatggtggatttggagaaacagaggatgcagtttgctaaagatcttgaagtgcagaggatggagatgtttatggacacacaggttcagctcgagagaattaagcgcggtaaaagatctggctctaatggtgagatacaaaaaaaaattcggccttttatttgcttcccttttggcttgatttgatcacacgttgtactttttagtgttttgttttcaacgaatgaatgatgttttggacttgaggataagtgggtcgctagaggattattctccagtgagttcctttttggtggtaaaagaaaaatagattggtttggactctagagggtgcactgaatgctctgaattggttgtttcttgtagtcctacaattaaatatactagcatgtgatgcacttt

SEQ ID NO: 57284 - protein, 326 aa, Glycine max
  peptide (1)..(326): Ceres Seq. ID no. 14314313
  misc_feature (192)..(266): Pfam Name: Prothymosin/parathymosin family Pfam Description: Prothymosin/parathymosin family
  misc_feature (172)..(311): Homolog of NCBI NO: 6016685 NR Description: hypothetical protein [Arabidopsis thaliana]
  misc_feature (10)..(147): Homolog of NCBI NO: 30680994 NR Description: expressed protein [Arabidopsis thaliana]
  misc_feature (172)..(315): Homolog of NCBI NO: 30680994 NR Description: expressed protein [Arabidopsis thaliana]
  misc_feature (172)..(310): Homolog of NCBI NO: 18414919 NR Description: expressed protein [Arabidopsis thaliana]
  misc_feature (172)..(310): Homolog of NCBI NO: 10178132 NR Description: gb|AAF01512.1~gene_id:MOP10.9~similar to unknown
  misc_feature (10)..(147): Homolog of NCBI NO: 18414919 NR Description: expressed protein [Arabidopsis thaliana]
  misc_feature (10)..(147): Homolog of NCBI NO: 10178132 NR Description: gb|AAF01512.1~gene_id:MOP10.9~similar to unknown
  misc_feature (13)..(322): Homolog of NCBI NO: 34911060 NR Description: putative 6b-interacting protein 1
  misc_feature (12)..(309): Homolog of NCBI NO: 30694843 NR Description: expressed protein [Arabidopsis thaliana]
  misc_feature (12)..(309): Homolog of NCBI NO: 11357442 NR Description: hypothetical protein F14P22.220 - Arabidopsis
MPDFHDSLLTTTPPPSRPVPVREDCWSEEASSTLVDAWGRRYLELNRGNLRQKDWQDVADAVNALHGHTKKTHRTDVQCKNRIDTIKKKYKIEKARVSASNGTLSSSWPFYERLDALIGPNFSAKKSTSSPSPSPPVALPLLPHRKNQNQNQNPSSSPAIAVPPTAVALPQKRSSAAAMDEGYFRRNYSAVAAAAAAAEADEDDEEEDEEEAEDLEEEEEEECEEEGRGSEVEEGDKEREGMRRLAKAIERFGEVYERVEAQKLRQMVDLEKQRMQFAKDLEVQRMEMFMDTQVQLERIKRGKRSGSNGEIQKKIRPFICFPFGLI

SEQ ID NO: 57285 - protein, 208 aa, Glycine max
  peptide (1)..(208): Ceres Seq. ID no. 14314314
  misc_feature (21)..(207): Pfam Name: Equine herpesvirus glycoprotein gp2 Pfam Description: Equine herpesvirus glycoprotein gp2
  misc_feature (17)..(208): Homolog of NCBI NO: 5821143 NR Description: RNA binding protein [Homo sapiens]
  misc_feature (17)..(208): Homolog of NCBI NO: 5821145 NR Description: RNA binding protein [Homo sapiens]
FGNVKKNWVFPIVVVVAVKPSRSDDASHSHTGGSPNNTRPSPATVPYYPSPFPLFRLAVSLSLSSSSSFSFSFSFSFPFLFISLPTLIPFFRCRTSTTPSSPPRRRHRAPSPSARTAGPRRPPPRSSTPGAAATSSSTAATSAKRTGRTSPTPSTRSTATPKRRTAPTSSAKTASTPLRRSTRSRRLGFRPPTVLSLPLGLSTSAWTL

SEQ ID NO: 57286 - DNA, 1665 bp, Glycine max
  misc_feature (1)..(1665): Ceres Seq. ID no. 15171821
acttcataggcctttcttattcttccttctaagaaaccacttcaaatcatcaacttccctagacttacacaccctttgggctgtaacaagcaatctgatcctcttgttatcattcagattgatttctcttctagcacctcgatcaaagggctaaaaaaatttgctacttattgcacttttcttttcatggtttgatacatcttattgattttagtgctatttcaaggggtgaatttgagacatgggtttgagttctaagcaggtttctagcagtggacttgattggaaacaaaccttgttggaggctcagaatttggaacttccaaagcctaatctgatgaggaaacaacagcagcagcagcagcaacaacaacaacaaactcagccgaattcagagtctttgaaatgtccaagatgtgactctaccaacaccaaattttgttactacaacaactacaacaagtctcagcctcgccatttctgcagggcttgcaagaggcactggactaaaggtggaactctacgcaatgttccagttggtggtggaaggaagaacaagagggtcaaaaaatcaatcactccaattacaacatcttccaccaccaccacaccaatcacaaccgccacttcaacttgcactgccacagtcacaacctcaattggcaacaacatggatgctatgttgggttgttatagccacatgacaatccaaactcctcttgcggatgatcagaaaaacatgtcttcctctctctaccaagctctaattcgtccaccacctttgctgctacaacagaatctgctcaacacaagagaattagaaggcaaagattttggtattggtatcggtaataatggtatctttcctagttcaactttggctcttcctactcatcaaagccaaagcctactcttccctttctcagcctcaagcagatcttttgacaccaacccttgttcagtagtgtcaacctctcttagatcctccaatgtttataactatggggaggatcagtttaaagcaatagaggaaccaaccatcaatagtactactgctactatagtgcctagcacaggtggcaccaacaacacacatcatccatgggagatagcagcagcaacaagtggtgttggcttgggaacttcttcaaattcaaactattggaattgggaggattttgattcattggtttcaactgatctaaaagatccctgggatgattcagatatcaaaccctgagaaccaaacaataagcaacaacacatcatgatggggcatgagaagtatttagagctgtcatgttttagtttcagcttcagcttcaagcaaaagggtcccaaaattcctcacaattagttgcaacccactctgtttgcctctttgttcatctctcttatcatttcctctaatctctaataataaaatggtgtattaatgtatgcaaacattgcaaagtagtgtctagcattatttatcaatataggattttgttttttttattttttattttattttttggggagttttgtgagtgctttgtgatgggagtgatatagatatggggtctgctccagcactgctgaactgacagaatgtgattggaagattctttggacatgtatatatcttggaatgatattttatcatacggttttattgcttgc

SEQ ID NO: 57287 - protein, 332 aa, Glycine max
  peptide (1)..(332): Ceres Seq. ID no. 15171822
  misc_feature (49)..(107): Pfam Name: Dof domain, zinc finger Pfam Description: Dof domain, zinc finger
  misc_feature (30)..(136): Homolog of NCBI NO: 25352305 NR Description: probable DOF zinc finger protein
  misc_feature (49)..(159): Homolog of NCBI NO: 29124139 NR Description: putative DNA-binding protein
  misc_feature (26)..(159): Homolog of NCBI NO: 7489820 NR Description: prolamin box binding factor - maize
  misc_feature (32)..(133): Homolog of NCBI NO: 15232514 NR Description: Dof zinc finger protein [Arabidopsis thaliana]
  misc_feature (32)..(122): Homolog of NCBI NO: 15027981 NR Description: putative Dof zinc finger protein [Arabidopsis
  misc_feature (54)..(307): Homolog of NCBI NO: 7688355 NR Description: Dof zinc finger protein [Solanum tuberosum]
  misc_feature (4)..(136): Homolog of NCBI NO: 37051129 NR Description: DNA binding with one finger 4 protein [Pisum
  misc_feature (12)..(227): Homolog of NCBI NO: 21538785 NR Description: dof zinc finger protein [Hordeum vulgare subsp.
  misc_feature (37)..(170): Homolog of NCBI NO: 25518515 NR Description: hypothetical protein F3H9.4 - Arabidopsis
  misc_feature (37)..(170): Homolog of NCBI NO: 22329829 NR Description: Dof zinc finger protein [Arabidopsis thaliana]
MGLSSKQVSSSGLDWKQTLLEAQNLELPKPNLMRKQQQQQQQQQQQTQPNSESLKCPRCDSTNTKFCYYNNYNKSQPRHFCRACKRHWTKGGTLRNVPVGGGRKNKRVKKSITPITTSSTTTTPITTATSTCTATVTTSIGNNMDAMLGCYSHMTIQTPLADDQKNMSSSLYQALIRPPPLLLQQNLLNTRELEGKDFGIGIGNNGIFPSSTLALPTHQSQSLLFPFSASSRSFDTNPCSVVSTSLRSSNVYNYGEDQFKAIEEPTINSTTATIVPSTGGTNNTHHPWEIAAATSGVGLGTSSNSNYWNWEDFDSLVSTDLKDPWDDSDIKP

SEQ ID NO: 57288 - protein, 300 aa, Glycine max
  peptide (1)..(300): Ceres Seq. ID no. 15171823
  misc_feature (17)..(75): Pfam Name: Dof domain, zinc finger Pfam Description: Dof domain, zinc finger
  misc_feature (1)..(104): Homolog of NCBI NO: 25352305 NR Description: probable DOF zinc finger protein
  misc_feature (17)..(127): Homolog of NCBI NO: 29124139 NR Description: putative DNA-binding protein
  misc_feature (1)..(127): Homolog of NCBI NO: 7489820 NR Description: prolamin box binding factor - maize
  misc_feature (1)..(101): Homolog of NCBI NO: 15232514 NR Description: Dof zinc finger protein [Arabidopsis thaliana]
  misc_feature (1)..(90): Homolog of NCBI NO: 15027981 NR Description: putative Dof zinc finger protein [Arabidopsis
  misc_feature (22)..(275): Homolog of NCBI NO: 7688355 NR Description: Dof zinc finger protein [Solanum tuberosum]
  misc_feature (1)..(104): Homolog of NCBI NO: 37051129 NR Description: DNA binding with one finger 4 protein [Pisum
  misc_feature (1)..(195): Homolog of NCBI NO: 21538785 NR Description: dof zinc finger protein [Hordeum vulgare subsp.
  misc_feature (5)..(138): Homolog of NCBI NO: 25518515 NR Description: hypothetical protein F3H9.4 - Arabidopsis
  misc_feature (5)..(138): Homolog of NCBI NO: 22329829 NR Description: Dof zinc finger protein [Arabidopsis thaliana]
MRKQQQQQQQQQQQTQPNSESLKCPRCDSTNTKFCYYNNYNKSQPRHFCRACKRHWTKGGTLRNVPVGGGRKNKRVKKSITPITTSSTTTTPITTATSTCTATVTTSIGNNMDAMLGCYSHMTIQTPLADDQKNMSSSLYQALIRPPPLLLQQNLLNTRELEGKDFGIGIGNNGIFPSSTLALPTHQSQSLLFPFSASSRSFDTNPCSVVSTSLRSSNVYNYGEDQFKAIEEPTINSTTATIVPSTGGTNNTHHPWEIAAATSGVGLGTSSNSNYWNWEDFDSLVSTDLKDPWDDSDIKP

SEQ ID NO: 57289 - protein, 189 aa, Glycine max
  peptide (1)..(189): Ceres Seq. ID no. 15171824
  misc_feature (1)..(63): Homolog of NCBI NO: 15239087 NR Description: Dof zinc finger protein [Arabidopsis thaliana]
  misc_feature (1)..(103): Homolog of NCBI NO: 21593274 NR Description: unknown [Arabidopsis thaliana]
  misc_feature (1)..(16): Homolog of NCBI NO: 29124139 NR Description: putative DNA-binding protein
  misc_feature (1)..(16): Homolog of NCBI NO: 7489820 NR Description: prolamin box binding factor - maize
  misc_feature (1)..(164): Homolog of NCBI NO: 7688355 NR Description: Dof zinc finger protein [Solanum tuberosum]
  misc_feature (1)..(84): Homolog of NCBI NO: 21538785 NR Description: dof zinc finger protein [Hordeum vulgare subsp.
  misc_feature (1)..(27): Homolog of NCBI NO: 25518515 NR Description: hypothetical protein F3H9.4 - Arabidopsis
  misc_feature (1)..(27): Homolog of NCBI NO: 22329829 NR Description: Dof zinc finger protein [Arabidopsis thaliana]
MDAMLGCYSHMTIQTPLADDQKNMSSSLYQALIRPPPLLLQQNLLNTRELEGKDFGIGIGNNGIFPSSTLALPTHQSQSLLFPFSASSRSFDTNPCSVVSTSLRSSNVYNYGEDQFKAIEEPTINSTTATIVPSTGGTNNTHHPWEIAAATSGVGLGTSSNSNYWNWEDFDSLVSTDLKDPWDDSDIKP

SEQ ID NO: 57290 - DNA, 1145 bp, Glycine max
  misc_feature (1)..(1145): Ceres Seq. ID no. 14312124
attttggtaccaccacaactctctatcactcacaacattttcacacaaacactttctgaaaaaagaattcgtttcttttccctaacatggccagatcacaacagcgataccgaggtgtccgacaaaggcattggggctcttgggtctccgaaattcgacaccccatattgtaagtgccccttttgttttcactccaatgcacatttcacttatctatggactaaaaaatagaccaaatgttggtctagcaaaagaaattagtccatggcaaaccaatttatcaacctccgttaaataaaaaatgttcacatttagtgtgtgacagcatgtcaaaccaatgtttgaatctccgttaaaaaggtgtttacatatagtatctgacagtgtctcgaaacattattgattcaaactttcttctaatttgcaggaaaactaggatatggctaggaacttttgaaactgctgaggatgcagctagagcctatgatgaagcagcaaggctaatgtgtggcacaagagcaagaactaacttcccttacaaccccaatgcgtctcagtcatcatcttccaagcttctctcagcaactttaactgcaaaactgcataggtgctacatggcttctttgcaaatgacaaggccatcatcacaggcagagcctcagagagtggcttcaccaaatgtcatcacctcctccgcgagcaacttctccatgaagagtaacgaaactgagacattgttgttgccacaaaagagacaagaagaggagcaagaagcagaagggaattgggttttcaagaaggttaaggtggaaaatgctcagcagttcaagcctcttgaagaggaccacatcgagcaaatgatagaggagttgctgcattacgggtctattgagctatgctctgtgattccaccacaggctctttgaactcacattgagcaagcatttttattgttagttcacattcttactctgctaatttaatcaactaattctcttggacaatttcagtctctattattattaagtgctttaggtgctagactagactagactagaatagtactatcttctaagtgactcattggacaatgttgtatgtacagccagccaatcatgttgaaattgtgcatttgttctgttcac

SEQ ID NO: 57291 - protein, 140 aa, Glycine max
  peptide (1)..(140): Ceres Seq. ID no. 14312125
  misc_feature (1)..(60): Homolog of NCBI NO: 12324244 NR Description: putative AP2 domain transcriptional regulator, 5'
  misc_feature (1)..(126): Homolog of NCBI NO: 30689846 NR Description: AP2 domain transcription factor, putative
  misc_feature (1)..(126): Homolog of NCBI NO: 15238976 NR Description: putative protein; protein id: At5g11190.1
  misc_feature (1)..(126): Homolog of NCBI NO: 15239413 NR Description: AP2 domain transcription factor, putative
  misc_feature (1)..(30): Homolog of NCBI NO: 21553845 NR Description: putative ethylene responsive element [Arabidopsis
  misc_feature (1)..(30): Homolog of NCBI NO: 15218134 NR Description: ethylene responsive element binding factor 2
  misc_feature (1)..(70): Homolog of NCBI NO: 38343976 NR Description: OSJNBb0022F16.15 [Oryza sativa (japonica
  misc_feature (1)..(140): Homolog of NCBI NO: 15238727 NR Description: ethylene responsive element binding protein,
  misc_feature (1)..(136): Homolog of NCBI NO: 18650662 NR Description: ethylene response factor 1 [Lycopersicon
  misc_feature (1)..(118): Homolog of NCBI NO: 131754 NR Description: PPLZ02 PROTEIN
MCGTRARTNFPYNPNASQSSSSKLLSATLTAKLHRCYMASLQMTRPSSQAEPQRVASPNVITSSASNFSMKSNETETLLLPQKRQEEEQEAEGNWVFKKVKVENAQQFKPLEEDHIEQMIEELLHYGSIELCSVIPPQAL

SEQ ID NO: 57292 - protein, 103 aa, Glycine max
  peptide (1)..(103): Ceres Seq. ID no. 14312126
  misc_feature (1)..(48): Homolog of NCBI NO: 8571476 NR Description: apetala2 domain-containing protein [Atriplex
  misc_feature (1)..(56): Homolog of NCBI NO: 15236319 NR Description: AP2 domain transcription factor RAP2, putative
  misc_feature (1)..(23): Homolog of NCBI NO: 12324244 NR Description: putative AP2 domain transcriptional regulator, 5'
  misc_feature (1)..(89): Homolog of NCBI NO: 30689846 NR Description: AP2 domain transcription factor, putative
  misc_feature (1)..(89): Homolog of NCBI NO: 15238976 NR Description: putative protein; protein id: At5g11190.1
  misc_feature (1)..(89): Homolog of NCBI NO: 15239413 NR Description: AP2 domain transcription factor, putative
  misc_feature (1)..(33): Homolog of NCBI NO: 38343976 NR Description: OSJNBb0022F16.15 [Oryza sativa (japonica
  misc_feature (1)..(103): Homolog of NCBI NO: 15238727 NR Description: ethylene responsive element binding protein,
  misc_feature (1)..(99): Homolog of NCBI NO: 18650662 NR Description: ethylene response factor 1 [Lycopersicon
  misc_feature (1)..(81): Homolog of NCBI NO: 131754 NR Description: PPLZ02 PROTEIN
MASLQMTRPSSQAEPQRVASPNVITSSASNFSMKSNETETLLLPQKRQEEEQEAEGNWVFKKVKVENAQQFKPLEEDHIEQMIEELLHYGSIELCSVIPPQAL

SEQ ID NO: 57293 - protein, 98 aa, Glycine max
  peptide (1)..(98): Ceres Seq. ID no. 14312127
  misc_feature (1)..(43): Homolog of NCBI NO: 8571476 NR Description: apetala2 domain-containing protein [Atriplex
  misc_feature (1)..(51): Homolog of NCBI NO: 15236319 NR Description: AP2 domain transcription factor RAP2, putative
  misc_feature (1)..(18): Homolog of NCBI NO: 12324244 NR Description: putative AP2 domain transcriptional regulator, 5'
  misc_feature (1)..(84): Homolog of NCBI NO: 30689846 NR Description: AP2 domain transcription factor, putative
  misc_feature (1)..(84): Homolog of NCBI NO: 15238976 NR Description: putative protein; protein id: At5g11190.1
  misc_feature (1)..(84): Homolog of NCBI NO: 15239413 NR Description: AP2 domain transcription factor, putative
  misc_feature (1)..(28): Homolog of NCBI NO: 38343976 NR Description: OSJNBb0022F16.15 [Oryza sativa (japonica
  misc_feature (1)..(98): Homolog of NCBI NO: 15238727 NR Description: ethylene responsive element binding protein,
  misc_feature (1)..(94): Homolog of NCBI NO: 18650662 NR Description: ethylene response factor 1 [Lycopersicon
  misc_feature (1)..(76): Homolog of NCBI NO: 131754 NR Description: PPLZ02 PROTEIN
MTRPSSQAEPQRVASPNVITSSASNFSMKSNETETLLLPQKRQEEEQEAEGNWVFKKVKVENAQQFKPLEEDHIEQMIEELLHYGSIELCSVIPPQAL

SEQ ID NO: 57294 - DNA, 1375 bp, Glycine max
  misc_feature (1)..(1375): Ceres Seq. ID no. 13514389
acctagaacatcctaatcgaaaataaacacccacatgacatggaaaagacgctaacgccacccgtcttcgagcattaaaacccgcgaaacttccaagcagggttacacgccgcattgctctcagcttcacaacaccatggaccacgttagggaaacctctgcttgggtagctagccgctcctcccacgttctcgttgactctgcaggaattgagaaagtggtgagcaccattgattccattcccaaggttgagtgggatttcgaagggattcactactttgataatggaccactcaccgttcagtacctgtttgtgttggacgctttaaatttttgcttctggcctgataaggatttgaattatgatgatttggcatctgggctaaaggcagctcttcaaaatgataaatctgcatttgatgctgatcgtctgcaaaagtacactggtccacaactgcgtgagcttttgaggtggcctagaccccttcctctggaagatgaacgagttaggttactacatgaggttgggattgaattagaaagaaactttgagggtaaagcatccaatcttgtggagtgctgtggaaaatcagccatgaatcttgttgctcttgttgcacgccattttcctggttttagagaccatacagtgtacaaaggacgccaggtatttttatataaaagggctcagatatttgcagcagatttgtttggtgcatttaggggccaaggatatggtgagttcaaagacattggctctctaactataatggcagactatattgtcccagctgtgcttcgacagcttggtgttttaaaatatagtccaacacttgccagtactattgaggccagtggagaaataggtccagggactgaagaggaagttgaactgcgtgcttgctctgtacatgcagtggagaaaatgagggagctaataagtgtaaagtcaggaagacaggtgctcagtgtggagctggatctttggctctgggcttctggtgttcagtccacatctctgcagcaccaccgtacactttcaatatattactgagcacatgatatatggtaacttctagctatcaacaatttagttgttgaacaagaaaattttggctgttttaaggtaattatttaggataatgtgtgaataactacctccttttgcactaaagttttggaatcagcttttgtaattttggaaaagtgatacttaaccagatgctttcaaacttaattttgaatagccatggtattcggattttaggaccttaaatagtttacagggtgaacaattaggctcatggttgttttacaatgggaggttgttaatatttactttgtcaaatataactgttggtatagccgaggttgt

SEQ ID NO: 57295 - protein, 305 aa, Glycine max
  peptide (1)..(305): Ceres Seq. ID no. 13514390
  misc_feature (157)..(305): Homolog of NCBI NO: 34873598 NR Description: similar to CG9752-PA [Rattus norvegicus]
  misc_feature (55)..(305): Homolog of NCBI NO: 7495851 NR Description: hypothetical protein C11D2.4 - Caenorhabditis
  misc_feature (55)..(305): Homolog of NCBI NO: 25145501 NR Description: Putative cytoplasmic protein of eukaryotic origin
  misc_feature (117)..(302): Homolog of NCBI NO: 40745001 NR Description: hypothetical protein AN2451.2 [Aspergillus
  misc_feature (55)..(304): Homolog of NCBI NO: 39584221 NR Description: Hypothetical protein CBG05511 [Caenorhabditis
  misc_feature (57)..(305): Homolog of NCBI NO: 24656903 NR Description: CG9752-PA [Drosophila melanogaster]
  misc_feature (57)..(305): Homolog of NCBI NO: 38074709 NR Description: RIKEN cDNA 2210016F16 [Mus musculus]
  misc_feature (1)..(74): Homolog of NCBI NO: 19114965 NR Description: conserved hypothetical protein; putative
  misc_feature (117)..(286): Homolog of NCBI NO: 19114965 NR Description: conserved hypothetical protein; putative
  misc_feature (1)..(305): Homolog of NCBI NO: 28564818 NR Description: OSJNBb0005G07.5 [Oryza sativa (japonica
MDHVRETSAWVASRSSHVLVDSAGIEKVVSTIDSIPKVEWDFEGIHYFDNGPLTVQYLFVLDALNFCFWPDKDLNYDDLASGLKAALQNDKSAFDADRLQKYTGPQLRELLRWPRPLPLEDERVRLLHEVGIELERNFEGKASNLVECCGKSAMNLVALVARHFPGFRDHTVYKGRQVFLYKRAQIFAADLFGAFRGQGYGEFKDIGSLTIMADYIVPAVLRQLGVLKYSPTLASTIEASGEIGPGTEEEVELRACSVHAVEKMRELISVKSGRQVLSVELDLWLWASGVQSTSLQHHRTLSIYY

SEQ ID NO: 57296 - protein, 152 aa, Glycine max
  peptide (1)..(152): Ceres Seq. ID no. 13514391
  misc_feature (1)..(136): Homolog of NCBI NO: 28829315 NR Description: hypothetical protein [Dictyostelium discoideum]
  misc_feature (4)..(152): Homolog of NCBI NO: 34873598 NR Description: similar to CG9752-PA [Rattus norvegicus]
  misc_feature (1)..(152): Homolog of NCBI NO: 7495851 NR Description: hypothetical protein C11D2.4 - Caenorhabditis
  misc_feature (1)..(152): Homolog of NCBI NO: 25145501 NR Description: Putative cytoplasmic protein of eukaryotic origin
  misc_feature (1)..(149): Homolog of NCBI NO: 40745001 NR Description: hypothetical protein AN2451.2 [Aspergillus
  misc_feature (1)..(151): Homolog of NCBI NO: 39584221 NR Description: Hypothetical protein CBG05511 [Caenorhabditis
  misc_feature (1)..(152): Homolog of NCBI NO: 24656903 NR Description: CG9752-PA [Drosophila melanogaster]
  misc_feature (1)..(152): Homolog of NCBI NO: 38074709 NR Description: RIKEN cDNA 2210016F16 [Mus musculus]
  misc_feature (1)..(133): Homolog of NCBI NO: 19114965 NR Description: conserved hypothetical protein; putative
  misc_feature (1)..(152): Homolog of NCBI NO: 28564818 NR Description: OSJNBb0005G07.5 [Oryza sativa (japonica
MNLVALVARHFPGFRDHTVYKGRQVFLYKRAQIFAADLFGAFRGQGYGEFKDIGSLTIMADYIVPAVLRQLGVLKYSPTLASTIEASGEIGPGTEEEVELRACSVHAVEKMRELISVKSGRQVLSVELDLWLWASGVQSTSLQHHRTLSIYY

SEQ ID NO: 57297 - DNA, 1112 bp, Glycine max
  misc_feature (1)..(1112): Ceres Seq. ID no. 14316455
aacaacaccgataggaggaattggagaagaaacaggaacagaaaggtttgggaaggaagcagaaatcgggggtggtgtgagagacaagcatggcgacgtgtcttcgccttgggagatttacgactattgattcgctctctctcttcgtttccaccgctagattctccttttcttcatcatcttcgtcgtcgtcctcgtcgtcatcttccggtaagtccaagacggggaagaagctgatggatcgtctttccaccgttatcgacgccgtcaatgatcgcaaactacctcctgagctacgtggccagcgcagcaatgtcaggtcagaaactgacattatcaacgttgttgagcaaagaatatggcataccatggaagaagggaagtttgagaatttgccaggcaaaggcaagccgcttaagctcgacacaaatcctcatgcagatccagctgaagacaccctgtaccgtatcctgtcaaaaaacggatatgcaccggagtgggttgaacttaacaaagagattagatctaaaatatctgaatggaggaagtccttgaagaaagcttgggctactaagtgcagtggagatcactctgagtgggttgaaagttcagaggctttgaaatctcagttacgagaaatcaatgataaggttttccgttataaccttattgtgccttttggtcggcaaatgtttggccttaagtgggagaaagagctaggttacttagaagaaaaatgagaatcattgttgttaaatttgagccagttggttcactatagtagaagattaaaatttgttattttcctgagaaaagtcatgccaggcgactaatcaactaggaactagcttaagttattcagttcaactattgttgattacttttaatttcttagcattatgttactggttatgattcctctttcaggcttattagtatggctatatttatatggttcataacctccgatcatgtacatcccaaggatacaatacaagtaaagatagtgaaaatgtatgtgactcaacaatattagttgtcctgacgattgtattatcagtttttgctttgagacaaattgtagacttcagttttctctttcagtaaaaaat

SEQ ID NO: 57298 - protein, 216 aa, Glycine max
  peptide (1)..(216): Ceres Seq. ID no. 14316456
  misc_feature (72)..(208): Homolog of NCBI NO: 31233474 NR Description: ENSANGP00000015813 [Anopheles gambiae]
  misc_feature (82)..(196): Homolog of NCBI NO: 7020577 NR Description: unnamed protein product [Homo sapiens]
  misc_feature (76)..(208): Homolog of NCBI NO: 24582398 NR Description: CG13776-PA [Drosophila melanogaster]
  misc_feature (104)..(215): Homolog of NCBI NO: 13542805 NR Description: ORF28 protein [Mus musculus]
  misc_feature (82)..(216): Homolog of NCBI NO: 40254908 NR Description: chromosome 21 open reading frame 55 [Homo
  misc_feature (82)..(215): Homolog of NCBI NO: 26349033 NR Description: unnamed protein product [Mus musculus]
  misc_feature (82)..(215): Homolog of NCBI NO: 20149746 NR Description: open reading frame 28 [Mus musculus]
  misc_feature (1)..(84): Homolog of NCBI NO: 11357378 NR Description: hypothetical protein F12E4.360 - Arabidopsis
  misc_feature (77)..(215): Homolog of NCBI NO: 11357378 NR Description: hypothetical protein F12E4.360 - Arabidopsis
  misc_feature (1)..(215): Homolog of NCBI NO: 18414270 NR Description: expressed protein [Arabidopsis thaliana]
MATCLRLGRFTTIDSLSLFVSTARFSFSSSSSSSSSSSSSGKSKTGKKLMDRLSTVIDAVNDRKLPPELRGQRSNVRSETDIINVVEQRIWHTMEEGKFENLPGKGKPLKLDTNPHADPAEDTLYRILSKNGYAPEWVELNKEIRSKISEWRKSLKKAWATKCSGDHSEWVESSEALKSQLREINDKVFRYNLIVPFGRQMFGLKWEKELGYLEEK

SEQ ID NO: 57299 - protein, 167 aa, Glycine max
  peptide (1)..(167): Ceres Seq. ID no. 14316457
  misc_feature (23)..(159): Homolog of NCBI NO: 31233474 NR Description: ENSANGP00000015813 [Anopheles gambiae]
  misc_feature (33)..(147): Homolog of NCBI NO: 7020577 NR Description: unnamed protein product [Homo sapiens]
  misc_feature (27)..(159): Homolog of NCBI NO: 24582398 NR Description: CG13776-PA [Drosophila melanogaster]
  misc_feature (55)..(166): Homolog of NCBI NO: 13542805 NR Description: ORF28 protein [Mus musculus]
  misc_feature (33)..(167): Homolog of NCBI NO: 40254908 NR Description: chromosome 21 open reading frame 55 [Homo
  misc_feature (33)..(166): Homolog of NCBI NO: 26349033 NR Description: unnamed protein product [Mus musculus]
  misc_feature (33)..(166): Homolog of NCBI NO: 20149746 NR Description: open reading frame 28 [Mus musculus]
  misc_feature (1)..(35): Homolog of NCBI NO: 11357378 NR Description: hypothetical protein F12E4.360 - Arabidopsis
  misc_feature (28)..(166): Homolog of NCBI NO: 11357378 NR Description: hypothetical protein F12E4.360 - Arabidopsis
  misc_feature (1)..(166): Homolog of NCBI NO: 18414270 NR Description: expressed protein [Arabidopsis thaliana]
MDRLSTVIDAVNDRKLPPELRGQRSNVRSETDIINVVEQRIWHTMEEGKFENLPGKGKPLKLDTNPHADPAEDTLYRILSKNGYAPEWVELNKEIRSKISEWRKSLKKAWATKCSGDHSEWVESSEALKSQLREINDKVFRYNLIVPFGRQMFGLKWEKELGYLEEK

SEQ ID NO: 57300 - protein, 123 aa, Glycine max
  peptide (1)..(123): Ceres Seq. ID no. 14316458
  misc_feature (1)..(103): Homolog of NCBI NO: 20810277 NR Description: Unknown (protein for MGC:33722) [Homo sapiens]
  misc_feature (1)..(115): Homolog of NCBI NO: 31233474 NR Description: ENSANGP00000015813 [Anopheles gambiae]
  misc_feature (1)..(103): Homolog of NCBI NO: 7020577 NR Description: unnamed protein product [Homo sapiens]
  misc_feature (1)..(115): Homolog of NCBI NO: 24582398 NR Description: CG13776-PA [Drosophila melanogaster]
  misc_feature (11)..(122): Homolog of NCBI NO: 13542805 NR Description: ORF28 protein [Mus musculus]
  misc_feature (1)..(123): Homolog of NCBI NO: 40254908 NR Description: chromosome 21 open reading frame 55 [Homo
  misc_feature (1)..(122): Homolog of NCBI NO: 26349033 NR Description: unnamed protein product [Mus musculus]
  misc_feature (1)..(122): Homolog of NCBI NO: 20149746 NR Description: open reading frame 28 [Mus musculus]
  misc_feature (1)..(122): Homolog of NCBI NO: 11357378 NR Description: hypothetical protein F12E4.360 - Arabidopsis
  misc_feature (1)..(122): Homolog of NCBI NO: 18414270 NR Description: expressed protein [Arabidopsis thaliana]
MEEGKFENLPGKGKPLKLDTNPHADPAEDTLYRILSKNGYAPEWVELNKEIRSKISEWRKSLKKAWATKCSGDHSEWVESSEALKSQLREINDKVFRYNLIVPFGRQMFGLKWEKELGYLEEK

SEQ ID NO: 57301 - DNA, 1430 bp, Glycine max
  misc_feature (1)..(1430): Ceres Seq. ID no. 14314343
agttcaactaagtacgctgtttttttattttccccacaaaaccatatagccatcggtcgtagatcccacgaaccccatcatcacaccactctctgcagttttcgcaaccaaaccttcttttttgtttttattcctctgcttattggattcaacgaagttgttgtgattaaggagaacataactttttgaatcacacagagagagagagagaagagacccagtactttctgcatccaaaccaatcactactgcggataactggtaagttcataaaggggagattcttcagtgatcatctatctgatttggtccagctaaggaatcattcagaagccaagttgattaagtactagagagatcatattttggattagtaaaagttaatcataagcatgggatctttcaagggtcatgctttgccagggactttgtttcttctagttggggtgtggcacgtatggggctctgtggtgagatatgttcgcaatccaatggcgtttcaagtcagagtttggaatcctgtgccagggtttgatgggaggctgaagcacctggagctatatgttattgcaattggtgctttcgttgacatgtgcatcgagcttttgtattcaccacacctcaagatttttgttggtggagtccttaaccccgctcacatgaatgactttgagcactctggaatgcttcttatgtttttcatctttggtgttgttgccctactttcccaaaagaccagatttcttcccttgccagaaggtgctctttgtttgcttgctgcctcagcattcactgcagagtaccttcttttctacttccattcaacaacacacaagggccttgagggctattaccacaccctccttgtcttcctggttggactgtgcattttatcttcaattgctggagcccttttgccaacaagctttccagtggatttatgcaatggcattgctatagcactgcaaggtttatggttctatcagacagcctttgttctctatggccctatgatgccaagtggttgtaagcttagggaaaacagtgtcacatgtcattctattgatagtgaggttcggggcgaattgcttgctaattttcagctctttgttgcggttcttgtggtccttgtgggaactgtggcatcatatggctttgctgcttcaagatatgggagttctgaagtcaggaacttgcatgcaattcagactgaattagatcaagactaaagttgcgttgctattttttctggtggtagttgaaatgtgttggcagcatagagtttcttatagaacatgtttgttgtatattgaagtgcaaaggatcatgcatgcatgatcactgaaaattgaaaattaacaccccctcctccctcaaaaaggaattatacatttttgacttttaggaatcggatgtcaaaggagcaacag

SEQ ID NO: 57302 - protein, 278 aa, Glycine max
  peptide (1)..(278): Ceres Seq. ID no. 14314344
  misc_feature (113)..(263): Pfam Name: Family of unknown function (DUF716) Pfam Description: Family of unknown function (DUF716)
  misc_feature (1)..(251): Homolog of NCBI NO: 21618061 NR Description: unknown [Arabidopsis thaliana]
  misc_feature (1)..(247): Homolog of NCBI NO: 15222675 NR Description: hypothetical protein [Arabidopsis thaliana]
  misc_feature (1)..(277): Homolog of NCBI NO: 30695897 NR Description: expressed protein [Arabidopsis thaliana]
  misc_feature (1)..(276): Homolog of NCBI NO: 4416307 NR Description: hypothetical protein [Zea mays]
  misc_feature (6)..(270): Homolog of NCBI NO: 4680346 NR Description: hypothetical protein [Oryza sativa subsp. indica]
  misc_feature (1)..(269): Homolog of NCBI NO: 22208473 NR Description: hypothetical protein [Sorghum bicolor]
  misc_feature (1)..(270): Homolog of NCBI NO: 4680337 NR Description: hypothetical protein [Oryza sativa subsp. indica]
  misc_feature (1)..(270): Homolog of NCBI NO: 4680504 NR Description: hypothetical protein [Oryza sativa]
  misc_feature (1)..(269): Homolog of NCBI NO: 32470632 NR Description: putative plant viral-response family protein
  misc_feature (1)..(263): Homolog of NCBI NO: 15222573 NR Description: expressed protein [Arabidopsis thaliana]
MGSFKGHALPGTLFLLVGVWHVWGSVVRYVRNPMAFQVRVWNPVPGFDGRLKHLELYVIAIGAFVDMCIELLYSPHLKIFVGGVLNPAHMNDFEHSGMLLMFFIFGVVALLSQKTRFLPLPEGALCLLAASAFTAEYLLFYFHSTTHKGLEGYYHTLLVFLVGLCILSSIAGALLPTSFPVDLCNGIAIALQGLWFYQTAFVLYGPMMPSGCKLRENSVTCHSIDSEVRGELLANFQLFVAVLVVLVGTVASYGFAASRYGSSEVRNLHAIQTELDQD

SEQ ID NO: 57303 - protein, 245 aa, Glycine max
  peptide (1)..(245): Ceres Seq. ID no. 14314345
  misc_feature (80)..(230): Pfam Name: Family of unknown function (DUF716) Pfam Description: Family of unknown function (DUF716)
  misc_feature (1)..(218): Homolog of NCBI NO: 21618061 NR Description: unknown [Arabidopsis thaliana]
  misc_feature (1)..(214): Homolog of NCBI NO: 15222675 NR Description: hypothetical protein [Arabidopsis thaliana]
  misc_feature (1)..(244): Homolog of NCBI NO: 30695897 NR Description: expressed protein [Arabidopsis thaliana]
  misc_feature (1)..(243): Homolog of NCBI NO: 4416307 NR Description: hypothetical protein [Zea mays]
  misc_feature (1)..(237): Homolog of NCBI NO: 4680346 NR Description: hypothetical protein [Oryza sativa subsp. indica]
  misc_feature (1)..(236): Homolog of NCBI NO: 22208473 NR Description: hypothetical protein [Sorghum bicolor]
  misc_feature (1)..(237): Homolog of NCBI NO: 4680337 NR Description: hypothetical protein [Oryza sativa subsp. indica]
  misc_feature (1)..(237): Homolog of NCBI NO: 4680504 NR Description: hypothetical protein [Oryza sativa]
  misc_feature (1)..(236): Homolog of NCBI NO: 32470632 NR Description: putative plant viral-response family protein
  misc_feature (1)..(230): Homolog of NCBI NO: 15222573 NR Description: expressed protein [Arabidopsis thaliana]
MAFQVRVWNPVPGFDGRLKHLELYVIAIGAFVDMCIELLYSPHLKIFVGGVLNPAHMNDFEHSGMLLMFFIFGVVALLSQKTRFLPLPEGALCLLAASAFTAEYLLFYFHSTTHKGLEGYYHTLLVFLVGLCILSSIAGALLPTSFPVDLCNGIAIALQGLWFYQTAFVLYGPMMPSGCKLRENSVTCHSIDSEVRGELLANFQLFVAVLVVLVGTVASYGFAASRYGSSEVRNLHAIQTELDQD

SEQ ID NO: 57304 - protein, 212 aa, Glycine max
  peptide (1)..(212): Ceres Seq. ID no. 14314346
  misc_feature (47)..(197): Pfam Name: Family of unknown function (DUF716) Pfam Description: Family of unknown function (DUF716)
  misc_feature (1)..(185): Homolog of NCBI NO: 21618061 NR Description: unknown [Arabidopsis thaliana]
  misc_feature (1)..(181): Homolog of NCBI NO: 15222675 NR Description: hypothetical protein [Arabidopsis thaliana]
  misc_feature (1)..(211): Homolog of NCBI NO: 30695897 NR Description: expressed protein [Arabidopsis thaliana]
  misc_feature (1)..(210): Homolog of NCBI NO: 4416307 NR Description: hypothetical protein [Zea mays]
  misc_feature (1)..(204): Homolog of NCBI NO: 4680346 NR Description: hypothetical protein [Oryza sativa subsp. indica]
  misc_feature (1)..(203): Homolog of NCBI NO: 22208473 NR Description: hypothetical protein [Sorghum bicolor]
  misc_feature (1)..(204): Homolog of NCBI NO: 4680337 NR Description: hypothetical protein [Oryza sativa subsp. indica]
  misc_feature (1)..(204): Homolog of NCBI NO: 4680504 NR Description: hypothetical protein [Oryza sativa]
  misc_feature (1)..(203): Homolog of NCBI NO: 32470632 NR Description: putative plant viral-response family protein
  misc_feature (1)..(197): Homolog of NCBI NO: 15222573 NR Description: expressed protein [Arabidopsis thaliana]
MCIELLYSPHLKIFVGGVLNPAHMNDFEHSGMLLMFFIFGVVALLSQKTRFLPLPEGALCLLAASAFTAEYLLFYFHSTTHKGLEGYYHTLLVFLVGLCILSSIAGALLPTSFPVDLCNGIAIALQGLWFYQTAFVLYGPMMPSGCKLRENSVTCHSIDSEVRGELLANFQLFVAVLVVLVGTVASYGFAASRYGSSEVRNLHAIQTELDQD

SEQ ID NO: 57305 - DNA, 1274 bp, Glycine max
  misc_feature (1)..(1274): Ceres Seq. ID no. 14314335
tccttttcctcttatttccctccctttgcttcaacaaaaagtatcttcttgtcatttgtcatgtttgctgcatgttttgcaagttctcatcttttttctcccttttcacactctcctgtgttggatgtctgaaaaaaatgtttactttgtagagggtttcttggttgaattttaagttccttagctttcaaagaaagaaacttggaatgtttgaactttgaacctcattttccagtgaatgtttctcacataatattcagaacttttcctcaaattaaaagtgacttattgttgtttttggactttgttctagcaatagtttgttcagggttaccatgaaagtttctagctttcattcatttggcttaaaatttttgttttgtttgtggtttgcagggggtcacattaacccagcggtgacatttgggctgtttttggctcgcaaggtgtctttgatccgagccatcatgtacatggtggctcagtgcttaggtgctatctgtggagttggtttggttaaggctttccaaaagtcttacttcaacaagtatggtggtggggctaattccctcgctgctgggtacagcacaggtactggattgggtgctgagattattggaacctttgttttggtctacactgtcttctctgccactgaccccaagaggaatgccagagattcccatgtgccggttttggctccacttcccattggatttgctgtgttcatggttcacttggccaccatcccagtcactggtactggtatcaaccctgctaggagtcttggagctgctgttatctacaaccaagataagccatgggatgaccattggatcttttgggtaggaccatttattggggcagccattgcagccttctaccatcagttcatcttaagagcaggtgcagctaaggctcttggatcattcaggagtaacccccataattgagttgtctttctcttccttatgatggctctagtggaaagaagataattggagagatgggggttgatatggcaagtttaataataattgggaatgcttttggcttgtgttttgcaacgtttctttgaccctctcgattatgtcttcaagattgtggataagtgtagattaaagtctctttcatgacagggggagccttttgcactttcctctgtggtgttcttccctttagtgtgtcatttttttcttttaagttattctcttcagctgtcatctctgtactcaaaatatatttatggaaaatgttaaattttaattttaatt

SEQ ID NO: 57306 - protein, 205 aa, Glycine max
  peptide (1)..(205): Ceres Seq. ID no. 14314336
  misc_feature (14)..(184): Pfam Name: Major intrinsic protein Pfam Description: Major intrinsic protein
  misc_feature (10)..(201): Homolog of NCBI NO: 7209560 NR Description: Plasma membrane aquaporin 2b [Raphanus sativus]
  misc_feature (10)..(201): Homolog of NCBI NO: 21554356 NR Description: aquaporin (plasma membrane intrinsic protein 2B)
  misc_feature (10)..(201): Homolog of NCBI NO: 15228095 NR Description: plasma membrane intrinsic protein 2B, putative
  misc_feature (14)..(202): Homolog of NCBI NO: 13486938 NR Description: plasma membrane intrinsic protein 2-1 [Pyrus
  misc_feature (8)..(203): Homolog of NCBI NO: 8071620 NR Description: putative aquaporin PIP2-1 [Vitis berlandieri x
  misc_feature (10)..(203): Homolog of NCBI NO: 7441251 NR Description: plasma membrane intrinsic protein 1 - soybean
  misc_feature (14)..(202): Homolog of NCBI NO: 13447803 NR Description: plasma membrane integral protein ZmPIP2-2 [Zea
  misc_feature (14)..(202): Homolog of NCBI NO: 29650727 NR Description: aquaporin [Zea mays]
  misc_feature (14)..(202): Homolog of NCBI NO: 13447801 NR Description: plasma membrane integral protein ZmPIP2-1 [Zea
  misc_feature (10)..(203): Homolog of NCBI NO: 3158476 NR Description: aquaporin 2 [Samanea saman]
MKVSSFHSFGLKFLFCLWFAGGHINPAVTFGLFLARKVSLIRAIMYMVAQCLGAICGVGLVKAFQKSYFNKYGGGANSLAAGYSTGTGLGAEIIGTFVLVYTVFSATDPKRNARDSHVPVLAPLPIGFAVFMVHLATIPVTGTGINPARSLGAAVIYNQDKPWDDHWIFWVGPFIGAAIAAFYHQFILRAGAAKALGSFRSNPHN

SEQ ID NO: 57307 - protein, 161 aa, Glycine max
  peptide (1)..(161): Ceres Seq. ID no. 14314337
  misc_feature (1)..(140): Pfam Name: Major intrinsic protein Pfam Description: Major intrinsic protein
  misc_feature (1)..(157): Homolog of NCBI NO: 7209560 NR Description: Plasma membrane aquaporin 2b [Raphanus sativus]
  misc_feature (1)..(157): Homolog of NCBI NO: 21554356 NR Description: aquaporin (plasma membrane intrinsic protein 2B)
  misc_feature (1)..(157): Homolog of NCBI NO: 15228095 NR Description: plasma membrane intrinsic protein 2B, putative
  misc_feature (1)..(158): Homolog of NCBI NO: 13486938 NR Description: plasma membrane intrinsic protein 2-1 [Pyrus
  misc_feature (1)..(159): Homolog of NCBI NO: 8071620 NR Description: putative aquaporin PIP2-1 [Vitis berlandieri x
  misc_feature (1)..(159): Homolog of NCBI NO: 7441251 NR Description: plasma membrane intrinsic protein 1 - soybean
  misc_feature (1)..(158): Homolog of NCBI NO: 13447803 NR Description: plasma membrane integral protein ZmPIP2-2 [Zea
  misc_feature (1)..(158): Homolog of NCBI NO: 29650727 NR Description: aquaporin [Zea mays]
  misc_feature (1)..(158): Homolog of NCBI NO: 13447801 NR Description: plasma membrane integral protein ZmPIP2-1 [Zea
  misc_feature (1)..(159): Homolog of NCBI NO: 3158476 NR Description: aquaporin 2 [Samanea saman]
MYMVAQCLGAICGVGLVKAFQKSYFNKYGGGANSLAAGYSTGTGLGAEIIGTFVLVYTVFSATDPKRNARDSHVPVLAPLPIGFAVFMVHLATIPVTGTGINPARSLGAAVIYNQDKPWDDHWIFWVGPFIGAAIAAFYHQFILRAGAAKALGSFRSNPHN

SEQ ID NO: 57308 - protein, 159 aa, Glycine max
  peptide (1)..(159): Ceres Seq. ID no. 14314338
  misc_feature (1)..(138): Pfam Name: Major intrinsic protein Pfam Description: Major intrinsic protein
  misc_feature (1)..(155): Homolog of NCBI NO: 7209560 NR Description: Plasma membrane aquaporin 2b [Raphanus sativus]
  misc_feature (1)..(155): Homolog of NCBI NO: 21554356 NR Description: aquaporin (plasma membrane intrinsic protein 2B)
  misc_feature (1)..(155): Homolog of NCBI NO: 15228095 NR Description: plasma membrane intrinsic protein 2B, putative
  misc_feature (1)..(156): Homolog of NCBI NO: 13486938 NR Description: plasma membrane intrinsic protein 2-1 [Pyrus
  misc_feature (1)..(157): Homolog of NCBI NO: 8071620 NR Description: putative aquaporin PIP2-1 [Vitis berlandieri x
  misc_feature (1)..(157): Homolog of NCBI NO: 7441251 NR Description: plasma membrane intrinsic protein 1 - soybean
  misc_feature (1)..(156): Homolog of NCBI NO: 13447803 NR Description: plasma membrane integral protein ZmPIP2-2 [Zea
  misc_feature (1)..(156): Homolog of NCBI NO: 29650727 NR Description: aquaporin [Zea mays]
  misc_feature (1)..(156): Homolog of NCBI NO: 13447801 NR Description: plasma membrane integral protein ZmPIP2-1 [Zea
  misc_feature (1)..(157): Homolog of NCBI NO: 3158476 NR Description: aquaporin 2 [Samanea saman]
MVAQCLGAICGVGLVKAFQKSYFNKYGGGANSLAAGYSTGTGLGAEIIGTFVLVYTVFSATDPKRNARDSHVPVLAPLPIGFAVFMVHLATIPVTGTGINPARSLGAAVIYNQDKPWDDHWIFWVGPFIGAAIAAFYHQFILRAGAAKALGSFRSNPHN

SEQ ID NO: 57309 - DNA, 1322 bp, Glycine max
  misc_feature (1)..(1322): Ceres Seq. ID no. 15171813
ctttttaaagttgtctttccaaatttatccttctaccttctccgaagctccaccgtcttcgatcacaacgactccaagtcccgccctccctcctccaccatcctttttatttgttctggctaggttatgcgctatgcaacacagtgccatggaagcctccaaattcagtaacagtgatcaaaacgttcgatgccatcactgcgcaggacccctttccaaagacatggaaaccagtcactggaccgtttcgcctctcattagggatagcttctccatgattggttctgccgttggcggcgtggcaagtgcattttatggattcaatcttgttatgccaattgtccaaagaaggatcaaaggacccatgtggttgcattttctcattggtgcaccacctgtgatagtattgtcttcagcctgtgcaggcctggcaggtggggctgttcctgctgcagcacaacttgtttcctcttcttatcatgcagcctactcatctcctatctcacctccgccatcaaaggatgaaaatattcaaaggtcaagaaaatgatataatggacttgtgtctgaccatgcattcatgatgggtgtgctgagagttttgtttttcttgtgtaaatactgctcttgagattggtatgtttggaacttgaatgagaggaaagatagtagaaaagagaaaaaacacgtataatgatgtattttattttgtttttttttttttttttttcttgaaggttgaggccaaaaacgctttggaaaactatgcatacaacatgaggaacaccgtgaaggatgacaagattggtgagaaacttgacccggctgacaagaagaagattgaggatgcaattgagcaagcaatccagtggttagacagcaaccagcttgcagaagcagatgagtttgaggacaaaatgaaggaattggaaagcatctgcaatccaatcattgccaagatgtaccaaggtggtgctggtccagacgtgggtggtgctggtgcagcagaggatgagtatgctgctcctccttctggtggaagtggtgctggccccaagattgaggaagtggactaaatgtagttgctttcctccagatacctgttttaaaaacttattttactttatgcttttttaattggattttaatcgcatgatttttgttggatgggattcaaactatttttcccttctgatatgaacgttgctttaagcattatgttatttgcgttattttcattattagatggtatactcaattgttatgcactttacctgtaggaattattctgtcttgttaaatgacatatcttgtctttagtc

SEQ ID NO: 57310 - protein, 182 aa, Glycine max
  peptide (1)..(182): Ceres Seq. ID no. 15171814
  misc_feature (56)..(180): Homolog of NCBI NO: 15238771 NR Description: expressed protein [Arabidopsis thaliana]
  misc_feature (49)..(175): Homolog of NCBI NO: 34903072 NR Description: unnamed protein product [Oryza sativa (japonica
FLKLSFQIYPSTFSEAPPSSITTTPSPALPPPPSFLFVLARLCAMQHSAMEASKFSNSDQNVRCHHCAGPLSKDMETSHWTVSPLIRDSFSMIGSAVGGVASAFYGFNLVMPIVQRRIKGPMWLHFLIGAPPVIVLSSACAGLAGGAVPAAAQLVSSSYHAAYSSPISPPPSKDENIQRSRK

SEQ ID NO: 57311 - protein, 140 aa, Glycine max
  peptide (1)..(140): Ceres Seq. ID no. 15171815
  misc_feature (28)..(105): Pfam Name: Hsp70 protein Pfam Description: Hsp70 protein
  misc_feature (28)..(140): Homolog of NCBI NO: 6969976 NR Description: high molecular weight heat shock protein [Malus x
  misc_feature (28)..(140): Homolog of NCBI NO: 6911551 NR Description: heat shock protein 70 [Cucumis sativus]
MRGKIVEKRKNTYNDVFYFVFFFFFFLKVEAKNALENYAYNMRNTVKDDKIGEKLDPADKKKIEDAIEQAIQWLDSNQLAEADEFEDKMKELESICNPIIAKMYQGGAGPDVGGAGAAEDEYAAPPSGGSGAGPKIEEVD

SEQ ID NO: 57312 - protein, 138 aa, Glycine max
  peptide (1)..(138): Ceres Seq. ID no. 15171816
  misc_feature (12)..(136): Homolog of NCBI NO: 15238771 NR Description: expressed protein [Arabidopsis thaliana]
  misc_feature (5)..(131): Homolog of NCBI NO: 34903072 NR Description: unnamed protein product [Oryza sativa (japonica
MQHSAMEASKFSNSDQNVRCHHCAGPLSKDMETSHWTVSPLIRDSFSMIGSAVGGVASAFYGFNLVMPIVQRRIKGPMWLHFLIGAPPVIVLSSACAGLAGGAVPAAAQLVSSSYHAAYSSPISPPPSKDENIQRSRK

SEQ ID NO: 57313 - DNA, 1326 bp, Glycine max
  misc_feature (1)..(1326): Ceres Seq. ID no. 14304148
attatacatgcacagctagagttaagagaggagatgggagaaatagaaagagaggagatgtcgtcgacaaggtgggagaaggaggaggaagaagaagaagaagaggcccaaatggatatctggaagtacatatttgggtttgtggaactggcagtgataaaatgtgcgattgagcttggcatagctgaagccatagagaagcatggaagtcccatgacactatcggagatatcatcaagtttagggtgtgatacttcacatctgaagcgcatcatgaggttcctggtgcaaagaaagatattcaaaggcgacgggtgcagcaggggctattctcaatcagctctgtctcgtcgattgatgagaaacggcgaacacagcatggctagttttctcttgctggagagtagtcctgtaatgctggcaccttggcacagtctgagtgctcgcgtcatggccaatggcaacccctcatttgcaaaggctcacggtgaagacgtgtggcgctatgctgccgcaaatctcgatcacagcaacctcatcaacgaagcaatggcatgtgatgctaagcttgttatgcctatcatcattcaaagttgcagcgaggcatttcatggcctcaagtccttggtggatgtcggtgggggcaacggcaccgccatgcgcatcctggctaaggcttgcccttccattcgacccatcaattttgatcttcctcatgtcattgccctctgcgatggcgatggcgatggcgtccaacacgtgtcaggcgacatgtttctaagtgttcctaaagctgatgctgcttttcttatgtgggttttgcacgattggtcagacgaagagtgcatccaaatcttaaagaagtgtagggaagccatatcaaattcaaaggaaaacggaagggttattattgtggaggcggtgattgaaggagaaggagaaggagaaggagggaagcatgacggattgaaggatgtgggattgatgctggacatggtaatgatggcgcacactaacttcggcaaagagcgcacactcaaagagtgggaatatgtcatcaaaatggcaggatttagctcatacactgtcaaacccattcatgctgtgcagtccgtcattatggctttctactaaaatatatccaccaaaaattacccttgcaagtttgccactaaaatgcattaaataatttaataaaaaataaaacatattgtgtgatccatcttgcacgtgtaaaacagtgtatgttaatttgttgtaacaatatgaaagcatttcattttctgtatgtttgttcgagaggagaataaaacgtatctttaaatc

SEQ ID NO: 57314 - protein, 377 aa, Glycine max
  peptide (1)..(377): Ceres Seq. ID no. 14304149
  misc_feature (160)..(353): Pfam Name: O-methyltransferase Pfam Description: O-methyltransferase
  misc_feature (33)..(376): Homolog of NCBI NO: 33413896 NR Description: S-adenosyl-L-methionine:norcoclaurine
  misc_feature (31)..(376): Homolog of NCBI NO: 33286372 NR Description: (R,S)-reticuline 7-O-methyltransferase [Papaver
  misc_feature (33)..(376): Homolog of NCBI NO: 33286374 NR Description: (R,S)-norcoclaurine 6-O-methyltransferase
  misc_feature (28)..(376): Homolog of NCBI NO: 32440935 NR Description: caffeic acid O-methyltransferase [Rosa chinensis
  misc_feature (28)..(376): Homolog of NCBI NO: 7447883 NR Description: catechol O-methyltransferase homolog - Monterey
  misc_feature (28)..(376): Homolog of NCBI NO: 4574324 NR Description: caffeic acid ortho-methyltransferase [Pinus
  misc_feature (28)..(376): Homolog of NCBI NO: 1777386 NR Description: caffeic acid O-methyltransferase
  misc_feature (31)..(120): Homolog of NCBI NO: 15236280 NR Description: O-methyltransferase family 2 [Arabidopsis
  misc_feature (160)..(376): Homolog of NCBI NO: 15236280 NR Description: O-methyltransferase family 2 [Arabidopsis
  misc_feature (15)..(376): Homolog of NCBI NO: 15236282 NR Description: O-methyltransferase family 2 [Arabidopsis
IIHAQLELREEMGEIEREEMSSTRWEKEEEEEEEEAQMDIWKYIFGFVELAVIKCAIELGIAEAIEKHGSPMTLSEISSSLGCDTSHLKRIMRFLVQRKIFKGDGCSRGYSQSALSRRLMRNGEHSMASFLLLESSPVMLAPWHSLSARVMANGNPSFAKAHGEDVWRYAAANLDHSNLINEAMACDAKLVMPIIIQSCSEAFHGLKSLVDVGGGNGTAMRILAKACPSIRPINFDLPHVIALCDGDGDGVQHVSGDMFLSVPKADAAFLMWVLHDWSDEECIQILKKCREAISNSKENGRVIIVEAVIEGEGEGEGGKHDGLKDVGLMLDMVMMAHTNFGKERTLKEWEYVIKMAGFSSYTVKPIHAVQSVIMAFY

SEQ ID NO: 57315 - protein, 366 aa, Glycine max
  peptide (1)..(366): Ceres Seq. ID no. 14304150
  misc_feature (149)..(342): Pfam Name: O-methyltransferase Pfam Description: O-methyltransferase
  misc_feature (22)..(365): Homolog of NCBI NO: 33413896 NR Description: S-adenosyl-L-methionine:norcoclaurine
  misc_feature (20)..(365): Homolog of NCBI NO: 33286372 NR Description: (R,S)-reticuline 7-O-methyltransferase [Papaver
  misc_feature (22)..(365): Homolog of NCBI NO: 33286374 NR Description: (R,S)-norcoclaurine 6-O-methyltransferase
  misc_feature (17)..(365): Homolog of NCBI NO: 32440935 NR Description: caffeic acid O-methyltransferase [Rosa chinensis
  misc_feature (17)..(365): Homolog of NCBI NO: 7447883 NR Description: catechol O-methyltransferase homolog - Monterey
  misc_feature (17)..(365): Homolog of NCBI NO: 4574324 NR Description: caffeic acid ortho-methyltransferase [Pinus
  misc_feature (17)..(365): Homolog of NCBI NO: 1777386 NR Description: caffeic acid O-methyltransferase
  misc_feature (20)..(109): Homolog of NCBI NO: 15236280 NR Description: O-methyltransferase family 2 [Arabidopsis
  misc_feature (149)..(365): Homolog of NCBI NO: 15236280 NR Description: O-methyltransferase family 2 [Arabidopsis
  misc_feature (4)..(365): Homolog of NCBI NO: 15236282 NR Description: O-methyltransferase family 2 [Arabidopsis
MGEIEREEMSSTRWEKEEEEEEEEAQMDIWKYIFGFVELAVIKCAIELGIAEAIEKHGSPMTLSEISSSLGCDTSHLKRIMRFLVQRKIFKGDGCSRGYSQSALSRRLMRNGEHSMASFLLLESSPVMLAPWHSLSARVMANGNPSFAKAHGEDVWRYAAANLDHSNLINEAMACDAKLVMPIIIQSCSEAFHGLKSLVDVGGGNGTAMRILAKACPSIRPINFDLPHVIALCDGDGDGVQHVSGDMFLSVPKADAAFLMWVLHDWSDEECIQILKKCREAISNSKENGRVIIVEAVIEGEGEGEGGKHDGLKDVGLMLDMVMMAHTNFGKERTLKEWEYVIKMAGFSSYTVKPIHAVQSVIMAFY

SEQ ID NO: 57316 - protein, 358 aa, Glycine max
  peptide (1)..(358): Ceres Seq. ID no. 14304151
  misc_feature (141)..(334): Pfam Name: O-methyltransferase Pfam Description: O-methyltransferase
  misc_feature (14)..(357): Homolog of NCBI NO: 33413896 NR Description: S-adenosyl-L-methionine:norcoclaurine
  misc_feature (12)..(357): Homolog of NCBI NO: 33286372 NR Description: (R,S)-reticuline 7-O-methyltransferase [Papaver
  misc_feature (14)..(357): Homolog of NCBI NO: 33286374 NR Description: (R,S)-norcoclaurine 6-O-methyltransferase
  misc_feature (9)..(357): Homolog of NCBI NO: 32440935 NR Description: caffeic acid O-methyltransferase [Rosa chinensis
  misc_feature (9)..(357): Homolog of NCBI NO: 7447883 NR Description: catechol O-methyltransferase homolog - Monterey
  misc_feature (9)..(357): Homolog of NCBI NO: 4574324 NR Description: caffeic acid ortho-methyltransferase [Pinus
  misc_feature (9)..(357): Homolog of NCBI NO: 1777386 NR Description: caffeic acid O-methyltransferase
  misc_feature (12)..(101): Homolog of NCBI NO: 15236280 NR Description: O-methyltransferase family 2 [Arabidopsis
  misc_feature (141)..(357): Homolog of NCBI NO: 15236280 NR Description: O-methyltransferase family 2 [Arabidopsis
  misc_feature (1)..(357): Homolog of NCBI NO: 15236282 NR Description: O-methyltransferase family 2 [Arabidopsis
MSSTRWEKEEEEEEEEAQMDIWKYIFGFVELAVIKCAIELGIAEAIEKHGSPMTLSEISSSLGCDTSHLKRIMRFLVQRKIFKGDGCSRGYSQSALSRRLMRNGEHSMASFLLLESSPVMLAPWHSLSARVMANGNPSFAKAHGEDVWRYAAANLDHSNLINEAMACDAKLVMPIIIQSCSEAFHGLKSLVDVGGGNGTAMRILAKACPSIRPINFDLPHVIALCDGDGDGVQHVSGDMFLSVPKADAAFLMWVLHDWSDEECIQILKKCREAISNSKENGRVIIVEAVIEGEGEGEGGKHDGLKDVGLMLDMVMMAHTNFGKERTLKEWEYVIKMAGFSSYTVKPIHAVQSVIMAFY

SEQ ID NO: 57317 - DNA, 2036 bp, Glycine max
  misc_feature (1)..(2036): Ceres Seq. ID no. 15171610
agataatgagtttaccatcgtgagccactcagcctgtgtttggtgggagggattattcagcttccctttttccttccctccacccaaccagagttagacaccgaaaatggctttcaaactgaaatcactacctctcctttgctctcttcactccccttcccgccaaaaccctaattcaacactctcaaaccatcacttttctcgtcgcttcttcgcaccttccattcctcccaccctgtgcctatccggcgcagcctcagcgtccacctttcatcgccatcgcttcttcgtaaccgctcgaagccaagacgaagaccagatcactgaggctcttgaacaagaagaagagaaagacaacgaagaaatatcgaggcagggtgagaaaaaggaactcgcgaagcaaggcacatgggatcagataaaggaaattgtgatgttcacaggaccagcaactggactttggatatgtggaccacttatgagtctcatcgatactgcagttattggtcagagaagttcaattgagcttgctgctttaggtcctgctacagttgtttgtgattacatgtgctacgtgttcatgtttctatcaattgctacttccaatatggttgctactgcccttgccaaacaggacaaagaagaagtacaacatcacatatctgtattgctttttgttgggttatcttgtggcattgcgatgcttttgttcacaaggctatttggtgctgctataataactgctttcactggaccaaagaatgtacacgtagtacctgcagctagcaattatgtaaagattcgaggcttggcatcacctgctttacttgttggatgggtagctcagagtgcaagtcttggtatgaaagattccttgggacccttgaaagctttagctgctgctacagttataaatgtcgctggttgtgtacttttgtgcacctatttaggttatggaattgtaggggctgcgtgggctacaatggtttcacaagttgttgcttcttacatgatgattcaaaatctaaatatgaagggatataatgcacttgccttctccattccttcagggaaggaacttctgacgatatttgggcttgctgctcctgtttttataacattgatgtcaaaggtggctttttacgcactacttatatattttgctacatcaatgggtacacatacaatggctgctcatcaagtcatggtccaaacctatttaatgtgtaccgtatggggtgaacctctctcccaaacctctcaatcatttatgcctgaattgatatgtggagtaaatcggagtttgtcaaaggcccgaatgcttctaaggtctctcgtgataattggagctatacttggattgttgttagggattattggaacatcggttccttggttatttcccaatatttttacacctgatcggatggtcatccaggagatgcataaggtgctgattccatactttatagccctggctgtaacaccccctactgtcagccttgagggaacgttgctggctggacgggatctgaaatttataagtttgtcaatgagtggatgcttttgtgtgggttcactagtattatgggctttgagtagtagatacggtttgcttggctgctggttttccctcgcattatttcaatgggctcggttttcaatggccctccagcgccttctttctcccaaaggcatcttatactcggaagatacagaacagtataagctgctaaagctaaggactgcctagtttgatgaagtcatcacaccagttacaaggatagaagtatgttttaataaaaaaaaaaagaggatagtagtatgttggaccatctcagcttatgggttaagcgagttaagaccaggacaaccggctaaaaagtgagccatcgtttttataatttgtttagtccgcgagctgggttggctcataggttggagttcactttgatacttatatgtgtatgattgctataataattagcatgaaaaattaattcagattcttaattatattgggcgcaatttatatt

SEQ ID NO: 57318 - protein, 548 aa, Glycine max
  peptide (1)..(548): Ceres Seq. ID no. 15171611
  misc_feature (114)..(276): Pfam Name: MatE Pfam Description: MatE
  misc_feature (175)..(530): Homolog of NCBI NO: 15231918 NR Description: MATE efflux protein family [Arabidopsis thaliana]
  misc_feature (67)..(525): Homolog of NCBI NO: 30687474 NR Description: MATE efflux protein family [Arabidopsis thaliana]
  misc_feature (67)..(526): Homolog of NCBI NO: 7487160 NR Description: hypothetical protein At2g38330 [imported] -
  misc_feature (79)..(316): Homolog of NCBI NO: 25412030 NR Description: hypothetical protein At2g21340 [imported] -
  misc_feature (231)..(447): Homolog of NCBI NO: 25412030 NR Description: hypothetical protein At2g21340 [imported] -
  misc_feature (1)..(457): Homolog of NCBI NO: 7485793 NR Description: hypothetical protein F19H22.130 - Arabidopsis
  misc_feature (1)..(547): Homolog of NCBI NO: 22329250 NR Description: enhanced disease susceptibility 5 (Eds5)
  misc_feature (79)..(540): Homolog of NCBI NO: 18399664 NR Description: enhanced disease susceptibility 5 (Eds5)
  misc_feature (79)..(540): Homolog of NCBI NO: 17065002 NR Description: Unknown protein [Arabidopsis thaliana]
  misc_feature (1)..(540): Homolog of NCBI NO: 21554183 NR Description: enhanced disease susceptibility 5 [Arabidopsis
MAFKLKSLPLLCSLHSPSRQNPNSTLSNHHFSRRFFAPSIPPTLCLSGAASASTFHRHRFFVTARSQDEDQITEALEQEEEKDNEEISRQGEKKELAKQGTWDQIKEIVMFTGPATGLWICGPLMSLIDTAVIGQRSSIELAALGPATVVCDYMCYVFMFLSIATSNMVATALAKQDKEEVQHHISVLLFVGLSCGIAMLLFTRLFGAAIITAFTGPKNVHVVPAASNYVKIRGLASPALLVGWVAQSASLGMKDSLGPLKALAAATVINVAGCVLLCTYLGYGIVGAAWATMVSQVVASYMMIQNLNMKGYNALAFSIPSGKELLTIFGLAAPVFITLMSKVAFYALLIYFATSMGTHTMAAHQVMVQTYLMCTVWGEPLSQTSQSFMPELICGVNRSLSKARMLLRSLVIIGAILGLLLGIIGTSVPWLFPNIFTPDRMVIQEMHKVLIPYFIALAVTPPTVSLEGTLLAGRDLKFISLSMSGCFCVGSLVLWALSSRYGLLGCWFSLALFQWARFSMALQRLLSPKGILYSEDTEQYKLLKLRTA

SEQ ID NO: 57319 - protein, 439 aa, Glycine max
  peptide (1)..(439): Ceres Seq. ID no. 15171612
  misc_feature (5)..(167): Pfam Name: MatE Pfam Description: MatE
  misc_feature (66)..(421): Homolog of NCBI NO: 15231918 NR Description: MATE efflux protein family [Arabidopsis thaliana]
  misc_feature (1)..(416): Homolog of NCBI NO: 30687474 NR Description: MATE efflux protein family [Arabidopsis thaliana]
  misc_feature (1)..(417): Homolog of NCBI NO: 7487160 NR Description: hypothetical protein At2g38330 [imported] -
  misc_feature (1)..(207): Homolog of NCBI NO: 25412030 NR Description: hypothetical protein At2g21340 [imported] -
  misc_feature (122)..(338): Homolog of NCBI NO: 25412030 NR Description: hypothetical protein At2g21340 [imported] -
  misc_feature (1)..(348): Homolog of NCBI NO: 7485793 NR Description: hypothetical protein F19H22.130 - Arabidopsis
  misc_feature (1)..(438): Homolog of NCBI NO: 22329250 NR Description: enhanced disease susceptibility 5 (Eds5)
  misc_feature (1)..(431): Homolog of NCBI NO: 18399664 NR Description: enhanced disease susceptibility 5 (Eds5)
  misc_feature (1)..(431): Homolog of NCBI NO: 17065002 NR Description: Unknown protein [Arabidopsis thaliana]
  misc_feature (1)..(431): Homolog of NCBI NO: 21554183 NR Description: enhanced disease susceptibility 5 [Arabidopsis
MFTGPATGLWICGPLMSLIDTAVIGQRSSIELAALGPATVVCDYMCYVFMFLSIATSNMVATALAKQDKEEVQHHISVLLFVGLSCGIAMLLFTRLFGAAIITAFTGPKNVHVVPAASNYVKIRGLASPALLVGWVAQSASLGMKDSLGPLKALAAATVINVAGCVLLCTYLGYGIVGAAWATMVSQVVASYMMIQNLNMKGYNALAFSIPSGKELLTIFGLAAPVFITLMSKVAFYALLIYFATSMGTHTMAAHQVMVQTYLMCTVWGEPLSQTSQSFMPELICGVNRSLSKARMLLRSLVIIGAILGLLLGIIGTSVPWLFPNIFTPDRMVIQEMHKVLIPYFIALAVTPPTVSLEGTLLAGRDLKFISLSMSGCFCVGSLVLWALSSRYGLLGCWFSLALFQWARFSMALQRLLSPKGILYSEDTEQYKLLKLRTA

SEQ ID NO: 57320 - protein, 424 aa, Glycine max
  peptide (1)..(424): Ceres Seq. ID no. 15171613
  misc_feature (1)..(152): Pfam Name: MatE Pfam Description: MatE
  misc_feature (51)..(406): Homolog of NCBI NO: 15231918 NR Description: MATE efflux protein family [Arabidopsis thaliana]
  misc_feature (1)..(401): Homolog of NCBI NO: 30687474 NR Description: MATE efflux protein family [Arabidopsis thaliana]
  misc_feature (1)..(402): Homolog of NCBI NO: 7487160 NR Description: hypothetical protein At2g38330 [imported] -
  misc_feature (1)..(192): Homolog of NCBI NO: 25412030 NR Description: hypothetical protein At2g21340 [imported] -
  misc_feature (107)..(323): Homolog of NCBI NO: 25412030 NR Description: hypothetical protein At2g21340 [imported] -
  misc_feature (1)..(333): Homolog of NCBI NO: 7485793 NR Description: hypothetical protein F19H22.130 - Arabidopsis
  misc_feature (1)..(423): Homolog of NCBI NO: 22329250 NR Description: enhanced disease susceptibility 5 (Eds5)
  misc_feature (1)..(416): Homolog of NCBI NO: 18399664 NR Description: enhanced disease susceptibility 5 (Eds5)
  misc_feature (1)..(416): Homolog of NCBI NO: 17065002 NR Description: Unknown protein [Arabidopsis thaliana]
  misc_feature (1)..(416): Homolog of NCBI NO: 21554183 NR Description: enhanced disease susceptibility 5 [Arabidopsis
MSLIDTAVIGQRSSIELAALGPATVVCDYMCYVFMFLSIATSNMVATALAKQDKEEVQHHISVLLFVGLSCGIAMLLFTRLFGAAIITAFTGPKNVHVVPAASNYVKIRGLASPALLVGWVAQSASLGMKDSLGPLKALAAATVINVAGCVLLCTYLGYGIVGAAWATMVSQVVASYMMIQNLNMKGYNALAFSIPSGKELLTIFGLAAPVFITLMSKVAFYALLIYFATSMGTHTMAAHQVMVQTYLMCTVWGEPLSQTSQSFMPELICGVNRSLSKARMLLRSLVIIGAILGLLLGIIGTSVPWLFPNIFTPDRMVIQEMHKVLIPYFIALAVTPPTVSLEGTLLAGRDLKFISLSMSGCFCVGSLVLWALSSRYGLLGCWFSLALFQWARFSMALQRLLSPKGILYSEDTEQYKLLKLRTA

SEQ ID NO: 57321 - DNA, 1276 bp, Glycine max
  misc_feature (1)..(1276): Ceres Seq. ID no. 14314220
atttgtatgtattcatgttcttaggacttatcttcattattgctaatttcagtttacaagggaaagagtatctgctcccaaggatagactctgttttgaaggtgctttatacctctcaaactttaaaacaataggttattccataataataacacaacacatgttctgaagggacacataatctcgagttccttgcaaggagctaattccacaagttggcctttgttaagcatctacaatctacactgattccttctgttttttcatttcaaaatggaatgtgctgtcttgggcgtgcattttatgaaaatcggtgcttaatcctatgatgcatgaatacatttttctgatttttttcttgaatgtgggttcctctcttctcaggatcattggtgcattattttttaattgaattacactggactttgagtggctgctttttctttgctcaccagtaagtgtttttatttttgttggaactaattatttctgtttttatcagaaatggcgatacatatgctggcgaatactttgcggataagatgcatggatttggggtatacagttttgctaatggccatcgttatgaaggatcctggcatgaaggcaaaaggcaaggtcttggaatgtatacatttagaaatggagaaacccagtctggtcactggcaaaatggagtccttgacattccaagcacacagagtaccacctatcctgtttcccctgttggggtcaatcattccagagtacttaatgcagtccaggaagcaagaagagcagctgagaaagcctatgatgtggccaaggtagatgagagggttaatagagcagtagctgccgctaacagagcagccaatgcagctagagtagctgctgtcaaggccgtgcaaaaccaaatgcttcataatgttaacagcacgagcatcccaattcccattgtgtgaggctgtcagctgcaaacttttgatagtagagatgcacgagattgtcagaagaggtcggtagtttaaactgctttgtttacaccgtcatcatcactgctggctgaatgaaatcaagcagatttattatccatctgccacgagtcttgtatagagggaggaagggtgatggcttccacatggtaaaatactacatatacatactatattttttccctttgcctacattttgtaaatttacttagatgtaaatgctggtgtgcgggtgaaacctcaacccagctactgttgtaagatcgcttggtaaaataaggagagaaacaaacatctagcct

SEQ ID NO: 57322 - protein, 133 aa, Glycine max
  peptide (1)..(133): Ceres Seq. ID no. 14314221
  misc_feature (1)..(116): Homolog of NCBI NO: 29476889 NR Description: JPH1 protein [Homo sapiens]
  misc_feature (1)..(116): Homolog of NCBI NO: 34865678 NR Description: similar to junctophilin type 1 [Rattus norvegicus]
  misc_feature (1)..(46): Homolog of NCBI NO: 28211437 NR Description: putative phosphatidylinositol 4-phosphate
  misc_feature (1)..(119): Homolog of NCBI NO: 15217439 NR Description: hypothetical protein [Arabidopsis thaliana]
  misc_feature (1)..(119): Homolog of NCBI NO: 21593251 NR Description: phosphatidylinositol-4-phosphate 5-kinase,
  misc_feature (1)..(119): Homolog of NCBI NO: 15219142 NR Description: phosphatidylinositol-4-phosphate 5-kinase
  misc_feature (1)..(121): Homolog of NCBI NO: 15235967 NR Description: expressed protein [Arabidopsis thaliana]
  misc_feature (1)..(121): Homolog of NCBI NO: 18403768 NR Description: expressed protein [Arabidopsis thaliana]
  misc_feature (1)..(121): Homolog of NCBI NO: 21928129 NR Description: AT4g17080/dl4570w [Arabidopsis thaliana]
  misc_feature (1)..(133): Homolog of NCBI NO: 37536922 NR Description: putative phosphatidylinositol-4-phosphate
MHGFGVYSFANGHRYEGSWHEGKRQGLGMYTFRNGETQSGHWQNGVLDIPSTQSTTYPVSPVGVNHSRVLNAVQEARRAAEKAYDVAKVDERVNRAVAAANRAANAARVAAVKAVQNQMLHNVNSTSIPIPIV

SEQ ID NO: 57323 - protein, 105 aa, Glycine max
  peptide (1)..(105): Ceres Seq. ID no. 14314222
  misc_feature (1)..(88): Homolog of NCBI NO: 29476889 NR Description: JPH1 protein [Homo sapiens]
  misc_feature (1)..(88): Homolog of NCBI NO: 34865678 NR Description: similar to junctophilin type 1 [Rattus norvegicus]
  misc_feature (1)..(18): Homolog of NCBI NO: 28211437 NR Description: putative phosphatidylinositol 4-phosphate
  misc_feature (1)..(91): Homolog of NCBI NO: 15217439 NR Description: hypothetical protein [Arabidopsis thaliana]
  misc_feature (1)..(91): Homolog of NCBI NO: 21593251 NR Description: phosphatidylinositol-4-phosphate 5-kinase,
  misc_feature (1)..(91): Homolog of NCBI NO: 15219142 NR Description: phosphatidylinositol-4-phosphate 5-kinase
  misc_feature (1)..(93): Homolog of NCBI NO: 15235967 NR Description: expressed protein [Arabidopsis thaliana]
  misc_feature (1)..(93): Homolog of NCBI NO: 18403768 NR Description: expressed protein [Arabidopsis thaliana]
  misc_feature (1)..(93): Homolog of NCBI NO: 21928129 NR Description: AT4g17080/dl4570w [Arabidopsis thaliana]
  misc_feature (1)..(105): Homolog of NCBI NO: 37536922 NR Description: putative phosphatidylinositol-4-phosphate
MYTFRNGETQSGHWQNGVLDIPSTQSTTYPVSPVGVNHSRVLNAVQEARRAAEKAYDVAKVDERVNRAVAAANRAANAARVAAVKAVQNQMLHNVNSTSIPIPIV

SEQ ID NO: 57324 - protein, 101 aa, Glycine max
  peptide (1)..(101): Ceres Seq. ID no. 14314223
MAIHMLANTLRIRCMDLGYTVLLMAIVMKDPGMKAKGKVLECIHLEMEKPSLVTGKMESLTFQAHRVPPILFPLLGSIIPEYLMQSRKQEEQLRKPMMWPR

SEQ ID NO: 57325 - DNA, 1631 bp, Glycine max
  misc_feature (1)..(1631): Ceres Seq. ID no. 15172560
atttttcactggaaagtttcaattgctggggggcttctgcttctggttttgttagttccgagttgccttttgagggaactcaagtagtcaagttcaagcttcctactacttctttgtctcacgttttggggttgccagttactgttgatatcataatggattccccacaatctgttgtgtcacccttcaggagctcagtgttgggtgagagtgagaagcacaagtctgatgttttcccaggaaactctagtcctttttccaaggacattgaagtgaatgggaaggaagttgtcatgtcaaatgtagaggagtatcttggagtgcttgatgtttacatacatcaggccagggacattcaaaacatttgcatataccacaagcaagatgtttatgctaagatttgtctgaccagtaatcctgagacaactgtgtctaccaaaaccatcaatggaggaggaaggaaccctgtgttcaacgagaatcttcgtattgatgttaggactgttgatgcttctctcaagtgtgagatatggatgcttagcagggtgaagaactatcttgaagaccagttgcttggttttgctttggtacccttgtctgaagtactagtccagaatgggaaacttgagaaagagttctctctttcttcaactgatctattccattctccttcgggttttgttcagttgtcgctttcttacactggtgcttcacctgatgttatgacaatttctgcaatgccgaacaaggtggccacagatgccgcagtgcaggactcagaaacgtccgagtcactggccagggatttagacaaaatcgagttcccggatccgaagattgtcaatgaagaccacttgatggtttcagtatacttcggtattccgtgtgaggagactcaatgttccgatagcttggctacttctgatgctgaaaaccagagttccgaagccggtgttcggcttgtggaaagcttctcagcatgcagtgttgagtctgttcagccaactaaggttgattcccctcctagcagtgtgtcaacaaatggggtttcttccccttcagtgccagcaaactcagaatcatctgatgctgctgcttccaagtctcccattcaggagcaagtttcaggcaccaaagaggacaaaaatgtggataccaaagatagtgagagtgattcctcaagtggggttcctagtgaatcattccctaagcctgttgtgactgtgaacattgaacccgagccaaaggtcgtgcagcaggatatagtagacatgtacatgaaaagcatgcagcaattcactgagtcactagcaaaaatgaagctccctatggacttggaaagtgaaccaactagttcaggaaattcaaccactgagcagaaactacagccatcaaagagcaataattctcgtgtgttttatggcagcagagctttcttctgatcttttgcttcccttgttcaagggaatacgagcagtcactgtagatttttagaagaaaactgattttagtagtgaagtgaaataatcaatgtactatcctgtgtggtttccccttctgtatttcatcacatgttggttgtagcttacagggaatataactttgtactctcacaagcttgttgctatctc

SEQ ID NO: 57326 - protein, 479 aa, Glycine max
  peptide (1)..(479): Ceres Seq. ID no. 15172561
  misc_feature (108)..(195): Pfam Name: C2 domain Pfam Description: C2 domain
  misc_feature (360)..(479): Homolog of NCBI NO: 18416832 NR Description: C2 domain-containing protein [Arabidopsis
  misc_feature (104)..(291): Homolog of NCBI NO: 18416832 NR Description: C2 domain-containing protein [Arabidopsis
  misc_feature (103)..(436): Homolog of NCBI NO: 34901084 NR Description: contains ESTs
  misc_feature (90)..(367): Homolog of NCBI NO: 21593485 NR Description: unknown [Arabidopsis thaliana]
  misc_feature (90)..(367): Homolog of NCBI NO: 25405379 NR Description: unknown protein [imported] - Arabidopsis thaliana
  misc_feature (90)..(367): Homolog of NCBI NO: 18403117 NR Description: C2 domain-containing protein [Arabidopsis
  misc_feature (52)..(383): Homolog of NCBI NO: 30696612 NR Description: C2 domain-containing protein [Arabidopsis
  misc_feature (52)..(383): Homolog of NCBI NO: 28393796 NR Description: unknown protein [Arabidopsis thaliana]
  misc_feature (41)..(383): Homolog of NCBI NO: 9758185 NR Description: gene_id:MTE17.25~pir||T07080~similar to unknown
  misc_feature (90)..(479): Homolog of NCBI NO: 24414275 NR Description: Unknown protein [Oryza sativa (japonica
FSLESFNCWGASASGFVSSELPFEGTQVVKFKLPTTSLSHVLGLPVTVDIIMDSPQSVVSPFRSSVLGESEKHKSDVFPGNSSPFSKDIEVNGKEVVMSNVEEYLGVLDVYIHQARDIQNICIYHKQDVYAKICLTSNPETTVSTKTINGGGRNPVFNENLRIDVRTVDASLKCEIWMLSRVKNYLEDQLLGFALVPLSEVLVQNGKLEKEFSLSSTDLFHSPSGFVQLSLSYTGASPDVMTISAMPNKVATDAAVQDSETSESLARDLDKIEFPDPKIVNEDHLMVSVYFGIPCEETQCSDSLATSDAENQSSEAGVRLVESFSACSVESVQPTKVDSPPSSVSTNGVSSPSVPANSESSDAAASKSPIQEQVSGTKEDKNVDTKDSESDSSSGVPSESFPKPVVTVNIEPEPKVVQQDIVDMYMKSMQQFTESLAKMKLPMDLESEPTSSGNSTTEQKLQPSKSNNSRVFYGSRAFF

SEQ ID NO: 57327 - protein, 428 aa, Glycine max
  peptide (1)..(428): Ceres Seq. ID no. 15172562
  misc_feature (57)..(144): Pfam Name: C2 domain Pfam Description: C2 domain
  misc_feature (309)..(428): Homolog of NCBI NO: 18416832 NR Description: C2 domain-containing protein [Arabidopsis
  misc_feature (53)..(240): Homolog of NCBI NO: 18416832 NR Description: C2 domain-containing protein [Arabidopsis
  misc_feature (52)..(385): Homolog of NCBI NO: 34901084 NR Description: contains ESTs
  misc_feature (39)..(316): Homolog of NCBI NO: 21593485 NR Description: unknown [Arabidopsis thaliana]
  misc_feature (39)..(316): Homolog of NCBI NO: 25405379 NR Description: unknown protein [imported] - Arabidopsis thaliana
  misc_feature (39)..(316): Homolog of NCBI NO: 18403117 NR Description: C2 domain-containing protein [Arabidopsis
  misc_feature (1)..(332): Homolog of NCBI NO: 30696612 NR Description: C2 domain-containing protein [Arabidopsis
  misc_feature (1)..(332): Homolog of NCBI NO: 28393796 NR Description: unknown protein [Arabidopsis thaliana]
  misc_feature (1)..(332): Homolog of NCBI NO: 9758185 NR Description: gene_id:MTE17.25~pir||T07080~similar to unknown
  misc_feature (39)..(428): Homolog of NCBI NO: 24414275 NR Description: Unknown protein [Oryza sativa (japonica
MDSPQSVVSPFRSSVLGESEKHKSDVFPGNSSPFSKDIEVNGKEVVMSNVEEYLGVLDVYIHQARDIQNICIYHKQDVYAKICLTSNPETTVSTKTINGGGRNPVFNENLRIDVRTVDASLKCEIWMLSRVKNYLEDQLLGFALVPLSEVLVQNGKLEKEFSLSSTDLFHSPSGFVQLSLSYTGASPDVMTISAMPNKVATDAAVQDSETSESLARDLDKIEFPDPKIVNEDHLMVSVYFGIPCEETQCSDSLATSDAENQSSEAGVRLVESFSACSVESVQPTKVDSPPSSVSTNGVSSPSVPANSESSDAAASKSPIQEQVSGTKEDKNVDTKDSESDSSSGVPSESFPKPVVTVNIEPEPKVVQQDIVDMYMKSMQQFTESLAKMKLPMDLESEPTSSGNSTTEQKLQPSKSNNSRVFYGSRAFF

SEQ ID NO: 57328 - protein, 382 aa, Glycine max
  peptide (1)..(382): Ceres Seq. ID no. 15172563
  misc_feature (11)..(98): Pfam Name: C2 domain Pfam Description: C2 domain
  misc_feature (263)..(382): Homolog of NCBI NO: 18416832 NR Description: C2 domain-containing protein [Arabidopsis
  misc_feature (7)..(194): Homolog of NCBI NO: 18416832 NR Description: C2 domain-containing protein [Arabidopsis
  misc_feature (6)..(339): Homolog of NCBI NO: 34901084 NR Description: contains ESTs
  misc_feature (1)..(270): Homolog of NCBI NO: 21593485 NR Description: unknown [Arabidopsis thaliana]
  misc_feature (1)..(270): Homolog of NCBI NO: 25405379 NR Description: unknown protein [imported] - Arabidopsis thaliana
  misc_feature (1)..(270): Homolog of NCBI NO: 18403117 NR Description: C2 domain-containing protein [Arabidopsis
  misc_feature (1)..(286): Homolog of NCBI NO: 30696612 NR Description: C2 domain-containing protein [Arabidopsis
  misc_feature (1)..(286): Homolog of NCBI NO: 28393796 NR Description: unknown protein [Arabidopsis thaliana]
  misc_feature (1)..(286): Homolog of NCBI NO: 9758185 NR Description: gene_id:MTE17.25~pir||T07080~similar to unknown
  misc_feature (1)..(382): Homolog of NCBI NO: 24414275 NR Description: Unknown protein [Oryza sativa (japonica
MSNVEEYLGVLDVYIHQARDIQNICIYHKQDVYAKICLTSNPETTVSTKTINGGGRNPVFNENLRIDVRTVDASLKCEIWMLSRVKNYLEDQLLGFALVPLSEVLVQNGKLEKEFSLSSTDLFHSPSGFVQLSLSYTGASPDVMTISAMPNKVATDAAVQDSETSESLARDLDKIEFPDPKIVNEDHLMVSVYFGIPCEETQCSDSLATSDAENQSSEAGVRLVESFSACSVESVQPTKVDSPPSSVSTNGVSSPSVPANSESSDAAASKSPIQEQVSGTKEDKNVDTKDSESDSSSGVPSESFPKPVVTVNIEPEPKVVQQDIVDMYMKSMQQFTESLAKMKLPMDLESEPTSSGNSTTEQKLQPSKSNNSRVFYGSRAFF

SEQ ID NO: 57329 - DNA, 1577 bp, Glycine max
  misc_feature (1)..(1577): Ceres Seq. ID no. 15171809
atccaagttccaacatcaactaaactccttctatgttctaactctctctcaccctccatattcctcaacttcaaattctttcttttctataccattttctctcaccaaagtcagctttacctgattcctttgtttagtttgatttattgtgatttcattggttcctttcttactttaaggaacaagtgtggctataatataactctggtgtacataatcacatagatgaggtggtgtggagttggtttattttcatttgttctccttttttctaacttcataaatggtgataatgattcaaaatgtaagtagcttagggaaataaaagtttgtggaaactgggtattcagcactatttttaaaaaataaaactttagtctaatttttggaatctgcattggtttccataaggattaagtgggaagcatgaagaacttatactggttcaaagagatttctaacaacgtgagatcagggagaaggctttcactaggggaatacaagagagcagtgtcatggtcaaagtatttggtctcttctggggcggccataaagggagaaggagaagaagaatggagtgctgatctgtctcagttgttcatagggtcaaaatttgcctctggcaggcatagcaggatctacagaggcatctacaagcacatggatgttgcaattaagctggtgagtcaacctgaggaggatgaggacttggctgttttgcttgagaagcaattcacttctgaggttgctttgctctttcgattgcgccatccaaatatcattacttttgttgcagcttgcaagaaacctcctgtgttctgcataattactgaatatttggctgggggttccttgagaaaatacttggttcagcaagggccacattcagttactcacaaagttgttctgaaattagctttagacatagcacggggaatgcaatatcttcattctcagggtatacttcacagggatctcaaatcagaaaacctgctgttgggggaagatttgtgcgtaaaagtagcagattttgggatctcttgcttggaatctcagacaggcagtgcaaaaggattcactggaacataccgttggatggcacctgaaatgatcaaagaaaagcgtcacaccaagaaagtagatgtctatagtttcgccatagttctatgggagctattaacaggattgacgccatttgacaacatgacaccagagcaagcagcatatgctgtgactcacaagaatgaaaggcctccgttgccatgtgactgtccaaaggcatttagccatctcatcaacagatgctggtcaagcaacccagataaaaggccacattttaatgagatagtcacaattttggagagctacattgaagcacttgagcaggatccagaatttttctctacttacaaaccacgtcctaataatataattctcagatgcttatcaaaatgtagtaatatatttgcttcttgcaaagcttagcattctctttccgataatgtaacatgaattgtattaaatcaatcccaagaaccaaaaatatgtttaattaataactatattaatcctcttcc

SEQ ID NO: 57330 - protein, 352 aa, Glycine max
  peptide (1)..(352): Ceres Seq. ID no. 15171810
  misc_feature (26)..(320): Homolog of NCBI NO: 18087633 NR Description: AT5g58950/k19m22_150 [Arabidopsis thaliana]
  misc_feature (26)..(321): Homolog of NCBI NO: 18424175 NR Description: protein kinase family [Arabidopsis thaliana]
  misc_feature (48)..(321): Homolog of NCBI NO: 34909474 NR Description: putative protein kinase [Oryza sativa (japonica
  misc_feature (24)..(321): Homolog of NCBI NO: 10241603 NR Description: protein kinase (PK) [Fagus sylvatica]
  misc_feature (15)..(321): Homolog of NCBI NO: 478809 NR Description: protein kinase 6 (EC 2.7.1.-) - soybean
  misc_feature (30)..(119): Homolog of NCBI NO: 7940280 NR Description: F24O1.13 [Arabidopsis thaliana]
  misc_feature (134)..(320): Homolog of NCBI NO: 7940280 NR Description: F24O1.13 [Arabidopsis thaliana]
  misc_feature (30)..(320): Homolog of NCBI NO: 15220773 NR Description: protein kinase, putative [Arabidopsis thaliana]
  misc_feature (30)..(320): Homolog of NCBI NO: 7488256 NR Description: protein kinase homolog F24O1.13 - Arabidopsis
  misc_feature (15)..(274): Homolog of NCBI NO: 34894114 NR Description: putative protein kinase [Oryza sativa (japonica
MKNLYWFKEISNNVRSGRRLSLGEYKRAVSWSKYLVSSGAAIKGEGEEEWSADLSQLFIGSKFASGRHSRIYRGIYKHMDVAIKLVSQPEEDEDLAVLLEKQFTSEVALLFRLRHPNIITFVAACKKPPVFCIITEYLAGGSLRKYLVQQGPHSVTHKVVLKLALDIARGMQYLHSQGILHRDLKSENLLLGEDLCVKVADFGISCLESQTGSAKGFTGTYRWMAPEMIKEKRHTKKVDVYSFAIVLWELLTGLTPFDNMTPEQAAYAVTHKNERPPLPCDCPKAFSHLINRCWSSNPDKRPHFNEIVTILESYIEALEQDPEFFSTYKPRPNNIILRCLSKCSNIFASCKA

SEQ ID NO: 57331 - protein, 274 aa, Glycine max
  peptide (1)..(274): Ceres Seq. ID no. 15171811
  misc_feature (1)..(242): Homolog of NCBI NO: 18087633 NR Description: AT5g58950/k19m22_150 [Arabidopsis thaliana]
  misc_feature (1)..(243): Homolog of NCBI NO: 18424175 NR Description: protein kinase family [Arabidopsis thaliana]
  misc_feature (1)..(243): Homolog of NCBI NO: 34909474 NR Description: putative protein kinase [Oryza sativa (japonica
  misc_feature (1)..(243): Homolog of NCBI NO: 10241603 NR Description: protein kinase (PK) [Fagus sylvatica]
  misc_feature (1)..(243): Homolog of NCBI NO: 478809 NR Description: protein kinase 6 (EC 2.7.1.-) - soybean
  misc_feature (1)..(41): Homolog of NCBI NO: 7940280 NR Description: F24O1.13 [Arabidopsis thaliana]
  misc_feature (56)..(242): Homolog of NCBI NO: 7940280 NR Description: F24O1.13 [Arabidopsis thaliana]
  misc_feature (1)..(242): Homolog of NCBI NO: 15220773 NR Description: protein kinase, putative [Arabidopsis thaliana]
  misc_feature (1)..(242): Homolog of NCBI NO: 7488256 NR Description: protein kinase homolog F24O1.13 - Arabidopsis
  misc_feature (1)..(196): Homolog of NCBI NO: 34894114 NR Description: putative protein kinase [Oryza sativa (japonica
MDVAIKLVSQPEEDEDLAVLLEKQFTSEVALLFRLRHPNIITFVAACKKPPVFCIITEYLAGGSLRKYLVQQGPHSVTHKVVLKLALDIARGMQYLHSQGILHRDLKSENLLLGEDLCVKVADFGISCLESQTGSAKGFTGTYRWMAPEMIKEKRHTKKVDVYSFAIVLWELLTGLTPFDNMTPEQAAYAVTHKNERPPLPCDCPKAFSHLINRCWSSNPDKRPHFNEIVTILESYIEALEQDPEFFSTYKPRPNNIILRCLSKCSNIFASCKA

SEQ ID NO: 57332 - protein, 182 aa, Glycine max
  peptide (1)..(182): Ceres Seq. ID no. 15171812
  misc_feature (1)..(142): Homolog of NCBI NO: 27085280 NR Description: serine/threonine protein kinase
  misc_feature (1)..(150): Homolog of NCBI NO: 18087633 NR Description: AT5g58950/k19m22_150 [Arabidopsis thaliana]
  misc_feature (1)..(151): Homolog of NCBI NO: 18424175 NR Description: protein kinase family [Arabidopsis thaliana]
  misc_feature (1)..(151): Homolog of NCBI NO: 34909474 NR Description: putative protein kinase [Oryza sativa (japonica
  misc_feature (1)..(151): Homolog of NCBI NO: 10241603 NR Description: protein kinase (PK) [Fagus sylvatica]
  misc_feature (1)..(151): Homolog of NCBI NO: 478809 NR Description: protein kinase 6 (EC 2.7.1.-) - soybean
  misc_feature (1)..(150): Homolog of NCBI NO: 7940280 NR Description: F24O1.13 [Arabidopsis thaliana]
  misc_feature (1)..(150): Homolog of NCBI NO: 15220773 NR Description: protein kinase, putative [Arabidopsis thaliana]
  misc_feature (1)..(150): Homolog of NCBI NO: 7488256 NR Description: protein kinase homolog F24O1.13 - Arabidopsis
  misc_feature (1)..(104): Homolog of NCBI NO: 34894114 NR Description: putative protein kinase [Oryza sativa (japonica
MQYLHSQGILHRDLKSENLLLGEDLCVKVADFGISCLESQTGSAKGFTGTYRWMAPEMIKEKRHTKKVDVYSFAIVLWELLTGLTPFDNMTPEQAAYAVTHKNERPPLPCDCPKAFSHLINRCWSSNPDKRPHFNEIVTILESYIEALEQDPEFFSTYKPRPNNIILRCLSKCSNIFASCKA

SEQ ID NO: 57333 - DNA, 1223 bp, Glycine max
  misc_feature (1)..(1223): Ceres Seq. ID no. 15172539
tagctctttgttctctgttctcgcgatttcggaagggtcgtgtttccctgcttcagtttcagcttcggcttcgagaagcgtcgattgggtccttaagctgttccttctctgtttctgacaaactgtataactcctatcaaacatgagcggtcgcttttctcgcacaatttatgtcggcaacctgccctctgatataagagagtcagaaattgaagatctattctacaagtatggccgtataatggatattgaattgaaggttcctccccgccctccatgttattgctttgttgagtttgataatgctcgagatgccgaagatgcaattcggggtcgagatggatacaactttgatggttgtcggttaagagtggagcttgctcatggtggtagagggccatcatcaagtgatcgacgtggatatggaggaggaggtggtaatggtggagcaggcgggggtcgttttggcatctcacgccattctgaatttcgagttattgttcgtggactcccatcttctgcatcttggcaagatttgaaggatcatatgcgaaaagctggggacgtgtgttttgctgaggtttcccgtgatagtgaagggacttttggcattgttgattacactaattatgatgacatgaagtatgccattcggaaattggatgacactgagtttagaaatccctgggcgagagcttatattcgggtgaggaagtatgagagtagtcgttctaggagccgcagcaggagccccagcaggagccccagcaggagcagaagtccaaaaagagttagaagtagatctctggagcgttctgtgtctaggtcacgatctagatctcaatcagcatcaccaatcaaatcttctaggccaagatcacgatcccgatcacgatcacgatctggatctggatctcctcatcaggtcctgtcaggtagtggttgaatttctgacaaagctggtggttctctggtgatattgttccattctggtgggcagtatcggaattatattggagttggactaaattgttttaagggaaaattattgatgtgcctaggctgtttggtgattgtcttatttcttttaaattaaaatgttggacattggccttgccctttgtaccttagcaaacacaagaatatctttagtcctcgcaaactgtgaatccaatttgaatggttttaaacagatttataaaaaaaaaatctacatatatcgc

SEQ ID NO: 57334 - protein, 267 aa, Glycine max
  peptide (1)..(267): Ceres Seq. ID no. 15172540
  misc_feature (9)..(77): Pfam Name: RNA recognition motif. (a.k.a. RRM, RBD, or RNP domain) Pfam Description: RNA recognition motif. (a.k.a. RRM, RBD, or RNP
  misc_feature (1)..(259): Homolog of NCBI NO: 5815237 NR Description: splicing factor SR1C [Arabidopsis thaliana]
  misc_feature (1)..(259): Homolog of NCBI NO: 5815239 NR Description: splicing factor SR1E [Arabidopsis thaliana]
  misc_feature (1)..(259): Homolog of NCBI NO: 5815236 NR Description: splicing factor SR1B [Arabidopsis thaliana]
  misc_feature (1)..(266): Homolog of NCBI NO: 5815235 NR Description: splicing factor SR1 [Arabidopsis thaliana]
  misc_feature (1)..(259): Homolog of NCBI NO: 30678395 NR Description: pre-mRNA splicing factor SF2 (SR1 protein)
  misc_feature (1)..(259): Homolog of NCBI NO: 2443473 NR Description: ASF/SF2 homolog [Arabidopsis thaliana]
  misc_feature (1)..(259): Homolog of NCBI NO: 30678391 NR Description: pre-mRNA splicing factor SF2 (SR1 protein)
  misc_feature (1)..(259): Homolog of NCBI NO: 33146854 NR Description: putative pre-mRNA splicing factor SF2
  misc_feature (1)..(259): Homolog of NCBI NO: 22331714 NR Description: arginine/serine-rich splicing factor (atSRp34),
  misc_feature (1)..(259): Homolog of NCBI NO: 12324445 NR Description: putative splicing factor; 53460-55514
MSGRFSRTIYVGNLPSDIRESEIEDLFYKYGRIMDIELKVPPRPPCYCFVEFDNARDAEDAIRGRDGYNFDGCRLRVELAHGGRGPSSSDRRGYGGGGGNGGAGGGRFGISRHSEFRVIVRGLPSSASWQDLKDHMRKAGDVCFAEVSRDSEGTFGIVDYTNYDDMKYAIRKLDDTEFRNPWARAYIRVRKYESSRSRSRSRSPSRSPSRSRSPKRVRSRSLERSVSRSRSRSQSASPIKSSRPRSRSRSRSRSGSGSPHQVLSGSG

SEQ ID NO: 57335 - protein, 234 aa, Glycine max
  peptide (1)..(234): Ceres Seq. ID no. 15172541
  misc_feature (1)..(226): Homolog of NCBI NO: 5815237 NR Description: splicing factor SR1C [Arabidopsis thaliana]
  misc_feature (1)..(226): Homolog of NCBI NO: 5815239 NR Description: splicing factor SR1E [Arabidopsis thaliana]
  misc_feature (1)..(226): Homolog of NCBI NO: 5815236 NR Description: splicing factor SR1B [Arabidopsis thaliana]
  misc_feature (1)..(233): Homolog of NCBI NO: 5815235 NR Description: splicing factor SR1 [Arabidopsis thaliana]
  misc_feature (1)..(226): Homolog of NCBI NO: 30678395 NR Description: pre-mRNA splicing factor SF2 (SR1 protein)
  misc_feature (1)..(226): Homolog of NCBI NO: 2443473 NR Description: ASF/SF2 homolog [Arabidopsis thaliana]
  misc_feature (1)..(226): Homolog of NCBI NO: 30678391 NR Description: pre-mRNA splicing factor SF2 (SR1 protein)
  misc_feature (1)..(226): Homolog of NCBI NO: 33146854 NR Description: putative pre-mRNA splicing factor SF2
  misc_feature (1)..(226): Homolog of NCBI NO: 22331714 NR Description: arginine/serine-rich splicing factor (atSRp34),
  misc_feature (1)..(226): Homolog of NCBI NO: 12324445 NR Description: putative splicing factor; 53460-55514
MDIELKVPPRPPCYCFVEFDNARDAEDAIRGRDGYNFDGCRLRVELAHGGRGPSSSDRRGYGGGGGNGGAGGGRFGISRHSEFRVIVRGLPSSASWQDLKDHMRKAGDVCFAEVSRDSEGTFGIVDYTNYDDMKYAIRKLDDTEFRNPWARAYIRVRKYESSRSRSRSRSPSRSPSRSRSPKRVRSRSLERSVSRSRSRSQSASPIKSSRPRSRSRSRSRSGSGSPHQVLSGSG

SEQ ID NO: 57336 - DNA, 1526 bp, Glycine max
  misc_feature (1)..(1526): Ceres Seq. ID no. 15177368
atatatatgtactcctttgtttagtaaccgaccgtgtgcgagagagagagagagagagagagacggctatattcgcgcctcggtctctttatttctccgccaacgacaccaccgcatctttctctctttccgttcccttctctctccgatctgcattttgcattctcttccgatgccgatattctccaattcctcgccctgctgcaccgccgccgccgccgcagtggttaactcctccaaccggaagaccagattcgtctctccttcttggaggaattgcaaggtcacatctccaattttacggctctccgagaatgacaaattcaatgtgtctcggttagctcctagccactctaggcggtcagttaaggaccggaacatatcaatggcattagtgggcgaaactgttggagttggacaaaagggacaggtggccggctcctctagcatcttggcatatgatttgattcagggggcacttgtaagatggagttctgttatggacaggtctttacctgagccaccaacggctgtttttctgcatggaatcctaggttgcaggaaaaactggggaacttttgctaggagattggctcaagagtttcctacatggcagtttcttttagtagacctgcgatgtcatggcgattcagcatcaatccagaagaaagatccccatactgttgcatctgctgctatggatgttttaaaactggttcgagatctgagaataacgccccgtgtgttagttggtcatagttttggggggaaagttgttttgagcatggtagaccaagctgcaaagcctcttgctcggccagtgagagcttggattctggatgcaacccctggaaaagttcgagcaggtggagatggagaagatcatccagaagaactcatatcctttctaagtacactgccaaaggaggtcccttcaaagcggcatgttgtcagagctcttattcaacatggattttccaatgatgtggcgcagtgggttgtgactaacctgcgaccttctggctctcctggttcacaatcatcaagcttctcatgggtgtttgacctaagggggattgcagaaatgtatcaatcctatgaagaaacaaatttgtggaaaattgttgaagatgtacctcgtggggtgcatgtgaactttttgaaagcagaaagaagcttacatagatgggctcttgaagaccttcagcggatccatgcagctgaagagcttgctgttgaggaaggagggggagttgaaatgcatgtccttgaagatgctggccactgggtgcatactgataacccggatggactctttaggatactgtcatcatctttccaattccagggaggcaaaacctgagtttacaaatgtgctctcttgtaatttctatttatacgtggattgccttaacagtttgatgccattccttcttcccattttttgtctagttatcccctttgtatatgctattattttttttaatcttcttgtacatcaccgtaatatatattttttaatcgcg

SEQ ID NO: 57337 - protein, 453 aa, Glycine max
  peptide (1)..(453): Ceres Seq. ID no. 15177369
  misc_feature (204)..(444): Pfam Name: alpha/beta hydrolase fold Pfam Description: alpha/beta hydrolase fold
  misc_feature (178)..(365): Homolog of NCBI NO: 27363654 NR Description: Predicted hydrolase or acyltransferase [Vibrio
  misc_feature (176)..(337): Homolog of NCBI NO: 28897611 NR Description: putative esterase/lipase YbfF
  misc_feature (176)..(375): Homolog of NCBI NO: 15642097 NR Description: esterase/lipase YbfF, putative [Vibrio cholerae]
  misc_feature (176)..(446): Homolog of NCBI NO: 7486010 NR Description: hypothetical protein F22O6.50 - Arabidopsis
  misc_feature (172)..(268): Homolog of NCBI NO: 34908512 NR Description: P0679C12.26 [Oryza sativa (japonica
  misc_feature (277)..(446): Homolog of NCBI NO: 34908512 NR Description: P0679C12.26 [Oryza sativa (japonica
  misc_feature (176)..(446): Homolog of NCBI NO: 22331752 NR Description: expressed protein [Arabidopsis thaliana]
  misc_feature (160)..(251): Homolog of NCBI NO: 20161236 NR Description: P0408G07.9 [Oryza sativa (japonica
  misc_feature (277)..(449): Homolog of NCBI NO: 20161236 NR Description: P0408G07.9 [Oryza sativa (japonica
  misc_feature (103)..(447): Homolog of NCBI NO: 15234891 NR Description: hydrolase, alpha/beta fold family [Arabidopsis
YICTPLFSNRPCARERERERDGYIRASVSLFLRQRHHRIFLSFRSLLSPICILHSLPMPIFSNSSPCCTAAAAAVVNSSNRKTRFVSPSWRNCKVTSPILRLSENDKFNVSRLAPSHSRRSVKDRNISMALVGETVGVGQKGQVAGSSSILAYDLIQGALVRWSSVMDRSLPEPPTAVFLHGILGCRKNWGTFARRLAQEFPTWQFLLVDLRCHGDSASIQKKDPHTVASAAMDVLKLVRDLRITPRVLVGHSFGGKVVLSMVDQAAKPLARPVRAWILDATPGKVRAGGDGEDHPEELISFLSTLPKEVPSKRHVVRALIQHGFSNDVAQWVVTNLRPSGSPGSQSSSFSWVFDLRGIAEMYQSYEETNLWKIVEDVPRGVHVNFLKAERSLHRWALEDLQRIHAAEELAVEEGGGVEMHVLEDAGHWVHTDNPDGLFRILSSSFQFQGGKT

SEQ ID NO: 57338 - protein, 396 aa, Glycine max
  peptide (1)..(396): Ceres Seq. ID no. 15177370
  misc_feature (147)..(387): Pfam Name: alpha/beta hydrolase fold Pfam Description: alpha/beta hydrolase fold
  misc_feature (121)..(308): Homolog of NCBI NO: 27363654 NR Description: Predicted hydrolase or acyltransferase [Vibrio
  misc_feature (119)..(280): Homolog of NCBI NO: 28897611 NR Description: putative esterase/lipase YbfF
  misc_feature (119)..(318): Homolog of NCBI NO: 15642097 NR Description: esterase/lipase YbfF, putative [Vibrio cholerae]
  misc_feature (119)..(389): Homolog of NCBI NO: 7486010 NR Description: hypothetical protein F22O6.50 - Arabidopsis
  misc_feature (115)..(211): Homolog of NCBI NO: 34908512 NR Description: P0679C12.26 [Oryza sativa (japonica
  misc_feature (220)..(389): Homolog of NCBI NO: 34908512 NR Description: P0679C12.26 [Oryza sativa (japonica
  misc_feature (119)..(389): Homolog of NCBI NO: 22331752 NR Description: expressed protein [Arabidopsis thaliana]
  misc_feature (103)..(194): Homolog of NCBI NO: 20161236 NR Description: P0408G07.9 [Oryza sativa (japonica
  misc_feature (220)..(392): Homolog of NCBI NO: 20161236 NR Description: P0408G07.9 [Oryza sativa (japonica
  misc_feature (46)..(390): Homolog of NCBI NO: 15234891 NR Description: hydrolase, alpha/beta fold family [Arabidopsis
MPIFSNSSPCCTAAAAAVVNSSNRKTRFVSPSWRNCKVTSPILRLSENDKFNVSRLAPSHSRRSVKDRNISMALVGETVGVGQKGQVAGSSSILAYDLIQGALVRWSSVMDRSLPEPPTAVFLHGILGCRKNWGTFARRLAQEFPTWQFLLVDLRCHGDSASIQKKDPHTVASAAMDVLKLVRDLRITPRVLVGHSFGGKVVLSMVDQAAKPLARPVRAWILDATPGKVRAGGDGEDHPEELISFLSTLPKEVPSKRHVVRALIQHGFSNDVAQWVVTNLRPSGSPGSQSSSFSWVFDLRGIAEMYQSYEETNLWKIVEDVPRGVHVNFLKAERSLHRWALEDLQRIHAAEELAVEEGGGVEMHVLEDAGHWVHTDNPDGLFRILSSSFQFQGGKT

SEQ ID NO: 57339 - protein, 325 aa, Glycine max
  peptide (1)..(325): Ceres Seq. ID no. 15177371
  misc_feature (76)..(316): Pfam Name: alpha/beta hydrolase fold Pfam Description: alpha/beta hydrolase fold
  misc_feature (50)..(237): Homolog of NCBI NO: 27363654 NR Description: Predicted hydrolase or acyltransferase [Vibrio
  misc_feature (48)..(209): Homolog of NCBI NO: 28897611 NR Description: putative esterase/lipase YbfF
  misc_feature (48)..(247): Homolog of NCBI NO: 15642097 NR Description: esterase/lipase YbfF, putative [Vibrio cholerae]
  misc_feature (48)..(318): Homolog of NCBI NO: 7486010 NR Description: hypothetical protein F22O6.50 - Arabidopsis
  misc_feature (44)..(140): Homolog of NCBI NO: 34908512 NR Description: P0679C12.26 [Oryza sativa (japonica
  misc_feature (149)..(318): Homolog of NCBI NO: 34908512 NR Description: P0679C12.26 [Oryza sativa (japonica
  misc_feature (48)..(318): Homolog of NCBI NO: 22331752 NR Description: expressed protein [Arabidopsis thaliana]
  misc_feature (32)..(123): Homolog of NCBI NO: 20161236 NR Description: P0408G07.9 [Oryza sativa (japonica
  misc_feature (149)..(321): Homolog of NCBI NO: 20161236 NR Description: P0408G07.9 [Oryza sativa (japonica
  misc_feature (1)..(319): Homolog of NCBI NO: 15234891 NR Description: hydrolase, alpha/beta fold family [Arabidopsis
MALVGETVGVGQKGQVAGSSSILAYDLIQGALVRWSSVMDRSLPEPPTAVFLHGILGCRKNWGTFARRLAQEFPTWQFLLVDLRCHGDSASIQKKDPHTVASAAMDVLKLVRDLRITPRVLVGHSFGGKVVLSMVDQAAKPLARPVRAWILDATPGKVRAGGDGEDHPEELISFLSTLPKEVPSKRHVVRALIQHGFSNDVAQWVVTNLRPSGSPGSQSSSFSWVFDLRGIAEMYQSYEETNLWKIVEDVPRGVHVNFLKAERSLHRWALEDLQRIHAAEELAVEEGGGVEMHVLEDAGHWVHTDNPDGLFRILSSSFQFQGGKT

SEQ ID NO: 57340 - DNA, 585 bp, Glycine max
  misc_feature (1)..(585): Ceres Seq. ID no. 13594248
caccaccacggtgcaagttgaagacgaaccacaatctgggaaaaggcaagacaaaaaaagtgcgcagggttaaggttgtggtttatagtttagtttatctatggctagcggcaccacaagaatgctagtgaaggagatgttgcaactctcttcttccacacttcacttctcttcttcggcgcttcgcggcctctctcctcctctgcccttctcaattcaattgcgacgctcgcgggggcgccctgcaattcgatgtgcttcctcttcctcagactcagatgcttccaacaaagtctcgtctcgtctgtcgcaggttcagcatcttcttcagcaggccgaacaccgcgctctctccgccgaccagggcccacctcctaaaatcaccttagatcatgttacggtgagctttgccagaagtggaggacctgggggtcagaatgtcaataaagtgaacaccaaggtggacatgcgcttcaatgttaaaaatgcatattggttgagtgacaggatcagagacaagattttgcaaacggagaaaaaccgtattaactgtttaaacacaataaagttggaacgggagggggg

SEQ ID NO: 57341 - protein, 161 aa, Glycine max
  peptide (1)..(161): Ceres Seq. ID no. 13594249
  misc_feature (123)..(150): Homolog of NCBI NO: 15221608 NR Description: expressed protein [Arabidopsis thaliana]
  misc_feature (94)..(149): Homolog of NCBI NO: 19921098 NR Description: CG6094-PA [Drosophila melanogaster]
  misc_feature (94)..(160): Homolog of NCBI NO: 20306641 NR Description: Ict1 protein [Mus musculus]
  misc_feature (94)..(160): Homolog of NCBI NO: 12833859 NR Description: unnamed protein product [Mus musculus]
  misc_feature (94)..(160): Homolog of NCBI NO: 27690532 NR Description: similar to immature colon carcinoma transcript 1
  misc_feature (77)..(160): Homolog of NCBI NO: 19387848 NR Description: immature colon carcinoma transcript 1 [Mus
  misc_feature (94)..(160): Homolog of NCBI NO: 30585121 NR Description: Homo sapiens immature colon carcinoma transcript
  misc_feature (94)..(160): Homolog of NCBI NO: 4557657 NR Description: immature colon carcinoma transcript 1 [Homo
  misc_feature (97)..(150): Homolog of NCBI NO: 6630453 NR Description: F23N19.20 [Arabidopsis thaliana]
  misc_feature (6)..(150): Homolog of NCBI NO: 27754314 NR Description: unknown protein [Arabidopsis thaliana]
MASGTTRMLVKEMLQLSSSTLHFSSSALRGLSPPLPFSIQLRRSRGRPAIRCASSSSDSDASNKVSSRLSQVQHLLQQAEHRALSADQGPPPKITLDHVTVSFARSGGPGGQNVNKVNTKVDMRFNVKNAYWLSDRIRDKILQTEKNRINCLNTIKLEREG

SEQ ID NO: 57342 - protein, 154 aa, Glycine max
  peptide (1)..(154): Ceres Seq. ID no. 13594250
  misc_feature (116)..(143): Homolog of NCBI NO: 15221608 NR Description: expressed protein [Arabidopsis thaliana]
  misc_feature (87)..(142): Homolog of NCBI NO: 19921098 NR Description: CG6094-PA [Drosophila melanogaster]
  misc_feature (87)..(153): Homolog of NCBI NO: 20306641 NR Description: Ict1 protein [Mus musculus]
  misc_feature (87)..(153): Homolog of NCBI NO: 12833859 NR Description: unnamed protein product [Mus musculus]
  misc_feature (87)..(153): Homolog of NCBI NO: 27690532 NR Description: similar to immature colon carcinoma transcript 1
  misc_feature (70)..(153): Homolog of NCBI NO: 19387848 NR Description: immature colon carcinoma transcript 1 [Mus
  misc_feature (87)..(153): Homolog of NCBI NO: 30585121 NR Description: Homo sapiens immature colon carcinoma transcript
  misc_feature (87)..(153): Homolog of NCBI NO: 4557657 NR Description: immature colon carcinoma transcript 1 [Homo
  misc_feature (90)..(143): Homolog of NCBI NO: 6630453 NR Description: F23N19.20 [Arabidopsis thaliana]
  misc_feature (1)..(143): Homolog of NCBI NO: 27754314 NR Description: unknown protein [Arabidopsis thaliana]
MLVKEMLQLSSSTLHFSSSALRGLSPPLPFSIQLRRSRGRPAIRCASSSSDSDASNKVSSRLSQVQHLLQQAEHRALSADQGPPPKITLDHVTVSFARSGGPGGQNVNKVNTKVDMRFNVKNAYWLSDRIRDKILQTEKNRINCLNTIKLEREG

SEQ ID NO: 57343 - protein, 149 aa, Glycine max
  peptide (1)..(149): Ceres Seq. ID no. 13594251
  misc_feature (111)..(138): Homolog of NCBI NO: 15221608 NR Description: expressed protein [Arabidopsis thaliana]
  misc_feature (82)..(137): Homolog of NCBI NO: 19921098 NR Description: CG6094-PA [Drosophila melanogaster]
  misc_feature (82)..(148): Homolog of NCBI NO: 20306641 NR Description: Ict1 protein [Mus musculus]
  misc_feature (82)..(148): Homolog of NCBI NO: 12833859 NR Description: unnamed protein product [Mus musculus]
  misc_feature (82)..(148): Homolog of NCBI NO: 27690532 NR Description: similar to immature colon carcinoma transcript 1
  misc_feature (65)..(148): Homolog of NCBI NO: 19387848 NR Description: immature colon carcinoma transcript 1 [Mus
  misc_feature (82)..(148): Homolog of NCBI NO: 30585121 NR Description: Homo sapiens immature colon carcinoma transcript
  misc_feature (82)..(148): Homolog of NCBI NO: 4557657 NR Description: immature colon carcinoma transcript 1 [Homo
  misc_feature (85)..(138): Homolog of NCBI NO: 6630453 NR Description: F23N19.20 [Arabidopsis thaliana]
  misc_feature (1)..(138): Homolog of NCBI NO: 27754314 NR Description: unknown protein [Arabidopsis thaliana]
MLQLSSSTLHFSSSALRGLSPPLPFSIQLRRSRGRPAIRCASSSSDSDASNKVSSRLSQVQHLLQQAEHRALSADQGPPPKITLDHVTVSFARSGGPGGQNVNKVNTKVDMRFNVKNAYWLSDRIRDKILQTEKNRINCLNTIKLEREG

SEQ ID NO: 57344 - DNA, 1206 bp, Glycine max
  misc_feature (1)..(1206): Ceres Seq. ID no. 15175898
atatactttttatgttactgttaatttatatttgacttaaatacatgttgattgtaaatccccagacattgtcttcaattcctaccaataaaaaaaaaatagatgttgatatgatttttggaattcaatattatcttactgtgtggttacgcatgtagaccatggcatggatactagatgagtattccaaattccacggttactctcctgcagtagtgactggaaaacctatagatcttggtggatctctcggtagagacgcggctacaggacgaggagtcctctttgcaacagaggctttgcttaatgagtatgggaagagtgtatctggacaacggtttgtcatacagggttttggaaatgtagggtcatgggctgcccaattaattagtaataaaggtggaaaagttgttgctgtgagtgacataactggagccataaagaacagcaatggtcttgacatcccaagcctacttgagcattccaaagtgcacaggggagtaaaaggattcaatggtagtgatccaatagaccctaactcaatattggttgaagattgtgatgttctagtcccagcagctcttgggggtgtcatcaatagggaaaatgcaaatgaaatcaaggccaaatttattgtggaagcagctaatcacccaactgacccagaagctgatgagattttgaagaagaaaggggttgtgatcctcccagacatatttgcaaattcaggaggcgttacagttagctactttgagtgggttcagaacatccaaggtttcatgtgggatgaggagaaagtgaacaatgagctaaagacctacatgaccaaaggtttcaaagatgtgaaggaaatgtgcaaaacccatgaatgtgatcttcgtatgggagccttcaccctggcagttaaccgtgtcgcacgtgctactgtccttaggggctgggaagcttgacatccattgcttctgctttcaataaattaattacagagctcccactctcagcaacacttcacaaagtttttgttgctttcaactaatgtgttgggtgaatcgtattttcacgccaaattttctttcaataaattagtatagtatataaatctttttgtaactacatgtgtggttctatgccacttcttgtgacagccacgctttttaatataatgtcactttgctttgaaaaaaaaaaatttgatttatcaaaggg

SEQ ID NO: 57345 - protein, 262 aa, Glycine max
  peptide (1)..(262): Ceres Seq. ID no. 15175899
  misc_feature (27)..(259): Pfam Name: Glutamate/Leucine/Phenylalanine/Valine dehydrogenase Pfam Description: Glutamate/Leucine/Phenylalanine/Valine
  misc_feature (1)..(262): Homolog of NCBI NO: 7431775 NR Description: glutamate dehydrogenase (EC 1.4.1.2) - maize
  misc_feature (1)..(262): Homolog of NCBI NO: 12229803 NR Description: Glutamate dehydrogenase (GDH) (Legdh1)
  misc_feature (1)..(262): Homolog of NCBI NO: 21314959 NR Description: NADH-glutamate dehydrogenase [Lycopersicon
  misc_feature (1)..(262): Homolog of NCBI NO: 4150965 NR Description: glutamate dehydrogenase [Asparagus officinalis]
  misc_feature (1)..(262): Homolog of NCBI NO: 28269441 NR Description: glutamate dehydrogenase [Oryza sativa (japonica
  misc_feature (1)..(262): Homolog of NCBI NO: 7431768 NR Description: glutamate dehydrogenase (EC 1.4.1.-) B -
  misc_feature (1)..(262): Homolog of NCBI NO: 12643806 NR Description: Glutamate dehydrogenase B (GDH B)
  misc_feature (1)..(262): Homolog of NCBI NO: 20873461 NR Description: glutamate dehydrogenase [Nicotiana tabacum]
  misc_feature (1)..(260): Homolog of NCBI NO: 15228667 NR Description: glutamate dehydrogenase -related [Arabidopsis
  misc_feature (1)..(262): Homolog of NCBI NO: 15238762 NR Description: glutamate dehydrogenase (EC 1.4.1.-) 1
MAWILDEYSKFHGYSPAVVTGKPIDLGGSLGRDAATGRGVLFATEALLNEYGKSVSGQRFVIQGFGNVGSWAAQLISNKGGKVVAVSDITGAIKNSNGLDIPSLLEHSKVHRGVKGFNGSDPIDPNSILVEDCDVLVPAALGGVINRENANEIKAKFIVEAANHPTDPEADEILKKKGVVILPDIFANSGGVTVSYFEWVQNIQGFMWDEEKVNNELKTYMTKGFKDVKEMCKTHECDLRMGAFTLAVNRVARATVLRGWEA

SEQ ID NO: 57346 - DNA, 1526 bp, Glycine max
  misc_feature (1)..(1526): Ceres Seq. ID no. 14314382
aaaaaacgcacgaaagattccatccatttgcgacttgggagagagtaccattgctccactccctctccctcttcgccggcggccaccatgtctttgtcggagttccgaccactcgacgacaagttcctcatcgaatacataaagtccgtccccgccctctcctccaaactcgccgacaacttcgacgacttatctgtcaaagaagtcggagatggcaaccttaacttcgtcttcattgtttccaaccccgcaggttcttttgtcatcaaacaggctctgccatacgttcgttgcataggggaatcgtggcctatgacgaaggagagagcgtattttgagtcactggcactgaaagaagagggtcgtttgagccccgaacatgttcctgaagtatatcactttgaccgtaccatgtctttgattggtatgcgttacttggagcctccacatataatcctcagaaaagggttgattgctgggattgagtaccctcttttggctcaacacatggctgatttcatggcaaagacactcttcttcacgtctctgcttttccgttccacatctgaccacaaacgagacgttgccgaattttgtgggaatgtggagttatgcaggctcactgagcaggttgttttctccgacccttataaagtttctcaatataatcgttggacttccccctatctcgatcgtgatgctgaggcagttcgggaagacaatccgctgaagcttgaagttgctgagctgaaatctaagttcattgagagggcccaggcactaatacatggagatctacacactggttctgtgatggttacccgtgaatcaactcaagttattgatccagaatttgcattttatggaccaatgggttttgatattggagcattcttgggaaacttgattttggctttctttgctcaagatgggcatgctgatcaagcaaatgatcgaaaagcctataaggagtggattcttaagacaatcgaagacagttggaatcttttctatcaaaaattcacttcactttgggatgagcacaaaaatggtgctggtgaagcatatcttccaacaatctataacaatcctgaggttcaactgcttgtacagaagaaatacatgacagatttgtttcacgacagtcttggatttggtgctgctaaaattattaggagaattgttggtgtggcacatgttgaggatttcgaatccattactgatgctgctaaacgggcaagttgtgaacggcgggcacttgatttagctaagatgcttctcaaagaaagaagaaaatttgaaggcattgctgaaattatttcagcaattcggcaatactagccataacaaggttttgctatatcaatagttcaatacctccgtaatgtatcgtgttccccaacattttaactgagttgctctagtaacagttttgatcactttctaattatattatccatactgataacatttctcttgtggaccatcttaaaatttatatccaccgtgatttttgaatgattttt

SEQ ID NO: 57347 - protein, 446 aa, Glycine max
  peptide (1)..(446): Ceres Seq. ID no. 14314383
  misc_feature (68)..(345): Homolog of NCBI NO: 30022120 NR Description: 5-methylthioribose kinase [Bacillus cereus ATCC
  misc_feature (330)..(432): Homolog of NCBI NO: 21402086 NR Description: Choline_kinase, Choline/ethanolamine kinase
  misc_feature (68)..(345): Homolog of NCBI NO: 21402086 NR Description: Choline_kinase, Choline/ethanolamine kinase
  misc_feature (59)..(446): Homolog of NCBI NO: 18921366 NR Description: 5-methylthioribose kinase [Klebsiella pneumoniae]
  misc_feature (30)..(439): Homolog of NCBI NO: 16265283 NR Description: conserved hypothetical protein [Sinorhizobium
  misc_feature (35)..(439): Homolog of NCBI NO: 13476069 NR Description: hypothetical protein [Mesorhizobium loti]
  misc_feature (34)..(445): Homolog of NCBI NO: 27380009 NR Description: bll4898 [Bradyrhizobium japonicum]
  misc_feature (24)..(446): Homolog of NCBI NO: 32488395 NR Description: OSJNBa0043A12.25 [Oryza sativa (japonica
  misc_feature (35)..(446): Homolog of NCBI NO: 32488394 NR Description: OSJNBa0043A12.24 [Oryza sativa (japonica
  misc_feature (30)..(445): Homolog of NCBI NO: 18402794 NR Description: expressed protein [Arabidopsis thaliana]
KKRTKDSIHLRLGREYHCSTPSPSSPAATMSLSEFRPLDDKFLIEYIKSVPALSSKLADNFDDLSVKEVGDGNLNFVFIVSNPAGSFVIKQALPYVRCIGESWPMTKERAYFESLALKEEGRLSPEHVPEVYHFDRTMSLIGMRYLEPPHIILRKGLIAGIEYPLLAQHMADFMAKTLFFTSLLFRSTSDHKRDVAEFCGNVELCRLTEQVVFSDPYKVSQYNRWTSPYLDRDAEAVREDNPLKLEVAELKSKFIERAQALIHGDLHTGSVMVTRESTQVIDPEFAFYGPMGFDIGAFLGNLILAFFAQDGHADQANDRKAYKEWILKTIEDSWNLFYQKFTSLWDEHKNGAGEAYLPTIYNNPEVQLLVQKKYMTDLFHDSLGFGAAKIIRRIVGVAHVEDFESITDAAKRASCERRALDLAKMLLKERRKFEGIAEIISAIRQY

SEQ ID NO: 57348 - protein, 417 aa, Glycine max
  peptide (1)..(417): Ceres Seq. ID no. 14314384
  misc_feature (39)..(316): Homolog of NCBI NO: 30022120 NR Description: 5-methylthioribose kinase [Bacillus cereus ATCC
  misc_feature (301)..(403): Homolog of NCBI NO: 21402086 NR Description: Choline_kinase, Choline/ethanolamine kinase
  misc_feature (39)..(316): Homolog of NCBI NO: 21402086 NR Description: Choline_kinase, Choline/ethanolamine kinase
  misc_feature (30)..(417): Homolog of NCBI NO: 18921366 NR Description: 5-methylthioribose kinase [Klebsiella pneumoniae]
  misc_feature (1)..(410): Homolog of NCBI NO: 16265283 NR Description: conserved hypothetical protein [Sinorhizobium
  misc_feature (6)..(410): Homolog of NCBI NO: 13476069 NR Description: hypothetical protein [Mesorhizobium loti]
  misc_feature (5)..(416): Homolog of NCBI NO: 27380009 NR Description: bll4898 [Bradyrhizobium japonicum]
  misc_feature (1)..(417): Homolog of NCBI NO: 32488395 NR Description: OSJNBa0043A12.25 [Oryza sativa (japonica
  misc_feature (6)..(417): Homolog of NCBI NO: 32488394 NR Description: OSJNBa0043A12.24 [Oryza sativa (japonica
  misc_feature (1)..(416): Homolog of NCBI NO: 18402794 NR Description: expressed protein [Arabidopsis thaliana]
MSLSEFRPLDDKFLIEYIKSVPALSSKLADNFDDLSVKEVGDGNLNFVFIVSNPAGSFVIKQALPYVRCIGESWPMTKERAYFESLALKEEGRLSPEHVPEVYHFDRTMSLIGMRYLEPPHIILRKGLIAGIEYPLLAQHMADFMAKTLFFTSLLFRSTSDHKRDVAEFCGNVELCRLTEQVVFSDPYKVSQYNRWTSPYLDRDAEAVREDNPLKLEVAELKSKFIERAQALIHGDLHTGSVMVTRESTQVIDPEFAFYGPMGFDIGAFLGNLILAFFAQDGHADQANDRKAYKEWILKTIEDSWNLFYQKFTSLWDEHKNGAGEAYLPTIYNNPEVQLLVQKKYMTDLFHDSLGFGAAKIIRRIVGVAHVEDFESITDAAKRASCERRALDLAKMLLKERRKFEGIAEIISAIRQY

SEQ ID NO: 57349 - protein, 342 aa, Glycine max
  peptide (1)..(342): Ceres Seq. ID no. 14314385
  misc_feature (1)..(241): Homolog of NCBI NO: 30022120 NR Description: 5-methylthioribose kinase [Bacillus cereus ATCC
  misc_feature (226)..(328): Homolog of NCBI NO: 21402086 NR Description: Choline_kinase, Choline/ethanolamine kinase
  misc_feature (1)..(241): Homolog of NCBI NO: 21402086 NR Description: Choline_kinase, Choline/ethanolamine kinase
  misc_feature (1)..(342): Homolog of NCBI NO: 18921366 NR Description: 5-methylthioribose kinase [Klebsiella pneumoniae]
  misc_feature (1)..(335): Homolog of NCBI NO: 16265283 NR Description: conserved hypothetical protein [Sinorhizobium
  misc_feature (1)..(335): Homolog of NCBI NO: 13476069 NR Description: hypothetical protein [Mesorhizobium loti]
  misc_feature (1)..(341): Homolog of NCBI NO: 27380009 NR Description: bll4898 [Bradyrhizobium japonicum]
  misc_feature (1)..(342): Homolog of NCBI NO: 32488395 NR Description: OSJNBa0043A12.25 [Oryza sativa (japonica
  misc_feature (1)..(342): Homolog of NCBI NO: 32488394 NR Description: OSJNBa0043A12.24 [Oryza sativa (japonica
  misc_feature (1)..(341): Homolog of NCBI NO: 18402794 NR Description: expressed protein [Arabidopsis thaliana]
MTKERAYFESLALKEEGRLSPEHVPEVYHFDRTMSLIGMRYLEPPHIILRKGLIAGIEYPLLAQHMADFMAKTLFFTSLLFRSTSDHKRDVAEFCGNVELCRLTEQVVFSDPYKVSQYNRWTSPYLDRDAEAVREDNPLKLEVAELKSKFIERAQALIHGDLHTGSVMVTRESTQVIDPEFAFYGPMGFDIGAFLGNLILAFFAQDGHADQANDRKAYKEWILKTIEDSWNLFYQKFTSLWDEHKNGAGEAYLPTIYNNPEVQLLVQKKYMTDLFHDSLGFGAAKIIRRIVGVAHVEDFESITDAAKRASCERRALDLAKMLLKERRKFEGIAEIISAIRQY

SEQ ID NO: 57350 - DNA, 970 bp, Glycine max
  misc_feature (1)..(970): Ceres Seq. ID no. 12608154
agaacatcctaatcgaaaaaattctcaaagcaatgcaacaaaaaatgttgaactccacacccacctgcttccaccgcaccaccactctcactccctctccttctcttctatccactcctcttccttcttgttcttcttcttccacccatcatcattcatatctacacccccgccactcctccttccacactcaacctcttcgcttaagcaacctccgctaccacacccatttgccatcaacccccaagacactcaaagtgaactgttccaccagcgagcctctgaaggtcatgatatcaggtgcacctgcatcgggcaaaggcacgcaatgtgaattgattgtccaaaagtttggattggtgcatatatcaacaggggatttgctaagagcagaggtagcggctgggactgaaattggaaataaagcaaaggagttcatgaacacgggtcaattggttcctgatgaaattgtgacagcgatggtggcagcacgattggctcgcgaagatgttaggcataaagggtggcttcttgatgggtaccctcggagttttggccaagcccagagtctggagaaaatgcagatacggcctgatgtgtatatcgtattagatgttcctgatgaaattctgatcgacagatgtgttggtagaaggctagacccagtgacagggaagatatatcatctaaagttttttccaccggatacagaagaaattaaagcaaggctgataactcggcctgatgacactgaggagaagttatttgaaaggatggactcatcatgaaatgatctcctaaagtcttgtctccgtggatgcgcagtagattttgttgcatgacaagtttgatcacaaaattaatgagaatttaaagatcttagttgtcaaagttttagactgtattttcagcagaatcattaaagacgctttatcagttagcataatgcattattaggatggtgtcattt

SEQ ID NO: 57351 - protein, 261 aa, Glycine max
  peptide (1)..(261): Ceres Seq. ID no. 12608155
  misc_feature (98)..(216): Pfam Name: Adenylate kinase Pfam Description: Adenylate kinase
  misc_feature (94)..(258): Homolog of NCBI NO: 24111857 NR Description: adenylate kinase [Shigella flexneri 2a str. 301]
  misc_feature (94)..(258): Homolog of NCBI NO: 10121071 NR Description: Chain A, Mutant G10v Of Adenylate Kinase From E.
  misc_feature (94)..(258): Homolog of NCBI NO: 1773156 NR Description: adenylate kinase [Escherichia coli]
  misc_feature (75)..(260): Homolog of NCBI NO: 7687936 NR Description: possible adenylate kinase [Leishmania major]
  misc_feature (146)..(260): Homolog of NCBI NO: 38175634 NR Description: putative Adenylate kinase, chloroplast
  misc_feature (93)..(258): Homolog of NCBI NO: 37727511 NR Description: adenylate kinase [Trypanosoma cruzi]
  misc_feature (91)..(260): Homolog of NCBI NO: 1170606 NR Description: ADENYLATE KINASE, CHLOROPLAST (ATP-AMP
  misc_feature (56)..(253): Homolog of NCBI NO: 15238822 NR Description: putative protein
  misc_feature (97)..(258): Homolog of NCBI NO: 10176815 NR Description: adenylate kinase-like [Arabidopsis thaliana]
  misc_feature (24)..(258): Homolog of NCBI NO: 22327339 NR Description: adenylate kinase -like protein
NILIEKILKAMQQKMLNSTPTCFHRTTTLTPSPSLLSTPLPSCSSSSTHHHSYLHPRHSSFHTQPLRLSNLRYHTHLPSTPKTLKVNCSTSEPLKVMISGAPASGKGTQCELIVQKFGLVHISTGDLLRAEVAAGTEIGNKAKEFMNTGQLVPDEIVTAMVAARLAREDVRHKGWLLDGYPRSFGQAQSLEKMQIRPDVYIVLDVPDEILIDRCVGRRLDPVTGKIYHLKFFPPDTEEIKARLITRPDDTEEKLFERMDSS

SEQ ID NO: 57352 - protein, 251 aa, Glycine max
  peptide (1)..(251): Ceres Seq. ID no. 12608156
  misc_feature (88)..(206): Pfam Name: Adenylate kinase Pfam Description: Adenylate kinase
  misc_feature (84)..(248): Homolog of NCBI NO: 10121071 NR Description: Chain A, Mutant G10v Of Adenylate Kinase From E.
  misc_feature (84)..(248): Homolog of NCBI NO: 15800203 NR Description: adenylate kinase activity
  misc_feature (84)..(248): Homolog of NCBI NO: 1773156 NR Description: adenylate kinase [Escherichia coli]
  misc_feature (65)..(250): Homolog of NCBI NO: 7687936 NR Description: possible adenylate kinase [Leishmania major]
  misc_feature (136)..(250): Homolog of NCBI NO: 38175634 NR Description: putative Adenylate kinase, chloroplast
  misc_feature (83)..(248): Homolog of NCBI NO: 37727511 NR Description: adenylate kinase [Trypanosoma cruzi]
  misc_feature (81)..(250): Homolog of NCBI NO: 1170606 NR Description: ADENYLATE KINASE, CHLOROPLAST (ATP-AMP
  misc_feature (46)..(243): Homolog of NCBI NO: 15238822 NR Description: putative protein
  misc_feature (87)..(248): Homolog of NCBI NO: 10176815 NR Description: adenylate kinase-like [Arabidopsis thaliana]
  misc_feature (14)..(248): Homolog of NCBI NO: 22327339 NR Description: adenylate kinase -like protein
MQQKMLNSTPTCFHRTTTLTPSPSLLSTPLPSCSSSSTHHHSYLHPRHSSFHTQPLRLSNLRYHTHLPSTPKTLKVNCSTSEPLKVMISGAPASGKGTQCELIVQKFGLVHISTGDLLRAEVAAGTEIGNKAKEFMNTGQLVPDEIVTAMVAARLAREDVRHKGWLLDGYPRSFGQAQSLEKMQIRPDVYIVLDVPDEILIDRCVGRRLDPVTGKIYHLKFFPPDTEEIKARLITRPDDTEEKLFERMDSS

SEQ ID NO: 57353 - protein, 247 aa, Glycine max
  peptide (1)..(247): Ceres Seq. ID no. 12608157
  misc_feature (84)..(202): Pfam Name: Adenylate kinase Pfam Description: Adenylate kinase
  misc_feature (80)..(244): Homolog of NCBI NO: 26246489 NR Description: Adenylate kinase [Escherichia coli CFT073]
  misc_feature (80)..(244): Homolog of NCBI NO: 10121071 NR Description: Chain A, Mutant G10v Of Adenylate Kinase From E.
  misc_feature (80)..(244): Homolog of NCBI NO: 1773156 NR Description: adenylate kinase [Escherichia coli]
  misc_feature (61)..(246): Homolog of NCBI NO: 7687936 NR Description: possible adenylate kinase [Leishmania major]
  misc_feature (132)..(246): Homolog of NCBI NO: 38175634 NR Description: putative Adenylate kinase, chloroplast
  misc_feature (79)..(244): Homolog of NCBI NO: 37727511 NR Description: adenylate kinase [Trypanosoma cruzi]
  misc_feature (77)..(246): Homolog of NCBI NO: 1170606 NR Description: ADENYLATE KINASE, CHLOROPLAST (ATP-AMP
  misc_feature (42)..(239): Homolog of NCBI NO: 15238822 NR Description: putative protein
  misc_feature (83)..(244): Homolog of NCBI NO: 10176815 NR Description: adenylate kinase-like [Arabidopsis thaliana]
  misc_feature (10)..(244): Homolog of NCBI NO: 22327339 NR Description: adenylate kinase -like protein
MLNSTPTCFHRTTTLTPSPSLLSTPLPSCSSSSTHHHSYLHPRHSSFHTQPLRLSNLRYHTHLPSTPKTLKVNCSTSEPLKVMISGAPASGKGTQCELIVQKFGLVHISTGDLLRAEVAAGTEIGNKAKEFMNTGQLVPDEIVTAMVAARLAREDVRHKGWLLDGYPRSFGQAQSLEKMQIRPDVYIVLDVPDEILIDRCVGRRLDPVTGKIYHLKFFPPDTEEIKARLITRPDDTEEKLFERMDSS

SEQ ID NO: 57354 - DNA, 1317 bp, Glycine max
  misc_feature (1)..(1317): Ceres Seq. ID no. 14314327
attatgttaggaagacgcccctttatccatttggccggacaccacacaccgaagctattcagctattgtctattgcattgccattttcaagtaatggcgctactacgtcttgtttgcttaccttcaacaaatcaattatccactcaaccccattcccattcccaatccacctctttctcttttcttcgcaaaacgccccattctcaacccatcaatttcagtctctcttcctttcactttccacgcctatcccttatcacaaccaaacaaacccttaacctcactcccacacattcctccacttccgaacaacaaaccgaggagcctcttgtctctgaagaagaattttctcgcaccaggttgctcgctcagaactgccctggacaagcacccctgaagacattcgcaccctcttcgaaaaacatgggaaagtcctcgaagtcgagctttctatgtataagaaaaacagaaaccggggtttggcctttgtcgaaatgggttccccagaagaggcactggaagctctcaataatctcgaatcgtatgagtttgagggtcgtgtaattaaagtcaattatgctcggccaaaaaaggagaaaacagcgccgccccctgtgaaaccaaaggtggtgacgtttaacttgtttgttgctaacttatcctatgaagcaagctccaaagatcttaaggagttttttgatttgggaactggtagagttgtctctgctgaggttgtgtatcgtgataatcctagaaggccgtctggatatggatttgtgtccttcaagtctaagaaagaagctgaggctgctcttgctgagttccaaggaaaggtttttatgggaaggccaatcagggtggatcggggtcggcgttttgttcaacaaccaggggacgggagtgcaaagtctgaagatactccttctgagttgagtgtgaatggggcagaagctccacaaccagcagaggggagtgcaaagtctgaagatactccttctgagttgagtgtgaatggggaagaagctgacaaagctgattgatatcagtttttccctgatgcatatcgatattattgatgttgtatgtccttgcttcagacattttgaaagtttgctcattcttgcagataatccgaaatctttgattggtttagattatgtgttttactggtggttttcacccttatataccagaggcccttgagatacaaggagcggataggtgtaagcacaagcacttccgtgattcaagaatccatttatcttcattgcataatttaacaattgttggcaagctactatatcttaagaaagcgat

SEQ ID NO: 57355 - protein, 195 aa, Glycine max
  peptide (1)..(195): Ceres Seq. ID no. 14314328
  misc_feature (64)..(136): Pfam Name: RNA recognition motif. (a.k.a. RRM, RBD, or RNP domain) Pfam Description: RNA recognition motif. (a.k.a. RRM, RBD, or RNP
  misc_feature (1)..(141): Homolog of NCBI NO: 7446361 NR Description: RNA-binding protein - fava bean (fragment)
  misc_feature (1)..(141): Homolog of NCBI NO: 7446357 NR Description: RNA-binding protein - garden pea
  misc_feature (1)..(137): Homolog of NCBI NO: 133246 NR Description: 28 kDa ribonucleoprotein, chloroplast precursor
  misc_feature (1)..(137): Homolog of NCBI NO: 7446359 NR Description: nucleic acid-binding protein - barley
  misc_feature (1)..(137): Homolog of NCBI NO: 7446356 NR Description: Ps16 protein - wheat
  misc_feature (1)..(137): Homolog of NCBI NO: 7446358 NR Description: cp31AHv protein - barley
  misc_feature (1)..(176): Homolog of NCBI NO: 38346724 NR Description: OSJNBa0086O06.22 [Oryza sativa (japonica
  misc_feature (1)..(159): Homolog of NCBI NO: 15226983 NR Description: 33 kDa ribonucleoprotein, chloroplast
  misc_feature (9)..(168): Homolog of NCBI NO: 25407472 NR Description: hypothetical protein AT4g09040 [imported] -
  misc_feature (1)..(168): Homolog of NCBI NO: 22328520 NR Description: RNA recognition motif (RRM)-containing protein
MYKKNRNRGLAFVEMGSPEEALEALNNLESYEFEGRVIKVNYARPKKEKTAPPPVKPKVVTFNLFVANLSYEASSKDLKEFFDLGTGRVVSAEVVYRDNPRRPSGYGFVSFKSKKEAEAALAEFQGKVFMGRPIRVDRGRRFVQQPGDGSAKSEDTPSELSVNGAEAPQPAEGSAKSEDTPSELSVNGEEADKAD

SEQ ID NO: 57356 - protein, 187 aa, Glycine max
  peptide (1)..(187): Ceres Seq. ID no. 14314329
IMLGRRPFIHLAGHHTPKLFSYCLLHCHFQVMALLRLVCLPSTNQLSTQPHSHSQSTSFSFLRKTPHSQPINFSLSSFHFPRLSLITTKQTLNLTPTHSSTSEQQTEEPLVSEEEFSRTRLLAQNCPGQAPLKTFAPSSKNMGKSSKSSFLCIRKTETGVWPLSKWVPQKRHWKLSIISNRMSLRVV

SEQ ID NO: 57357 - protein, 186 aa, Glycine max
  peptide (1)..(186): Ceres Seq. ID no. 14314330
MLGRRPFIHLAGHHTPKLFSYCLLHCHFQVMALLRLVCLPSTNQLSTQPHSHSQSTSFSFLRKTPHSQPINFSLSSFHFPRLSLITTKQTLNLTPTHSSTSEQQTEEPLVSEEEFSRTRLLAQNCPGQAPLKTFAPSSKNMGKSSKSSFLCIRKTETGVWPLSKWVPQKRHWKLSIISNRMSLRVV

SEQ ID NO: 57358 - DNA, 951 bp, Glycine max
  misc_feature (1)..(951): Ceres Seq. ID no. 14306006
agtgaaggaaaactctctctctctcaaaaagagaatcttcaaaatgtcaatcacaacaggaatatgtcaagtagttgctgtttcattgcttttgggattactgagtgtgtattccttggaatgtgatgatgatcgctgcaaaactgggctgtgcaacaacactggtgcctgcatttgcaacctccctgatccttccaccatcttgaatggtgatagaactttcttcggggggaagttttgtgacgaagaaatgaccatgtgtgatgggacaaactccttctggtgtgaacatggggcaacttgtgaggagattgttcaaggagagaagtactcttgcaaatgtcccctaggatttgctggggagcattgtgagcattctggagcaccctgtggtcatactttttgtttccataatgctgaatgcttggctgaaacaggtgatgtttgccagtgcccttctgaatggaaaggcagtgctgattgctctcttccaaccacaccaacagatttttactcaatttcaactgacacaaaatcatctaaagtcagcagcagcagtgactccaataaggcactggctgtcttggcagtttcttcagtgggaggagctgctgctggtgccatttatggcaagaaactattcaacaagaaaaaaagagaggcaaggttccagcaattatctgaaatgcagactcaagggatattggatgatgatggtgatgaggaggatgaaaaccacaatatggtaccccaaagggtccatggtgatatttcacacaattagtgggcacttccttttccagcatcagaacattttagcactcttagctcaagtagttttttttgtcagttttcataattggcagtagcattttatttggtaagcttgagtagtactaatatttatatgattgtgcttaataaaaagatggcatgcaagcacatttttct

SEQ ID NO: 57359 - protein, 260 aa, Glycine max
  peptide (1)..(260): Ceres Seq. ID no. 14306007
  misc_feature (95)..(123): Pfam Name: EGF-like domain Pfam Description: EGF-like domain
  misc_feature (40)..(158): Homolog of NCBI NO: 107215 NR Description: notch protein homolog TAN-1 precursor - human
  misc_feature (40)..(158): Homolog of NCBI NO: 338675 NR Description: TAN1
  misc_feature (40)..(158): Homolog of NCBI NO: 6093542 NR Description: Neurogenic locus notch homolog protein 1
  misc_feature (40)..(158): Homolog of NCBI NO: 112074 NR Description: notch protein homolog - rat
  misc_feature (40)..(158): Homolog of NCBI NO: 31543332 NR Description: Notch gene homolog 1; Notch gene homolog 1,
  misc_feature (40)..(158): Homolog of NCBI NO: 31339071 NR Description: transmembrane receptor Notch1 [Mus musculus]
  misc_feature (40)..(158): Homolog of NCBI NO: 31339069 NR Description: transmembrane receptor Notch1 B [Mus musculus]
  misc_feature (40)..(158): Homolog of NCBI NO: 31339070 NR Description: transmembrane receptor Notch1 D [Mus musculus]
  misc_feature (40)..(158): Homolog of NCBI NO: 1352528 NR Description: Neurogenic locus notch homolog protein 1
  misc_feature (44)..(258): Homolog of NCBI NO: 18858543 NR Description: deltaB [Danio rerio]
VKENSLSLKKRIFKMSITTGICQVVAVSLLLGLLSVYSLECDDDRCKTGLCNNTGACICNLPDPSTILNGDRTFFGGKFCDEEMTMCDGTNSFWCEHGATCEEIVQGEKYSCKCPLGFAGEHCEHSGAPCGHTFCFHNAECLAETGDVCQCPSEWKGSADCSLPTTPTDFYSISTDTKSSKVSSSSDSNKALAVLAVSSVGGAAAGAIYGKKLFNKKKREARFQQLSEMQTQGILDDDGDEEDENHNMVPQRVHGDISHN

SEQ ID NO: 57360 - protein, 246 aa, Glycine max
  peptide (1)..(246): Ceres Seq. ID no. 14306008
  misc_feature (81)..(109): Pfam Name: EGF-like domain Pfam Description: EGF-like domain
  misc_feature (26)..(144): Homolog of NCBI NO: 107215 NR Description: notch protein homolog TAN-1 precursor - human
  misc_feature (26)..(144): Homolog of NCBI NO: 338675 NR Description: TAN1
  misc_feature (26)..(144): Homolog of NCBI NO: 6093542 NR Description: Neurogenic locus notch homolog protein 1
  misc_feature (26)..(144): Homolog of NCBI NO: 112074 NR Description: notch protein homolog - rat
  misc_feature (26)..(144): Homolog of NCBI NO: 31339070 NR Description: transmembrane receptor Notch1 D [Mus musculus]
  misc_feature (26)..(144): Homolog of NCBI NO: 31339071 NR Description: transmembrane receptor Notch1 [Mus musculus]
  misc_feature (26)..(144): Homolog of NCBI NO: 31543332 NR Description: Notch gene homolog 1; Notch gene homolog 1,
  misc_feature (26)..(144): Homolog of NCBI NO: 31339069 NR Description: transmembrane receptor Notch1 B [Mus musculus]
  misc_feature (26)..(144): Homolog of NCBI NO: 1352528 NR Description: Neurogenic locus notch homolog protein 1
  misc_feature (30)..(244): Homolog of NCBI NO: 18858543 NR Description: deltaB [Danio rerio]
MSITTGICQVVAVSLLLGLLSVYSLECDDDRCKTGLCNNTGACICNLPDPSTILNGDRTFFGGKFCDEEMTMCDGTNSFWCEHGATCEEIVQGEKYSCKCPLGFAGEHCEHSGAPCGHTFCFHNAECLAETGDVCQCPSEWKGSADCSLPTTPTDFYSISTDTKSSKVSSSSDSNKALAVLAVSSVGGAAAGAIYGKKLFNKKKREARFQQLSEMQTQGILDDDGDEEDENHNMVPQRVHGDISHN

SEQ ID NO: 57361 - protein, 177 aa, Glycine max
  peptide (1)..(177): Ceres Seq. ID no. 14306009
  misc_feature (12)..(40): Pfam Name: EGF-like domain Pfam Description: EGF-like domain
  misc_feature (1)..(75): Homolog of NCBI NO: 107215 NR Description: notch protein homolog TAN-1 precursor - human
  misc_feature (1)..(75): Homolog of NCBI NO: 338675 NR Description: TAN1
  misc_feature (1)..(75): Homolog of NCBI NO: 6093542 NR Description: Neurogenic locus notch homolog protein 1
  misc_feature (1)..(75): Homolog of NCBI NO: 112074 NR Description: notch protein homolog - rat
  misc_feature (1)..(75): Homolog of NCBI NO: 31339069 NR Description: transmembrane receptor Notch1 B [Mus musculus]
  misc_feature (1)..(75): Homolog of NCBI NO: 31339070 NR Description: transmembrane receptor Notch1 D [Mus musculus]
  misc_feature (1)..(75): Homolog of NCBI NO: 31543332 NR Description: Notch gene homolog 1; Notch gene homolog 1,
  misc_feature (1)..(75): Homolog of NCBI NO: 31339071 NR Description: transmembrane receptor Notch1 [Mus musculus]
  misc_feature (1)..(75): Homolog of NCBI NO: 1352528 NR Description: Neurogenic locus notch homolog protein 1
  misc_feature (1)..(175): Homolog of NCBI NO: 18858543 NR Description: deltaB [Danio rerio]
MTMCDGTNSFWCEHGATCEEIVQGEKYSCKCPLGFAGEHCEHSGAPCGHTFCFHNAECLAETGDVCQCPSEWKGSADCSLPTTPTDFYSISTDTKSSKVSSSSDSNKALAVLAVSSVGGAAAGAIYGKKLFNKKKREARFQQLSEMQTQGILDDDGDEEDENHNMVPQRVHGDISHN

SEQ ID NO: 57362 - DNA, 887 bp, Glycine max
  misc_feature (1)..(887): Ceres Seq. ID no. 13594244
aattgtgaagaaggataataaaaggcatagatggtctagggcgaggggaggcgacgaagaagaaaatgatggcaacaaccgcgcctgtgcggtggcaaccaccaaacattaggtttaggattgagccgaagagagcgatgagagtgaaagcctttggtaagggaggcagggatatggatagggtttggagtgaggcgtggcgaagtgctaacgatgggtttgagcggttcgtcttcgaagcgaagaagactgcggagcgcatcgaccggcgctattccctttcgcggcgtctctcctccgtggcgagggcggccgcagaccgagcccgcgagattgatcgtgagtttgagattggacaacgttaccgcactttgagcatcgatttccaaagaaactggcccaagtacaggaagcagctcaaggactttctggatagtccgcttggaaagagctttgctacactgctgttcatctggttagcactgtctggttggcttttccggatcctgataatcgcaacatgggtacttccatttgcaggacctcttctaattggaactttggccaacaccttagttattaaggggacttgtccggcttgcaagatgcaatttggtggttacaagaatcaaataatccgatgtacaggctgtggcaacattgtgtggcaacccaaaggtagaaccaactccaaatctaataagtcagaccccgacattattgatgtcgactttgaggagaggtgacactctcccagcccattcattctttacttctacactttgtaaagttaccaacatttttccatgcccaccctctccatctattctgttggacttcatatttctctcatgttttcaatttctttgttctttcccaggcataac

SEQ ID NO: 57363 - protein, 226 aa, Glycine max
  peptide (1)..(226): Ceres Seq. ID no. 13594245
  misc_feature (7)..(226): Homolog of NCBI NO: 7486940 NR Description: hypothetical protein At2g44870 [imported] -
  misc_feature (9)..(226): Homolog of NCBI NO: 37537000 NR Description: unknown protein [Oryza sativa (japonica
  misc_feature (10)..(226): Homolog of NCBI NO: 18406650 NR Description: expressed protein [Arabidopsis thaliana]
MMATTAPVRWQPPNIRFRIEPKRAMRVKAFGKGGRDMDRVWSEAWRSANDGFERFVFEAKKTAERIDRRYSLSRRLSSVARAAADRAREIDREFEIGQRYRTLSIDFQRNWPKYRKQLKDFLDSPLGKSFATLLFIWLALSGWLFRILIIATWVLPFAGPLLIGTLANTLVIKGTCPACKMQFGGYKNQIIRCTGCGNIVWQPKGRTNSKSNKSDPDIIDVDFEER

SEQ ID NO: 57364 - protein, 225 aa, Glycine max
  peptide (1)..(225): Ceres Seq. ID no. 13594246
  misc_feature (6)..(225): Homolog of NCBI NO: 7486940 NR Description: hypothetical protein At2g44870 [imported] -
  misc_feature (8)..(225): Homolog of NCBI NO: 37537000 NR Description: unknown protein [Oryza sativa (japonica
  misc_feature (9)..(225): Homolog of NCBI NO: 18406650 NR Description: expressed protein [Arabidopsis thaliana]
MATTAPVRWQPPNIRFRIEPKRAMRVKAFGKGGRDMDRVWSEAWRSANDGFERFVFEAKKTAERIDRRYSLSRRLSSVARAAADRAREIDREFEIGQRYRTLSIDFQRNWPKYRKQLKDFLDSPLGKSFATLLFIWLALSGWLFRILIIATWVLPFAGPLLIGTLANTLVIKGTCPACKMQFGGYKNQIIRCTGCGNIVWQPKGRTNSKSNKSDPDIIDVDFEER

SEQ ID NO: 57365 - protein, 202 aa, Glycine max
  peptide (1)..(202): Ceres Seq. ID no. 13594247
  misc_feature (1)..(202): Homolog of NCBI NO: 7486940 NR Description: hypothetical protein At2g44870 [imported] -
  misc_feature (1)..(202): Homolog of NCBI NO: 37537000 NR Description: unknown protein [Oryza sativa (japonica
  misc_feature (1)..(202): Homolog of NCBI NO: 18406650 NR Description: expressed protein [Arabidopsis thaliana]
MRVKAFGKGGRDMDRVWSEAWRSANDGFERFVFEAKKTAERIDRRYSLSRRLSSVARAAADRAREIDREFEIGQRYRTLSIDFQRNWPKYRKQLKDFLDSPLGKSFATLLFIWLALSGWLFRILIIATWVLPFAGPLLIGTLANTLVIKGTCPACKMQFGGYKNQIIRCTGCGNIVWQPKGRTNSKSNKSDPDIIDVDFEER

SEQ ID NO: 57366 - DNA, 1084 bp, Glycine max
  misc_feature (1)..(1084): Ceres Seq. ID no. 14314194
ttttcaatttcaatatccgctcaaaccctaacctaactcctctcgtcgtcacaaaaagtcttcttctccgatcgttacgatgttggaactccgtctcgtgcaaggttcccttctgaagaaggttctggaatcgatcaaggagctcgtaaacgacgcgaacttcgactgctcctccaccgggttctccctccaggccatggattccagccacgtcgccctcgttgcgctcctcctccggtccgagggctttgagcactaccgctgcgaccgcaatacctccatgggcatgaacctcaacaacatggccaagatgctcaagtgcgccggcaatgacgacatcataaccatcaaggccgacgacggcagcgacaccgtcactttcatgttcgaaagccctacacaagataagatttctgattttgagatgaagctgatggacattgacagtgagcaccttgggattccagaggcagagtatcatgccattgttaagatgccatcctctgagtttgctaggatctgcaaggatctcagtagtattggtgacactgttgtcatttcaattactaaggagggtgttaagttttccaccaaaggagacattggaactgccaatatagtttgcaggcagaatacttctgtggacaagcctgaagaagctactgtcattgagatgaatgagcctgtgtccttgacatttgctttgcgatatatgaactcttttacaaaggcaacgccattgtccaacacagttaccattagtctgtcaaatgagctgccagttgtagtcgagtataagattgctgagatgggttatgtgcggttctatttggctcccaagatagaagaggatgaagaagatacgaaacctcaagtttaatctacctattagatgttgggttaggatattaggattttaatgccttttgaacttgtttttgttatacatctttgaagatattttaaccttgtgagcaacgaattggcattttgtggatttcttatgtgtattagtttcctgccaccttattttctcctgaatttattgtttattgtttagaacaatgtgaaacaattggtgtgc

SEQ ID NO: 57367 - protein, 266 aa, Glycine max
  peptide (1)..(266): Ceres Seq. ID no. 14314195
  misc_feature (127)..(254): Pfam Name: Proliferating cell nuclear antigen, C-terminal domain Pfam Description: Proliferating cell nuclear antigen, C-terminal
  misc_feature (1)..(265): Homolog of NCBI NO: 15227564 NR Description: proliferating cell nuclear antigen, PCNA -related
  misc_feature (1)..(261): Homolog of NCBI NO: 129691 NR Description: PROLIFERATING CELL NUCLEAR ANTIGEN (PCNA)
  misc_feature (1)..(264): Homolog of NCBI NO: 100160 NR Description: proliferating cell nuclear antigen (clone 4.10) -
  misc_feature (1)..(264): Homolog of NCBI NO: 129692 NR Description: PROLIFERATING CELL NUCLEAR ANTIGEN (PCNA) (CYCLIN)
  misc_feature (1)..(264): Homolog of NCBI NO: 4406225 NR Description: proliferating cell nuclear antigen II [Nicotiana
  misc_feature (1)..(264): Homolog of NCBI NO: 25005275 NR Description: proliferating cell nuclear antigen [Lycopersicon
  misc_feature (1)..(264): Homolog of NCBI NO: 3947727 NR Description: proliferating cell nuclear antigen [Nicotiana
  misc_feature (1)..(264): Homolog of NCBI NO: 6225836 NR Description: Proliferating cell nuclear antigen (PCNA)
  misc_feature (1)..(264): Homolog of NCBI NO: 10946427 NR Description: proliferating cell nuclear antigen [Nicotiana
  misc_feature (1)..(265): Homolog of NCBI NO: 3608175 NR Description: proliferating cell nuclear antigen [Pisum
MLELRLVQGSLLKKVLESIKELVNDANFDCSSTGFSLQAMDSSHVALVALLLRSEGFEHYRCDRNTSMGMNLNNMAKMLKCAGNDDIITIKADDGSDTVTFMFESPTQDKISDFEMKLMDIDSEHLGIPEAEYHAIVKMPSSEFARICKDLSSIGDTVVISITKEGVKFSTKGDIGTANIVCRQNTSVDKPEEATVIEMNEPVSLTFALRYMNSFTKATPLSNTVTISLSNELPVVVEYKIAEMGYVRFYLAPKIEEDEEDTKPQV

SEQ ID NO: 57368 - protein, 227 aa, Glycine max
  peptide (1)..(227): Ceres Seq. ID no. 14314196
  misc_feature (88)..(215): Pfam Name: Proliferating cell nuclear antigen, C-terminal domain Pfam Description: Proliferating cell nuclear antigen, C-terminal
  misc_feature (1)..(226): Homolog of NCBI NO: 15227564 NR Description: proliferating cell nuclear antigen, PCNA -related
  misc_feature (1)..(222): Homolog of NCBI NO: 129691 NR Description: PROLIFERATING CELL NUCLEAR ANTIGEN (PCNA)
  misc_feature (1)..(225): Homolog of NCBI NO: 100160 NR Description: proliferating cell nuclear antigen (clone 4.10) -
  misc_feature (1)..(225): Homolog of NCBI NO: 129692 NR Description: PROLIFERATING CELL NUCLEAR ANTIGEN (PCNA) (CYCLIN)
  misc_feature (1)..(225): Homolog of NCBI NO: 4406225 NR Description: proliferating cell nuclear antigen II [Nicotiana
  misc_feature (1)..(225): Homolog of NCBI NO: 25005275 NR Description: proliferating cell nuclear antigen [Lycopersicon
  misc_feature (1)..(225): Homolog of NCBI NO: 3947727 NR Description: proliferating cell nuclear antigen [Nicotiana
  misc_feature (1)..(225): Homolog of NCBI NO: 6225836 NR Description: Proliferating cell nuclear antigen (PCNA)
  misc_feature (1)..(225): Homolog of NCBI NO: 10946427 NR Description: proliferating cell nuclear antigen [Nicotiana
  misc_feature (1)..(226): Homolog of NCBI NO: 3608175 NR Description: proliferating cell nuclear antigen [Pisum
MDSSHVALVALLLRSEGFEHYRCDRNTSMGMNLNNMAKMLKCAGNDDIITIKADDGSDTVTFMFESPTQDKISDFEMKLMDIDSEHLGIPEAEYHAIVKMPSSEFARICKDLSSIGDTVVISITKEGVKFSTKGDIGTANIVCRQNTSVDKPEEATVIEMNEPVSLTFALRYMNSFTKATPLSNTVTISLSNELPVVVEYKIAEMGYVRFYLAPKIEEDEEDTKPQV

SEQ ID NO: 57369 - protein, 199 aa, Glycine max
  peptide (1)..(199): Ceres Seq. ID no. 14314197
  misc_feature (60)..(187): Pfam Name: Proliferating cell nuclear antigen, C-terminal domain Pfam Description: Proliferating cell nuclear antigen, C-terminal
  misc_feature (1)..(198): Homolog of NCBI NO: 15227564 NR Description: proliferating cell nuclear antigen, PCNA -related
  misc_feature (1)..(194): Homolog of NCBI NO: 129691 NR Description: PROLIFERATING CELL NUCLEAR ANTIGEN (PCNA)
  misc_feature (1)..(197): Homolog of NCBI NO: 100160 NR Description: proliferating cell nuclear antigen (clone 4.10) -
  misc_feature (1)..(197): Homolog of NCBI NO: 129692 NR Description: PROLIFERATING CELL NUCLEAR ANTIGEN (PCNA) (CYCLIN)
  misc_feature (1)..(197): Homolog of NCBI NO: 4406225 NR Description: proliferating cell nuclear antigen II [Nicotiana
  misc_feature (1)..(197): Homolog of NCBI NO: 25005275 NR Description: proliferating cell nuclear antigen [Lycopersicon
  misc_feature (1)..(197): Homolog of NCBI NO: 3947727 NR Description: proliferating cell nuclear antigen [Nicotiana
  misc_feature (1)..(197): Homolog of NCBI NO: 6225836 NR Description: Proliferating cell nuclear antigen (PCNA)
  misc_feature (1)..(197): Homolog of NCBI NO: 10946427 NR Description: proliferating cell nuclear antigen [Nicotiana
  misc_feature (1)..(198): Homolog of NCBI NO: 3608175 NR Description: proliferating cell nuclear antigen [Pisum
MGMNLNNMAKMLKCAGNDDIITIKADDGSDTVTFMFESPTQDKISDFEMKLMDIDSEHLGIPEAEYHAIVKMPSSEFARICKDLSSIGDTVVISITKEGVKFSTKGDIGTANIVCRQNTSVDKPEEATVIEMNEPVSLTFALRYMNSFTKATPLSNTVTISLSNELPVVVEYKIAEMGYVRFYLAPKIEEDEEDTKPQV

SEQ ID NO: 57370 - DNA, 1380 bp, Glycine max
  misc_feature (1)..(1380): Ceres Seq. ID no. 15168425
acacagttccctcacttctcttccctttgaccattcaaccttcctcgcctttgcctccgtttcaaaattgcgagaggcacttatttggtgaaggtataatcttgattcagaaaatatgctgcgtgactgagatggctggaggtgttattcagcagatattgaggaggaaactccaccctcggtttactaactctcccttgttgtcacccatcgtagcaaaaaaagatgatgctggctctactggcagtcagtccttaagagcacttgcattaattggagctggtttgtcaggtcttttcagtttttcaacaatggcagcagctgatgaagctgaacatggcctggcatgtccaagctatccatggcctcacaagggaattcttagttcatatgatcacgcttcgattcgtcgtggtcatcaagtttatacagaagtctgtgcttcctgccattctatgtctttgatatcgtatcgtgatttggttggtgttgcttatacagaagaagaggtaaaggctatggcagctgagattgaggtggttgatggccctaacgatgagggtgagatgtttacacgccctggtaaactcagtgatcgttttcctcagccatatgcaaatgaagcagctgctaggtttgctaatggaggagcttatcctccagatctaagtcttgttaccaaagcccgtcacaatggtcagaactatgtttttgcccttctgactggttatcgtgacccacctgctggtgtttcgataagagagggacttcattataatccttactttcctggtggagcaattgccatgcctaaaatgcttaatgatggtgctgtggaatatgaagatggtactcctgctacagaagctcagatggggaaggatgttgtgtcattcttaacttgggccgccgaacccgagatggaagagagaaaactgatgggatttaaatggatatttgtactgtcattggcactacttcaggctgcctattaccgccgcttgaggtggtcagttctaaagtctcgcaagctggttcttgatgttgtcaactagctctgcctcgagtttcattttcacttgaacaaagtttactgttggcaataatttgtcagatgattaagttgtttcatcatttcaaattctttcagctaagttaatgtttaatggaacaacaactagaagagtgttataattttgtttgagataaaaaaaaatgttccatgcacgagatgcgtttaatttttctcatcacccatctcggacttgtgtattgttgcattttccgagagctgttcctgtttcataaactattgaattttgtggaacttgtcgttattattcaagaaaaataatagataaatatgctcacgttggaaat

SEQ ID NO: 57371 - protein, 350 aa, Glycine max
  peptide (1)..(350): Ceres Seq. ID no. 15168426
  misc_feature (116)..(340): Pfam Name: Cytochrome C1 family Pfam Description: Cytochrome C1 family
  misc_feature (52)..(344): Homolog of NCBI NO: 38969870 NR Description: Unknown (protein for MGC:75973) [Silurana
  misc_feature (45)..(350): Homolog of NCBI NO: 34907202 NR Description: putative cytochrome c1 precursor
  misc_feature (75)..(350): Homolog of NCBI NO: 117765 NR Description: Cytochrome c1, heme protein, mitochondrial
  misc_feature (75)..(350): Homolog of NCBI NO: 82263 NR Description: ubiquinol-cytochrome-c reductase (EC 1.10.2.2)
  misc_feature (75)..(350): Homolog of NCBI NO: 7547401 NR Description: cytochrome c1 precursor [Solanum tuberosum]
  misc_feature (44)..(350): Homolog of NCBI NO: 15809956 NR Description: AT3g27240/K17E12_6 [Arabidopsis thaliana]
  misc_feature (44)..(350): Homolog of NCBI NO: 15215624 NR Description: AT5g40810/MHK7_4 [Arabidopsis thaliana]
  misc_feature (44)..(350): Homolog of NCBI NO: 15232125 NR Description: cytochrome c -related [Arabidopsis thaliana]
  misc_feature (44)..(350): Homolog of NCBI NO: 21593678 NR Description: cytochrome c, putative [Arabidopsis thaliana]
  misc_feature (44)..(350): Homolog of NCBI NO: 15237497 NR Description: cytochrome c1 precursor [Arabidopsis thaliana]
TVPSLLFPLTIQPSSPLPPFQNCERHLFGEGIILIQKICCVTEMAGGVIQQILRRKLHPRFTNSPLLSPIVAKKDDAGSTGSQSLRALALIGAGLSGLFSFSTMAAADEAEHGLACPSYPWPHKGILSSYDHASIRRGHQVYTEVCASCHSMSLISYRDLVGVAYTEEEVKAMAAEIEVVDGPNDEGEMFTRPGKLSDRFPQPYANEAAARFANGGAYPPDLSLVTKARHNGQNYVFALLTGYRDPPAGVSIREGLHYNPYFPGGAIAMPKMLNDGAVEYEDGTPATEAQMGKDVVSFLTWAAEPEMEERKLMGFKWIFVLSLALLQAAYYRRLRWSVLKSRKLVLDVVN

SEQ ID NO: 57372 - protein, 307 aa, Glycine max; identical to SEQ ID NO: 54344
  peptide (1)..(307): Ceres Seq. ID no. 15168427
  misc_feature (73)..(297): Pfam Name: Cytochrome C1 family Pfam Description: Cytochrome C1 family
  misc_feature (9)..(301): Homolog of NCBI NO: 38969870 NR Description: Unknown (protein for MGC:75973) [Silurana
  misc_feature (2)..(307): Homolog of NCBI NO: 34907202 NR Description: putative cytochrome c1 precursor
  misc_feature (32)..(307): Homolog of NCBI NO: 117765 NR Description: Cytochrome c1, heme protein, mitochondrial
  misc_feature (32)..(307): Homolog of NCBI NO: 82263 NR Description: ubiquinol-cytochrome-c reductase (EC 1.10.2.2)
  misc_feature (32)..(307): Homolog of NCBI NO: 7547401 NR Description: cytochrome c1 precursor [Solanum tuberosum]
  misc_feature (1)..(307): Homolog of NCBI NO: 15809956 NR Description: AT3g27240/K17E12_6 [Arabidopsis thaliana]
  misc_feature (1)..(307): Homolog of NCBI NO: 15215624 NR Description: AT5g40810/MHK7_4 [Arabidopsis thaliana]
  misc_feature (1)..(307): Homolog of NCBI NO: 15232125 NR Description: cytochrome c -related [Arabidopsis thaliana]
  misc_feature (1)..(307): Homolog of NCBI NO: 21593678 NR Description: cytochrome c, putative [Arabidopsis thaliana]
  misc_feature (1)..(307): Homolog of NCBI NO: 15237497 NR Description: cytochrome c1 precursor [Arabidopsis thaliana]

SEQ ID NO: 57373 - protein, 247 aa, Glycine max; identical to SEQ ID NO: 54345
  peptide (1)..(247): Ceres Seq. ID no. 15168428
  misc_feature (13)..(237): Pfam Name: Cytochrome C1 family Pfam Description: Cytochrome C1 family
  misc_feature (1)..(241): Homolog of NCBI NO: 38969870 NR Description: Unknown (protein for MGC:75973) [Silurana
  misc_feature (1)..(247): Homolog of NCBI NO: 34907202 NR Description: putative cytochrome c1 precursor
  misc_feature (1)..(247): Homolog of NCBI NO: 117765 NR Description: Cytochrome c1, heme protein, mitochondrial
  misc_feature (1)..(247): Homolog of NCBI NO: 82263 NR Description: ubiquinol-cytochrome-c reductase (EC 1.10.2.2)
  misc_feature (1)..(247): Homolog of NCBI NO: 7547401 NR Description: cytochrome c1 precursor [Solanum tuberosum]
  misc_feature (1)..(247): Homolog of NCBI NO: 15809956 NR Description: AT3g27240/K17E12_6 [Arabidopsis thaliana]
  misc_feature (1)..(247): Homolog of NCBI NO: 15215624 NR Description: AT5g40810/MHK7_4 [Arabidopsis thaliana]
  misc_feature (1)..(247): Homolog of NCBI NO: 15232125 NR Description: cytochrome c -related [Arabidopsis thaliana]
  misc_feature (1)..(247): Homolog of NCBI NO: 21593678 NR Description: cytochrome c, putative [Arabidopsis thaliana]
  misc_feature (1)..(247): Homolog of NCBI NO: 15237497 NR Description: cytochrome c1 precursor [Arabidopsis thaliana]

SEQ ID NO: 57374 - DNA, 1457 bp, Glycine max
  misc_feature (1)..(1457): Ceres Seq. ID no. 14314264
gaatcactctgcactctgcactctgcacaatgctttccctctccgtccctcctctcaacctcaaacccataacacccaatgacctctttctctcatcagcctctccctcacctcaccgtcgctacttcgtgaaacccatctccgccgtcctcaactcatcttccttcaagaaacctgagcagcctctgctgccgcagcatcaagtctaccagcccttccgccctcccccgtctcccctcccctcgcaattcggcaccctcgacatcgccggccgaatcgacatcctcgccaaccgcctcggcctctggtacgagtacgcgcccttaatcaattccctaatccgcgaaggcttctcccctccgacaatcgaagaaaccaccggcatctccggcgtcgagcagaaccgcctcatcgtcggggcgcaggtccgcgactccctcgtccactccaaggccgaccccgacctcctcgctgccttcgagaccggcggcgccgagctcctctacgagatccgtctcctcagcgcctcgcagcgcgtcgccgccgcgcgcttcctcgtcgagaatcgctgcgacgggaaggccgcgcaggagctcgcacgttccatgaaggatttcccgagccggcgcggggataaaggatgggcgaggttcgactacactctccccggggactgtctttcttttatgtattacaggcagagcagggagcataggaacccgtcggagcagaggacttcggcgctggagcaggcgctgcgcgtggcggagacggaggcggccaggaatatgattttggaggagttggaggggaatggtgaagagggggataaggtggatgcaggggagggtgctgtgcgtgttccggtggtgaggctgaggattggggaggtggcggaggcgagttcggtggtggtgttgccggtctccgcggcggaggagagggagattttggaggcgccgtatgagagtaggagccagggggtgtttggtgtggtggtggcggagaagggatggggaaaatgggtggtgttgccttcgtgggacccagtggttggtttaggaaaagggggtgttgtggtatcgtttcccgatgctagggttttgccgtggaaggtgaataggtggtataaggaggagcctatattggtggtggctgacaggagtaaaaaagaggtgggtgccgatgatgggttttatcttgtgaatgctgatggtgagggtttgaaggtcgagaggggttcgggattgaaggaaaagggtttcactcagagtttaggaactgtgttattggttgttagacctcccaaagaagaaaatgatgaattgagtgacgaagactgggagtgaactcaaatcaaagggaagggaatgattgagttgctaaagaatagcgataacaccacattatatatatatatatatggttttctcaattcaagaattgctagttaaccc

SEQ ID NO: 57375 - protein, 448 aa, Glycine max
  peptide (1)..(448): Ceres Seq. ID no. 14314265
  misc_feature (86)..(347): Homolog of NCBI NO: 37521728 NR Description: hypothetical protein glr2159 [Gloeobacter
  misc_feature (87)..(390): Homolog of NCBI NO: 16331838 NR Description: unknown protein [Synechocystis sp. PCC 6803]
  misc_feature (74)..(391): Homolog of NCBI NO: 17232742 NR Description: hypothetical protein [Nostoc sp. PCC 7120]
  misc_feature (74)..(406): Homolog of NCBI NO: 23042669 NR Description: hypothetical protein [Trichodesmium erythraeum
  misc_feature (95)..(447): Homolog of NCBI NO: 22299309 NR Description: ORF_ID:tlr1766~hypothetical protein
  misc_feature (74)..(402): Homolog of NCBI NO: 23127437 NR Description: hypothetical protein [Nostoc punctiforme]
  misc_feature (51)..(448): Homolog of NCBI NO: 37534826 NR Description: unknown protein [Oryza sativa (japonica
  misc_feature (34)..(448): Homolog of NCBI NO: 18396920 NR Description: expressed protein [Arabidopsis thaliana]
  misc_feature (10)..(448): Homolog of NCBI NO: 15241839 NR Description: expressed protein [Arabidopsis thaliana]
ITLHSALCTMLSLSVPPLNLKPITPNDLFLSSASPSPHRRYFVKPISAVLNSSSFKKPEQPLLPQHQVYQPFRPPPSPLPSQFGTLDIAGRIDILANRLGLWYEYAPLINSLIREGFSPPTIEETTGISGVEQNRLIVGAQVRDSLVHSKADPDLLAAFETGGAELLYEIRLLSASQRVAAARFLVENRCDGKAAQELARSMKDFPSRRGDKGWARFDYTLPGDCLSFMYYRQSREHRNPSEQRTSALEQALRVAETEAARNMILEELEGNGEEGDKVDAGEGAVRVPVVRLRIGEVAEASSVVVLPVSAAEEREILEAPYESRSQGVFGVVVAEKGWGKWVVLPSWDPVVGLGKGGVVVSFPDARVLPWKVNRWYKEEPILVVADRSKKEVGADDGFYLVNADGEGLKVERGSGLKEKGFTQSLGTVLLVVRPPKEENDELSDEDWE

SEQ ID NO: 57376 - protein, 439 aa, Glycine max
  peptide (1)..(439): Ceres Seq. ID no. 14314266
  misc_feature (77)..(338): Homolog of NCBI NO: 37521728 NR Description: hypothetical protein glr2159 [Gloeobacter
  misc_feature (78)..(381): Homolog of NCBI NO: 16331838 NR Description: unknown protein [Synechocystis sp. PCC 6803]
  misc_feature (65)..(382): Homolog of NCBI NO: 17232742 NR Description: hypothetical protein [Nostoc sp. PCC 7120]
  misc_feature (65)..(397): Homolog of NCBI NO: 23042669 NR Description: hypothetical protein [Trichodesmium erythraeum
  misc_feature (86)..(438): Homolog of NCBI NO: 22299309 NR Description: ORF_ID:tlr1766~hypothetical protein
  misc_feature (65)..(393): Homolog of NCBI NO: 23127437 NR Description: hypothetical protein [Nostoc punctiforme]
  misc_feature (42)..(439): Homolog of NCBI NO: 37534826 NR Description: unknown protein [Oryza sativa (japonica
  misc_feature (25)..(439): Homolog of NCBI NO: 18396920 NR Description: expressed protein [Arabidopsis thaliana]
  misc_feature (1)..(439): Homolog of NCBI NO: 15241839 NR Description: expressed protein [Arabidopsis thaliana]
MLSLSVPPLNLKPITPNDLFLSSASPSPHRRYFVKPISAVLNSSSFKKPEQPLLPQHQVYQPFRPPPSPLPSQFGTLDIAGRIDILANRLGLWYEYAPLINSLIREGFSPPTIEETTGISGVEQNRLIVGAQVRDSLVHSKADPDLLAAFETGGAELLYEIRLLSASQRVAAARFLVENRCDGKAAQELARSMKDFPSRRGDKGWARFDYTLPGDCLSFMYYRQSREHRNPSEQRTSALEQALRVAETEAARNMILEELEGNGEEGDKVDAGEGAVRVPVVRLRIGEVAEASSVVVLPVSAAEEREILEAPYESRSQGVFGVVVAEKGWGKWVVLPSWDPVVGLGKGGVVVSFPDARVLPWKVNRWYKEEPILVVADRSKKEVGADDGFYLVNADGEGLKVERGSGLKEKGFTQSLGTVLLVVRPPKEENDELSDEDWE

SEQ ID NO: 57377 - protein, 247 aa, Glycine max
  peptide (1)..(247): Ceres Seq. ID no. 14314267
  misc_feature (1)..(146): Homolog of NCBI NO: 37521728 NR Description: hypothetical protein glr2159 [Gloeobacter
  misc_feature (1)..(189): Homolog of NCBI NO: 16331838 NR Description: unknown protein [Synechocystis sp. PCC 6803]
  misc_feature (1)..(190): Homolog of NCBI NO: 17232742 NR Description: hypothetical protein [Nostoc sp. PCC 7120]
  misc_feature (1)..(205): Homolog of NCBI NO: 23042669 NR Description: hypothetical protein [Trichodesmium erythraeum
  misc_feature (1)..(246): Homolog of NCBI NO: 22299309 NR Description: ORF_ID:tlr1766~hypothetical protein
  misc_feature (1)..(201): Homolog of NCBI NO: 23127437 NR Description: hypothetical protein [Nostoc punctiforme]
  misc_feature (1)..(247): Homolog of NCBI NO: 37534826 NR Description: unknown protein [Oryza sativa (japonica
  misc_feature (1)..(247): Homolog of NCBI NO: 18396920 NR Description: expressed protein [Arabidopsis thaliana]
  misc_feature (1)..(247): Homolog of NCBI NO: 15241839 NR Description: expressed protein [Arabidopsis thaliana]
MKDFPSRRGDKGWARFDYTLPGDCLSFMYYRQSREHRNPSEQRTSALEQALRVAETEAARNMILEELEGNGEEGDKVDAGEGAVRVPVVRLRIGEVAEASSVVVLPVSAAEEREILEAPYESRSQGVFGVVVAEKGWGKWVVLPSWDPVVGLGKGGVVVSFPDARVLPWKVNRWYKEEPILVVADRSKKEVGADDGFYLVNADGEGLKVERGSGLKEKGFTQSLGTVLLVVRPPKEENDELSDEDWE

SEQ ID NO: 57378 - DNA, 1103 bp, Glycine max
  misc_feature (1)..(1103): Ceres Seq. ID no. 14306066
attcccacaacacaacacaacgcacaaacacacaaaaaatttctagagcgagaaagtgagaggagagagaaagtagctgatcctccatggcctccaccaaggaacgcgaaaactttgtctacaccgccaagctcgccgaacaagccgaacgctatgaagaaatggtggaagcaatgaagaatgtggcgaagctgaacgtggaattgacggtcgaggagcggaaccttctgtcggtagggtacaagaacgtggtgggtgctcgtagggcttcgtggaggattctatcgtcgattgaacagaaagaagaagctaaagggaacgatgtgagtgtgaagaggataaaggagtataggcagaaggtggagtctgagttgtccaatatctgcagtgatatcatgactgttattgatgaacaccttattccctctagctctgctggtgaacctagtgtctttttctacaaaatgaagggggactattaccggtacctcgcggagttcaagtccggtgatgagagaaaagaggctgctgatcattccatgaaggcgtatcagtcggcttccactactgcagaggctgagttaccacccacacatcccatccgtttgggcctggctttgaacttctctgtcttttattatgaaattttgaactctcctgaaagggcctgtcaccttgctaagcaggcatttgatgaagccatctctgagttggatactctgagcgaggagtcttacaaagacagcaccctaattatgcagcttctgagggacaatctcaccctgtggacttctgacatccctgaagaaggagctgaggaacaaaaggtggattctgccagagctgctggaggtgacaatgcatagtgaagcaggtattggctaggaatttgtggtgtcatacgagaaggctagtctttctcttgataatttaccattaggatgtagtaatagaacatggagttggtctctagaaaatcaccatagggctttgtgagccttttattctatgcgtgtgctttctgttactggatggagactggagttgagatttgtatgttgtttgcctgtgattcagtgaatttcttcattttgacttctttc

SEQ ID NO: 57379 - protein, 259 aa, Glycine max
  peptide (1)..(259): Ceres Seq. ID no. 14306067
  misc_feature (7)..(242): Pfam Name: 14-3-3 protein Pfam Description: 14-3-3 protein
MASTKERENFVYTAKLAEQAERYEEMVEAMKNVAKLNVELTVEERNLLSVGYKNVVGARRASWRILSSIEQKEEAKGNDVSVKRIKEYRQKVESELSNICSDIMTVIDEHLIPSSSAGEPSVFFYKMKGDYYRYLAEFKSGDERKEAADHSMKAYQSASTTAEAELPPTHPIRLGLALNFSVFYYEILNSPERACHLAKQAFDEAISELDTLSEESYKDSTLIMQLLRDNLTLWTSDIPEEGAEEQKVDSARAAGGDNA

SEQ ID NO: 57380 - protein, 234 aa, Glycine max
  peptide (1)..(234): Ceres Seq. ID no. 14306068
  misc_feature (1)..(217): Pfam Name: 14-3-3 protein Pfam Description: 14-3-3 protein
MVEAMKNVAKLNVELTVEERNLLSVGYKNVVGARRASWRILSSIEQKEEAKGNDVSVKRIKEYRQKVESELSNICSDIMTVIDEHLIPSSSAGEPSVFFYKMKGDYYRYLAEFKSGDERKEAADHSMKAYQSASTTAEAELPPTHPIRLGLALNFSVFYYEILNSPERACHLAKQAFDEAISELDTLSEESYKDSTLIMQLLRDNLTLWTSDIPEEGAEEQKVDSARAAGGDNA

SEQ ID NO: 57381 - protein, 230 aa, Glycine max
  peptide (1)..(230): Ceres Seq. ID no. 14306069
  misc_feature (1)..(213): Pfam Name: 14-3-3 protein Pfam Description: 14-3-3 protein
MKNVAKLNVELTVEERNLLSVGYKNVVGARRASWRILSSIEQKEEAKGNDVSVKRIKEYRQKVESELSNICSDIMTVIDEHLIPSSSAGEPSVFFYKMKGDYYRYLAEFKSGDERKEAADHSMKAYQSASTTAEAELPPTHPIRLGLALNFSVFYYEILNSPERACHLAKQAFDEAISELDTLSEESYKDSTLIMQLLRDNLTLWTSDIPEEGAEEQKVDSARAAGGDNA

SEQ ID NO: 57382 - DNA, 1866 bp, Glycine max
  misc_feature (1)..(1866): Ceres Seq. ID no. 14314276
aattctccaccaaccccattctctctttctctctttacataactcaatttctccttgtatcattttcactacacatattacattattccttccaaaatgagcacgcagctgaaaaggttcaactcaatggaacgcaggccaagaatgctgaaggacttcctcagcgagaatctaaactcgtgctcctcaagcggcttcaaatcacttccaagaaaaccaaccaacaacaacagcatgcacagcctcatcgaaatggaactcaaatcttcatcaccctttcaaacactcatgaacaccataagaagcatctctctcttcacctcaaaatcaccctccgtgctttctctaccgaggagcctctcacgcaagctatcatcttcaaggagaaaaacaagaacaagaagaagaaggagccatgtgtgcagcagcgatgtcaacatcacaacggtggtgaagatcaaggacatcatacggtggaagtcattcagggatatcgtggtggaaccttctcttccaccaccaccgttggatttcatggtggggtccaccaacaccacttgtagtagctgtagcagtggctctagttggactgagagtgatttttttttaacctcgtcctgggaagaaccacaaaacgacaacgttgaagcgggtaaaaggttttcatttttttcaccccttgttgtcggcaaggactccggggctacggacacttcaacttgccaagaagaacaacacagtccagtttcagttcttcacgttggagaagatgatttctcaccttttgatcaaagtcttgccaatattctaaggagaaaacagaagttcatacaaacagttcaaaaattggagagtcatgcaaaatttgaccttgcaaacttagaccaatgtctctcattggatgacaactctggctatgatgaagaatatgaagaagaagaagatgatgataatgatgacattgaagaacaagattggattgaggaaaaggcaaagcagctgctacattgtgtcaaagcaagagtttcagcacatggctgtatagactatttggatacacttctgttggattttttcagggaagaactaagtggaagtagaaaccaatacaagaatgaagaggagtttgagttggagacattgagaataactgaggattggataaatgggtcatttgcttttgatgcagggcatgctgacaaacatgcttacataaaggacatggagaggagagatcagtggagtaggttggaggaggatcaagaagaattggcctttgaaattgagacagctatattgcatagtttgattgctgatcttctggacctggatgcttaatacttaatagtttcccttttcaaagttcaaatcaagttttggcaattgcttcttcgcctccataatggcttcgtgtacctttttaagtttatgaaacacctaattcggaatgtaaattacattccagaaagactaattcgaaatgtaattttacattccaggttaggtggaagcaattgcctcaagttctttaagatctctgggcctttagcctcacttttctcaacagaaattatctggccgcacttgaagtccgaatcagaaaagtaggtttcatcctacagcacccatttagattttaggcttaccaaccagaccagaaaaataaggatacctaccaaccaagggcagagggatgcctacttttgtggtaacaaaggacatataggtcagagtttggtgagttttggatactgttatatgaaggggtaatgagatgctagtggacataagtacatgattgggctgtactgtacttaaatttagttatggcttaattagattttggactttggagtgtagcatatt

SEQ ID NO: 57383 - protein, 413 aa, Glycine max
  peptide (1)..(413): Ceres Seq. ID no. 14314277
  misc_feature (245)..(407): Homolog of NCBI NO: 7485281 NR Description: hypothetical protein A_TM018A10.11 - Arabidopsis
  misc_feature (17)..(407): Homolog of NCBI NO: 21593216 NR Description: unknown [Arabidopsis thaliana]
  misc_feature (11)..(410): Homolog of NCBI NO: 18411440 NR Description: expressed protein [Arabidopsis thaliana]
MSTQLKRFNSMERRPRMLKDFLSENLNSCSSSGFKSLPRKPTNNNSMHSLIEMELKSSSPFQTLMNTIRSISLFTSKSPSVLSLPRSLSRKLSSSRRKTRTRRRRSHVCSSDVNITTVVKIKDIIRWKSFRDIVVEPSLPPPPLDFMVGSTNTTCSSCSSGSSWTESDFFLTSSWEEPQNDNVEAGKRFSFFSPLVVGKDSGATDTSTCQEEQHSPVSVLHVGEDDFSPFDQSLANILRRKQKFIQTVQKLESHAKFDLANLDQCLSLDDNSGYDEEYEEEEDDDNDDIEEQDWIEEKAKQLLHCVKARVSAHGCIDYLDTLLLDFFREELSGSRNQYKNEEEFELETLRITEDWINGSFAFDAGHADKHAYIKDMERRDQWSRLEEDQEELAFEIETAILHSLIADLLDLDA

SEQ ID NO: 57384 - protein, 403 aa, Glycine max
  peptide (1)..(403): Ceres Seq. ID no. 14314278
  misc_feature (235)..(397): Homolog of NCBI NO: 7485281 NR Description: hypothetical protein A_TM018A10.11 - Arabidopsis
  misc_feature (7)..(397): Homolog of NCBI NO: 21593216 NR Description: unknown [Arabidopsis thaliana]
  misc_feature (1)..(400): Homolog of NCBI NO: 18411440 NR Description: expressed protein [Arabidopsis thaliana]
MERRPRMLKDFLSENLNSCSSSGFKSLPRKPTNNNSMHSLIEMELKSSSPFQTLMNTIRSISLFTSKSPSVLSLPRSLSRKLSSSRRKTRTRRRRSHVCSSDVNITTVVKIKDIIRWKSFRDIVVEPSLPPPPLDFMVGSTNTTCSSCSSGSSWTESDFFLTSSWEEPQNDNVEAGKRFSFFSPLVVGKDSGATDTSTCQEEQHSPVSVLHVGEDDFSPFDQSLANILRRKQKFIQTVQKLESHAKFDLANLDQCLSLDDNSGYDEEYEEEEDDDNDDIEEQDWIEEKAKQLLHCVKARVSAHGCIDYLDTLLLDFFREELSGSRNQYKNEEEFELETLRITEDWINGSFAFDAGHADKHAYIKDMERRDQWSRLEEDQEELAFEIETAILHSLIADLLDLDA

SEQ ID NO: 57385 - protein, 397 aa, Glycine max
  peptide (1)..(397): Ceres Seq. ID no. 14314279
  misc_feature (229)..(391): Homolog of NCBI NO: 7485281 NR Description: hypothetical protein A_TM018A10.11 - Arabidopsis
  misc_feature (1)..(391): Homolog of NCBI NO: 21593216 NR Description: unknown [Arabidopsis thaliana]
  misc_feature (1)..(394): Homolog of NCBI NO: 18411440 NR Description: expressed protein [Arabidopsis thaliana]
MLKDFLSENLNSCSSSGFKSLPRKPTNNNSMHSLIEMELKSSSPFQTLMNTIRSISLFTSKSPSVLSLPRSLSRKLSSSRRKTRTRRRRSHVCSSDVNITTVVKIKDIIRWKSFRDIVVEPSLPPPPLDFMVGSTNTTCSSCSSGSSWTESDFFLTSSWEEPQNDNVEAGKRFSFFSPLVVGKDSGATDTSTCQEEQHSPVSVLHVGEDDFSPFDQSLANILRRKQKFIQTVQKLESHAKFDLANLDQCLSLDDNSGYDEEYEEEEDDDNDDIEEQDWIEEKAKQLLHCVKARVSAHGCIDYLDTLLLDFFREELSGSRNQYKNEEEFELETLRITEDWINGSFAFDAGHADKHAYIKDMERRDQWSRLEEDQEELAFEIETAILHSLIADLLDLDA

SEQ ID NO: 57386 - DNA, 1486 bp, Glycine max
  misc_feature (1)..(1486): Ceres Seq. ID no. 14314300
gcaattcctctgtctgttccttcaattcttcaaatcccgaaattgtcatttttaatctcgctgcaaattgcgctcacgattctttgctttccttcgaaactctcccaaatcccacttctttctctctcataaataaattcgccacctttgtatttttgcgtaactgctctgcaccttattgattcttctctctctctccattctccaattctccatttcgatctgcagctccccgctttcaaagctctgaaatttccgattcgggatggagaaatacgagctcgtgaaggatataggatctgggaatttcggtgtggccaggctcatgcgacacaaagacaccaaggagcttgttgccatgaaatacattgaacggggtcacaagattgatgagaatgttgcgagggaaatcataaaccatagaagtcttcggcaccccaatattattcggttcaaggaggtggttctgactccaacccatctgggtattgttatggagtatgcggctggtggagagctctttgagaggatttgcagtgctggaagattcagcgaagatgaggctcgatatttcttccagcagctcatctcaggagttagctactgtcattccatgcaaatctgtcatcgagacttgaagctggagaacacattattggatggcagcccagccccacggctcaaaatttgtgattttggctattctaagtcatctctgcttcattctaggcctaagtcaacggtgggaaccccggcctacattgcacctgaggttctttcacgtagagagtatgatggaaagttagcagatgtatggtcctgtggagtgactctttatgtaatgctggtgggagcatacccatttgaagaccaagaggatcccaaaaatttcaggaaaaccatcaatcgaattatggctgttcaatacaagattccagactacgttcacatatctcaagactgtagacatcttctatctcgcatttttgtggcaaatccagctaggagaatcaccattaaggaaatcaagtcccacccatggtttgtaaagaacttgcccagagaattaacagaagtagctcaagctgcctactacagaaaagaaaacccaaccttttctcttcagagtatagaggacatcatgaatattgttgaggaggccaaggctccacctccagcatccaggtcaattggaggatttggctggggaggggaggaagaagaagaggatgaaacaaaagaagcagtggctgagactgaagaagatgagtacgaaaagagagtcaaggaagcacaagcaagtggggaatttcatgtcagttaaaaagtgtttatttttagatagagagcaattgattcttggtttcctttgcacttagctaagttcaactaaggtgagtgtgttttgcttgtatgtataaaattaagttttccgcatgggacatatagtttaataaatggctgtacatttttttaaggttgtgcg

SEQ ID NO: 57387 - protein, 352 aa, Glycine max
  peptide (1)..(352): Ceres Seq. ID no. 14314301
  misc_feature (4)..(260): Pfam Name: Protein kinase domain Pfam Description: Protein kinase domain
  misc_feature (1)..(352): Homolog of NCBI NO: 38343920 NR Description: serin/threonine protein kinase [Fagus sylvatica]
  misc_feature (1)..(352): Homolog of NCBI NO: 19568098 NR Description: osmotic stress-activated protein kinase
MEKYELVKDIGSGNFGVARLMRHKDTKELVAMKYIERGHKIDENVAREIINHRSLRHPNIIRFKEVVLTPTHLGIVMEYAAGGELFERICSAGRFSEDEARYFFQQLISGVSYCHSMQICHRDLKLENTLLDGSPAPRLKICDFGYSKSSLLHSRPKSTVGTPAYIAPEVLSRREYDGKLADVWSCGVTLYVMLVGAYPFEDQEDPKNFRKTINRIMAVQYKIPDYVHISQDCRHLLSRIFVANPARRITIKEIKSHPWFVKNLPRELTEVAQAAYYRKENPTFSLQSIEDIMNIVEEAKAPPPASRSIGGFGWGGEEEEEDETKEAVAETEEDEYEKRVKEAQASGEFHVS

SEQ ID NO: 57388 - protein, 332 aa, Glycine max
  peptide (1)..(332): Ceres Seq. ID no. 14314302
  misc_feature (1)..(240): Pfam Name: Protein kinase domain Pfam Description: Protein kinase domain
  misc_feature (1)..(332): Homolog of NCBI NO: 38343920 NR Description: serin/threonine protein kinase [Fagus sylvatica]
  misc_feature (1)..(332): Homolog of NCBI NO: 19568098 NR Description: osmotic stress-activated protein kinase
MRHKDTKELVAMKYIERGHKIDENVAREIINHRSLRHPNIIRFKEVVLTPTHLGIVMEYAAGGELFERICSAGRFSEDEARYFFQQLISGVSYCHSMQICHRDLKLENTLLDGSPAPRLKICDFGYSKSSLLHSRPKSTVGTPAYIAPEVLSRREYDGKLADVWSCGVTLYVMLVGAYPFEDQEDPKNFRKTINRIMAVQYKIPDYVHISQDCRHLLSRIFVANPARRITIKEIKSHPWFVKNLPRELTEVAQAAYYRKENPTFSLQSIEDIMNIVEEAKAPPPASRSIGGFGWGGEEEEEDETKEAVAETEEDEYEKRVKEAQASGEFHVS

SEQ ID NO: 57389 - protein, 321 aa, Glycine max
  peptide (1)..(321): Ceres Seq. ID no. 14314303
  misc_feature (1)..(229): Pfam Name: Protein kinase domain Pfam Description: Protein kinase domain
  misc_feature (1)..(321): Homolog of NCBI NO: 38343920 NR Description: serin/threonine protein kinase [Fagus sylvatica]
  misc_feature (1)..(321): Homolog of NCBI NO: 19568098 NR Description: osmotic stress-activated protein kinase
MKYIERGHKIDENVAREIINHRSLRHPNIIRFKEVVLTPTHLGIVMEYAAGGELFERICSAGRFSEDEARYFFQQLISGVSYCHSMQICHRDLKLENTLLDGSPAPRLKICDFGYSKSSLLHSRPKSTVGTPAYIAPEVLSRREYDGKLADVWSCGVTLYVMLVGAYPFEDQEDPKNFRKTINRIMAVQYKIPDYVHISQDCRHLLSRIFVANPARRITIKEIKSHPWFVKNLPRELTEVAQAAYYRKENPTFSLQSIEDIMNIVEEAKAPPPASRSIGGFGWGGEEEEEDETKEAVAETEEDEYEKRVKEAQASGEFHVS

SEQ ID NO: 57390 - DNA, 1551 bp, Glycine max
  misc_feature (1)..(1551): Ceres Seq. ID no. 14314331
cttgctctcactctcactccgtctccggtggcctcaaaccgctccctcacaattccaaacaccgcgtgcgctgcccacatctccgttcgcatctcctccttgaccagctcgaagtttctctccagtgttgctttgtgagaagtcgttcttgcttgaagtggcttttcattcacaagctctttgagactttcttggagaagagatgtaggagttggactaaggtttcttccaattttcaattgggcacagccacaatcttattctacttaaccttcctcaccttttcggatacctaaggcgaagtatagctaaaaaatgggagtggagagagaagagaaggtgtctttggaactcagcgaagaaattcttcagagtatggaagtgggaatgtccttcaaagactataacggtagaattagttcgttggattttcacagggcatccagttatctagtgaccgctagtgatgatgaatccattcgtctgtatgatgttactggtggaacatgtttgaagacaattaatagcaagaagtatggagttgacctggtttgcttcacatctcatcctacaactgtcatttactcttcaaaaaatggttgggatgaatctttgcggcttctatcgttgcatgataacaagtatttgagatatttcaaaggtcaccatgacagggttgtgtctctaagcttatgctctcgaaaagactgctttatatctggatctctagatcgaactgttttactgtgggatcaaagggctgagaagtgccagggacttttacatgtacaaggaagacctgctatatcatatgatgatccagggcttgtctttgcaattgcctttggaggatacataagaatgtttgatgcccgcaagtatgaaaagggtccctttgagatattttctgttgggggagatatttctgatgcaaatgttgtgaaatttagtaatgatgggagactaatgcttttaacaacggcagatgggcatattcatgtgcttgacacatttcgtggcacacttttatccacatataatgtcacacctgtctcatgcaactccacattagaagcttctttcagccctgagggaatgttcataatatctggttctggagaaggcagcatctacgcatggagtgttcgaagtggcaaagaagttgcaagttggaggagtgcaacttctgatactggacctcctgtaataaagtgggctcctggaagtcttatgtttgctacaggatcatctgagttgtcattctgggttcctgatttgtctaagttgggatcctatgttggaagaaagtagaaacaaatcaaacaatgcatgataaaactattgtttgcctattaacccactgaaaggtaattttttttattaatactacacaaatttaactgtgccgaatggcgtcgtgtgatccatgtagccgacctcacctagtgggataaaactttgttgttgttgcactacacaaagtgacagattttgccatgtttttgtaaatattcttcaccgaagagcaatggatatttcaatgatcctcct

SEQ ID NO: 57391 - protein, 331 aa, Glycine max
  peptide (1)..(331): Ceres Seq. ID no. 14314332
  misc_feature (109)..(146): Pfam Name: WD domain, G-beta repeat Pfam Description: WD domain, G-beta repeat
  misc_feature (39)..(321): Homolog of NCBI NO: 34877546 NR Description: similar to CG17293-PA [Rattus norvegicus]
  misc_feature (11)..(321): Homolog of NCBI NO: 29727992 NR Description: similar to CG17293-PA [Homo sapiens]
  misc_feature (9)..(319): Homolog of NCBI NO: 19920938 NR Description: CG17293-PA [Drosophila melanogaster]
  misc_feature (18)..(321): Homolog of NCBI NO: 21618713 NR Description: RIKEN cDNA 9430077D24 gene [Mus musculus]
  misc_feature (11)..(321): Homolog of NCBI NO: 28277563 NR Description: Similar to RIKEN cDNA 9430077D24 gene [Danio
  misc_feature (12)..(320): Homolog of NCBI NO: 15241434 NR Description: transducin / WD-40 repeat protein family
  misc_feature (9)..(331): Homolog of NCBI NO: 28564824 NR Description: OSJNBb0005G07.13 [Oryza sativa (japonica
  misc_feature (4)..(331): Homolog of NCBI NO: 21536827 NR Description: WD repeat protein-like [Arabidopsis thaliana]
  misc_feature (4)..(331): Homolog of NCBI NO: 18425050 NR Description: transducin / WD-40 repeat protein family
  misc_feature (3)..(331): Homolog of NCBI NO: 30698206 NR Description: transducin / WD-40 repeat protein family
MGVEREEKVSLELSEEILQSMEVGMSFKDYNGRISSLDFHRASSYLVTASDDESIRLYDVTGGTCLKTINSKKYGVDLVCFTSHPTTVIYSSKNGWDESLRLLSLHDNKYLRYFKGHHDRVVSLSLCSRKDCFISGSLDRTVLLWDQRAEKCQGLLHVQGRPAISYDDPGLVFAIAFGGYIRMFDARKYEKGPFEIFSVGGDISDANVVKFSNDGRLMLLTTADGHIHVLDTFRGTLLSTYNVTPVSCNSTLEASFSPEGMFIISGSGEGSIYAWSVRSGKEVASWRSATSDTGPPVIKWAPGSLMFATGSSELSFWVPDLSKLGSYVGRK

SEQ ID NO: 57392 - protein, 311 aa, Glycine max
  peptide (1)..(311): Ceres Seq. ID no. 14314333
  misc_feature (89)..(126): Pfam Name: WD domain, G-beta repeat Pfam Description: WD domain, G-beta repeat
  misc_feature (19)..(301): Homolog of NCBI NO: 34877546 NR Description: similar to CG17293-PA [Rattus norvegicus]
  misc_feature (1)..(301): Homolog of NCBI NO: 29727992 NR Description: similar to CG17293-PA [Homo sapiens]
  misc_feature (1)..(299): Homolog of NCBI NO: 19920938 NR Description: CG17293-PA [Drosophila melanogaster]
  misc_feature (1)..(301): Homolog of NCBI NO: 21618713 NR Description: RIKEN cDNA 9430077D24 gene [Mus musculus]
  misc_feature (1)..(301): Homolog of NCBI NO: 28277563 NR Description: Similar to RIKEN cDNA 9430077D24 gene [Danio
  misc_feature (1)..(300): Homolog of NCBI NO: 15241434 NR Description: transducin / WD-40 repeat protein family
  misc_feature (1)..(311): Homolog of NCBI NO: 28564824 NR Description: OSJNBb0005G07.13 [Oryza sativa (japonica
  misc_feature (1)..(311): Homolog of NCBI NO: 21536827 NR Description: WD repeat protein-like [Arabidopsis thaliana]
  misc_feature (1)..(311): Homolog of NCBI NO: 18425050 NR Description: transducin / WD-40 repeat protein family
  misc_feature (1)..(311): Homolog of NCBI NO: 30698206 NR Description: transducin / WD-40 repeat protein family
MEVGMSFKDYNGRISSLDFHRASSYLVTASDDESIRLYDVTGGTCLKTINSKKYGVDLVCFTSHPTTVIYSSKNGWDESLRLLSLHDNKYLRYFKGHHDRVVSLSLCSRKDCFISGSLDRTVLLWDQRAEKCQGLLHVQGRPAISYDDPGLVFAIAFGGYIRMFDARKYEKGPFEIFSVGGDISDANVVKFSNDGRLMLLTTADGHIHVLDTFRGTLLSTYNVTPVSCNSTLEASFSPEGMFIISGSGEGSIYAWSVRSGKEVASWRSATSDTGPPVIKWAPGSLMFATGSSELSFWVPDLSKLGSYVGRK

SEQ ID NO: 57393 - protein, 307 aa, Glycine max
  peptide (1)..(307): Ceres Seq. ID no. 14314334
  misc_feature (85)..(122): Pfam Name: WD domain, G-beta repeat Pfam Description: WD domain, G-beta repeat
  misc_feature (15)..(297): Homolog of NCBI NO: 34877546 NR Description: similar to CG17293-PA [Rattus norvegicus]
  misc_feature (1)..(297): Homolog of NCBI NO: 29727992 NR Description: similar to CG17293-PA [Homo sapiens]
  misc_feature (1)..(295): Homolog of NCBI NO: 19920938 NR Description: CG17293-PA [Drosophila melanogaster]
  misc_feature (1)..(297): Homolog of NCBI NO: 21618713 NR Description: RIKEN cDNA 9430077D24 gene [Mus musculus]
  misc_feature (1)..(297): Homolog of NCBI NO: 28277563 NR Description: Similar to RIKEN cDNA 9430077D24 gene [Danio
  misc_feature (1)..(296): Homolog of NCBI NO: 15241434 NR Description: transducin / WD-40 repeat protein family
  misc_feature (1)..(307): Homolog of NCBI NO: 28564824 NR Description: OSJNBb0005G07.13 [Oryza sativa (japonica
  misc_feature (1)..(307): Homolog of NCBI NO: 21536827 NR Description: WD repeat protein-like [Arabidopsis thaliana]
  misc_feature (1)..(307): Homolog of NCBI NO: 18425050 NR Description: transducin / WD-40 repeat protein family
  misc_feature (1)..(307): Homolog of NCBI NO: 30698206 NR Description: transducin / WD-40 repeat protein family
MSFKDYNGRISSLDFHRASSYLVTASDDESIRLYDVTGGTCLKTINSKKYGVDLVCFTSHPTTVIYSSKNGWDESLRLLSLHDNKYLRYFKGHHDRVVSLSLCSRKDCFISGSLDRTVLLWDQRAEKCQGLLHVQGRPAISYDDPGLVFAIAFGGYIRMFDARKYEKGPFEIFSVGGDISDANVVKFSNDGRLMLLTTADGHIHVLDTFRGTLLSTYNVTPVSCNSTLEASFSPEGMFIISGSGEGSIYAWSVRSGKEVASWRSATSDTGPPVIKWAPGSLMFATGSSELSFWVPDLSKLGSYVGRK

SEQ ID NO: 57394 - DNA, 868 bp, Glycine max
  misc_feature (1)..(868): Ceres Seq. ID no. 13594241
atatcgatcccaagcctccctccgtagccagttagttctcatttctaatattgcttccaaaatctctctctctctctctctctggggggtatgtgtgttgttcagtacaactagttttggtatagctagctgctcttcatttgattttgctcgcagtcgcagctccaatccaaatatggaggcgatcactgcttccttagagaggtctcttcaaaactgttccttaaacaataccaacaacaaccatcagcagagcaggaggccggaagaagatgatgggtcagctacagatggaggcataggaatctcatcctgctcagacgatgtcccggacccggataatagtcatatctccgacaccactttagagctcaactcccacatctcactcccttatcattgggagcaatgcctagatttaaagacgggggaaatatattacattaactggaggaacgggatgaaagcaaaggaggatccaagaagcaggagggcagattatagtgtaagtagggattgtgagtccgaagaagaagaagaagaagagagctggtacgacagcgaagagtcttcatcggagtcatgcccttcttcatccaaagagcactatgatgagggacaggtagagaaacagaataacaatgttctggtggtggctgggtgcaagggctgtctcatgtatttcatggtgcccaaacaggttgaagactgcccaaaatgtactggtcaactcctccacttcgatcgatccgaaaatggctctccatgattaattcccactcctcttttctccttgtgtttccttcttcgcttctcttttctttttgctgtgactgtcaaattaaactatagttctctctttttttgt

SEQ ID NO: 57395 - protein, 255 aa, Glycine max
  peptide (1)..(255): Ceres Seq. ID no. 13594242
  misc_feature (91)..(255): Homolog of NCBI NO: 15217816 NR Description: hypothetical protein [Arabidopsis thaliana]
  misc_feature (114)..(254): Homolog of NCBI NO: 28393658 NR Description: unknown protein [Arabidopsis thaliana]
  misc_feature (114)..(254): Homolog of NCBI NO: 30685734 NR Description: expressed protein [Arabidopsis thaliana]
  misc_feature (114)..(254): Homolog of NCBI NO: 25408280 NR Description: hypothetical protein At2g33510 [imported] -
  misc_feature (112)..(254): Homolog of NCBI NO: 33113263 NR Description: Humj1 [Humulus japonicus]
YRSQASLRSQLVLISNIASKISLSLSLWGVCVLFSTTSFGIASCSSFDFARSRSSNPNMEAITASLERSLQNCSLNNTNNNHQQSRRPEEDDGSATDGGIGISSCSDDVPDPDNSHISDTTLELNSHISLPYHWEQCLDLKTGEIYYINWRNGMKAKEDPRSRRADYSVSRDCESEEEEEEESWYDSEESSSESCPSSSKEHYDEGQVEKQNNNVLVVAGCKGCLMYFMVPKQVEDCPKCTGQLLHFDRSENGSP

SEQ ID NO: 57396 - protein, 197 aa, Glycine max
  peptide (1)..(197): Ceres Seq. ID no. 13594243
  misc_feature (33)..(197): Homolog of NCBI NO: 15217816 NR Description: hypothetical protein [Arabidopsis thaliana]
  misc_feature (56)..(196): Homolog of NCBI NO: 28393658 NR Description: unknown protein [Arabidopsis thaliana]
  misc_feature (56)..(196): Homolog of NCBI NO: 30685734 NR Description: expressed protein [Arabidopsis thaliana]
  misc_feature (56)..(196): Homolog of NCBI NO: 25408280 NR Description: hypothetical protein At2g33510 [imported] -
  misc_feature (54)..(196): Homolog of NCBI NO: 33113263 NR Description: Humj1 [Humulus japonicus]
MEAITASLERSLQNCSLNNTNNNHQQSRRPEEDDGSATDGGIGISSCSDDVPDPDNSHISDTTLELNSHISLPYHWEQCLDLKTGEIYYINWRNGMKAKEDPRSRRADYSVSRDCESEEEEEEESWYDSEESSSESCPSSSKEHYDEGQVEKQNNNVLVVAGCKGCLMYFMVPKQVEDCPKCTGQLLHFDRSENGSP

SEQ ID NO: 57397 - DNA, 1361 bp, Glycine max
  misc_feature (1)..(1361): Ceres Seq. ID no. 14316507
gatagcgcttacagtaagaggtgagaaagagagacaaatcggcagaagcaaggaggctgagagcgagagagcaactgcacgcactgtaactcctaacttcccagatcgtcttcttcctcttttctctccggtgattgttggaactcagagagcttctttgatggaacaggttagtaaaacgcactgcgttttgaagcttcactttcacttttgagtttcgattctttccctctactctgcgtatgtgtgcgttttgtgaatttctgcagtacgagaaggttgagaagataggcgaaggaacatacggcgtcgtttacaagggtcgcgaccgcgtcaccaacgagaccatcgcgttgaagaagattcgcctcgagcaggaggatgagggggttcccagcaccgccattcgcgagatttctctcttgaaagaaatgcagcacaggaacattgttaggttgcaggatgtagtgcacgatgagaagagtttgtatctggtttttgagtaccttgacttagatctaaagaagcacatggattcatctccagaatttgcaaaagatccacgacaagtaaaaatgttcctgtaccaaattctctgtggcattgcatactgtcattcacatagagttcttcatcgagacttaaaaccacagaatttgttgatagatcgcagcactaatgcactgaaacttgcagattttggattggccagggcttttggaattcctgttaggacatttacacatgaggtggtaacactgtggtacagagctccggaaattttgcttggatcccgtcagtattctaccccagttgatatttggtcagtgggatgcatatttgcagagatggtaaatcaacgaccacttttccctggggactctgagattgatgaattgtttaaaatattcagaatcatgggtacaccaaatgaagatacatggcctggagtgacatcattgccagattttaaatcagcctttcccaaatggcaacctaaggacctgaaaaatgtggttccaaatcttgagccagctggtcttgatcttctttctagcatgctttacttggatcccagcaaaagaattactgctaggagcgctcttgagcatgaatacttcaaagacattaaatttgtaccctgatttcttatcttcaaggctgaggtgtcttattagtatgtgtagcatttatgggttttgactcaaacgcgtgttgtccttgcttttttcttcaatgcttttggaccgaatcatatttcatttatttgttcttacatttttatttagtatgtgtgatcttgttacctatttacccgtttaatgtattagtctcgatgcaatgcaactagcaaatttcag

SEQ ID NO: 57398 - protein, 300 aa, Glycine max
  peptide (1)..(300): Ceres Seq. ID no. 14316508
  misc_feature (10)..(293): Pfam Name: Protein kinase domain Pfam Description: Protein kinase domain
  misc_feature (9)..(300): Homolog of NCBI NO: 25989351 NR Description: cyclin-dependent kinase [Helianthus tuberosus]
  misc_feature (9)..(300): Homolog of NCBI NO: 9885803 NR Description: cyclin-dependent kinase A:4 [Nicotiana tabacum]
  misc_feature (11)..(300): Homolog of NCBI NO: 115924 NR Description: CELL DIVISION CONTROL PROTEIN 2 HOMOLOG 1
  misc_feature (9)..(300): Homolog of NCBI NO: 13249052 NR Description: CDC2 homolog [Populus tremula x Populus
  misc_feature (9)..(300): Homolog of NCBI NO: 461702 NR Description: CELL DIVISION CONTROL PROTEIN 2 HOMOLOG 2
  misc_feature (9)..(300): Homolog of NCBI NO: 2117788 NR Description: protein kinase (EC 2.7.1.37) cdc2 homolog - cowpea
  misc_feature (9)..(300): Homolog of NCBI NO: 1705676 NR Description: Cell division control protein 2 homolog (p34cdc2)
  misc_feature (9)..(300): Homolog of NCBI NO: 24636266 NR Description: Cell division control protein 2 homolog (p34cdc2)
  misc_feature (9)..(300): Homolog of NCBI NO: 3608177 NR Description: cdc2 [Pisum sativum]
  misc_feature (9)..(300): Homolog of NCBI NO: 1835258 NR Description: cdc2 kinase homologue [Sesbania rostrata]
MCAFCEFLQYEKVEKIGEGTYGVVYKGRDRVTNETIALKKIRLEQEDEGVPSTAIREISLLKEMQHRNIVRLQDVVHDEKSLYLVFEYLDLDLKKHMDSSPEFAKDPRQVKMFLYQILCGIAYCHSHRVLHRDLKPQNLLIDRSTNALKLADFGLARAFGIPVRTFTHEVVTLWYRAPEILLGSRQYSTPVDIWSVGCIFAEMVNQRPLFPGDSEIDELFKIFRIMGTPNEDTWPGVTSLPDFKSAFPKWQPKDLKNVVPNLEPAGLDLLSSMLYLDPSKRITARSALEHEYFKDIKFVP

SEQ ID NO: 57399 - protein, 237 aa, Glycine max
  peptide (1)..(237): Ceres Seq. ID no. 14316509
  misc_feature (1)..(230): Pfam Name: Protein kinase domain Pfam Description: Protein kinase domain
  misc_feature (1)..(237): Homolog of NCBI NO: 25989351 NR Description: cyclin-dependent kinase [Helianthus tuberosus]
  misc_feature (1)..(237): Homolog of NCBI NO: 9885803 NR Description: cyclin-dependent kinase A:4 [Nicotiana tabacum]
  misc_feature (1)..(237): Homolog of NCBI NO: 115924 NR Description: CELL DIVISION CONTROL PROTEIN 2 HOMOLOG 1
  misc_feature (1)..(237): Homolog of NCBI NO: 13249052 NR Description: CDC2 homolog [Populus tremula x Populus
  misc_feature (1)..(237): Homolog of NCBI NO: 461702 NR Description: CELL DIVISION CONTROL PROTEIN 2 HOMOLOG 2
  misc_feature (1)..(237): Homolog of NCBI NO: 2117788 NR Description: protein kinase (EC 2.7.1.37) cdc2 homolog - cowpea
  misc_feature (1)..(237): Homolog of NCBI NO: 1705676 NR Description: Cell division control protein 2 homolog (p34cdc2)
  misc_feature (1)..(237): Homolog of NCBI NO: 24636266 NR Description: Cell division control protein 2 homolog (p34cdc2)
  misc_feature (1)..(237): Homolog of NCBI NO: 3608177 NR Description: cdc2 [Pisum sativum]
  misc_feature (1)..(237): Homolog of NCBI NO: 1835258 NR Description: cdc2 kinase homologue [Sesbania rostrata]
MQHRNIVRLQDVVHDEKSLYLVFEYLDLDLKKHMDSSPEFAKDPRQVKMFLYQILCGIAYCHSHRVLHRDLKPQNLLIDRSTNALKLADFGLARAFGIPVRTFTHEVVTLWYRAPEILLGSRQYSTPVDIWSVGCIFAEMVNQRPLFPGDSEIDELFKIFRIMGTPNEDTWPGVTSLPDFKSAFPKWQPKDLKNVVPNLEPAGLDLLSSMLYLDPSKRITARSALEHEYFKDIKFVP

SEQ ID NO: 57400 - protein, 204 aa, Glycine max
  peptide (1)..(204): Ceres Seq. ID no. 14316510
  misc_feature (1)..(197): Pfam Name: Protein kinase domain Pfam Description: Protein kinase domain
  misc_feature (1)..(204): Homolog of NCBI NO: 25989351 NR Description: cyclin-dependent kinase [Helianthus tuberosus]
  misc_feature (1)..(204): Homolog of NCBI NO: 9885803 NR Description: cyclin-dependent kinase A:4 [Nicotiana tabacum]
  misc_feature (1)..(204): Homolog of NCBI NO: 115924 NR Description: CELL DIVISION CONTROL PROTEIN 2 HOMOLOG 1
  misc_feature (1)..(204): Homolog of NCBI NO: 13249052 NR Description: CDC2 homolog [Populus tremula x Populus
  misc_feature (1)..(204): Homolog of NCBI NO: 461702 NR Description: CELL DIVISION CONTROL PROTEIN 2 HOMOLOG 2
  misc_feature (1)..(204): Homolog of NCBI NO: 2117788 NR Description: protein kinase (EC 2.7.1.37) cdc2 homolog - cowpea
  misc_feature (1)..(204): Homolog of NCBI NO: 1705676 NR Description: Cell division control protein 2 homolog (p34cdc2)
  misc_feature (1)..(204): Homolog of NCBI NO: 24636266 NR Description: Cell division control protein 2 homolog (p34cdc2)
  misc_feature (1)..(204): Homolog of NCBI NO: 3608177 NR Description: cdc2 [Pisum sativum]
  misc_feature (1)..(204): Homolog of NCBI NO: 1835258 NR Description: cdc2 kinase homologue [Sesbania rostrata]
MDSSPEFAKDPRQVKMFLYQILCGIAYCHSHRVLHRDLKPQNLLIDRSTNALKLADFGLARAFGIPVRTFTHEVVTLWYRAPEILLGSRQYSTPVDIWSVGCIFAEMVNQRPLFPGDSEIDELFKIFRIMGTPNEDTWPGVTSLPDFKSAFPKWQPKDLKNVVPNLEPAGLDLLSSMLYLDPSKRITARSALEHEYFKDIKFVP

SEQ ID NO: 57401 - DNA, 1395 bp, Glycine max
  misc_feature (1)..(1395): Ceres Seq. ID no. 14314212
ctaatcgaaaaaaaaatgcctcctcctcttccatctctctgcaacttcaacttggcgatactcttcctcttcctcacacccactttccaaatccccctcatagccccaatctcaaaagacgacaccacccaactctacactctctccgtgttcctgaaaaccccactccaacccacaaaactccacctccaccttggctcctccctcagctgggtcctctgcgactccacctacacctcctcctcctcccaccacatcccctgcaacacccctctctgcaactccttcccctccaacgcatgctccaacaactcctccctctgcgccctcttccccgaaaaccccgtcacaagaaacaccctcctggacaccgccctcatcgattccctcgctcttcccacctacgacgcttcctcctctctcgtcctcatctccgacttcatcttctcctgcgccacggcccatcttctccagggcctcgccgccaatgcattgggcctcgcctcattgggccggtccaactactccctcccggcccaaatcagcacttcattaacctcacctcgttctttcactctctgcctgccagcttcatcagccaacacaggggcagctatattcgcctccactgcctcctcatttcttttctcttccaaaattgaccttacttacacacaactcatcgtaaaccccgttgccgacaccgtcgtcaccgacaatccacaaccgtctgatgagtatttcataaacttaacctcaatcaaaatcaacggtaagcctctttatatcaactcctccatcctcaccgttgatcagaccggcttcggtgggaccaagataagcactgcggaaccctacactgttttagaaacttctatttacagactatttgttcagcgttttgtgaacgagtcctctgcttttaacttgacggtgacggaagcagttgagccgtttggcgtgtgctaccctgcgggggatctcacggagacacgagttggacccgcggtgcccaccgttgatctggtgatgcacagcgaggacgtgttctggagaatctttggcgggaattcgatggtgagggttgcgaagggaggagtggatgtgtggtgtttgggttttgtggacggtgggacccgcgggagaactcccattgtaatcggagggcatcagttggaggataatttaatgcagtttgatcttgactcaaatagattcggtttcacttcgactctcttgcttcaggatgccaaatgttctaatctcaaggtcaataattttgcaaatggaattaaataaattccaattcaaaaaatatgtataggtaatttgattgtttctattttttctgtaacactattacctgttttattacatgttgtaatcaaatgttcc

SEQ ID NO: 57402 - protein, 432 aa, Glycine max
  peptide (1)..(432): Ceres Seq. ID no. 14314213
  misc_feature (27)..(410): Pfam Name: Eukaryotic aspartyl protease Pfam Description: Eukaryotic aspartyl protease
  misc_feature (27)..(426): Homolog of NCBI NO: 662366 NR Description: conglutin gamma [Lupinus angustifolius]
  misc_feature (66)..(420): Homolog of NCBI NO: 10334495 NR Description: putative extracellular dermal glycoprotein [Cicer
  misc_feature (16)..(421): Homolog of NCBI NO: 34907230 NR Description: putative dermal glycoprotein precursor
  misc_feature (33)..(426): Homolog of NCBI NO: 11191819 NR Description: conglutin gamma [Lupinus albus]
  misc_feature (27)..(428): Homolog of NCBI NO: 18379072 NR Description: expressed protein [Arabidopsis thaliana]
  misc_feature (11)..(428): Homolog of NCBI NO: 15218740 NR Description: expressed protein [Arabidopsis thaliana]
  misc_feature (11)..(428): Homolog of NCBI NO: 21537233 NR Description: EDGP precursor [Arabidopsis thaliana]
  misc_feature (33)..(421): Homolog of NCBI NO: 27372527 NR Description: xyloglucan-specific fungal endoglucanase
  misc_feature (33)..(428): Homolog of NCBI NO: 32482806 NR Description: putative xyloglucanase inhibitor [Solanum
  misc_feature (27)..(421): Homolog of NCBI NO: 7488910 NR Description: dermal glycoprotein precursor, extracellular -
LIEKKMPPPLPSLCNFNLAILFLFLTPTFQIPLIAPISKDDTTQLYTLSVFLKTPLQPTKLHLHLGSSLSWVLCDSTYTSSSSHHIPCNTPLCNSFPSNACSNNSSLCALFPENPVTRNTLLDTALIDSLALPTYDASSSLVLISDFIFSCATAHLLQGLAANALGLASLGRSNYSLPAQISTSLTSPRSFTLCLPASSANTGAAIFASTASSFLFSSKIDLTYTQLIVNPVADTVVTDNPQPSDEYFINLTSIKINGKPLYINSSILTVDQTGFGGTKISTAEPYTVLETSIYRLFVQRFVNESSAFNLTVTEAVEPFGVCYPAGDLTETRVGPAVPTVDLVMHSEDVFWRIFGGNSMVRVAKGGVDVWCLGFVDGGTRGRTPIVIGGHQLEDNLMQFDLDSNRFGFTSTLLLQDAKCSNLKVNNFANGIK

SEQ ID NO: 57403 - protein, 427 aa, Glycine max
  peptide (1)..(427): Ceres Seq. ID no. 14314214
  misc_feature (22)..(405): Pfam Name: Eukaryotic aspartyl protease Pfam Description: Eukaryotic aspartyl protease
  misc_feature (22)..(421): Homolog of NCBI NO: 662366 NR Description: conglutin gamma [Lupinus angustifolius]
  misc_feature (61)..(415): Homolog of NCBI NO: 10334495 NR Description: putative extracellular dermal glycoprotein [Cicer
  misc_feature (11)..(416): Homolog of NCBI NO: 34907230 NR Description: putative dermal glycoprotein precursor
  misc_feature (28)..(421): Homolog of NCBI NO: 11191819 NR Description: conglutin gamma [Lupinus albus]
  misc_feature (22)..(423): Homolog of NCBI NO: 18379072 NR Description: expressed protein [Arabidopsis thaliana]
  misc_feature (6)..(423): Homolog of NCBI NO: 15218740 NR Description: expressed protein [Arabidopsis thaliana]
  misc_feature (6)..(423): Homolog of NCBI NO: 21537233 NR Description: EDGP precursor [Arabidopsis thaliana]
  misc_feature (28)..(416): Homolog of NCBI NO: 27372527 NR Description: xyloglucan-specific fungal endoglucanase
  misc_feature (28)..(423): Homolog of NCBI NO: 32482806 NR Description: putative xyloglucanase inhibitor [Solanum
  misc_feature (22)..(416): Homolog of NCBI NO: 7488910 NR Description: dermal glycoprotein precursor, extracellular -
MPPPLPSLCNFNLAILFLFLTPTFQIPLIAPISKDDTTQLYTLSVFLKTPLQPTKLHLHLGSSLSWVLCDSTYTSSSSHHIPCNTPLCNSFPSNACSNNSSLCALFPENPVTRNTLLDTALIDSLALPTYDASSSLVLISDFIFSCATAHLLQGLAANALGLASLGRSNYSLPAQISTSLTSPRSFTLCLPASSANTGAAIFASTASSFLFSSKIDLTYTQLIVNPVADTVVTDNPQPSDEYFINLTSIKINGKPLYINSSILTVDQTGFGGTKISTAEPYTVLETSIYRLFVQRFVNESSAFNLTVTEAVEPFGVCYPAGDLTETRVGPAVPTVDLVMHSEDVFWRIFGGNSMVRVAKGGVDVWCLGFVDGGTRGRTPIVIGGHQLEDNLMQFDLDSNRFGFTSTLLLQDAKCSNLKVNNFANGIK

SEQ ID NO: 57404 - protein, 219 aa, Glycine max
  peptide (1)..(219): Ceres Seq. ID no. 14314215
NRKKNASSSSISLQLQLGDTLPLPHTHFPNPPHSPNLKRRHHPTLHSLRVPENPTPTHKTPPPPWLLPQLGPLRLHLHLLLLPPHPLQHPSLQLLPLQRMLQQLLPLRPLPRKPRHKKHPPGHRPHRFPRSSHLRRFLLSRPHLRLHLLLRHGPSSPGPRRQCIGPRLIGPVQLLPPGPNQHFINLTSFFHSLPASFISQHRGSYIRLHCLLISFLFQN

SEQ ID NO: 57405 - DNA, 1380 bp, Glycine max
  misc_feature (1)..(1380): Ceres Seq. ID no. 15177022
actaaaatacactaattgcctctctctttccctttcttcttcttctccgtcttcttcacactgagttgactgagtcttcgtaactcgctctctactgtctcagctactcatcgcattctctgcatttatcctccgatcacattttctctctcttcgttcgactatagctgacagggatgtcggagaaagctcttagggatctcaatacaattcttggaactgaaaggaagaatgaggactccagtaaggcatgtttatccaagccttctgttgacaatgctgttgaaaatattgaagaatggcaaaagaaaaataatagtccctccttggtttctccagctgttaatggaaatctggctgtgactgctaattctggtgcggaggttgtaaatccagaagtagaatatattgaatctgagaacttgaatgatgtagacgatattgatacttgtctcaagaccctattagctggacttgactcaaaggattgggtcctggtttgtgacacactgaataacgtacgtcgattgtctatatttcataaggaagcaatgcttgatatgctgggggatgtgatcacatctattgcaaagtcactgaaaagtcctagaagtgctgtttgcaaaactgccattatgacatctgcagacattttcagtgcatataatgatcttataatagattcattggaccctctgctagtacaacttcttctcaagtcttcacaagacaaacgctttgtatgtgaggcagctgaaaaagccttgatatcaatgactatttggatttcccctatttctttattgccaaaattgcaaccataccttaagaacaagaatcctcgtatccgtgcaaaagcatcaatgtgcttttctcggagtgttcctcagctgggtgcagaaggcataaagacatatgggattgacaaattgatccaagtagctgcatctcagttgagtgaccagctcccagagtccagggaagcggcccgaactctacttctcgagcttcaaaatgtgtatgagaaatctcatgatctcatcaagccagctactcctactgtcaataatgagcatactgtgaatgaggagaatccagaggtgagttcttgggaaagcttctgtcagtcaaaactttctcctcttagtgctcaagctgtacttcgtgtaaccaccagtatcgctcgggagggtcttgtttcatgacacgcacattaaacctcactttgcggctttcatcatttccttgtttgcttatcattttcttctgtaaatacagtgcgacaattgagatgattgagttgagttgtcgtcgaagcacgtattgagcccaagatttataatgtgtattctattattttccccctagctgttgttacct

SEQ ID NO: 57406 - protein, 342 aa, Glycine max
  peptide (1)..(342): Ceres Seq. ID no. 15177023
  misc_feature (90)..(302): Homolog of NCBI NO: 21064295 NR Description: LP02990p [Drosophila melanogaster]
  misc_feature (133)..(334): Homolog of NCBI NO: 7485173 NR Description: hypothetical protein - Arabidopsis thaliana
  misc_feature (31)..(334): Homolog of NCBI NO: 21593517 NR Description: unknown [Arabidopsis thaliana]
  misc_feature (31)..(334): Homolog of NCBI NO: 18414533 NR Description: expressed protein [Arabidopsis thaliana]
  misc_feature (1)..(276): Homolog of NCBI NO: 9294314 NR Description: gb|AAF24615.1~gene_id:K24M9.2~similar to unknown
  misc_feature (269)..(342): Homolog of NCBI NO: 15229670 NR Description: expressed protein [Arabidopsis thaliana]
  misc_feature (1)..(241): Homolog of NCBI NO: 15229670 NR Description: expressed protein [Arabidopsis thaliana]
  misc_feature (1)..(342): Homolog of NCBI NO: 21537265 NR Description: unknown [Arabidopsis thaliana]
  misc_feature (1)..(342): Homolog of NCBI NO: 18395821 NR Description: expressed protein [Arabidopsis thaliana]
  misc_feature (1)..(342): Homolog of NCBI NO: 15241493 NR Description: expressed protein [Arabidopsis thaliana]
MSEKALRDLNTILGTERKNEDSSKACLSKPSVDNAVENIEEWQKKNNSPSLVSPAVNGNLAVTANSGAEVVNPEVEYIESENLNDVDDIDTCLKTLLAGLDSKDWVLVCDTLNNVRRLSIFHKEAMLDMLGDVITSIAKSLKSPRSAVCKTAIMTSADIFSAYNDLIIDSLDPLLVQLLLKSSQDKRFVCEAAEKALISMTIWISPISLLPKLQPYLKNKNPRIRAKASMCFSRSVPQLGAEGIKTYGIDKLIQVAASQLSDQLPESREAARTLLLELQNVYEKSHDLIKPATPTVNNEHTVNEENPEVSSWESFCQSKLSPLSAQAVLRVTTSIAREGLVS

SEQ ID NO: 57407 - protein, 217 aa, Glycine max
  peptide (1)..(217): Ceres Seq. ID no. 15177024
  misc_feature (1)..(177): Homolog of NCBI NO: 21064295 NR Description: LP02990p [Drosophila melanogaster]
  misc_feature (8)..(209): Homolog of NCBI NO: 7485173 NR Description: hypothetical protein - Arabidopsis thaliana
  misc_feature (1)..(209): Homolog of NCBI NO: 21593517 NR Description: unknown [Arabidopsis thaliana]
  misc_feature (1)..(209): Homolog of NCBI NO: 18414533 NR Description: expressed protein [Arabidopsis thaliana]
  misc_feature (1)..(151): Homolog of NCBI NO: 9294314 NR Description: gb|AAF24615.1~gene_id:K24M9.2~similar to unknown
  misc_feature (144)..(217): Homolog of NCBI NO: 15229670 NR Description: expressed protein [Arabidopsis thaliana]
  misc_feature (1)..(116): Homolog of NCBI NO: 15229670 NR Description: expressed protein [Arabidopsis thaliana]
  misc_feature (1)..(217): Homolog of NCBI NO: 21537265 NR Description: unknown [Arabidopsis thaliana]
  misc_feature (1)..(217): Homolog of NCBI NO: 18395821 NR Description: expressed protein [Arabidopsis thaliana]
  misc_feature (1)..(217): Homolog of NCBI NO: 15241493 NR Description: expressed protein [Arabidopsis thaliana]
MLDMLGDVITSIAKSLKSPRSAVCKTAIMTSADIFSAYNDLIIDSLDPLLVQLLLKSSQDKRFVCEAAEKALISMTIWISPISLLPKLQPYLKNKNPRIRAKASMCFSRSVPQLGAEGIKTYGIDKLIQVAASQLSDQLPESREAARTLLLELQNVYEKSHDLIKPATPTVNNEHTVNEENPEVSSWESFCQSKLSPLSAQAVLRVTTSIAREGLVS

SEQ ID NO: 57408 - protein, 214 aa, Glycine max
  peptide (1)..(214): Ceres Seq. ID no. 15177025
  misc_feature (1)..(174): Homolog of NCBI NO: 21064295 NR Description: LP02990p [Drosophila melanogaster]
  misc_feature (5)..(206): Homolog of NCBI NO: 7485173 NR Description: hypothetical protein - Arabidopsis thaliana
  misc_feature (1)..(206): Homolog of NCBI NO: 21593517 NR Description: unknown [Arabidopsis thaliana]
  misc_feature (1)..(206): Homolog of NCBI NO: 18414533 NR Description: expressed protein [Arabidopsis thaliana]
  misc_feature (1)..(148): Homolog of NCBI NO: 9294314 NR Description: gb|AAF24615.1~gene_id:K24M9.2~similar to unknown
  misc_feature (141)..(214): Homolog of NCBI NO: 15229670 NR Description: expressed protein [Arabidopsis thaliana]
  misc_feature (1)..(113): Homolog of NCBI NO: 15229670 NR Description: expressed protein [Arabidopsis thaliana]
  misc_feature (1)..(214): Homolog of NCBI NO: 21537265 NR Description: unknown [Arabidopsis thaliana]
  misc_feature (1)..(214): Homolog of NCBI NO: 18395821 NR Description: expressed protein [Arabidopsis thaliana]
  misc_feature (1)..(214): Homolog of NCBI NO: 15241493 NR Description: expressed protein [Arabidopsis thaliana]
MLGDVITSIAKSLKSPRSAVCKTAIMTSADIFSAYNDLIIDSLDPLLVQLLLKSSQDKRFVCEAAEKALISMTIWISPISLLPKLQPYLKNKNPRIRAKASMCFSRSVPQLGAEGIKTYGIDKLIQVAASQLSDQLPESREAARTLLLELQNVYEKSHDLIKPATPTVNNEHTVNEENPEVSSWESFCQSKLSPLSAQAVLRVTTSIAREGLVS

SEQ ID NO: 57409 - DNA, 1540 bp, Glycine max
  misc_feature (1)..(1540): Ceres Seq. ID no. 13582534
aaaattttgcacaacaggttatgaaaatccacgagaagcaaccggtcgctgcctgtggatattgaggttccacaagtggtacttcctaatccggatcagcaactttcggatgatggcagcaccttggtttctaacggcggaacctttgagttgggtttcttcaatcccgggagttccaataaccgctatgtcggaatctggtacaaaaaaatctctattaaaacagtagtttgggttgccaaccgtgacaacccaatagtcagacacaactcaagcaagctggtcataaggcaagagggaaacctcgtactcctcagcaacaacaaccagtctcttctttggactacaaatgtaacaaaaaaggcttcgagttcgagtccaattgtgcaactcttggacactggaaacttggtaattaaagatggtatcaacgaagagagtgtttttctgtggcaaagctttgaccatccttgtgacacgctattgtcgggaatgaagcttgggtgggacttaagaactgggcttaaccggcgtcttacttcttggaaaagctgggatgatccgtcttcgggagacattgtttgggaggtagtgataggaaacaatcctgaattggtcatgtggaagagtaaagttgactactttaggactgggccttatactgggaatatgttcagtggagtatatgcgccgaggaataacccactttataattggaaatttgtgagtaacaaagatgaagtgtatttccaatacaccttgagtaatagttttgtggtttctataattgttttgaaccaaacccttaatcttcgtcaacgcctcacttggattcccgataccaagacttggacggtttaccaatccttgccactagatagttgtgatgtttataacacttgtgggccaaatggaaattgcatcattgctgggtcgccaatttgccagtgcttagacgggttcaagccgaaatcgccccaacagtggaacgcaatggattggaggcaagggtgtgtgcgcagtgaagagtggagttgtggggtaaaaaataaggatggttttcaaagacttgctagtatgaaactgccaaacactacattttcttgggttaacgaaagtataacacttgaggagtgtagggccaaatgtttggaaaactgttcgtgcacagcttattcgaacttggacacaaggggaggaggtagtgggtgctccatttgggttggtgaacttgttgacatgagagatgtaaaaagcggacaagatttatatgttcgaatagccacttcggatccagatggtaaacatgagcgtcaaaaaaaggtaatcttggtggttgcgatcactgtttcgctggtccttgtgatgttattagcattctgtgtttacatgatcaagaaaaaatataaaggtgagtttcttacctagaaatcttttttatttcacatacattttaaaatttaagagaacacctacaatgtcataaatagaatatttacgcacttgtgaatctcataaattcattcttcatgtttttctc

SEQ ID NO: 57410 - protein, 311 aa, Glycine max
  peptide (1)..(311): Ceres Seq. ID no. 13582535
  misc_feature (182)..(290): Pfam Name: PAN domain Pfam Description: PAN domain
  misc_feature (1)..(267): Homolog of NCBI NO: 5821271 NR Description: SLG13-b [Brassica oleracea]
  misc_feature (1)..(304): Homolog of NCBI NO: 2148043 NR Description: S-receptor kinase (EC 2.7.1.-) A14 precursor -
  misc_feature (1)..(304): Homolog of NCBI NO: 7434414 NR Description: S-receptor kinase (EC 2.7.1.-) - wild cabbage
  misc_feature (1)..(310): Homolog of NCBI NO: 15234427 NR Description: receptor-related serine/threonine protein kinase
  misc_feature (1)..(310): Homolog of NCBI NO: 913141 NR Description: ARK3 product/receptor-like serine/threonine
  misc_feature (1)..(311): Homolog of NCBI NO: 3868810 NR Description: SRK23Bol [Brassica oleracea]
  misc_feature (1)..(304): Homolog of NCBI NO: 3986092 NR Description: SRK45 [Brassica rapa]
  misc_feature (1)..(267): Homolog of NCBI NO: 1272349 NR Description: secreted glycoprotein 3
  misc_feature (1)..(303): Homolog of NCBI NO: 5821298 NR Description: SRK13-b [Brassica oleracea]
  misc_feature (1)..(303): Homolog of NCBI NO: 5821294 NR Description: SRK13 [Brassica oleracea]
MKLGWDLRTGLNRRLTSWKSWDDPSSGDIVWEVVIGNNPELVMWKSKVDYFRTGPYTGNMFSGVYAPRNNPLYNWKFVSNKDEVYFQYTLSNSFVVSIIVLNQTLNLRQRLTWIPDTKTWTVYQSLPLDSCDVYNTCGPNGNCIIAGSPICQCLDGFKPKSPQQWNAMDWRQGCVRSEEWSCGVKNKDGFQRLASMKLPNTTFSWVNESITLEECRAKCLENCSCTAYSNLDTRGGGSGCSIWVGELVDMRDVKSGQDLYVRIATSDPDGKHERQKKVILVVAITVSLVLVMLLAFCVYMIKKKYKGEFLT

SEQ ID NO: 57411 - protein, 269 aa, Glycine max
  peptide (1)..(269): Ceres Seq. ID no. 13582536
  misc_feature (140)..(248): Pfam Name: PAN domain Pfam Description: PAN domain
  misc_feature (1)..(225): Homolog of NCBI NO: 5821271 NR Description: SLG13-b [Brassica oleracea]
  misc_feature (1)..(262): Homolog of NCBI NO: 2148043 NR Description: S-receptor kinase (EC 2.7.1.-) A14 precursor -
  misc_feature (1)..(262): Homolog of NCBI NO: 7434414 NR Description: S-receptor kinase (EC 2.7.1.-) - wild cabbage
  misc_feature (1)..(268): Homolog of NCBI NO: 15234427 NR Description: receptor-related serine/threonine protein kinase
  misc_feature (1)..(268): Homolog of NCBI NO: 913141 NR Description: ARK3 product/receptor-like serine/threonine
  misc_feature (1)..(269): Homolog of NCBI NO: 3868810 NR Description: SRK23Bol [Brassica oleracea]
  misc_feature (1)..(262): Homolog of NCBI NO: 3986092 NR Description: SRK45 [Brassica rapa]
  misc_feature (1)..(225): Homolog of NCBI NO: 1272349 NR Description: secreted glycoprotein 3
  misc_feature (1)..(261): Homolog of NCBI NO: 5821298 NR Description: SRK13-b [Brassica oleracea]
  misc_feature (1)..(261): Homolog of NCBI NO: 5821294 NR Description: SRK13 [Brassica oleracea]
MWKSKVDYFRTGPYTGNMFSGVYAPRNNPLYNWKFVSNKDEVYFQYTLSNSFVVSIIVLNQTLNLRQRLTWIPDTKTWTVYQSLPLDSCDVYNTCGPNGNCIIAGSPICQCLDGFKPKSPQQWNAMDWRQGCVRSEEWSCGVKNKDGFQRLASMKLPNTTFSWVNESITLEECRAKCLENCSCTAYSNLDTRGGGSGCSIWVGELVDMRDVKSGQDLYVRIATSDPDGKHERQKKVILVVAITVSLVLVMLLAFCVYMIKKKYKGEFLT

SEQ ID NO: 57412 - protein, 252 aa, Glycine max
  peptide (1)..(252): Ceres Seq. ID no. 13582537
  misc_feature (123)..(231): Pfam Name: PAN domain Pfam Description: PAN domain
  misc_feature (1)..(208): Homolog of NCBI NO: 5821271 NR Description: SLG13-b [Brassica oleracea]
  misc_feature (1)..(245): Homolog of NCBI NO: 2148043 NR Description: S-receptor kinase (EC 2.7.1.-) A14 precursor -
  misc_feature (1)..(245): Homolog of NCBI NO: 7434414 NR Description: S-receptor kinase (EC 2.7.1.-) - wild cabbage
  misc_feature (1)..(251): Homolog of NCBI NO: 15234427 NR Description: receptor-related serine/threonine protein kinase
  misc_feature (1)..(251): Homolog of NCBI NO: 913141 NR Description: ARK3 product/receptor-like serine/threonine
  misc_feature (1)..(252): Homolog of NCBI NO: 3868810 NR Description: SRK23Bol [Brassica oleracea]
  misc_feature (1)..(245): Homolog of NCBI NO: 3986092 NR Description: SRK45 [Brassica rapa]
  misc_feature (1)..(208): Homolog of NCBI NO: 1272349 NR Description: secreted glycoprotein 3
  misc_feature (1)..(244): Homolog of NCBI NO: 5821298 NR Description: SRK13-b [Brassica oleracea]
  misc_feature (1)..(244): Homolog of NCBI NO: 5821294 NR Description: SRK13 [Brassica oleracea]
MFSGVYAPRNNPLYNWKFVSNKDEVYFQYTLSNSFVVSIIVLNQTLNLRQRLTWIPDTKTWTVYQSLPLDSCDVYNTCGPNGNCIIAGSPICQCLDGFKPKSPQQWNAMDWRQGCVRSEEWSCGVKNKDGFQRLASMKLPNTTFSWVNESITLEECRAKCLENCSCTAYSNLDTRGGGSGCSIWVGELVDMRDVKSGQDLYVRIATSDPDGKHERQKKVILVVAITVSLVLVMLLAFCVYMIKKKYKGEFLT

SEQ ID NO: 57413 - DNA, 915 bp, Glycine max
  misc_feature (1)..(915): Ceres Seq. ID no. 15173851
gtaagggagtgtttggttacttctgagattcttctgttcctaagagagagagagagcgatgacggtagcagcaggaatcggttacgctctggtagcactaggaccctctctctccctcttcgtttccgtcatttccaaaaaacccttcctcattctcacagttctctccagtacgttgttgtggcttattagtttgattgtgctgtctggaatatggaggggggttttgcctctcagcacaacagcttcgtggccttttggaatactcattttctcatctgttgcttttcaagaagccctcagacttttcttctggaaaatatataagaggttagaagacatgttagatgcctttgctgacagagtatcaaaaccacatcttcacctgacagataagatgctgattgctctggctggtgggttgggtcatggtgttgcccatgctgtgttcttctgcatcagcctattaactcctgcatttggtccagcaacgtatttcgttgaccgctgttcaagagttccatttttccttctttctgcaattattgctcttgcatttgtcataatccacactttctcaatggtcatcgcatttaacgggtatacagaggggaacaaagtggatcaatattttgttcccatcgttcacgttgttgctggaatggtgactctggtgaatttggcgcctggcggttgtgctgttggcattcctcttctttatttggttgcaatcttgaccttgattcattgtgggaggatggtttggagaaaattgacagaaaacccaatcaggccagttcactcatagtaactgataatctttgtaaaaaatctcatctatagtttcttggtgcttgccattcctgttggaatacataaagataccgaaagttataatgcacaaaagtttttcct

SEQ ID NO: 57414 - protein, 249 aa, Glycine max
  peptide (1)..(249): Ceres Seq. ID no. 15173852
  misc_feature (1)..(180): Homolog of NCBI NO: 12654775 NR Description: Similar to CGI-78 protein [Homo sapiens]
  misc_feature (1)..(180): Homolog of NCBI NO: 7705787 NR Description: CGI-78 protein [Homo sapiens]
  misc_feature (1)..(180): Homolog of NCBI NO: 22203751 NR Description: anterior pharynx defective 1A homolog [Mus
  misc_feature (1)..(226): Homolog of NCBI NO: 13775224 NR Description: presenilin stabilization factor-like [Homo
  misc_feature (1)..(226): Homolog of NCBI NO: 18088649 NR Description: hypothetical protein DKFZp564D0372 [Homo sapiens]
  misc_feature (1)..(226): Homolog of NCBI NO: 29243936 NR Description: hypothetical protein 4632417K02 [Mus musculus]
  misc_feature (1)..(227): Homolog of NCBI NO: 31233667 NR Description: ENSANGP00000015809 [Anopheles gambiae]
  misc_feature (1)..(227): Homolog of NCBI NO: 20129183 NR Description: presenilin stabilization factor CG2855-PA
  misc_feature (1)..(242): Homolog of NCBI NO: 18402667 NR Description: expressed protein [Arabidopsis thaliana]
  misc_feature (1)..(242): Homolog of NCBI NO: 21594204 NR Description: unknown [Arabidopsis thaliana]
MTVAAGIGYALVALGPSLSLFVSVISKKPFLILTVLSSTLLWLISLIVLSGIWRGVLPLSTTASWPFGILIFSSVAFQEALRLFFWKIYKRLEDMLDAFADRVSKPHLHLTDKMLIALAGGLGHGVAHAVFFCISLLTPAFGPATYFVDRCSRVPFFLLSAIIALAFVIIHTFSMVIAFNGYTEGNKVDQYFVPIVHVVAGMVTLVNLAPGGCAVGIPLLYLVAILTLIHCGRMVWRKLTENPIRPVHS

SEQ ID NO: 57415 - protein, 155 aa, Glycine max
  peptide (1)..(155): Ceres Seq. ID no. 15173853
  misc_feature (1)..(86): Homolog of NCBI NO: 12654775 NR Description: Similar to CGI-78 protein [Homo sapiens]
  misc_feature (1)..(86): Homolog of NCBI NO: 7705787 NR Description: CGI-78 protein [Homo sapiens]
  misc_feature (1)..(86): Homolog of NCBI NO: 22203751 NR Description: anterior pharynx defective 1A homolog [Mus
  misc_feature (1)..(132): Homolog of NCBI NO: 13775224 NR Description: presenilin stabilization factor-like [Homo
  misc_feature (1)..(132): Homolog of NCBI NO: 18088649 NR Description: hypothetical protein DKFZp564D0372 [Homo sapiens]
  misc_feature (1)..(132): Homolog of NCBI NO: 29243936 NR Description: hypothetical protein 4632417K02 [Mus musculus]
  misc_feature (1)..(133): Homolog of NCBI NO: 31233667 NR Description: ENSANGP00000015809 [Anopheles gambiae]
  misc_feature (1)..(133): Homolog of NCBI NO: 20129183 NR Description: presenilin stabilization factor CG2855-PA
  misc_feature (1)..(148): Homolog of NCBI NO: 18402667 NR Description: expressed protein [Arabidopsis thaliana]
  misc_feature (1)..(148): Homolog of NCBI NO: 21594204 NR Description: unknown [Arabidopsis thaliana]
MLDAFADRVSKPHLHLTDKMLIALAGGLGHGVAHAVFFCISLLTPAFGPATYFVDRCSRVPFFLLSAIIALAFVIIHTFSMVIAFNGYTEGNKVDQYFVPIVHVVAGMVTLVNLAPGGCAVGIPLLYLVAILTLIHCGRMVWRKLTENPIRPVHS

SEQ ID NO: 57416 - protein, 136 aa, Glycine max
  peptide (1)..(136): Ceres Seq. ID no. 15173854
  misc_feature (1)..(67): Homolog of NCBI NO: 34858248 NR Description: similar to Aph1a-pending protein [Rattus
  misc_feature (1)..(67): Homolog of NCBI NO: 7705787 NR Description: CGI-78 protein [Homo sapiens]
  misc_feature (1)..(67): Homolog of NCBI NO: 22203751 NR Description: anterior pharynx defective 1A homolog [Mus
  misc_feature (1)..(113): Homolog of NCBI NO: 13775224 NR Description: presenilin stabilization factor-like [Homo
  misc_feature (1)..(113): Homolog of NCBI NO: 18088649 NR Description: hypothetical protein DKFZp564D0372 [Homo sapiens]
  misc_feature (1)..(113): Homolog of NCBI NO: 29243936 NR Description: hypothetical protein 4632417K02 [Mus musculus]
  misc_feature (1)..(114): Homolog of NCBI NO: 31233667 NR Description: ENSANGP00000015809 [Anopheles gambiae]
  misc_feature (1)..(114): Homolog of NCBI NO: 20129183 NR Description: presenilin stabilization factor CG2855-PA
  misc_feature (1)..(129): Homolog of NCBI NO: 18402667 NR Description: expressed protein [Arabidopsis thaliana]
  misc_feature (1)..(129): Homolog of NCBI NO: 21594204 NR Description: unknown [Arabidopsis thaliana]
MLIALAGGLGHGVAHAVFFCISLLTPAFGPATYFVDRCSRVPFFLLSAIIALAFVIIHTFSMVIAFNGYTEGNKVDQYFVPIVHVVAGMVTLVNLAPGGCAVGIPLLYLVAILTLIHCGRMVWRKLTENPIRPVHS

SEQ ID NO: 57417 - DNA, 1324 bp, Glycine max
  misc_feature (1)..(1324): Ceres Seq. ID no. 15171777
gaactgggatctaactctcattctctttctctctctcagttgtcagtacttaaaaatcattgtccttgagtctctgcacactgcacacagcacacagcacacatcgtcgtcgtaatcatcatcatctccctttctgaaacttttgtcatcatgagagtgcgagccaaaccctgttatcagccttaaagcgaaacagtgagagagatagagacaccactttgcatgagaacgatatcactatcacatctcatcatcttattctaccatggccttcctaccttctcacggtttcacgtttaacactactcatgaagaagatcactgccacttccctccaacctctctcgacgccttcccctctttgccaccccagcactttcaagggggtgcacctttcatgttgaagcggtccatgtcgttatcaggcatagagaacaagtgcaatgaagtacatggagatgatgagttatccgatgatggggtcttccagagtggggagaagaagaagaggttgaatttggaacaggtgaaggcccttgagaagagttttgatcaggggaacaaacttgagccagaaaggaaagtgcagttagctaaggctttggggttgcagccaagacaagttgccatatggtttcagaatagaagggctagatggaaaaccaagcaattggagaaagaatatgaagtcctcaagaagcagtttgaagcagtcaaggctgataatgatgttcttaaggttcggaaccagaaactacaggcagagttacaagctgtaaaaagtagggattgttgtgaagctggaataatcagccttaagaaagaaactgagggttcatggagcaatggaagtgataacaactcagatctaaatttagatccctcaagagcactaggtttgaacagtcctatatcttctcataacattaaaaacctactaccaaattcgttaaagccaaacagcataacccaactccttcaagatgatggcttgtgcaacatgtttcacaacattgatgcaccacagaacttttggcccaggcctgatcagcaccaccagcgtttccattgaccctatataagtgatttttggatattaattaatgatatgatatgaggacaaattatacaatacaatcttttttattcagttttttttttccgatttatttatgtgcagtagattggtgtataaagtttgagcaaattaaatctgctattagagtcatgaggagtcggtggactttgagcagtgtaatttctttcctatatgtatacattattgtattacagaataatataaaataatatttaagttaggccg

SEQ ID NO: 57418 - protein, 268 aa, Glycine max
  peptide (1)..(268): Ceres Seq. ID no. 15171778
  misc_feature (79)..(133): Pfam Name: Homeobox domain Pfam Description: Homeobox domain
  misc_feature (45)..(265): Homolog of NCBI NO: 25453564 NR Description: homeobox protein HAT7 [imported] - Arabidopsis
  misc_feature (45)..(265): Homolog of NCBI NO: 21431775 NR Description: Homeobox-leucine zipper protein HAT7 (HD-ZIP
  misc_feature (1)..(262): Homolog of NCBI NO: 18396130 NR Description: homeobox-leucine zipper protein. putative
  misc_feature (19)..(208): Homolog of NCBI NO: 19071644 NR Description: putative DNA-binding protein
  misc_feature (1)..(265): Homolog of NCBI NO: 30685207 NR Description: Homeobox-leucine zipper protein HAT7 (HD-ZIP
  misc_feature (1)..(209): Homolog of NCBI NO: 21555784 NR Description: homeobox gene 13 protein [Arabidopsis thaliana]
  misc_feature (1)..(209): Homolog of NCBI NO: 15222452 NR Description: homeobox-leucine zipper protein ATHB-13 (HD-Zip
  misc_feature (1)..(268): Homolog of NCBI NO: 7446247 NR Description: homeotic protein - common sunflower
  misc_feature (1)..(268): Homolog of NCBI NO: 21593221 NR Description: putative homeobox-leucine zipper protein, HAT7
  misc_feature (1)..(268): Homolog of NCBI NO: 15232066 NR Description: Homeobox-leucine zipper protein/HD-Zip
MAFLPSHGFTFNTTHEEDHCHFPPTSLDAFPSLPPQHFQGGAPFMLKRSMSLSGIENKCNEVHGDDELSDDGVFQSGEKKKRLNLEQVKALEKSFDQGNKLEPERKVQLAKALGLQPRQVAIWFQNRRARWKTKQLEKEYEVLKKQFEAVKADNDVLKVRNQKLQAELQAVKSRDCCEAGIISLKKETEGSWSNGSDNNSDLNLDPSRALGLNSPISSHNIKNLLPNSLKPNSITQLLQDDGLCNMFHNIDAPQNFWPRPDQHHQRFH

SEQ ID NO: 57419 - protein, 224 aa, Glycine max
  peptide (1)..(224): Ceres Seq. ID no. 15171779
  misc_feature (35)..(89): Pfam Name: Homeobox domain Pfam Description: Homeobox domain
  misc_feature (1)..(221): Homolog of NCBI NO: 25453564 NR Description: homeobox protein HAT7 [imported] - Arabidopsis
  misc_feature (1)..(221): Homolog of NCBI NO: 21431775 NR Description: Homeobox-leucine zipper protein HAT7 (HD-ZIP
  misc_feature (1)..(218): Homolog of NCBI NO: 18396130 NR Description: homeobox-leucine zipper protein. putative
  misc_feature (1)..(164): Homolog of NCBI NO: 19071644 NR Description: putative DNA-binding protein
  misc_feature (1)..(221): Homolog of NCBI NO: 30685207 NR Description: Homeobox-leucine zipper protein HAT7 (HD-ZIP
  misc_feature (1)..(165): Homolog of NCBI NO: 21555784 NR Description: homeobox gene 13 protein [Arabidopsis thaliana]
  misc_feature (1)..(165): Homolog of NCBI NO: 15222452 NR Description: homeobox-leucine zipper protein ATHB-13 (HD-Zip
  misc_feature (1)..(224): Homolog of NCBI NO: 7446247 NR Description: homeotic protein - common sunflower
  misc_feature (1)..(224): Homolog of NCBI NO: 21593221 NR Description: putative homeobox-leucine zipper protein, HAT7
  misc_feature (1)..(224): Homolog of NCBI NO: 15232066 NR Description: Homeobox-leucine zipper protein/HD-Zip
MLKRSMSLSGIENKCNEVHGDDELSDDGVFQSGEKKKRLNLEQVKALEKSFDQGNKLEPERKVQLAKALGLQPRQVAIWFQNRRARWKTKQLEKEYEVLKKQFEAVKADNDVLKVRNQKLQAELQAVKSRDCCEAGIISLKKETEGSWSNGSDNNSDLNLDPSRALGLNSPISSHNIKNLLPNSLKPNSITQLLQDDGLCNMFHNIDAPQNFWPRPDQHHQRFH

SEQ ID NO: 57420 - protein, 219 aa, Glycine max
  peptide (1)..(219): Ceres Seq. ID no. 15171780
  misc_feature (30)..(84): Pfam Name: Homeobox domain Pfam Description: Homeobox domain
  misc_feature (1)..(216): Homolog of NCBI NO: 25453564 NR Description: homeobox protein HAT7 [imported] - Arabidopsis
  misc_feature (1)..(216): Homolog of NCBI NO: 21431775 NR Description: Homeobox-leucine zipper protein HAT7 (HD-ZIP
  misc_feature (1)..(213): Homolog of NCBI NO: 18396130 NR Description: homeobox-leucine zipper protein. putative
  misc_feature (1)..(159): Homolog of NCBI NO: 19071644 NR Description: putative DNA-binding protein
  misc_feature (1)..(216): Homolog of NCBI NO: 30685207 NR Description: Homeobox-leucine zipper protein HAT7 (HD-ZIP
  misc_feature (1)..(160): Homolog of NCBI NO: 21555784 NR Description: homeobox gene 13 protein [Arabidopsis thaliana]
  misc_feature (1)..(160): Homolog of NCBI NO: 15222452 NR Description: homeobox-leucine zipper protein ATHB-13 (HD-Zip
  misc_feature (1)..(219): Homolog of NCBI NO: 7446247 NR Description: homeotic protein - common sunflower
  misc_feature (1)..(219): Homolog of NCBI NO: 21593221 NR Description: putative homeobox-leucine zipper protein, HAT7
  misc_feature (1)..(219): Homolog of NCBI NO: 15232066 NR Description: Homeobox-leucine zipper protein/HD-Zip
MSLSGIENKCNEVHGDDELSDDGVFQSGEKKKRLNLEQVKALEKSFDQGNKLEPERKVQLAKALGLQPRQVAIWFQNRRARWKTKQLEKEYEVLKKQFEAVKADNDVLKVRNQKLQAELQAVKSRDCCEAGIISLKKETEGSWSNGSDNNSDLNLDPSRALGLNSPISSHNIKNLLPNSLKPNSITQLLQDDGLCNMFHNIDAPQNFWPRPDQHHQRFH

SEQ ID NO: 57421 - DNA, 2018 bp, Glycine max
  misc_feature (1)..(2018): Ceres Seq. ID no. 14314404
acatttctcactctcgtctcgaagatcgagatatctatttagatctcagaaaaacagtgtttcatttcaattcattcagtcttattattattagggtttggcgattcagagagaaagagaaatgggagaacgaaaaggaatcccaattgctctggggctcttggcgatgctcctcttcttcattgcttcttcctcttcctctcacctcgttcgtgcttccgatgacgccgacgacgcgatcttctacgagtcattcgacgaggattttgacggacggtggattgtgtccgacaacgaggattacaacggtgtctggaagcatgctaagagtgatgggcatgatgattatggacttcttattagtgaacaagcccggaaatatgctatagtcaaaaaacttgacgagcctgtcagtcttaaggatggaacagttgttcttcagtttgagactcgccttcagaatggcctcgaatgtggtggcgcatatattaaatatcttcgaccccaggagagcggatggaaaccaaaggaatttgataacgaatctccatattctatcatgtttggtcctgataagtgtggtgctacaaacaaggtgcacttcattttcaagcataagaatccaaagagtggggagtatgttgaacaccatctcaagtatcctccttctgtcccatctgacaaactaactcatgtatacactgcaattctgaagcccgataatgaattgcaaattttgattgatggtgaggagaagaaaaaggcaaatttcttgtcttctgaggactttgagcctcctcttatcccttccaagacaatccctgatcctgatgataagaaacctgaggactgggacgaaagagccaaaatcccggacccaagtgctgtgaagccagatgactgggatgaggatgcacccatggaaattttagatgaagaagcagagaaacctgaaggatggttggatgacgagccagaggaaattgatgacccagaggcgacaaaacccgaagactgggatgatgaggaggatggtgaatgggaagccccaaagattgaaaacccgaagtgtgaggcagcccctggttgtggtgaatggaagaggccaatgaagaggaatccagcttataagggaaagtggagtgctccttacatcgataaccccaattacaagggcatatggaagcctcgcgagattccaaaccctgaatactttgaactcgagaaacctgattttgagcccattgctgctcttggcattgagatttggacaatgcaggatggcatcctatttgacaatattctgatagctaacgatgataaagttgcagaatcctatcgggagaccacatggaagcccaagtttaccattgagaaagaaaaacagaaggctgaagatgaggctgcaactggttcagatggtattgcaggcttccagaagaaggtatttgacctcttgtacaagattgcagacattcccttcctgagcgaccacaaatctaagatatacgatctcattgagaaagctgagaaacagccaaatctcactattggaattcttgtagcggttgtggttgtcttcgtgtcaattttcttcaggctcatatttggtggcaagaaacctgcaaaggtggagaagaaaccagaacgcacagaagcttccaataaccaaggtggtgcagagaatgaagaaaacaaagagaaagaggaagcatctaatgctccgcgtcggaggccaaggcgagaagattgaaatggttgaatcttttaaatggcgccctgtcaactatcatcaccacagctacagataaattttgggctttagtttcattttaggtgcactctgttttcattcgtttccttttttccctttttttttaagaaaaagaaaagattatttgcttcaggggtgtagatcttctcctgtttttggagacttgagtgtttgagctagtagttgaagttgtacaattattttttgtctttatttttctattaatggatcctgtttttaacac

SEQ ID NO: 57422 - protein, 543 aa, Glycine max
  peptide (1)..(543): Ceres Seq. ID no. 14314405
  misc_feature (39)..(396): Pfam Name: Calreticulin family Pfam Description: Calreticulin family
  misc_feature (38)..(540): Homolog of NCBI NO: 18564808 NR Description: calnexin [Aspergillus niger]
  misc_feature (122)..(498): Homolog of NCBI NO: 7441503 NR Description: calnexin - maize (fragment)
  misc_feature (36)..(542): Homolog of NCBI NO: 11131766 NR Description: Calnexin homolog precursor
  misc_feature (37)..(542): Homolog of NCBI NO: 473878 NR Description: calnexin homolog
  misc_feature (37)..(542): Homolog of NCBI NO: 15240773 NR Description: calnexin, putative [Arabidopsis thaliana]
  misc_feature (37)..(543): Homolog of NCBI NO: 31321896 NR Description: putative papillar cell-specific calnexin
  misc_feature (13)..(543): Homolog of NCBI NO: 15240353 NR Description: calnexin 1 (CNX1) [Arabidopsis thaliana]
  misc_feature (36)..(542): Homolog of NCBI NO: 21740628 NR Description: OSJNBb0012E08.10 [Oryza sativa (japonica
  misc_feature (1)..(543): Homolog of NCBI NO: 11131469 NR Description: Calnexin homolog precursor
  misc_feature (1)..(542): Homolog of NCBI NO: 3334138 NR Description: CALNEXIN HOMOLOG PRECURSOR
MGERKGIPIALGLLAMLLFFIASSSSSHLVRASDDADDAIFYESFDEDFDGRWIVSDNEDYNGVWKHAKSDGHDDYGLLISEQARKYAIVKKLDEPVSLKDGTVVLQFETRLQNGLECGGAYIKYLRPQESGWKPKEFDNESPYSIMFGPDKCGATNKVHFIFKHKNPKSGEYVEHHLKYPPSVPSDKLTHVYTAILKPDNELQILIDGEEKKKANFLSSEDFEPPLIPSKTIPDPDDKKPEDWDERAKIPDPSAVKPDDWDEDAPMEILDEEAEKPEGWLDDEPEEIDDPEATKPEDWDDEEDGEWEAPKIENPKCEAAPGCGEWKRPMKRNPAYKGKWSAPYIDNPNYKGIWKPREIPNPEYFELEKPDFEPIAALGIEIWTMQDGILFDNILIANDDKVAESYRETTWKPKFTIEKEKQKAEDEAATGSDGIAGFQKKVFDLLYKIADIPFLSDHKSKIYDLIEKAEKQPNLTIGILVAVVVVFVSIFFRLIFGGKKPAKVEKKPERTEASNNQGGAENEENKEKEEASNAPRRRPRRED

SEQ ID NO: 57423 - protein, 528 aa, Glycine max
  peptide (1)..(528): Ceres Seq. ID no. 14314406
  misc_feature (24)..(381): Pfam Name: Calreticulin family Pfam Description: Calreticulin family
  misc_feature (23)..(525): Homolog of NCBI NO: 18564808 NR Description: calnexin [Aspergillus niger]
  misc_feature (107)..(483): Homolog of NCBI NO: 7441503 NR Description: calnexin - maize (fragment)
  misc_feature (21)..(527): Homolog of NCBI NO: 11131766 NR Description: Calnexin homolog precursor
  misc_feature (22)..(527): Homolog of NCBI NO: 473878 NR Description: calnexin homolog
  misc_feature (22)..(527): Homolog of NCBI NO: 15240773 NR Description: calnexin, putative [Arabidopsis thaliana]
  misc_feature (22)..(528): Homolog of NCBI NO: 31321896 NR Description: putative papillar cell-specific calnexin
  misc_feature (1)..(528): Homolog of NCBI NO: 15240353 NR Description: calnexin 1 (CNX1) [Arabidopsis thaliana]
  misc_feature (21)..(527): Homolog of NCBI NO: 21740628 NR Description: OSJNBb0012E08.10 [Oryza sativa (japonica
  misc_feature (1)..(528): Homolog of NCBI NO: 11131469 NR Description: Calnexin homolog precursor
  misc_feature (1)..(527): Homolog of NCBI NO: 3334138 NR Description: CALNEXIN HOMOLOG PRECURSOR
MLLFFIASSSSSHLVRASDDADDAIFYESFDEDFDGRWIVSDNEDYNGVWKHAKSDGHDDYGLLISEQARKYAIVKKLDEPVSLKDGTVVLQFETRLQNGLECGGAYIKYLRPQESGWKPKEFDNESPYSIMFGPDKCGATNKVHFIFKHKNPKSGEYVEHHLKYPPSVPSDKLTHVYTAILKPDNELQILIDGEEKKKANFLSSEDFEPPLIPSKTIPDPDDKKPEDWDERAKIPDPSAVKPDDWDEDAPMEILDEEAEKPEGWLDDEPEEIDDPEATKPEDWDDEEDGEWEAPKIENPKCEAAPGCGEWKRPMKRNPAYKGKWSAPYIDNPNYKGIWKPREIPNPEYFELEKPDFEPIAALGIEIWTMQDGILFDNILIANDDKVAESYRETTWKPKFTIEKEKQKAEDEAATGSDGIAGFQKKVFDLLYKIADIPFLSDHKSKIYDLIEKAEKQPNLTIGILVAVVVVFVSIFFRLIFGGKKPAKVEKKPERTEASNNQGGAENEENKEKEEASNAPRRRPRRED

SEQ ID NO: 57424 - protein, 397 aa, Glycine max
  peptide (1)..(397): Ceres Seq. ID no. 14314407
  misc_feature (1)..(250): Pfam Name: Calreticulin family Pfam Description: Calreticulin family
  misc_feature (1)..(394): Homolog of NCBI NO: 18564808 NR Description: calnexin [Aspergillus niger]
  misc_feature (1)..(352): Homolog of NCBI NO: 7441503 NR Description: calnexin - maize (fragment)
  misc_feature (1)..(396): Homolog of NCBI NO: 11131766 NR Description: Calnexin homolog precursor
  misc_feature (1)..(396): Homolog of NCBI NO: 473878 NR Description: calnexin homolog
  misc_feature (1)..(396): Homolog of NCBI NO: 15240773 NR Description: calnexin, putative [Arabidopsis thaliana]
  misc_feature (1)..(397): Homolog of NCBI NO: 31321896 NR Description: putative papillar cell-specific calnexin
  misc_feature (1)..(397): Homolog of NCBI NO: 15240353 NR Description: calnexin 1 (CNX1) [Arabidopsis thaliana]
  misc_feature (1)..(396): Homolog of NCBI NO: 21740628 NR Description: OSJNBb0012E08.10 [Oryza sativa (japonica
  misc_feature (1)..(397): Homolog of NCBI NO: 11131469 NR Description: Calnexin homolog precursor
  misc_feature (1)..(396): Homolog of NCBI NO: 3334138 NR Description: CALNEXIN HOMOLOG PRECURSOR
MFGPDKCGATNKVHFIFKHKNPKSGEYVEHHLKYPPSVPSDKLTHVYTAILKPDNELQILIDGEEKKKANFLSSEDFEPPLIPSKTIPDPDDKKPEDWDERAKIPDPSAVKPDDWDEDAPMEILDEEAEKPEGWLDDEPEEIDDPEATKPEDWDDEEDGEWEAPKIENPKCEAAPGCGEWKRPMKRNPAYKGKWSAPYIDNPNYKGIWKPREIPNPEYFELEKPDFEPIAALGIEIWTMQDGILFDNILIANDDKVAESYRETTWKPKFTIEKEKQKAEDEAATGSDGIAGFQKKVFDLLYKIADIPFLSDHKSKIYDLIEKAEKQPNLTIGILVAVVVVFVSIFFRLIFGGKKPAKVEKKPERTEASNNQGGAENEENKEKEEASNAPRRRPRRED

SEQ ID NO: 57425 - DNA, 1780 bp, Glycine max
  misc_feature (1)..(1780): Ceres Seq. ID no. 15177043
ctctctgaactctgaacaccgaaaatccgccatggattttcgcatctatggcgtcacgatccttctcttcctcttcccaaccctcacattctcaatctcacagggtcagataaactcaaactcaatccttgtcgctctgttggactcccattacaccgaactcgctgagcttgtggaaaaagccatgcttttgcagactctggagaacactgtcatgaacaacagcaacaacatcacaatcttcgctcccagaaacgaagccctcgaacgcgatctcgaccccgatttcaagcgtttcctcctcgaaccccgcaatctccattccctccaaaccctcctgttgtcccacatcgtccccaaaagaatcaccaaacccgaattcaaaaccgggtcgacccgacacagaactttagcgtctcaccaccacctcactctccaagccctgaatttgactcactggaatgttgagtcttcccgggttattaacccgaattcggtaacccgacccgacggagtgatccacggcatcgacactctcctcatccctcgctcagtccaagacgaattcaaccgtcgccggaatctgatctccatcgccgcggtaaaacccgaaccatccccggaggtcgacccgcgaacccaccggttaaagaaaccggcgccggcatcgccggcgggggccccgccggcgctcccgatctacgacgcgatggcgccggggccatcgcttgcaccggcgccagcgccgggtccgggtgggtctcacaagcacttcaatggggaaaagcaagtaaaagatttcatcgagacgttactccactacggcggctacaacgagatggcggatattctggtaaacctaacgtccctggcgacggagatgggaaggttggtttcggagggttacgttttgacggtgttagctcctaacgacgaggccatggcgaagttagcgacggagcaattaagtgaaccgggttcgcccgaacagattatgtactatcacttgatacccgagtatcagaccgaggagagcatgtacaatgccgtcagaaggttcgggaaggtccgttacgacacgttacggttgccgcacaaggtcacggcgcaggaggctgacggctccgttaagttcggccacggggacacgtctgcttacttgttcgaccccgatatttacacggatggacggatctccgttcagggaattgacggcgttctgtttccgcctcaggaggaagaagccgccgggcccgttacccgagcccagcccgctaaggtcgtcgtcaagcaaagaagaggaaaattgttggaaacagcatgttggatgcttggaagctttggacagaactctagattcatctcttgtcaatgaagagctcttatctggatgctagcaagactagttaagaacgaaaaccctgcacaggaaattccaaagatgtaaaaagtcaacggaatatgaaggccaggttacttgaaatgggttaatagcagcagctgctatggatttggttttcccacgtttttgtgatggtctttttttctttctccttctcgatttttcttcttgtggatttgggtcttggacttgagaacaaaagtttctcaagtctagtgaaaacaatatatagtgcaatttagattcagttaggaggttgtgttggtgggatgagaaggttttatgtaataagatggcagtgaaatctgtgcccgattcagtaagtaattttacaaaaatggaaatacagtaataatcaataaaatgattcttttctgt

SEQ ID NO: 57426 - protein, 457 aa, Glycine max
  peptide (1)..(457): Ceres Seq. ID no. 15177044
  misc_feature (38)..(182): Pfam Name: Fasciclin domain Pfam Description: Fasciclin domain
  misc_feature (116)..(434): Homolog of NCBI NO: 7486009 NR Description: hypothetical protein F22O6.250 - Arabidopsis
  misc_feature (35)..(425): Homolog of NCBI NO: 27819499 NR Description: putative arabinogalactan-protein
  misc_feature (33)..(417): Homolog of NCBI NO: 34899886 NR Description: OJ1714_H10.26 [Oryza sativa (japonica
  misc_feature (11)..(437): Homolog of NCBI NO: 15240029 NR Description: expressed protein [Arabidopsis thaliana]
  misc_feature (33)..(457): Homolog of NCBI NO: 33146739 NR Description: GPI-anchored protein -like
  misc_feature (35)..(434): Homolog of NCBI NO: 6041822 NR Description: unknown protein [Arabidopsis thaliana]
  misc_feature (35)..(456): Homolog of NCBI NO: 18399319 NR Description: expressed protein [Arabidopsis thaliana]
  misc_feature (16)..(435): Homolog of NCBI NO: 25370583 NR Description: hypothetical protein At2g35860 [imported] -
  misc_feature (20)..(457): Homolog of NCBI NO: 15231197 NR Description: predicted GPI-anchored protein [Arabidopsis
  misc_feature (16)..(457): Homolog of NCBI NO: 30686588 NR Description: expressed protein [Arabidopsis thaliana]
SLNSEHRKSAMDFRIYGVTILLFLFPTLTFSISQGQINSNSILVALLDSHYTELAELVEKAMLLQTLENTVMNNSNNITIFAPRNEALERDLDPDFKRFLLEPRNLHSLQTLLLSHIVPKRITKPEFKTGSTRHRTLASHHHLTLQALNLTHWNVESSRVINPNSVTRPDGVIHGIDTLLIPRSVQDEFNRRRNLISIAAVKPEPSPEVDPRTHRLKKPAPASPAGAPPALPIYDAMAPGPSLAPAPAPGPGGSHKHFNGEKQVKDFIETLLHYGGYNEMADILVNLTSLATEMGRLVSEGYVLTVLAPNDEAMAKLATEQLSEPGSPEQIMYYHLIPEYQTEESMYNAVRRFGKVRYDTLRLPHKVTAQEADGSVKFGHGDTSAYLFDPDIYTDGRISVQGIDGVLFPPQEEEAAGPVTRAQPAKVVVKQRRGKLLETACWMLGSFGQNSRFISCQ

SEQ ID NO: 57427 - protein, 447 aa, Glycine max
  peptide (1)..(447): Ceres Seq. ID no. 15177045
  misc_feature (28)..(172): Pfam Name: Fasciclin domain Pfam Description: Fasciclin domain
  misc_feature (106)..(424): Homolog of NCBI NO: 7486009 NR Description: hypothetical protein F22O6.250 - Arabidopsis
  misc_feature (25)..(415): Homolog of NCBI NO: 27819499 NR Description: putative arabinogalactan-protein
  misc_feature (23)..(407): Homolog of NCBI NO: 34899886 NR Description: OJ1714_H10.26 [Oryza sativa (japonica
  misc_feature (1)..(427): Homolog of NCBI NO: 15240029 NR Description: expressed protein [Arabidopsis thaliana]
  misc_feature (23)..(447): Homolog of NCBI NO: 33146739 NR Description: GPI-anchored protein -like
  misc_feature (25)..(424): Homolog of NCBI NO: 6041822 NR Description: unknown protein [Arabidopsis thaliana]
  misc_feature (25)..(446): Homolog of NCBI NO: 18399319 NR Description: expressed protein [Arabidopsis thaliana]
  misc_feature (6)..(425): Homolog of NCBI NO: 25370583 NR Description: hypothetical protein At2g35860 [imported] -
  misc_feature (10)..(447): Homolog of NCBI NO: 15231197 NR Description: predicted GPI-anchored protein [Arabidopsis
  misc_feature (6)..(447): Homolog of NCBI NO: 30686588 NR Description: expressed protein [Arabidopsis thaliana]
MDFRIYGVTILLFLFPTLTFSISQGQINSNSILVALLDSHYTELAELVEKAMLLQTLENTVMNNSNNITIFAPRNEALERDLDPDFKRFLLEPRNLHSLQTLLLSHIVPKRITKPEFKTGSTRHRTLASHHHLTLQALNLTHWNVESSRVINPNSVTRPDGVIHGIDTLLIPRSVQDEFNRRRNLISIAAVKPEPSPEVDPRTHRLKKPAPASPAGAPPALPIYDAMAPGPSLAPAPAPGPGGSHKHFNGEKQVKDFIETLLHYGGYNEMADILVNLTSLATEMGRLVSEGYVLTVLAPNDEAMAKLATEQLSEPGSPEQIMYYHLIPEYQTEESMYNAVRRFGKVRYDTLRLPHKVTAQEADGSVKFGHGDTSAYLFDPDIYTDGRISVQGIDGVLFPPQEEEAAGPVTRAQPAKVVVKQRRGKLLETACWMLGSFGQNSRFISCQ

SEQ ID NO: 57428 - protein, 396 aa, Glycine max
  peptide (1)..(396): Ceres Seq. ID no. 15177046
  misc_feature (1)..(121): Pfam Name: Fasciclin domain Pfam Description: Fasciclin domain
  misc_feature (55)..(373): Homolog of NCBI NO: 7486009 NR Description: hypothetical protein F22O6.250 - Arabidopsis
  misc_feature (1)..(364): Homolog of NCBI NO: 27819499 NR Description: putative arabinogalactan-protein
  misc_feature (1)..(356): Homolog of NCBI NO: 34899886 NR Description: OJ1714_H10.26 [Oryza sativa (japonica
  misc_feature (1)..(376): Homolog of NCBI NO: 15240029 NR Description: expressed protein [Arabidopsis thaliana]
  misc_feature (1)..(396): Homolog of NCBI NO: 33146739 NR Description: GPI-anchored protein -like
  misc_feature (1)..(373): Homolog of NCBI NO: 6041822 NR Description: unknown protein [Arabidopsis thaliana]
  misc_feature (1)..(395): Homolog of NCBI NO: 18399319 NR Description: expressed protein [Arabidopsis thaliana]
  misc_feature (1)..(374): Homolog of NCBI NO: 25370583 NR Description: hypothetical protein At2g35860 [imported] -
  misc_feature (1)..(396): Homolog of NCBI NO: 15231197 NR Description: predicted GPI-anchored protein [Arabidopsis
  misc_feature (1)..(396): Homolog of NCBI NO: 30686588 NR Description: expressed protein [Arabidopsis thaliana]
MLLQTLENTVMNNSNNITIFAPRNEALERDLDPDFKRFLLEPRNLHSLQTLLLSHIVPKRITKPEFKTGSTRHRTLASHHHLTLQALNLTHWNVESSRVINPNSVTRPDGVIHGIDTLLIPRSVQDEFNRRRNLISIAAVKPEPSPEVDPRTHRLKKPAPASPAGAPPALPIYDAMAPGPSLAPAPAPGPGGSHKHFNGEKQVKDFIETLLHYGGYNEMADILVNLTSLATEMGRLVSEGYVLTVLAPNDEAMAKLATEQLSEPGSPEQIMYYHLIPEYQTEESMYNAVRRFGKVRYDTLRLPHKVTAQEADGSVKFGHGDTSAYLFDPDIYTDGRISVQGIDGVLFPPQEEEAAGPVTRAQPAKVVVKQRRGKLLETACWMLGSFGQNSRFISCQ

SEQ ID NO: 57429 - DNA, 1614 bp, Glycine max
  misc_feature (1)..(1614): Ceres Seq. ID no. 14314280
aaacactagtagtctagtacattacatcacaaaaatatcatccctctttgttcctaaacacggggcactggtttcgaaccctcgttgtggttaggtcttcttcacctttcgaattttggaatccatgggtcagggaactccgggcggcatgaaccggcagggcgaccggaagccggacggcggcgacaagaaggagaagaagttcgagccgtcggctccgccggcgcgcgtggggcggaaacagcggaagcagaaaggtccggaggcggcggcgcggttgccgacagtgactccggtgacgaagtgcaaactgcggcttctgaagctggagcggatcaaggactaccttctgatggaggaggagttcgtggcgaatcaggagcgactcaagccgcaggaggagaaggccgaggaagacagatccaaggtcgatgatctccgaggctctcccatgagcgtcggaaacctcgaagagctcatcgacgagaatcacgctattgtctcctcctccgttgggcctgagtactatgtcggaatcctgtctttcgttgataaggatcagttggagcctggttgtgctattttgatgcataataaggttctttctgttgttgggcttcttcaagatgaagttgatccaatggtctctgtcatgaaggttgagaaggctcctctggaatcttatgctgacattggtggtttagatgcccaaatacaggaaattaaagaagcagttgagctacccctgacgcatcctgaactatatgaagacattggtatcaagcctcctaagggggtcattttatatggagaacctggaactgggaagacattgcttgcgaaggctgtggcaaactcaacatcagcaacattcttgcgtgttgttggtagtgaactgatacaaaagtacttgggagatggcccaaaacttgtaagagaacttttcagagttgctgatgatctttctccttctattgtattcattgatgaaattgatgcagttggtacaaaaaggtatgatgctcactcaggaggagaacgtgaaattcaaaggaccatgctagagttgctgaaccagttagatggttttgattcaagaggagatgtgaaagtgattctggcaaccaacagaattgaaagtcttgatccagctttgctacgacctggtcgaattgacaggaagatagaatttcctcttcctgatatcaaaacaaggagacgcatcttccagatacacacgtcaaggatgacattagctgatgatgtcaacttggaagaatttgttatgactaaagacgaattctccggagctgatataaaggcaatatgtactgaagctggtttacttgctctacgagaacgtcgaatgaaggtgactcatgccgactttaagaaggccaaggataaagtgatgtttaagaagaaagaaggggtgcctgaagggctgtatatgtgaaaaactatcctctattatctctggccctcttgtctttcttttaacgttctagttatgcgaacaaatgccaattcatttgtattctgcgaacaaatgtcagttgtattttaggggctttgaatctcaacaacgattttaattcaatatagttttctttc

SEQ ID NO: 57430 - protein, 443 aa, Glycine max
  peptide (1)..(443): Ceres Seq. ID no. 14314281
  misc_feature (224)..(411): Pfam Name: ATPase family associated with various cellular Pfam Description: ATPase family associated with various cellular
  misc_feature (1)..(443): Homolog of NCBI NO: 31207505 NR Description: ENSANGP00000017098 [Anopheles gambiae]
  misc_feature (1)..(443): Homolog of NCBI NO: 18479040 NR Description: 26S proteasome regulatory subunit IV [Tortula
  misc_feature (1)..(443): Homolog of NCBI NO: 17297987 NR Description: 26S proteasome regulatory particle triple-A
  misc_feature (1)..(443): Homolog of NCBI NO: 1172635 NR Description: 26S PROTEASE REGULATORY SUBUNIT 4 HOMOLOG
  misc_feature (1)..(443): Homolog of NCBI NO: 11045086 NR Description: 26S proteasome subunit 4-like protein [Brassica
  misc_feature (1)..(443): Homolog of NCBI NO: 21593177 NR Description: 26S proteasome subunit 4 [Arabidopsis thaliana]
  misc_feature (1)..(443): Homolog of NCBI NO: 13937244 NR Description: At2g20140/T2G17.6 [Arabidopsis thaliana]
  misc_feature (1)..(443): Homolog of NCBI NO: 6652880 NR Description: 26S proteasome AAA-ATPase subunit RPT2a
  misc_feature (1)..(443): Homolog of NCBI NO: 15225307 NR Description: 26S proteasome subunit 4 [Arabidopsis thaliana]
  misc_feature (1)..(443): Homolog of NCBI NO: 15235544 NR Description: 26S proteasome AAA-ATPase subunit RPT2a
MGQGTPGGMNRQGDRKPDGGDKKEKKFEPSAPPARVGRKQRKQKGPEAAARLPTVTPVTKCKLRLLKLERIKDYLLMEEEFVANQERLKPQEEKAEEDRSKVDDLRGSPMSVGNLEELIDENHAIVSSSVGPEYYVGILSFVDKDQLEPGCAILMHNKVLSVVGLLQDEVDPMVSVMKVEKAPLESYADIGGLDAQIQEIKEAVELPLTHPELYEDIGIKPPKGVILYGEPGTGKTLLAKAVANSTSATFLRVVGSELIQKYLGDGPKLVRELFRVADDLSPSIVFIDEIDAVGTKRYDAHSGGEREIQRTMLELLNQLDGFDSRGDVKVILATNRIESLDPALLRPGRIDRKIEFPLPDIKTRRRIFQIHTSRMTLADDVNLEEFVMTKDEFSGADIKAICTEAGLLALRERRMKVTHADFKKAKDKVMFKKKEGVPEGLYM

SEQ ID NO: 57431 - protein, 435 aa, Glycine max
  peptide (1)..(435): Ceres Seq. ID no. 14314282
  misc_feature (216)..(403): Pfam Name: ATPase family associated with various cellular Pfam Description: ATPase family associated with various cellular
  misc_feature (1)..(435): Homolog of NCBI NO: 31207505 NR Description: ENSANGP00000017098 [Anopheles gambiae]
  misc_feature (1)..(435): Homolog of NCBI NO: 18479040 NR Description: 26S proteasome regulatory subunit IV [Tortula
  misc_feature (1)..(435): Homolog of NCBI NO: 17297987 NR Description: 26S proteasome regulatory particle triple-A
  misc_feature (1)..(435): Homolog of NCBI NO: 1172635 NR Description: 26S PROTEASE REGULATORY SUBUNIT 4 HOMOLOG
  misc_feature (1)..(435): Homolog of NCBI NO: 11045086 NR Description: 26S proteasome subunit 4-like protein [Brassica
  misc_feature (1)..(435): Homolog of NCBI NO: 21593177 NR Description: 26S proteasome subunit 4 [Arabidopsis thaliana]
  misc_feature (1)..(435): Homolog of NCBI NO: 13937244 NR Description: At2g20140/T2G17.6 [Arabidopsis thaliana]
  misc_feature (1)..(435): Homolog of NCBI NO: 6652880 NR Description: 26S proteasome AAA-ATPase subunit RPT2a
  misc_feature (1)..(435): Homolog of NCBI NO: 15225307 NR Description: 26S proteasome subunit 4 [Arabidopsis thaliana]
  misc_feature (1)..(435): Homolog of NCBI NO: 15235544 NR Description: 26S proteasome AAA-ATPase subunit RPT2a
MNRQGDRKPDGGDKKEKKFEPSAPPARVGRKQRKQKGPEAAARLPTVTPVTKCKLRLLKLERIKDYLLMEEEFVANQERLKPQEEKAEEDRSKVDDLRGSPMSVGNLEELIDENHAIVSSSVGPEYYVGILSFVDKDQLEPGCAILMHNKVLSVVGLLQDEVDPMVSVMKVEKAPLESYADIGGLDAQIQEIKEAVELPLTHPELYEDIGIKPPKGVILYGEPGTGKTLLAKAVANSTSATFLRVVGSELIQKYLGDGPKLVRELFRVADDLSPSIVFIDEIDAVGTKRYDAHSGGEREIQRTMLELLNQLDGFDSRGDVKVILATNRIESLDPALLRPGRIDRKIEFPLPDIKTRRRIFQIHTSRMTLADDVNLEEFVMTKDEFSGADIKAICTEAGLLALRERRMKVTHADFKKAKDKVMFKKKEGVPEGLYM

SEQ ID NO: 57432 - protein, 367 aa, Glycine max
  peptide (1)..(367): Ceres Seq. ID no. 14314283
  misc_feature (148)..(335): Pfam Name: ATPase family associated with various cellular Pfam Description: ATPase family associated with various cellular
  misc_feature (1)..(367): Homolog of NCBI NO: 31207505 NR Description: ENSANGP00000017098 [Anopheles gambiae]
  misc_feature (1)..(367): Homolog of NCBI NO: 18479040 NR Description: 26S proteasome regulatory subunit IV [Tortula
  misc_feature (1)..(367): Homolog of NCBI NO: 17297987 NR Description: 26S proteasome regulatory particle triple-A
  misc_feature (1)..(367): Homolog of NCBI NO: 1172635 NR Description: 26S PROTEASE REGULATORY SUBUNIT 4 HOMOLOG
  misc_feature (1)..(367): Homolog of NCBI NO: 11045086 NR Description: 26S proteasome subunit 4-like protein [Brassica
  misc_feature (1)..(367): Homolog of NCBI NO: 21593177 NR Description: 26S proteasome subunit 4 [Arabidopsis thaliana]
  misc_feature (1)..(367): Homolog of NCBI NO: 13937244 NR Description: At2g20140/T2G17.6 [Arabidopsis thaliana]
  misc_feature (1)..(367): Homolog of NCBI NO: 6652880 NR Description: 26S proteasome AAA-ATPase subunit RPT2a
  misc_feature (1)..(367): Homolog of NCBI NO: 15225307 NR Description: 26S proteasome subunit 4 [Arabidopsis thaliana]
  misc_feature (1)..(367): Homolog of NCBI NO: 15235544 NR Description: 26S proteasome AAA-ATPase subunit RPT2a
MEEEFVANQERLKPQEEKAEEDRSKVDDLRGSPMSVGNLEELIDENHAIVSSSVGPEYYVGILSFVDKDQLEPGCAILMHNKVLSVVGLLQDEVDPMVSVMKVEKAPLESYADIGGLDAQIQEIKEAVELPLTHPELYEDIGIKPPKGVILYGEPGTGKTLLAKAVANSTSATFLRVVGSELIQKYLGDGPKLVRELFRVADDLSPSIVFIDEIDAVGTKRYDAHSGGEREIQRTMLELLNQLDGFDSRGDVKVILATNRIESLDPALLRPGRIDRKIEFPLPDIKTRRRIFQIHTSRMTLADDVNLEEFVMTKDEFSGADIKAICTEAGLLALRERRMKVTHADFKKAKDKVMFKKKEGVPEGLYM

SEQ ID NO: 57433 - DNA, 1739 bp, Glycine max
  misc_feature (1)..(1739): Ceres Seq. ID no. 15171805
ctattcttacacggcatggatctcgtggccactctgttttagtttaatcagaagcaaaatccacaaaactaacagtgtattaaaatttctgaacctgaaaaattgttattattttgatagggtttataggaaaagcagcatacccgagttcacaaacactgaacgccgctgctccgtagtttcgatcgacgcattcttcacttcaagatatcacaatgtctataacgcacagcctcactactccactctcttcttcttcctctgctttcttagctccttcttccttcaattgcaggggacaggtttcgttgcctgtgaagagcgtgagcatttgcaaatgcgttgccacacccgaagctgagactgcctacaagacaggggtcaatcgcaatccaaatatggggaaacttcaagctggctatctctttcccgagattgctagaagaaggtctgcgcacttgctgaagtaccctgatgctaaagtaataagccttggaattggtgatacaactgaacctattcctgaagtcataactgatgcaatgtcaaagagatcacatgcattgtcgactatagaaggatacagtgggtatggagctgaacaaggtgaaaagccattaagaagggcacttgcttcaacattttacagcgatcttggcatagaagaggatgatatatttgtctcagatggagcaaagtgtgatatatctcgtctccagattgtctttgggtcaaatgtaaaaatggctgtgcaagacccttcatatccggcctatgtagactctagtgtaattatgggccagactggcctcttccagaagaatgttgagaagtttgcaaacattgaatacatgaggtgtaatccggaaaatggtttcttccctgatttgtcttcaatttctcgaccagatataatatttttctgttctccaaacaatcctactggtgctgtggcaacaagggaacaactgacccaactagttcagtttgctaaggacaatggttctatagtaatccacgattcagcttatgcaatgtatatttctggtgacaaccctcgctcaatatttgaaattcctggagccaaagaggttgccattgagacttcatcatttagcaagtatgctgggttcactggagtccgattgggttggactgtggttccgaagcagttgctgttttctgatggatttcctgttgccaaggacttcaaccgtattgtatgcacttgtttcaatggtgcttcaaatatttcccaggcaggcggtctggcttgcctttcaccagaaggtcttaaggctatgcgtgatgttattggattctacaaggaaaatactaacataataatggagacatttgattctcttgggtttaaagtctatggagggaaagatgcaccatatgtgtgggtccattttcccggccgaagctcatgggatgtattcgctgagattcttgagaagactcatgtggttacaacccctggtagtggttttggacctggtggtgaaggttttatcagggttagtgcctttggtcacagggaaaatgtcttggaggcatgcagaaggttcaagcagctatacaagtgaagttagaatatctcatttggtttcaagagttgttctcttggactgaagctagggctgtcttatttaaataatgcaattgattttccgtggagtttagattataagatgtaaagacagggtttatcaattgaggaagtatatttttct

SEQ ID NO: 57434 - protein, 458 aa, Glycine max
  peptide (1)..(458): Ceres Seq. ID no. 15171806
  misc_feature (147)..(457): Pfam Name: Aminotransferase class I and II Pfam Description: Aminotransferase class I and II
  misc_feature (59)..(458): Homolog of NCBI NO: 17232595 NR Description: aminotransferase [Nostoc sp. PCC 7120]
  misc_feature (59)..(456): Homolog of NCBI NO: 23022290 NR Description: hypothetical protein [Clostridium thermocellum
  misc_feature (57)..(456): Homolog of NCBI NO: 24213476 NR Description: aminotransferase [Leptospira interrogans serovar
  misc_feature (54)..(457): Homolog of NCBI NO: 18397344 NR Description: aminotransferase family [Arabidopsis thaliana]
  misc_feature (48)..(457): Homolog of NCBI NO: 25315768 NR Description: probable aspartate aminotransferase
  misc_feature (53)..(454): Homolog of NCBI NO: 24414269 NR Description: Putative transaminase [Oryza sativa (japonica
  misc_feature (53)..(454): Homolog of NCBI NO: 37703722 NR Description: putative aminotransferase ALD1
  misc_feature (12)..(458): Homolog of NCBI NO: 37703720 NR Description: putative aminotransferase AGD2
  misc_feature (35)..(458): Homolog of NCBI NO: 7447845 NR Description: probable transaminase (EC 2.6.1.-) T16L1.170
  misc_feature (1)..(458): Homolog of NCBI NO: 18418270 NR Description: aminotransferase family [Arabidopsis thaliana]
MSITHSLTTPLSSSSSAFLAPSSFNCRGQVSLPVKSVSICKCVATPEAETAYKTGVNRNPNMGKLQAGYLFPEIARRRSAHLLKYPDAKVISLGIGDTTEPIPEVITDAMSKRSHALSTIEGYSGYGAEQGEKPLRRALASTFYSDLGIEEDDIFVSDGAKCDISRLQIVFGSNVKMAVQDPSYPAYVDSSVIMGQTGLFQKNVEKFANIEYMRCNPENGFFPDLSSISRPDIIFFCSPNNPTGAVATREQLTQLVQFAKDNGSIVIHDSAYAMYISGDNPRSIFEIPGAKEVAIETSSFSKYAGFTGVRLGWTVVPKQLLFSDGFPVAKDFNRIVCTCFNGASNISQAGGLACLSPEGLKAMRDVIGFYKENTNIIMETFDSLGFKVYGGKDAPYVWVHFPGRSSWDVFAEILEKTHVVTTPGSGFGPGGEGFIRVSAFGHRENVLEACRRFKQLYK

SEQ ID NO: 57435 - protein, 397 aa, Glycine max
  peptide (1)..(397): Ceres Seq. ID no. 15171807
  misc_feature (86)..(396): Pfam Name: Aminotransferase class I and II Pfam Description: Aminotransferase class I and II
  misc_feature (1)..(397): Homolog of NCBI NO: 17232595 NR Description: aminotransferase [Nostoc sp. PCC 7120]
  misc_feature (1)..(395): Homolog of NCBI NO: 23022290 NR Description: hypothetical protein [Clostridium thermocellum
  misc_feature (1)..(395): Homolog of NCBI NO: 24213476 NR Description: aminotransferase [Leptospira interrogans serovar
  misc_feature (1)..(396): Homolog of NCBI NO: 18397344 NR Description: aminotransferase family [Arabidopsis thaliana]
  misc_feature (1)..(396): Homolog of NCBI NO: 25315768 NR Description: probable aspartate aminotransferase
  misc_feature (1)..(393): Homolog of NCBI NO: 24414269 NR Description: Putative transaminase [Oryza sativa (japonica
  misc_feature (1)..(393): Homolog of NCBI NO: 37703722 NR Description: putative aminotransferase ALD1
  misc_feature (1)..(397): Homolog of NCBI NO: 37703720 NR Description: putative aminotransferase AGD2
  misc_feature (1)..(397): Homolog of NCBI NO: 7447845 NR Description: probable transaminase (EC 2.6.1.-) T16L1.170
  misc_feature (1)..(397): Homolog of NCBI NO: 18418270 NR Description: aminotransferase family [Arabidopsis thaliana]
MGKLQAGYLFPEIARRRSAHLLKYPDAKVISLGIGDTTEPIPEVITDAMSKRSHALSTIEGYSGYGAEQGEKPLRRALASTFYSDLGIEEDDIFVSDGAKCDISRLQIVFGSNVKMAVQDPSYPAYVDSSVIMGQTGLFQKNVEKFANIEYMRCNPENGFFPDLSSISRPDIIFFCSPNNPTGAVATREQLTQLVQFAKDNGSIVIHDSAYAMYISGDNPRSIFEIPGAKEVAIETSSFSKYAGFTGVRLGWTVVPKQLLFSDGFPVAKDFNRIVCTCFNGASNISQAGGLACLSPEGLKAMRDVIGFYKENTNIIMETFDSLGFKVYGGKDAPYVWVHFPGRSSWDVFAEILEKTHVVTTPGSGFGPGGEGFIRVSAFGHRENVLEACRRFKQLYK

SEQ ID NO: 57436 - protein, 349 aa, Glycine max
  peptide (1)..(349): Ceres Seq. ID no. 15171808
  misc_feature (38)..(348): Pfam Name: Aminotransferase class I and II Pfam Description: Aminotransferase class I and II
  misc_feature (1)..(349): Homolog of NCBI NO: 17232595 NR Description: aminotransferase [Nostoc sp. PCC 7120]
  misc_feature (1)..(347): Homolog of NCBI NO: 23022290 NR Description: hypothetical protein [Clostridium thermocellum
  misc_feature (1)..(347): Homolog of NCBI NO: 24213476 NR Description: aminotransferase [Leptospira interrogans serovar
  misc_feature (1)..(348): Homolog of NCBI NO: 18397344 NR Description: aminotransferase family [Arabidopsis thaliana]
  misc_feature (1)..(348): Homolog of NCBI NO: 25315768 NR Description: probable aspartate aminotransferase
  misc_feature (1)..(345): Homolog of NCBI NO: 24414269 NR Description: Putative transaminase [Oryza sativa (japonica
  misc_feature (1)..(345): Homolog of NCBI NO: 37703722 NR Description: putative aminotransferase ALD1
  misc_feature (1)..(349): Homolog of NCBI NO: 37703720 NR Description: putative aminotransferase AGD2
  misc_feature (1)..(349): Homolog of NCBI NO: 7447845 NR Description: probable transaminase (EC 2.6.1.-) T16L1.170
  misc_feature (1)..(349): Homolog of NCBI NO: 18418270 NR Description: aminotransferase family [Arabidopsis thaliana]
MSKRSHALSTIEGYSGYGAEQGEKPLRRALASTFYSDLGIEEDDIFVSDGAKCDISRLQIVFGSNVKMAVQDPSYPAYVDSSVIMGQTGLFQKNVEKFANIEYMRCNPENGFFPDLSSISRPDIIFFCSPNNPTGAVATREQLTQLVQFAKDNGSIVIHDSAYAMYISGDNPRSIFEIPGAKEVAIETSSFSKYAGFTGVRLGWTVVPKQLLFSDGFPVAKDFNRIVCTCFNGASNISQAGGLACLSPEGLKAMRDVIGFYKENTNIIMETFDSLGFKVYGGKDAPYVWVHFPGRSSWDVFAEILEKTHVVTTPGSGFGPGGEGFIRVSAFGHRENVLEACRRFKQLYK

SEQ ID NO: 57437 - DNA, 1756 bp, Glycine max
  misc_feature (1)..(1756): Ceres Seq. ID no. 15179924
acactcacacatactcctttttccgttattaccctaaaacatcctccatctacaacacacactcttactcttactaatccaacctcctttgcccctcatgcactaccattaacattaccctctcttttttttctccctcacgaaccttcatttcttctcccgccatggatccttgccctttcgtgaggctcacagtcggcaacctcgccctcaaaattcccgttgcttctaaacccgcgctctccgttgttcatccttcttcttctccttgtttctgcaaaatcaagctcaagaattttcctcttcaatccgccgtcgttcctttcattcctccggaaagccacttccccgactcgcaggtgcatcctattgccgccacgttccacctcagcaagtccgatatcgacaagctcgccggaaaatccatcttcgccgggaagctctgcctcaaaatctcgatctacaccggccggagaggcaccacctgcggcgtcagctccgggagactcctcggccgagtttccgtgcccttggatctcaccggaacggtagccaagaccacagtgttccacaatggttggattaggataggaaaagatgccaaaggctcctccgcgcagtttcatttgaatgtaaaagccgaacccgatcctagatttgtcttccagttcgacggcgaacctgaatgcagtcctcaagttttccagatccaaggcaacatttcacaacctgtttttacctgcaagttcagtttcagaaacaatggcgaccggaatcaccgttccagatcgttacaatcggaaccaggaggttctagaagctggttgagttcgttcggaagcgagcgcgagaggccggggaaggagcgcaaaggatggtccataacggttcacgatctttccggttcaccggtggccgcagcttccatggtcacgcctttcgtcgcttcgcccggttcggaccgggtgagctgctccaaccccggctcgtggctcattcttcgtcctagcgacggcacgtggaagccctgggggaggctcgaggcgtggcgcgaacgcggcggctccgacggcctcggctaccgtttcgaactcattccggacaccaacggcggtatgagcgccgccggcatagtgcttgcggaatccacgctgagcaataacaaaggtggaaagttcgtcatcgatttgagttgtcgtaacggtaacgttagcggaaacggtggatctaatggccgtgcgacgccggggagcgcgacgtcgccggcgtgcagcccgaggagtagtggagattatggatacggcctctggccttattgtatgtatagaggttttgtaatgtcggcgagcgtggagggtgaggggaggtgcagcaagcctacagtggaggtgagcgtgccgcacgtgaattgcacggaggatgcggcggcgtttgtggctttagcggctgccgttgatctgagcgtggatgcgtgcaggcttttctcgcaacggctgaggaaggaactgtgccagcagctggatttgattggctgattccgccgtttttctttgtcgttttttctaatatttttgtttaatggggttgttcattttgagtgagaagcattttactactaacaaacaatttacaggctgtacaggggaaggagagagtattgcagtgcgcgctgtctattcacgtgtggcttttcattgattttctctcttcttttttcatcagttgtggggaatcaagaaaaagcttttttgttttg

SEQ ID NO: 57438 - protein, 456 aa, Glycine max
  peptide (1)..(456): Ceres Seq. ID no. 15179925
  misc_feature (255)..(451): Pfam Name: Protein of unknown function (DUF1005) Pfam Description: Protein of unknown function (DUF1005)
  misc_feature (69)..(363): Homolog of NCBI NO: 34896878 NR Description: unknown protein [Oryza sativa (japonica
  misc_feature (1)..(363): Homolog of NCBI NO: 36104436 NR Description: unknown protein [Oryza sativa (japonica
  misc_feature (66)..(454): Homolog of NCBI NO: 18176372 NR Description: unknown protein [Arabidopsis thaliana]
  misc_feature (1)..(455): Homolog of NCBI NO: 15222861 NR Description: expressed protein [Arabidopsis thaliana]
  misc_feature (1)..(109): Homolog of NCBI NO: 15230917 NR Description: expressed protein [Arabidopsis thaliana]
  misc_feature (66)..(454): Homolog of NCBI NO: 15230917 NR Description: expressed protein [Arabidopsis thaliana]
  misc_feature (388)..(449): Homolog of NCBI NO: 15233530 NR Description: expressed protein [Arabidopsis thaliana]
  misc_feature (1)..(361): Homolog of NCBI NO: 15233530 NR Description: expressed protein [Arabidopsis thaliana]
  misc_feature (29)..(455): Homolog of NCBI NO: 32352156 NR Description: hypothetical protein [Oryza sativa (japonica
  misc_feature (1)..(451): Homolog of NCBI NO: 15218372 NR Description: expressed protein [Arabidopsis thaliana]
MDPCPFVRLTVGNLALKIPVASKPALSVVHPSSSPCFCKIKLKNFPLQSAVVPFIPPESHFPDSQVHPIAATFHLSKSDIDKLAGKSIFAGKLCLKISIYTGRRGTTCGVSSGRLLGRVSVPLDLTGTVAKTTVFHNGWIRIGKDAKGSSAQFHLNVKAEPDPRFVFQFDGEPECSPQVFQIQGNISQPVFTCKFSFRNNGDRNHRSRSLQSEPGGSRSWLSSFGSERERPGKERKGWSITVHDLSGSPVAAASMVTPFVASPGSDRVSCSNPGSWLILRPSDGTWKPWGRLEAWRERGGSDGLGYRFELIPDTNGGMSAAGIVLAESTLSNNKGGKFVIDLSCRNGNVSGNGGSNGRATPGSATSPACSPRSSGDYGYGLWPYCMYRGFVMSASVEGEGRCSKPTVEVSVPHVNCTEDAAAFVALAAAVDLSVDACRLFSQRLRKELCQQLDLIG

SEQ ID NO: 57439 - DNA, 744 bp, Glycine max
  misc_feature (1)..(744): Ceres Seq. ID no. 12608140
aatatctaccattcactactttgattccctgagatttctgcaatctacaaaaattcactatgggagtcacaacctttacacaggaatactcctcctctgttgccccatcacgcatgttcaaggccttgattgtagactccagaaatttgcttccaaagctcttacctcagtttgtaaaagatgtgaatgtgatccaaggtgatggtgaagctggaagcattgaacaagttaacttcaatgaagctagccccttcaaatatctgaaacacaggattgatgtgcttgacaaggacaacttggtttgcaaatacactatgattgaaggggatccattgggcgacaagcttgattctataggttatgaggtgaagtttgaggctactagtgatggaggttgcctatgcaaaatgacaagcaattacaataccattggagagattgatgttaaagaggaagaggtaaaggaaggaagggaaagcggtattgcagtttacagagttgtggagtcatacctgctcgagaacccacaagtgtatgcttaatcacttgcttatttattgtgtcatgtatcatacgatataaaaacatattcaattttttaataacggtgtgcaaccaaatatagggttgtttagaatggttgcaaagacttgaattccttaataagtccttattgtatgaacagccaaaaatggctagtggtttgccaaaaatatttgtactttggtagtaaaaaagagtgaa

SEQ ID NO: 57440 - protein, 160 aa, Glycine max
  peptide (1)..(160): Ceres Seq. ID no. 12608141
  misc_feature (1)..(155): Pfam Name: Pathogenesis-related protein Bet v I family Pfam Description: Pathogenesis-related protein Bet v I family
  misc_feature (1)..(138): Homolog of NCBI NO: 7442187 NR Description: TSI-1 protein - tomato
  misc_feature (3)..(159): Homolog of NCBI NO: 13787043 NR Description: Chain A, Solution Structure Of The Major Cherry
  misc_feature (1)..(159): Homolog of NCBI NO: 15418738 NR Description: ribonuclease-like PR-10b [Malus x domestica]
  misc_feature (1)..(159): Homolog of NCBI NO: 7388028 NR Description: Major allergen Pru av 1 (Pru a 1)
  misc_feature (1)..(159): Homolog of NCBI NO: 11182126 NR Description: pathogenesis-related protein 10 [Vitis vinifera]
  misc_feature (1)..(159): Homolog of NCBI NO: 27922941 NR Description: major allergen Mal d 1 [Malus x domestica]
  misc_feature (1)..(159): Homolog of NCBI NO: 7106538 NR Description: similar to PR-10 [Vigna unguiculata]
  misc_feature (1)..(159): Homolog of NCBI NO: 14423842 NR Description: Major allergen Pru ar 1
  misc_feature (1)..(160): Homolog of NCBI NO: 131025 NR Description: Pathogenesis-related protein STH-21
  misc_feature (1)..(160): Homolog of NCBI NO: 131026 NR Description: Pathogenesis-related protein STH-2
MGVTTFTQEYSSSVAPSRMFKALIVDSRNLLPKLLPQFVKDVNVIQGDGEAGSIEQVNFNEASPFKYLKHRIDVLDKDNLVCKYTMIEGDPLGDKLDSIGYEVKFEATSDGGCLCKMTSNYNTIGEIDVKEEEVKEGRESGIAVYRVVESYLLENPQVYA

SEQ ID NO: 57441 - protein, 142 aa, Glycine max
  peptide (1)..(142): Ceres Seq. ID no. 12608142
  misc_feature (1)..(137): Pfam Name: Pathogenesis-related protein Bet v I family Pfam Description: Pathogenesis-related protein Bet v I family
  misc_feature (1)..(120): Homolog of NCBI NO: 7442187 NR Description: TSI-1 protein - tomato
  misc_feature (1)..(141): Homolog of NCBI NO: 13787043 NR Description: Chain A, Solution Structure Of The Major Cherry
  misc_feature (1)..(141): Homolog of NCBI NO: 15418738 NR Description: ribonuclease-like PR-10b [Malus x domestica]
  misc_feature (1)..(141): Homolog of NCBI NO: 7388028 NR Description: Major allergen Pru av 1 (Pru a 1)
  misc_feature (1)..(141): Homolog of NCBI NO: 11182126 NR Description: pathogenesis-related protein 10 [Vitis vinifera]
  misc_feature (1)..(141): Homolog of NCBI NO: 27922941 NR Description: major allergen Mal d 1 [Malus x domestica]
  misc_feature (1)..(141): Homolog of NCBI NO: 7106538 NR Description: similar to PR-10 [Vigna unguiculata]
  misc_feature (1)..(141): Homolog of NCBI NO: 14423842 NR Description: Major allergen Pru ar 1
  misc_feature (1)..(142): Homolog of NCBI NO: 131025 NR Description: Pathogenesis-related protein STH-21
  misc_feature (1)..(142): Homolog of NCBI NO: 131026 NR Description: Pathogenesis-related protein STH-2
MFKALIVDSRNLLPKLLPQFVKDVNVIQGDGEAGSIEQVNFNEASPFKYLKHRIDVLDKDNLVCKYTMIEGDPLGDKLDSIGYEVKFEATSDGGCLCKMTSNYNTIGEIDVKEEEVKEGRESGIAVYRVVESYLLENPQVYA

SEQ ID NO: 57442 - DNA, 1365 bp, Glycine max
  misc_feature (1)..(1365): Ceres Seq. ID no. 14314415
ctctcacgcacacatggtgctgccactgtcactcttctcttctcctttctgcttcgccgattctctatttttgcgcgcaatcgagtaacttgattgcatgtggtcctaaacttgcaggatggattgtatgctttgggccagtcgttaatgataacttgaggtctggatgatgctttctgattggttgtttacatattgtaattcagaatgtggaactttgcatcgaattgcattgctggaactgtgggactgaaaaatgattcaaagcctactcattctgcttcggaatgttctgatgatgaaaactctgttataggcagagaggaagggctggaatgcccaatatgctgggaatctttcaatattgttgaaaatgtgccctatgttttatggtgtggccacaccctttgtaaaaattgtatcctcggactgcagtgggctgttgtgaaatttccaacactgcctgttcaacttcccctttttatctcctgtccatggtgcaaccttctgtctttccgtttagtttaccggggaaaccttaaattccctcgcaaaaactactttcttctttggatggttgagagcatgaatggtgatagagggaaatcgcattcacctttctgtggtgataatcagcaacactcaattaaagataatttaaccatgggaagccaagtaagccatggaaaccttcggagggggctagttcgccatccagagacatcgagttccaaccaatatcatggtaatactggtaatcacctcaatacagaaagatttcatgtttatcttcggaagtcactgatcttctttgtccagttgacggctaagttcccattggtcattatattccttttaattgtcttatatgcaataccagcaagtgcagccattttggccctgtatgtacttgttacaattctgtttgccctcccatcatttctcattttgtacttctcatatcctagtttggattggcttgtgagggaaattatcacttaagattgtgaactagtgtaggctccaactttgcaaacattaagacaacagcttatatcttctactttgtaattatccgacttctcctttagaagctgtcatttatcttcccatatagggtcgttatcaatatatgtatacttgagtcttgattgtagctcaggtcgaacttggctagttggtggatgaaatgtcagtttttggcattagcttcgatgtcaatcagggcagtgggatagggtaatgataaatgcttgtgccctttcctggtggcaagaatttgtttgattaatgccatgttttatttcaattctgattatacttatatttgtaaattgtatataataattgagttgtttgtttgac

SEQ ID NO: 57443 - protein, 264 aa, Glycine max
  peptide (1)..(264): Ceres Seq. ID no. 14314416
  misc_feature (44)..(98): Pfam Name: Zinc finger, C3HC4 type (RING finger) Pfam Description: Zinc finger, C3HC4 type (RING finger)
  misc_feature (1)..(264): Homolog of NCBI NO: 21592563 NR Description: putative RING zinc finger protein [Arabidopsis
  misc_feature (1)..(264): Homolog of NCBI NO: 15221223 NR Description: zinc finger (C3HC4-type RING finger) protein
  misc_feature (1)..(262): Homolog of NCBI NO: 18409246 NR Description: zinc finger (C3HC4-type RING finger) protein
  misc_feature (1)..(262): Homolog of NCBI NO: 21594048 NR Description: unknown [Arabidopsis thaliana]
  misc_feature (1)..(264): Homolog of NCBI NO: 11994767 NR Description: RING zinc finger protein-like [Arabidopsis
  misc_feature (1)..(264): Homolog of NCBI NO: 15228658 NR Description: expressed protein [Arabidopsis thaliana]
MWNFASNCIAGTVGLKNDSKPTHSASECSDDENSVIGREEGLECPICWESFNIVENVPYVLWCGHTLCKNCILGLQWAVVKFPTLPVQLPLFISCPWCNLLSFRLVYRGNLKFPRKNYFLLWMVESMNGDRGKSHSPFCGDNQQHSIKDNLTMGSQVSHGNLRRGLVRHPETSSSNQYHGNTGNHLNTERFHVYLRKSLIFFVQLTAKFPLVIIFLLIVLYAIPASAAILALYVLVTILFALPSFLILYFSYPSLDWLVREIIT

SEQ ID NO: 57444 - protein, 142 aa, Glycine max
  peptide (1)..(142): Ceres Seq. ID no. 14314417
  misc_feature (1)..(142): Homolog of NCBI NO: 21592563 NR Description: putative RING zinc finger protein [Arabidopsis
  misc_feature (1)..(142): Homolog of NCBI NO: 15221223 NR Description: zinc finger (C3HC4-type RING finger) protein
  misc_feature (1)..(140): Homolog of NCBI NO: 18409246 NR Description: zinc finger (C3HC4-type RING finger) protein
  misc_feature (1)..(140): Homolog of NCBI NO: 21594048 NR Description: unknown [Arabidopsis thaliana]
  misc_feature (1)..(142): Homolog of NCBI NO: 11994767 NR Description: RING zinc finger protein-like [Arabidopsis
  misc_feature (1)..(142): Homolog of NCBI NO: 15228658 NR Description: expressed protein [Arabidopsis thaliana]
MVESMNGDRGKSHSPFCGDNQQHSIKDNLTMGSQVSHGNLRRGLVRHPETSSSNQYHGNTGNHLNTERFHVYLRKSLIFFVQLTAKFPLVIIFLLIVLYAIPASAAILALYVLVTILFALPSFLILYFSYPSLDWLVREIIT

SEQ ID NO: 57445 - protein, 138 aa, Glycine max
  peptide (1)..(138): Ceres Seq. ID no. 14314418
  misc_feature (1)..(138): Homolog of NCBI NO: 21592563 NR Description: putative RING zinc finger protein [Arabidopsis
  misc_feature (1)..(138): Homolog of NCBI NO: 15221223 NR Description: zinc finger (C3HC4-type RING finger) protein
  misc_feature (1)..(136): Homolog of NCBI NO: 18409246 NR Description: zinc finger (C3HC4-type RING finger) protein
  misc_feature (1)..(136): Homolog of NCBI NO: 21594048 NR Description: unknown [Arabidopsis thaliana]
  misc_feature (1)..(138): Homolog of NCBI NO: 11994767 NR Description: RING zinc finger protein-like [Arabidopsis
  misc_feature (1)..(138): Homolog of NCBI NO: 15228658 NR Description: expressed protein [Arabidopsis thaliana]
MNGDRGKSHSPFCGDNQQHSIKDNLTMGSQVSHGNLRRGLVRHPETSSSNQYHGNTGNHLNTERFHVYLRKSLIFFVQLTAKFPLVIIFLLIVLYAIPASAAILALYVLVTILFALPSFLILYFSYPSLDWLVREIIT

SEQ ID NO: 57446 - DNA, 1258 bp, Glycine max
  misc_feature (1)..(1258): Ceres Seq. ID no. 14314367
atgggtggctaactcaagcgttaggcttgaggatcttcacggtctcccaagtgaaatcaggatcgtcacgtccaaaatgcccataagcagcagttttctggtacctgaagttgcctcctctcatgagatcaagatggattgctatcattcctggcctgaaatcaaatttctccttaattagagccaatatgtccttgtctggaatcttccccgtttggtatgtgtctacaaacacagaaagtggctctggaactccaattgcataagaaacctgcacaatgcaacgtcgtgcaagccctgaagctaccacgctcttggctgcttgcctaacaatgtatgcaccactcctatcaaccttggttgggtccttgccggagaaggcaccaccaccatgagcaccccaaccaccataggtgtcgataatgatcttccttccagtgagtcctgcatctccatggggtccaccaatcacaaacctaccagaggggttgaggtggaagatggtcttatcatcaaggtatttagctgggatgacaggtttgatcacatgctctttcaattctttagagatttgttcatttgtgacagtttcatcatgctgagttgagatgagaactgtgtgaacccgaataggaatcatggctccaccatcgttcttgtactcaactgtcacttgggttttaccatctggcctcagccaggggcatgttttgttctttctcacctcagtgagcctggcaccaagtttagtagcaagcacatgagtgagtggcattaactcaggtgtttcgtctgtagcataaccaaacatgtggccttggtcaccagcaccaatttcctcaggtttcttggtcatatgaccgtgaactccttgagcaatatcagggctctgttgctcaatgttgaccagaactttgcagttgtcagcatcaagaccaacatctggtgacacaaacccaatgcctttgcaagtgtctcgaactattttctcgtagttcacgctggccttggttgtaatctcaccaaagaccataaccatgttagtttttgtacaggtctcgcaagcaaccttgctttctgggtcttgctccaagcatgcatctaggatggcatctgaaacctggtcacacagcttgtcgggatggccttcgtttacagattctgaggtgaagaggaaagtttccatctctagtgttaagaaaacaaaaaggggttaaattgtattctagagagaaattatgaaagcaattaacttgac

SEQ ID NO: 57447 - protein, 71 aa, Glycine max
  peptide (1)..(71): Ceres Seq. ID no. 14314368
  misc_feature (1)..(71): Homolog of NCBI NO: 23485282 NR Description: hypothetical protein [Plasmodium yoelii yoelii]
MSTPTTIGVDNDLPSSESCISMGSTNHKPTRGVEVEDGLIIKVFSWDDRFDHMLFQFFRDLFICDSFIMLS

SEQ ID NO: 57448 - protein, 59 aa, Glycine max
  peptide (1)..(59): Ceres Seq. ID no. 14314369
MIFLPVSPASPWGPPITNLPEGLRWKMVLSSRYLAGMTGLITCSFNSLEICSFVTVSSC

SEQ ID NO: 57449 - protein, 59 aa, Glycine max
  peptide (1)..(59): Ceres Seq. ID no. 14314370
WVANSSVRLEDLHGLPSEIRIVTSKMPISSSFLVPEVASSHEIKMDCYHSWPEIKFLLN

SEQ ID NO: 57450 - DNA, 1416 bp, Glycine max
  misc_feature (1)..(1416): Ceres Seq. ID no. 15177055
gaaaaatcatcaccaacaaacaaacaaacattcattccattctctctctaaatcgcactcacatcatctcttctatctcctcagtactccggcgatcggagcctctaatccgccacgttctccctatctcctctttctcaactccagaatctcgtcctcgtgagagaaaataaaagttagttagggttacgcacagttgattaattaattaataatagaaaaaatgagctttcaggacatcgaggccggccgttccttcgcttcccggcgaaatctaatcaacggcaaacaagaccccacgcaggcggtggcttccggcatctttcagatcaacaccgccgtctccacgttccagagactcgtcaacaccctcggaacccccaaggacacccccgaactccgcgataagctgcacaagacgagactgcacattggacaattggtgaaggatacttcggctaagcttaagcaagctagtgagattgatcacaacgttgaagttaatgcaagtaagaagatagcagatgcgaagcttgcaaaagattttcaggcggtgttgaaagaatttcagaaggcacagcgtctttcagcggagagggaaactgcttacactccttttgttccgcaagcacttcttccatccagctatacagccagtgaagtagacattggttctgataagactccagaacagcgtgcacttcttgtggaatccagaagacaggaggtattattcttagataatgagatttccttcaatgaggctatcattgaggaaagagagcaaggcattcaagaaatccagtcgcagattggtgaagtaaatgagattttcaaagatcttgctgtgcttgtccatgagcaaggagcaatgattgatgatatcgggtccaatattgagcattcccatgaagcaactgcgcaagcaaaatctcaacttgccaaagcttcaaagacgcaaagatcaaattcatctttgacatgcttgcttctggtgatattcgggatcgtgcttctaatcgtcatcattgttcttgctgcttagtcatagactctggattctattacaaatcaaatgctcttacatactgagttgcagatacgatctcccttgctgatgactacactgaatggtgatttaccagatctcacgaatgaccggaatttgtctcatcaggtttcagtacatgatgtgggaatattcacaacattagtgtatcgttattttggtgggtatatgttctggtttctttgttggtgtttggggctttaaggatgtgtcacaacctgcctgctgtgtatgttatctttttggtttcttaataaacgatatattaattcgttctttacctgtatacgcaacttgaaaattagcatgactgactcttctttagtaataccttgatccattcaccc

SEQ ID NO: 57451 - protein, 273 aa, Glycine max
  peptide (1)..(273): Ceres Seq. ID no. 15177056
  misc_feature (14)..(116): Pfam Name: Syntaxin Pfam Description: Syntaxin
MSFQDIEAGRSFASRRNLINGKQDPTQAVASGIFQINTAVSTFQRLVNTLGTPKDTPELRDKLHKTRLHIGQLVKDTSAKLKQASEIDHNVEVNASKKIADAKLAKDFQAVLKEFQKAQRLSAERETAYTPFVPQALLPSSYTASEVDIGSDKTPEQRALLVESRRQEVLFLDNEISFNEAIIEEREQGIQEIQSQIGEVNEIFKDLAVLVHEQGAMIDDIGSNIEHSHEATAQAKSQLAKASKTQRSNSSLTCLLLVIFGIVLLIVIIVLAA

SEQ ID NO: 57452 - DNA, 669 bp, Glycine max
  misc_feature (1)..(669): Ceres Seq. ID no. 15168438
aatcccaagctcacacacactaaaccaaagtaagaggtatagtgttctaagagtgagcaacttgtgagaaatggcttccaaggctgcacttctcttgtgtctcaatgttctctttttcactgtggttagttccacatatgtgccatgtaatccaccccccaaaactcccaaacacccacctgtcccaaagccaccatccccaaagcaagcaagctgccccaaagacactattaagttcggtgtgtgtgctgatgtgttaggtttgattaatgtgcaacttgggaagccaccaaagaccccatgctgcaacctaattcagggtcttggaaaccttaaaattgcagaaaattgtacacaaatgtttttgcattgtggtggtttcagagaccatgatatttttgacgatgcgggtgcaattgcacttttgtatctccatttcaaaccttgttccttccttcaatggctctacaattgaaagtgaaacgtggtttaaagaataaaactctttcaaagttggaaattttctttactcacatgtcgcttttttattgggggtatgaaatgaagacagtgatttggtacatgtagacagcatgctcttttctcagttcattctgtctatggcaagtgtttagtggcagtggtgtaatggtggttttaagagttttc

SEQ ID NO: 57453 - protein, 134 aa, Glycine max
  peptide (1)..(134): Ceres Seq. ID no. 15168439
  misc_feature (2)..(91): Homolog of NCBI NO: 21360370 NR Description: extensin-like protein [Citrus junos]
  misc_feature (1)..(91): Homolog of NCBI NO: 4240033 NR Description: ZmGR1a [Zea mays]
  misc_feature (3)..(91): Homolog of NCBI NO: 10798752 NR Description: P-rich protein EIG-I30 [Nicotiana tabacum]
  misc_feature (1)..(91): Homolog of NCBI NO: 4454097 NR Description: hybrid proline-rich protein [Catharanthus roseus]
  misc_feature (1)..(91): Homolog of NCBI NO: 481236 NR Description: hypothetical protein - Madagascar periwinkle
  misc_feature (2)..(91): Homolog of NCBI NO: 112697 NR Description: 14 KD PROLINE-RICH PROTEIN DC2.15 PRECURSOR
  misc_feature (1)..(97): Homolog of NCBI NO: 13561927 NR Description: extensin-like protein [Brassica napus]
  misc_feature (1)..(97): Homolog of NCBI NO: 15221201 NR Description: protease inhibitor/seed storage/lipid transfer
  misc_feature (1)..(97): Homolog of NCBI NO: 18406723 NR Description: protease inhibitor/seed storage/lipid transfer
  misc_feature (12)..(97): Homolog of NCBI NO: 2129871 NR Description: proline-rich protein, 14K - kidney bean
MASKAALLLCLNVLFFTVVSSTYVPCNPPPKTPKHPPVPKPPSPKQASCPKDTIKFGVCADVLGLINVQLGKPPKTPCCNLIQGLGNLKIAENCTQMFLHCGGFRDHDIFDDAGAIALLYLHFKPCSFLQWLYN

SEQ ID NO: 57454 - DNA, 1308 bp, Glycine max
  misc_feature (1)..(1308): Ceres Seq. ID no. 14315515
acttctcatacaatacaagaggtcacatatacagaccttctctccctctctctctttctctctcaacattctaccttcttttcttttcctcttttcacaaccatttgtgagattcctccaatgttcttctctcttccattggattgtacagattcccagctacactacacacatcaatcccttcaattctagttgctgtgggattgtttgtttatgtgaaaaaattttaaggactgtaaaagacaaaacttttctgggtttattggtttctgctttatatttattttttcttctgcaaactatcattctgggtttgctcataaaacaaagcctttcaagataactgttgtatttttcagaaaaaaaatccatttttcttagcttatttgtcaaaagaataattttttttctttttcttcctcatttttctgcaaattttcttcatattcctttttattaatttgcggaaaagattgagacatgggcaagcaaggaccttgctatcactgtggagttacaagcacgccactctggcgcaatggaccacccgagaagccagtactatgcaatgcatgtgggtctcgatggagaacaaagggaactcttgcaaattatacccctttacatgctcgagcagaaactgatgattatgatgatcaaagggtttccaggataaagagcatatcgataaataagaagaaagaagtggcattgctcaaacgaaaacagaaccatgataatgtaatgtctggagggtttgcacctgattacaaccagggataccaaaaggttgtagatgaagatattagcaaccggtcgagttcaggatcagctatctctaactcagagagctgtgcacaatttggttatgatggcatggatgctagtgatctgacaggttgaattaagatctttcttcacaactgattacagcagcatttatcattttgaaacaagtattgattttattgcctgtccaggtttatattagcacaatccagaagaggataatggaacgaaggaaaatgaaaaagaaatatattagtttcgtagtcattggttttcctaaaagaaaaacaaatgaactttgttttaactatgtacggttgtgctcttcattgacaaaaagaattgaagaagtggttttaatattttaccaccatgaagctctaattatacttgccaacatttgtaatggcaagtccaataattagacatggtggattatttgttttttgtttagtgtgtaacaatatgtagtacttttccctcccaataatagaatgtcaagtcttgcatatatttttc

SEQ ID NO: 57455 - protein, 140 aa, Glycine max
  peptide (1)..(140): Ceres Seq. ID no. 14315516
  misc_feature (40)..(140): Homolog of NCBI NO: 7485111 NR Description: hypothetical protein - Arabidopsis thaliana
  misc_feature (13)..(127): Homolog of NCBI NO: 8978081 NR Description: gene_id:K14A3.9~pir||D71445~similar to unknown
  misc_feature (1)..(139): Homolog of NCBI NO: 38345953 NR Description: OSJNBb0038F03.10 [Oryza sativa (japonica
  misc_feature (1)..(127): Homolog of NCBI NO: 22327632 NR Description: GATA zinc finger protein [Arabidopsis thaliana]
  misc_feature (1)..(132): Homolog of NCBI NO: 30684095 NR Description: GATA zinc finger protein [Arabidopsis thaliana]
MGKQGPCYHCGVTSTPLWRNGPPEKPVLCNACGSRWRTKGTLANYTPLHARAETDDYDDQRVSRIKSISINKKKEVALLKRKQNHDNVMSGGFAPDYNQGYQKVVDEDISNRSSSGSAISNSESCAQFGYDGMDASDLTG

SEQ ID NO: 57456 - protein, 113 aa, Glycine max
  peptide (1)..(113): Ceres Seq. ID no. 14315517
LLIQYKRSHIQTFSPSLSFSLNILPSFLFLFSQPFVRFLQCSSLFHWIVQIPSYTTHINPFNSSCCGIVCLCEKILRTVKDKTFLGLLVSALYLFFLLQTIILGLLIKQSLSR

SEQ ID NO: 57457 - DNA, 1310 bp, Glycine max
  misc_feature (1)..(1310): Ceres Seq. ID no. 14314186
tcgtctttctcttcttcctaagatcccttctcacttctatagttctattctcttctctttctccacctcttcacctcttctctcccctgtcttcttcttaattagcctctctcattgcgtgcaccaccccaaaaaaaatatacatatacatatatacataaaaaaaacaaccccccccctctacgtggccacactcgctcacaacacaacacaccctcttaattaaatctctatataaaaccccttcagggtctctccactatgacgggcagggaaatttttcataagatgaaggaaaaagttttgggctcatctgatcctgattctggtaaaggaaagagcaagatgaagaagaacataactcatggctttcacttggtaaaggggagatcaggtcatgccatggaagactatcttgttgctcaattcaagcaagttgacgacaatgaattgggtttatttgcaatatttgatggccactcaggtcacagtgtacctgattacttgaagtctcatttgtttgataatatcttgaaagagcctaacttctggacagaacctgctgaggctgttaagagagcatatggtataactgattctactattttagacaaatcaggtgaattgggtagagggggttcaactgcggttactgcaatattgatcaactgtcaggagctgctagtggccaatattggggattcccgggctgtcttatgcaagaatggcgtggccaaacaactatcagtggatcatgaaccaagcatagaaagtgaagatataagaaacagaggtggttttgtgtcaaacttcccaggggatgttccacgtgtcgatggtcagttggcggtgtcaagggcatttggtgacaaaagcctgaagatacatttgagctcagaaccatatgtaactttggagatgatagaagatgatgcagagtttcttatactagccagtgatgggttatggaaggtaatgtcaaatcaagaagcagttagtgctatcaaagatgttaaggatgccaggtccgcagctaaggtgcttaccgaagaagcaaagatcaggaaaagttctgatgatatctcttgcgttgttgtgaaatttcagtgatcactgaactcacatagtagatttttatcttcgaacttgaaaatgtaacatatactttagtgtatatggattaatgttgattccctttaggtgttattatgttgtggcattctgtttgtgatattttatctgctttcgtacaaatcaactgtctgagaacgtgttgtttgatgtaacagtgtaaaaaaggatttagtttc

SEQ ID NO: 57458 - protein, 282 aa, Glycine max
  peptide (1)..(282): Ceres Seq. ID no. 14314187
  misc_feature (15)..(274): Pfam Name: Protein phosphatase 2C Pfam Description: Protein phosphatase 2C
  misc_feature (7)..(282): Homolog of NCBI NO: 18395099 NR Description: protein phosphatase 2C (PP2C), putative
  misc_feature (15)..(282): Homolog of NCBI NO: 32488822 NR Description: OSJNBa0085I10.2 [Oryza sativa (japonica
  misc_feature (29)..(281): Homolog of NCBI NO: 7488280 NR Description: protein phosphatase 2C homolog F20O9.80 -
  misc_feature (1)..(282): Homolog of NCBI NO: 25411985 NR Description: probable protein phosphatase 2C [imported] -
  misc_feature (1)..(282): Homolog of NCBI NO: 18399423 NR Description: protein phosphatase 2C (PP2C), putative
  misc_feature (1)..(281): Homolog of NCBI NO: 18417190 NR Description: protein phosphatase 2C (PP2C), putative
  misc_feature (1)..(281): Homolog of NCBI NO: 23307574 NR Description: putative protein phosphatase 2C homolog
  misc_feature (1)..(282): Homolog of NCBI NO: 21539551 NR Description: putative protein phosphatase type 2C [Arabidopsis
  misc_feature (1)..(282): Homolog of NCBI NO: 15232538 NR Description: protein phosphatase 2C (PP2C), putative
  misc_feature (1)..(282): Homolog of NCBI NO: 4336436 NR Description: protein phosphatase type 2C [Lotus japonicus]
MTGREIFHKMKEKVLGSSDPDSGKGKSKMKKNITHGFHLVKGRSGHAMEDYLVAQFKQVDDNELGLFAIFDGHSGHSVPDYLKSHLFDNILKEPNFWTEPAEAVKRAYGITDSTILDKSGELGRGGSTAVTAILINCQELLVANIGDSRAVLCKNGVAKQLSVDHEPSIESEDIRNRGGFVSNFPGDVPRVDGQLAVSRAFGDKSLKIHLSSEPYVTLEMIEDDAEFLILASDGLWKVMSNQEAVSAIKDVKDARSAAKVLTEEAKIRKSSDDISCVVVKFQ

SEQ ID NO: 57459 - protein, 273 aa, Glycine max
  peptide (1)..(273): Ceres Seq. ID no. 14314188
  misc_feature (6)..(265): Pfam Name: Protein phosphatase 2C Pfam Description: Protein phosphatase 2C
  misc_feature (1)..(273): Homolog of NCBI NO: 18395099 NR Description: protein phosphatase 2C (PP2C), putative
  misc_feature (6)..(273): Homolog of NCBI NO: 32488822 NR Description: OSJNBa0085I10.2 [Oryza sativa (japonica
  misc_feature (20)..(272): Homolog of NCBI NO: 7488280 NR Description: protein phosphatase 2C homolog F20O9.80 -
  misc_feature (1)..(273): Homolog of NCBI NO: 25411985 NR Description: probable protein phosphatase 2C [imported] -
  misc_feature (1)..(273): Homolog of NCBI NO: 18399423 NR Description: protein phosphatase 2C (PP2C), putative
  misc_feature (1)..(272): Homolog of NCBI NO: 18417190 NR Description: protein phosphatase 2C (PP2C), putative
  misc_feature (1)..(272): Homolog of NCBI NO: 23307574 NR Description: putative protein phosphatase 2C homolog
  misc_feature (1)..(273): Homolog of NCBI NO: 21539551 NR Description: putative protein phosphatase type 2C [Arabidopsis
  misc_feature (1)..(273): Homolog of NCBI NO: 15232538 NR Description: protein phosphatase 2C (PP2C), putative
  misc_feature (1)..(273): Homolog of NCBI NO: 4336436 NR Description: protein phosphatase type 2C [Lotus japonicus]
MKEKVLGSSDPDSGKGKSKMKKNITHGFHLVKGRSGHAMEDYLVAQFKQVDDNELGLFAIFDGHSGHSVPDYLKSHLFDNILKEPNFWTEPAEAVKRAYGITDSTILDKSGELGRGGSTAVTAILINCQELLVANIGDSRAVLCKNGVAKQLSVDHEPSIESEDIRNRGGFVSNFPGDVPRVDGQLAVSRAFGDKSLKIHLSSEPYVTLEMIEDDAEFLILASDGLWKVMSNQEAVSAIKDVKDARSAAKVLTEEAKIRKSSDDISCVVVKFQ

SEQ ID NO: 57460 - protein, 254 aa, Glycine max
  peptide (1)..(254): Ceres Seq. ID no. 14314189
  misc_feature (1)..(246): Pfam Name: Protein phosphatase 2C Pfam Description: Protein phosphatase 2C
  misc_feature (1)..(254): Homolog of NCBI NO: 18395099 NR Description: protein phosphatase 2C (PP2C), putative
  misc_feature (1)..(254): Homolog of NCBI NO: 32488822 NR Description: OSJNBa0085I10.2 [Oryza sativa (japonica
  misc_feature (1)..(253): Homolog of NCBI NO: 7488280 NR Description: protein phosphatase 2C homolog F20O9.80 -
  misc_feature (1)..(254): Homolog of NCBI NO: 25411985 NR Description: probable protein phosphatase 2C [imported] -
  misc_feature (1)..(254): Homolog of NCBI NO: 18399423 NR Description: protein phosphatase 2C (PP2C), putative
  misc_feature (1)..(253): Homolog of NCBI NO: 18417190 NR Description: protein phosphatase 2C (PP2C), putative
  misc_feature (1)..(253): Homolog of NCBI NO: 23307574 NR Description: putative protein phosphatase 2C homolog
  misc_feature (1)..(254): Homolog of NCBI NO: 21539551 NR Description: putative protein phosphatase type 2C [Arabidopsis
  misc_feature (1)..(254): Homolog of NCBI NO: 15232538 NR Description: protein phosphatase 2C (PP2C), putative
  misc_feature (1)..(254): Homolog of NCBI NO: 4336436 NR Description: protein phosphatase type 2C [Lotus japonicus]
MKKNITHGFHLVKGRSGHAMEDYLVAQFKQVDDNELGLFAIFDGHSGHSVPDYLKSHLFDNILKEPNFWTEPAEAVKRAYGITDSTILDKSGELGRGGSTAVTAILINCQELLVANIGDSRAVLCKNGVAKQLSVDHEPSIESEDIRNRGGFVSNFPGDVPRVDGQLAVSRAFGDKSLKIHLSSEPYVTLEMIEDDAEFLILASDGLWKVMSNQEAVSAIKDVKDARSAAKVLTEEAKIRKSSDDISCVVVKFQ

SEQ ID NO: 57461 - DNA, 1339 bp, Glycine max
  misc_feature (1)..(1339): Ceres Seq. ID no. 14314272
aattcttctttgtattctccatccaccctcattgcactttttagtttttaccctttttcggtgtcttctcatattcctcacacgcacaccctcttcgatctcaacgcctctttggcttatattctcaccgacccacattgccattctcaccattctttgcagatcacgcacccctttaggaagagaggaaggaaagtctagtttttggttcgtgggggttggtttgcgaaatggcctctttctcggtcccatgccccaagtgtcctacaacttcttcttctccccctttggggttgaaatctctaaatgtttcatttcaaagggtgttgagcttgaagccttctctttcattcggatctttgtctgctgaatctgctgcatcaaggattcagtgccttaacaggaagcaattttctgttctgaaggctactaaagttgaaaattccaattctgcccctgtaatggtcaatggacctaatgttgcttcatcgaaagaaaaagaagtgcataatggaaaactctctggtggtactatcccagatgatgcttcaattattgcattcatgtctcaagtttcagaccttgtaaaactcgtggattcgagagatattgtggaacttcaacttaagcaatcagactgtgagctcatgataagaaaaaaagaagcattgcagcctccaccagttatagccccaacatccccaccaatgcactatgccacagttccttctccgccaccaccaccagcagctgctcctgctagctctgcacctccaaaagcagttcctgccttgccttcccctgcaaaagcaggcacatcttctcacccaacgctgaaatgtccgatggcaggaaccttctacaggagtccagcacctggtgaacctgcatttgtcaaggtgggagataaagtgcagaaaggccaggttatttgcattatcgaggctatgaaactgatgaatgaaattgaggctgatcagtcaggaacaatagctgaggtattagctgaggatgggaaaccagtcagtgtggacacgcctctttttgtaatagttccatgagtaccagaagggaccttacttcgaacttgatgtgaaatctcccttgttggagcagcatggtattcgatgacttagactctgtgttcagaaatttgttgagtggtaatgtttgtctcattttaagaaatccttgtcgtctttagcccccacccctcctcttaatttattgagatattttggacataaaagccccagcatatcagaatgagaatatttgacatttcagttctataagcagttttgacatttttagtagtatttatgttctatttttgttt

SEQ ID NO: 57462 - protein, 276 aa, Glycine max
  peptide (1)..(276): Ceres Seq. ID no. 14314273
  misc_feature (200)..(274): Pfam Name: Biotin-requiring enzyme Pfam Description: Biotin-requiring enzyme
MASFSVPCPKCPTTSSSPPLGLKSLNVSFQRVLSLKPSLSFGSLSAESAASRIQCLNRKQFSVLKATKVENSNSAPVMVNGPNVASSKEKEVHNGKLSGGTIPDDASIIAFMSQVSDLVKLVDSRDIVELQLKQSDCELMIRKKEALQPPPVIAPTSPPMHYATVPSPPPPPAAAPASSAPPKAVPALPSPAKAGTSSHPTLKCPMAGTFYRSPAPGEPAFVKVGDKVQKGQVICIIEAMKLMNEIEADQSGTIAEVLAEDGKPVSVDTPLFVIVP

SEQ ID NO: 57463 - protein, 199 aa, Glycine max
  peptide (1)..(199): Ceres Seq. ID no. 14314274
  misc_feature (123)..(197): Pfam Name: Biotin-requiring enzyme Pfam Description: Biotin-requiring enzyme
MVNGPNVASSKEKEVHNGKLSGGTIPDDASIIAFMSQVSDLVKLVDSRDIVELQLKQSDCELMIRKKEALQPPPVIAPTSPPMHYATVPSPPPPPAAAPASSAPPKAVPALPSPAKAGTSSHPTLKCPMAGTFYRSPAPGEPAFVKVGDKVQKGQVICIIEAMKLMNEIEADQSGTIAEVLAEDGKPVSVDTPLFVIVP

SEQ ID NO: 57464 - protein, 165 aa, Glycine max
  peptide (1)..(165): Ceres Seq. ID no. 14314275
  misc_feature (89)..(163): Pfam Name: Biotin-requiring enzyme Pfam Description: Biotin-requiring enzyme
MSQVSDLVKLVDSRDIVELQLKQSDCELMIRKKEALQPPPVIAPTSPPMHYATVPSPPPPPAAAPASSAPPKAVPALPSPAKAGTSSHPTLKCPMAGTFYRSPAPGEPAFVKVGDKVQKGQVICIIEAMKLMNEIEADQSGTIAEVLAEDGKPVSVDTPLFVIVP

SEQ ID NO: 57465 - DNA, 989 bp, Glycine max
  misc_feature (1)..(989): Ceres Seq. ID no. 14316297
attattggtgttgaagatagaaaagaaagagaaagagcgatgccaggatcattgaggcctcggtttgttatctttggttcttccatcgttcaatttggtttttatgatgaaggttgggtggctattctttctcatttgtatgcccgcaaggttgatattgatttgcgaggatatgctggttggaattcaaggcgtgctgtgcaggttctggataaagtttttcccaaggatgcccctatacaaccttcattggttattgtctactttggtggtaatgattcttctgctcccctctcatctggcctaggtcctcatgtgcctctccaagaatacattgaaaatttgaggaagatcgttgaccatctcaagagcctctcagagaacactcgcattctacttctcagtactcctcccctcaatgatgcagcaattacgccaaacagtgatgggaagccaacaaagacaaatgaagcttgtcaaatatattcagaagcatgtttggatgtgtgccgcaagatgaatatcaaggccattgatttgtggtctgctattcagaaaagagataactggcaagatgtttgcttcattgatggaattcacctctcatctgagggaagcaagatagtgttgaaagagatactgaatgtcctcaaaggtgcagaatgggaacctagtctatattggaaatcaatgccaagtgagtttgatgaagattcaccatatgatccagttacaactgatggaaagtcaactattaatctttccagctgggtcttccctgacaatgacaaatgggactagactttatatgtgcattaacggcgagtcactgaatcgcatcgaacgaaaatgcctatttttatcttttttttttgtgttgcatgtttgggttcctttctttatcgtgtttatttctgtattacttgcaaaaaatgacgtctattactatgattaactttgaggttcacgagtcattttcaatcttctcc

SEQ ID NO: 57466 - protein, 266 aa, Glycine max
  peptide (1)..(266): Ceres Seq. ID no. 14316298
  misc_feature (23)..(213): Pfam Name: GDSL-like Lipase/Acylhydrolase Pfam Description: GDSL-like Lipase/Acylhydrolase
  misc_feature (18)..(244): Homolog of NCBI NO: 34903948 NR Description: OSJNBa0038J17.19 [Oryza sativa (japonica
  misc_feature (18)..(218): Homolog of NCBI NO: 38454102 NR Description: At5g45920 [Arabidopsis thaliana]
  misc_feature (18)..(218): Homolog of NCBI NO: 15242539 NR Description: GDSL-motif lipase/hydrolase protein [Arabidopsis
  misc_feature (18)..(242): Homolog of NCBI NO: 37535366 NR Description: putative esterase [Oryza sativa (japonica
  misc_feature (14)..(240): Homolog of NCBI NO: 18404664 NR Description: GDSL-motif lipase/hydrolase protein [Arabidopsis
  misc_feature (14)..(240): Homolog of NCBI NO: 16974631 NR Description: At2g38180/F16M14.11 [Arabidopsis thaliana]
  misc_feature (14)..(266): Homolog of NCBI NO: 13161403 NR Description: CPRD49 [Vigna unguiculata]
  misc_feature (14)..(266): Homolog of NCBI NO: 18399151 NR Description: GDSL-motif lipase/hydrolase protein [Arabidopsis
  misc_feature (14)..(266): Homolog of NCBI NO: 21554235 NR Description: CPRD49 [Arabidopsis thaliana]
  misc_feature (15)..(266): Homolog of NCBI NO: 32352168 NR Description: hypothetical protein [Oryza sativa (japonica
IIGVEDRKERERAMPGSLRPRFVIFGSSIVQFGFYDEGWVAILSHLYARKVDIDLRGYAGWNSRRAVQVLDKVFPKDAPIQPSLVIVYFGGNDSSAPLSSGLGPHVPLQEYIENLRKIVDHLKSLSENTRILLLSTPPLNDAAITPNSDGKPTKTNEACQIYSEACLDVCRKMNIKAIDLWSAIQKRDNWQDVCFIDGIHLSSEGSKIVLKEILNVLKGAEWEPSLYWKSMPSEFDEDSPYDPVTTDGKSTINLSSWVFPDNDKWD

SEQ ID NO: 57467 - protein, 253 aa, Glycine max
  peptide (1)..(253): Ceres Seq. ID no. 14316299
  misc_feature (10)..(200): Pfam Name: GDSL-like Lipase/Acylhydrolase Pfam Description: GDSL-like Lipase/Acylhydrolase
  misc_feature (5)..(231): Homolog of NCBI NO: 34903948 NR Description: OSJNBa0038J17.19 [Oryza sativa (japonica
  misc_feature (5)..(205): Homolog of NCBI NO: 38454102 NR Description: At5g45920 [Arabidopsis thaliana]
  misc_feature (5)..(205): Homolog of NCBI NO: 15242539 NR Description: GDSL-motif lipase/hydrolase protein [Arabidopsis
  misc_feature (5)..(229): Homolog of NCBI NO: 37535366 NR Description: putative esterase [Oryza sativa (japonica
  misc_feature (1)..(227): Homolog of NCBI NO: 18404664 NR Description: GDSL-motif lipase/hydrolase protein [Arabidopsis
  misc_feature (1)..(227): Homolog of NCBI NO: 16974631 NR Description: At2g38180/F16M14.11 [Arabidopsis thaliana]
  misc_feature (1)..(253): Homolog of NCBI NO: 13161403 NR Description: CPRD49 [Vigna unguiculata]
  misc_feature (1)..(253): Homolog of NCBI NO: 18399151 NR Description: GDSL-motif lipase/hydrolase protein [Arabidopsis
  misc_feature (1)..(253): Homolog of NCBI NO: 21554235 NR Description: CPRD49 [Arabidopsis thaliana]
  misc_feature (2)..(253): Homolog of NCBI NO: 32352168 NR Description: hypothetical protein [Oryza sativa (japonica
MPGSLRPRFVIFGSSIVQFGFYDEGWVAILSHLYARKVDIDLRGYAGWNSRRAVQVLDKVFPKDAPIQPSLVIVYFGGNDSSAPLSSGLGPHVPLQEYIENLRKIVDHLKSLSENTRILLLSTPPLNDAAITPNSDGKPTKTNEACQIYSEACLDVCRKMNIKAIDLWSAIQKRDNWQDVCFIDGIHLSSEGSKIVLKEILNVLKGAEWEPSLYWKSMPSEFDEDSPYDPVTTDGKSTINLSSWVFPDNDKWD

SEQ ID NO: 57468 - DNA, 1004 bp, Glycine max
  misc_feature (1)..(1004): Ceres Seq. ID no. 14315395
acaatggattggaaactttgagctcaatcgtacggttaggaaaatttgcagtttcttagcatagattggaggaagaagattgttggcaactgttcccagggagaacaaccttcatcttcttctgaaggtgctcggtgaaagggtgtttgaccaagagaagaaatccagttccagagattttttattcaaggatgggtgaaaggaaggacactattgctaccttgtgtacttggtggatgtagctcggcattgtggaaatttacaaaaggaggatggcacttatccttgcagcaaatatgtgctccattacaaattccaaaacggttgaagtgataaaaagaatcgatattgaagataaaatgcaatccagatctaatattgcactgcctccttcggaagcttcatcaagtcgcaggcatctcttaatcggtgttggtccttcattgcttaccttgacgtgtggtttatcaccaccaacggtatgggccgaagagaagtctggcgacaaagaggaagaagataaaggggttattggggccatcaaatcactatttgatcctaatgagaaaacaaagtctggaaaggtgttgccaaaggcttacttaaggtcagcaagggaagtagtgaaaacactgcgtgaatctttaaacgaaggcaccgatgataatgccaaatttagacggactgcggactcagcaaaggagtcaattcgggagtatttgggcagttggaggggaaatcagattgttgctcaagaagaatcatatgttattttggaaaaagtaatcagatctttggcaaactattactcaaaagcagggccatcagctccactgtcacatgaagtaaagtctgaaatattagattatctaaatacagctgaagaatttttgtagaacatcctccaatgtgttatagaaacaacaccatttctaactccctggatgtcgtcaatggctgtgataaaagtaaatttattcttcaatcaatttaaattttgtagc

SEQ ID NO: 57469 - protein, 207 aa, Glycine max
  peptide (1)..(207): Ceres Seq. ID no. 14315396
  misc_feature (5)..(207): Homolog of NCBI NO: 14626275 NR Description: unknown protein [Oryza sativa (japonica
  misc_feature (26)..(207): Homolog of NCBI NO: 26451618 NR Description: unknown protein [Arabidopsis thaliana]
  misc_feature (26)..(207): Homolog of NCBI NO: 18390518 NR Description: expressed protein [Arabidopsis thaliana]
MALILAANMCSITNSKTVEVIKRIDIEDKMQSRSNIALPPSEASSSRRHLLIGVGPSLLTLTCGLSPPTVWAEEKSGDKEEEDKGVIGAIKSLFDPNEKTKSGKVLPKAYLRSAREVVKTLRESLNEGTDDNAKFRRTADSAKESIREYLGSWRGNQIVAQEESYVILEKVIRSLANYYSKAGPSAPLSHEVKSEILDYLNTAEEFL

SEQ ID NO: 57470 - protein, 199 aa, Glycine max
  peptide (1)..(199): Ceres Seq. ID no. 14315397
  misc_feature (1)..(199): Homolog of NCBI NO: 14626275 NR Description: unknown protein [Oryza sativa (japonica
  misc_feature (18)..(199): Homolog of NCBI NO: 26451618 NR Description: unknown protein [Arabidopsis thaliana]
  misc_feature (18)..(199): Homolog of NCBI NO: 18390518 NR Description: expressed protein [Arabidopsis thaliana]
MCSITNSKTVEVIKRIDIEDKMQSRSNIALPPSEASSSRRHLLIGVGPSLLTLTCGLSPPTVWAEEKSGDKEEEDKGVIGAIKSLFDPNEKTKSGKVLPKAYLRSAREVVKTLRESLNEGTDDNAKFRRTADSAKESIREYLGSWRGNQIVAQEESYVILEKVIRSLANYYSKAGPSAPLSHEVKSEILDYLNTAEEFL

SEQ ID NO: 57471 - protein, 178 aa, Glycine max
  peptide (1)..(178): Ceres Seq. ID no. 14315398
  misc_feature (1)..(178): Homolog of NCBI NO: 14626275 NR Description: unknown protein [Oryza sativa (japonica
  misc_feature (1)..(178): Homolog of NCBI NO: 26451618 NR Description: unknown protein [Arabidopsis thaliana]
  misc_feature (1)..(178): Homolog of NCBI NO: 18390518 NR Description: expressed protein [Arabidopsis thaliana]
MQSRSNIALPPSEASSSRRHLLIGVGPSLLTLTCGLSPPTVWAEEKSGDKEEEDKGVIGAIKSLFDPNEKTKSGKVLPKAYLRSAREVVKTLRESLNEGTDDNAKFRRTADSAKESIREYLGSWRGNQIVAQEESYVILEKVIRSLANYYSKAGPSAPLSHEVKSEILDYLNTAEEFL

SEQ ID NO: 57472 - DNA, 1320 bp, Glycine max
  misc_feature (1)..(1320): Ceres Seq. ID no. 14314198
attcacaactccaatccctcttcgctttagcaaattccaattcccaatccaaaaccctaatttcgttcaaagaaccaattgtgatggcaccaaaggcagagaagaagccagcggagaagaagcccgcggaggagaagaagtcgacggtgggagacaaggctccggcggagaagaagccgaaggccggaaagaagcttcctaaggagggaggagccggcggagaaggggggaagaagaagaagaggaacaagaagagcgtggagacatacaagatatacatattcaaggtgctgaagcaggtccaccctgacattggtatctcaagcaaggccatgggaatcatgaacagcttcatcaacgacatcttcgagaagcttgctcaggaatcttccagacttgcccgctacaacaagaagcccaccatcacttcaagggaaatccagaccgcgcaaccctcccactcatccttcctacgaggagatgattaaagacgcaattacctcgctgaaggagaaaaccggttcgagccaacacgcgattgcgaagttcatcgaggagaagcacaagcagcttccaccgaacttcaggaagcttcttctctaccatttgaagaaacttgtagccgctggaaaactcgtcaaagtcaaaggctccttcaagctcccacctacccgaccttctgcatcttcttcttcttcgccggcgaagaagaagaagcccgcacctgctaagccccaacccaagcccaagcctaagcctaagcccaagcccgctgctaaagccaaggacactaaggcaactaagtcaaaggcaccagctaatcccaaggcagctgctaagcctaaagccaaagctccagccaagcccaagcccgcccctaaaccaaaggctgctgctgctgctgcttccaagcccaagcctgctgccgccaagcccaaagggactaagccagctgccaagcccaagcccaagcccgctgctaaaacaaaggctgctgctgccaagcccgcggcaaagcccaaagcgaagcccgccaaggcttcaaggacgtcgacacggacttcaccagggaagaaagcagctcctgctgcgaagccggcagcgaagaaagtagcgcctgctaagaaagcgccagtgaagagtgtgaaaccaaagagtgtaaagtctccagcgaaaaaggctacggctaagagagggggtaggaagtgagaatgtggtgggtagagtggttttagggttagttttgtgaagttctttgtcctcttggtggtgtagttggggttacagatgatcctataatatatgaaatctgattttatc

SEQ ID NO: 57473 - protein, 242 aa, Glycine max
  peptide (1)..(242): Ceres Seq. ID no. 14314199
  misc_feature (1)..(62): Pfam Name: linker histone H1 and H5 family Pfam Description: linker histone H1 and H5 family
  misc_feature (1)..(239): Homolog of NCBI NO: 4996567 NR Description: ribosome-sedimenting protein [Pisum sativum]
  misc_feature (1)..(239): Homolog of NCBI NO: 4106696 NR Description: ribosome-sedimenting protein [Pisum sativum]
  misc_feature (1)..(239): Homolog of NCBI NO: 13540399 NR Description: histone H1 [Lathyrus sativus]
  misc_feature (1)..(239): Homolog of NCBI NO: 13540397 NR Description: histone H1 [Lathyrus sativus]
  misc_feature (1)..(239): Homolog of NCBI NO: 21465095 NR Description: histone H1 [Pisum sativum subsp. abyssinicum]
  misc_feature (1)..(239): Homolog of NCBI NO: 21465093 NR Description: histone H1 [Lathyrus aphaca]
  misc_feature (1)..(239): Homolog of NCBI NO: 30420974 NR Description: histone H1 [Lens nigricans]
  misc_feature (1)..(239): Homolog of NCBI NO: 13540395 NR Description: histone H1 [Pisum sativum]
  misc_feature (1)..(239): Homolog of NCBI NO: 13540403 NR Description: histone H1 [Lens culinaris]
  misc_feature (1)..(239): Homolog of NCBI NO: 13540405 NR Description: histone H1 [Lens culinaris]
MIKDAITSLKEKTGSSQHAIAKFIEEKHKQLPPNFRKLLLYHLKKLVAAGKLVKVKGSFKLPPTRPSASSSSSPAKKKKPAPAKPQPKPKPKPKPKPAAKAKDTKATKSKAPANPKAAAKPKAKAPAKPKPAPKPKAAAAAASKPKPAAAKPKGTKPAAKPKPKPAAKTKAAAAKPAAKPKAKPAKASRTSTRTSPGKKAAPAAKPAAKKVAPAKKAPVKSVKPKSVKSPAKKATAKRGGRK

SEQ ID NO: 57474 - protein, 161 aa, Glycine max
  peptide (1)..(161): Ceres Seq. ID no. 14314200
  misc_feature (32)..(149): Pfam Name: Core histone H2A/H2B/H3/H4 Pfam Description: Core histone H2A/H2B/H3/H4
  misc_feature (8)..(90): Homolog of NCBI NO: 29789026 NR Description: neurofilament, heavy polypeptide [Rattus
  misc_feature (8)..(90): Homolog of NCBI NO: 462702 NR Description: NEUROFILAMENT TRIPLET H PROTEIN (200 KDA
  misc_feature (8)..(90): Homolog of NCBI NO: 205686 NR Description: heavy neurofilament subunit
  misc_feature (12)..(74): Homolog of NCBI NO: 29789026 NR Description: neurofilament, heavy polypeptide [Rattus
  misc_feature (8)..(87): Homolog of NCBI NO: 205686 NR Description: heavy neurofilament subunit
  misc_feature (8)..(68): Homolog of NCBI NO: 29789026 NR Description: neurofilament, heavy polypeptide [Rattus
  misc_feature (8)..(87): Homolog of NCBI NO: 462702 NR Description: NEUROFILAMENT TRIPLET H PROTEIN (200 KDA
  misc_feature (17)..(149): Homolog of NCBI NO: 15223150 NR Description: histone H2B family [Arabidopsis thaliana]
  misc_feature (53)..(149): Homolog of NCBI NO: 15030224 NR Description: Similar to H2B histone family, member D [Homo
  misc_feature (28)..(149): Homolog of NCBI NO: 7387726 NR Description: Histone H2B
SQLQSLFALANSNSQSKTLISFKEPIVMAPKAEKKPAEKKPAEEKKSTVGDKAPAEKKPKAGKKLPKEGGAGGEGGKKKKRNKKSVETYKIYIFKVLKQVHPDIGISSKAMGIMNSFINDIFEKLAQESSRLARYNKKPTITSREIQTAQPSHSSFLRGDD

SEQ ID NO: 57475 - protein, 134 aa, Glycine max
  peptide (1)..(134): Ceres Seq. ID no. 14314201
  misc_feature (5)..(122): Pfam Name: Core histone H2A/H2B/H3/H4 Pfam Description: Core histone H2A/H2B/H3/H4
  misc_feature (1)..(63): Homolog of NCBI NO: 29789026 NR Description: neurofilament, heavy polypeptide [Rattus
  misc_feature (1)..(63): Homolog of NCBI NO: 462702 NR Description: NEUROFILAMENT TRIPLET H PROTEIN (200 KDA
  misc_feature (1)..(63): Homolog of NCBI NO: 205686 NR Description: heavy neurofilament subunit
  misc_feature (1)..(47): Homolog of NCBI NO: 29789026 NR Description: neurofilament, heavy polypeptide [Rattus
  misc_feature (1)..(60): Homolog of NCBI NO: 205686 NR Description: heavy neurofilament subunit
  misc_feature (1)..(41): Homolog of NCBI NO: 29789026 NR Description: neurofilament, heavy polypeptide [Rattus
  misc_feature (1)..(60): Homolog of NCBI NO: 462702 NR Description: NEUROFILAMENT TRIPLET H PROTEIN (200 KDA
  misc_feature (1)..(122): Homolog of NCBI NO: 15223150 NR Description: histone H2B family [Arabidopsis thaliana]
  misc_feature (26)..(122): Homolog of NCBI NO: 15030224 NR Description: Similar to H2B histone family, member D [Homo
  misc_feature (1)..(122): Homolog of NCBI NO: 7387726 NR Description: Histone H2B
MAPKAEKKPAEKKPAEEKKSTVGDKAPAEKKPKAGKKLPKEGGAGGEGGKKKKRNKKSVETYKIYIFKVLKQVHPDIGISSKAMGIMNSFINDIFEKLAQESSRLARYNKKPTITSREIQTAQPSHSSFLRGDD

SEQ ID NO: 57476 - DNA, 1228 bp, Glycine max
  misc_feature (1)..(1228): Ceres Seq. ID no. 15171175
atgtgggagtaacagcagaagcaaaacaaaacatcatagacagacacaacattatctttcaactgttgctctgcctctgcacagagaatggtgtgggaggggaaacagacatgatctatctgtgttcacagcaccactgtttccctgcctcacacccttatctagaagaacaagaatcagcacatacacccgccacaacgccatagtcatcatcacttagaagaacttcacaatttttattttggttgtgtcgagtgtttttagctgacacaacctgaaagcttttgtctttattccgaaatttgtggcaatctttgcggtttagcttctggggtgttggggtggaagtaaagtttgtcactttgagatctaggtggggctgatatgcagaaacaacggcaatgagcaaattggcttggatatggcgagtcttgctcttgaaaccgaggatgtaatctcagatatatacctttcactgggacttaaggaatcagacaaaggagtaggagttcctcgagttttatctcttctctcttcacttcttgagagatcagttcagagaaacgaaacgctattggaggcaaagcacgtaaaagatgtagttacagtatttcacggtttaagagctcctactctgagcgttcgaaagtacattgatcgtatcttcaagtactcaggttgcagcccatcatgctttgtcgtggcacacatatatgtggacagattcattcaacacacagaaatcaaattgacttcacttaatgtgcaccggcttctgataacaagcatcatgctagcagcaaagtttatagatgacgcattctacaacaatgcttactatgcaaaagttggaggagtgagcacgtctgaattaaacaggttggagatgagctttctatttggcatagattttaggcttcagtttagtgtagacacgtttggaagatattgtaggcaattggagaaagaagctgcagaagtagtccaaattgaaaggccaatgcaggcttgtcgaattaaagaaagttggtcaaacaaagatgatcctacctgtgcttccacaattgcaagataaaaatgtggcaacaccattgtagcaatatattgctgtcccacaattaaccgagacaaaatgaatttgaagtatttcaaagtaaaaaaaaaaaaagagagagagagagaatagattgttctatacttgccactggaaattcaaccattttttacg

SEQ ID NO: 57477 - protein, 217 aa, Glycine max
  peptide (1)..(217): Ceres Seq. ID no. 15171176
  misc_feature (35)..(166): Pfam Name: Cyclin, N-terminal domain Pfam Description: Cyclin, N-terminal domain
  misc_feature (59)..(183): Homolog of NCBI NO: 6729043 NR Description: hypothetical protein [Arabidopsis thaliana]
  misc_feature (1)..(209): Homolog of NCBI NO: 15225402 NR Description: cyclin family [Arabidopsis thaliana]
  misc_feature (30)..(191): Homolog of NCBI NO: 15240306 NR Description: cyclin family [Arabidopsis thaliana]
  misc_feature (30)..(183): Homolog of NCBI NO: 15240794 NR Description: cyclin family [Arabidopsis thaliana]
  misc_feature (21)..(211): Homolog of NCBI NO: 37536902 NR Description: hypothetical protein [Oryza sativa (japonica
  misc_feature (23)..(183): Homolog of NCBI NO: 15233185 NR Description: cyclin family [Arabidopsis thaliana]
  misc_feature (32)..(183): Homolog of NCBI NO: 15224950 NR Description: cyclin family [Arabidopsis thaliana]
  misc_feature (31)..(183): Homolog of NCBI NO: 25493992 NR Description: PREG-like protein [imported] - Picea mariana
  misc_feature (1)..(217): Homolog of NCBI NO: 15229382 NR Description: cyclin family [Arabidopsis thaliana]
  misc_feature (1)..(217): Homolog of NCBI NO: 21593009 NR Description: unknown [Arabidopsis thaliana]
MASLALETEDVISDIYLSLGLKESDKGVGVPRVLSLLSSLLERSVQRNETLLEAKHVKDVVTVFHGLRAPTLSVRKYIDRIFKYSGCSPSCFVVAHIYVDRFIQHTEIKLTSLNVHRLLITSIMLAAKFIDDAFYNNAYYAKVGGVSTSELNRLEMSFLFGIDFRLQFSVDTFGRYCRQLEKEAAEVVQIERPMQACRIKESWSNKDDPTCASTIAR

SEQ ID NO: 57478 - DNA, 1225 bp, Glycine max
  misc_feature (1)..(1225): Ceres Seq. ID no. 15172528
ttcatctttgattgagataaggtaaggttctttacctgcttccactttctactttttcatcactttcattttcgttctctcttttgctatctaattttctgttcaagattcctaacttcccttctttaaaggaacgaactttgcattcaatttgttatgggtcgattcaatttctgttcgttgttactacgttgttttcatcataaaaatcgtgctcaatcatattaaagctgtctttttttaattttttttcaaatttaggaataaaacaattcatgtgaagtagtaattaatatgtttgatgtcgtcaggagttagttacaagtacaatggagttaagatcattgattttgcaaccaaacttgacacacttgtttccaacattcacatgctgtgtcaaactcaaaccttctttccagcatttacagaataatagtaataataaggaattatcactaaaaatccgtagtagaagggtaggggttttggctgccataacttccttgattttgggtggaaatggaatttttaggactcaaagtgcaaatgcatttgagtttaaatttgtggcccctgatatgacagttgaagaggcattgagtggagtgaggggtcatgcacaagatttgttacatgttagagatttgttagagttagagtcatggagagcagcacaaaagacattgagacagagctcagcaattctgaagaaggatatttatatcataatccaaagcaagcctggaattgagagggcacaattaaggaagctctattctactctcttcaacaatgtaactagactagattatgcagcaagggataaagatggaccccaagtctggcagtgttacaagaacattgttgtggctgtcaacgacattctatccagaatataatgatcccttgtcttttgataatgggagattgaactgttcttgataagtttatgcgaacagctgactaacttgcttgttgcaagaagtggagttgtgaaggatatgcactcaaaagtaggctgcacaaaggaaaaaccctgttatataaaattatagactaagagtttgatcattaagagttagataatattgaaggtttaatcatatttgacagaaaaatgatgcccagattctgtgtcatcattgatcaggagcttaaaaagagaacgattgtaagcatatcaattttgataaagagaaatctaagcttaattttttatctgctc

SEQ ID NO: 57479 - protein, 189 aa, Glycine max
  peptide (1)..(189): Ceres Seq. ID no. 15172529
  misc_feature (72)..(189): Pfam Name: Oxygen evolving enhancer protein 3 (PsbQ) Pfam Description: Oxygen evolving enhancer protein 3 (PsbQ)
  misc_feature (79)..(189): Homolog of NCBI NO: 31096349 NR Description: oxygen-evolving enhancer protein 3 precursor
  misc_feature (78)..(189): Homolog of NCBI NO: 131397 NR Description: Oxygen-evolving enhancer protein 3, chloroplast (OEE3) (16 kDa subunit of oxygen evolving system of photosystem
  misc_feature (78)..(189): Homolog of NCBI NO: 34810268 NR Description: Chain A, Crystal Structure Of Psbq Polypeptide Of
  misc_feature (62)..(189): Homolog of NCBI NO: 11134057 NR Description: Oxygen-evolving enhancer protein 3-1, chloroplast (OEE3) (16 kDa subunit of oxygen evolving system of photosystem
  misc_feature (78)..(185): Homolog of NCBI NO: 8131595 NR Description: oxygen evolving enhancer protein 3 [Bruguiera
  misc_feature (78)..(189): Homolog of NCBI NO: 11134066 NR Description: Oxygen-evolving enhancer protein 3-2, chloroplast (OEE3) (16 kDa subunit of oxygen evolving system of photosystem (OEC 16 kDa subunit) (Ferredoxin-NADP reductase binding protein)
  misc_feature (74)..(189): Homolog of NCBI NO: 15234637 NR Description: oxygen-evolving complex protein 16, chloroplast
  misc_feature (72)..(189): Homolog of NCBI NO: 15233587 NR Description: oxygen-evolving complex protein 16, chloroplast
  misc_feature (69)..(189): Homolog of NCBI NO: 32489844 NR Description: OSJNBb0065J09.4 [Oryza sativa (japonica
MELRSLILQPNLTHLFPTFTCCVKLKPSFQHLQNNSNNKELSLKIRSRRVGVLAAITSLILGGNGIFRTQSANAFEFKFVAPDMTVEEALSGVRGHAQDLLHVRDLLELESWRAAQKTLRQSSAILKKDIYIIIQSKPGIERAQLRKLYSTLFNNVTRLDYAARDKDGPQVWQCYKNIVVAVNDILSRI

SEQ ID NO: 57480 - protein, 106 aa, Glycine max
  peptide (1)..(106): Ceres Seq. ID no. 15172530
  misc_feature (1)..(106): Pfam Name: Oxygen evolving enhancer protein 3 (PsbQ) Pfam Description: Oxygen evolving enhancer protein 3 (PsbQ)
  misc_feature (1)..(106): Homolog of NCBI NO: 31096349 NR Description: oxygen-evolving enhancer protein 3 precursor
  misc_feature (1)..(106): Homolog of NCBI NO: 131397 NR Description: Oxygen-evolving enhancer protein 3, chloroplast (OEE3) (16 kDa subunit of oxygen evolving system of photosystem
  misc_feature (1)..(106): Homolog of NCBI NO: 34810268 NR Description: Chain A, Crystal Structure Of Psbq Polypeptide Of
  misc_feature (1)..(106): Homolog of NCBI NO: 11134057 NR Description: Oxygen-evolving enhancer protein 3-1, chloroplast (OEE3) (16 kDa subunit of oxygen evolving system of photosystem
  misc_feature (1)..(102): Homolog of NCBI NO: 8131595 NR Description: oxygen evolving enhancer protein 3 [Bruguiera
  misc_feature (1)..(106): Homolog of NCBI NO: 11134066 NR Description: Oxygen-evolving enhancer protein 3-2, chloroplast (OEE3) (16 kDa subunit of oxygen evolving system of photosystem (OEC 16 kDa subunit) (Ferredoxin-NADP reductase binding protein)
  misc_feature (1)..(106): Homolog of NCBI NO: 15234637 NR Description: oxygen-evolving complex protein 16, chloroplast
  misc_feature (1)..(106): Homolog of NCBI NO: 15233587 NR Description: oxygen-evolving complex protein 16, chloroplast
  misc_feature (1)..(106): Homolog of NCBI NO: 32489844 NR Description: OSJNBb0065J09.4 [Oryza sativa (japonica
MTVEEALSGVRGHAQDLLHVRDLLELESWRAAQKTLRQSSAILKKDIYIIIQSKPGIERAQLRKLYSTLFNNVTRLDYAARDKDGPQVWQCYKNIVVAVNDILSRI

SEQ ID NO: 57481 - DNA, 1571 bp, Glycine max
  misc_feature (1)..(1571): Ceres Seq. ID no. 15178157
atcatatttaatgccttaagtatctctctatctctctcacacacactcatcattttctagcaaactctctagcctcttcaaatgggctaggaaggttgaatacaaagaaaacaaaccctagcttaattaattaacttgcttgtgttgttaattaatttgttcaacatggaaggaggagtgcctgaagctgatatctctgcctttagagaatgtttgtctctatcatggaaaaatccttatgttcttcgccttgctttctccgctggaattggaggctttctctttggctatgacacaggagtcatatctggagcacttttgtacatcagagatgatttcaaagaggtggatagaaagacgtggctgcaggaagctatagtgagtatggcacttgctggagcaatcataggagcttcagttggtggatggatcaacgatcgatttgggagaaagaaagcaatccttttggcagataccctcttttttatagggtctattgtgatggctgctgctataaacccagctattctgattgttggtcgagttttcgttggccttggggttggaatggcctcaatggcctcacctttgtacatctcagaagcatcaccaacaagagttcgaggtgcccttgttagtctcaatggattcctcatcactggaggacagttcctttcctatgtcatcaacttggccttcacaagcgcaccaggaacatggaggtggatgttaggagtagcagcagtaccagcattgacacaaatcatattgatggttttgctcccagaatcacctcgttggttgttcagaaagggtaaacaagaagaagccaaagaaattttgaggaggatttaccctccccaggatgttgaagatgaaatcaatgctttgaaggaatcaattgaaacggaactcaatgaagaagcttcagcttcaaacaaagtcagcataatgaagctgctgaaaaccaaaactgtgagaagaggtttatatgctggaatgggccttcaaatcttccaacaatttgtggggattaacactgttatgtactacagccccacaattgtgcaattagctggttttgcatcaaatagggttgcactacttctatcacttgtcactgcagggcttaatgcatttggttccattttaagcatatatttcattgacaagactgggaggaggaagcttttgttgtttagtttgtgtggtgttgtggtctcacttgttgttttgaccgtggcttttcatgagactaccactcactcccctatggtcagcacaatcgaaacctctcacttcaacaacacatgccctgattacagcactgctttcaaccctggtgaatgggattgcatgaaatgcctcaaggcctctccagaatgtggcttttgtgcctctagagctaataaggtaaatgtttcataatctcctttagattaagtacatcataaggttttctgattcaaacttggatcctctcgtgtaagatatgaccaagttggagataaaaaagacacaaatgtgacataattagtattattttagtaaaaatgcgtctttctatcttg

SEQ ID NO: 57482 - protein, 420 aa, Glycine max
  peptide (1)..(420): Ceres Seq. ID no. 15178158
  misc_feature (29)..(416): Pfam Name: Sugar (and other) transporter Pfam Description: Sugar (and other) transporter
  misc_feature (23)..(418): Homolog of NCBI NO: 25308955 NR Description: probable membrane transporter [imported] -
  misc_feature (23)..(418): Homolog of NCBI NO: 30689342 NR Description: sugar transporter family [Arabidopsis thaliana]
  misc_feature (21)..(361): Homolog of NCBI NO: 38347452 NR Description: OSJNBa0076N16.21 [Oryza sativa (japonica
  misc_feature (15)..(416): Homolog of NCBI NO: 15227479 NR Description: sugar transporter family [Arabidopsis thaliana]
  misc_feature (1)..(416): Homolog of NCBI NO: 9652184 NR Description: putative Na+/myo-inositol symporter
  misc_feature (1)..(412): Homolog of NCBI NO: 15235767 NR Description: sugar transporter family [Arabidopsis thaliana]
  misc_feature (1)..(417): Homolog of NCBI NO: 32488451 NR Description: OSJNBa0004N05.8 [Oryza sativa (japonica
  misc_feature (1)..(417): Homolog of NCBI NO: 9652186 NR Description: putative Na+/myo-inositol symporter
  misc_feature (1)..(412): Homolog of NCBI NO: 33146705 NR Description: putative proton myo-inositol transporter
  misc_feature (1)..(416): Homolog of NCBI NO: 15220697 NR Description: sugar transporter family [Arabidopsis thaliana]
MEGGVPEADISAFRECLSLSWKNPYVLRLAFSAGIGGFLFGYDTGVISGALLYIRDDFKEVDRKTWLQEAIVSMALAGAIIGASVGGWINDRFGRKKAILLADTLFFIGSIVMAAAINPAILIVGRVFVGLGVGMASMASPLYISEASPTRVRGALVSLNGFLITGGQFLSYVINLAFTSAPGTWRWMLGVAAVPALTQIILMVLLPESPRWLFRKGKQEEAKEILRRIYPPQDVEDEINALKESIETELNEEASASNKVSIMKLLKTKTVRRGLYAGMGLQIFQQFVGINTVMYYSPTIVQLAGFASNRVALLLSLVTAGLNAFGSILSIYFIDKTGRRKLLLFSLCGVVVSLVVLTVAFHETTTHSPMVSTIETSHFNNTCPDYSTAFNPGEWDCMKCLKASPECGFCASRANKVNVS

SEQ ID NO: 57483 - protein, 347 aa, Glycine max
  peptide (1)..(347): Ceres Seq. ID no. 15178159
  misc_feature (1)..(343): Pfam Name: Sugar (and other) transporter Pfam Description: Sugar (and other) transporter
  misc_feature (1)..(345): Homolog of NCBI NO: 25308955 NR Description: probable membrane transporter [imported] -
  misc_feature (1)..(345): Homolog of NCBI NO: 30689342 NR Description: sugar transporter family [Arabidopsis thaliana]
  misc_feature (1)..(288): Homolog of NCBI NO: 38347452 NR Description: OSJNBa0076N16.21 [Oryza sativa (japonica
  misc_feature (1)..(343): Homolog of NCBI NO: 15227479 NR Description: sugar transporter family [Arabidopsis thaliana]
  misc_feature (1)..(343): Homolog of NCBI NO: 9652184 NR Description: putative Na+/myo-inositol symporter
  misc_feature (1)..(339): Homolog of NCBI NO: 15235767 NR Description: sugar transporter family [Arabidopsis thaliana]
  misc_feature (1)..(344): Homolog of NCBI NO: 32488451 NR Description: OSJNBa0004N05.8 [Oryza sativa (japonica
  misc_feature (1)..(344): Homolog of NCBI NO: 9652186 NR Description: putative Na+/myo-inositol symporter
  misc_feature (1)..(339): Homolog of NCBI NO: 33146705 NR Description: putative proton myo-inositol transporter
  misc_feature (1)..(343): Homolog of NCBI NO: 15220697 NR Description: sugar transporter family [Arabidopsis thaliana]
MALAGAIIGASVGGWINDRFGRKKAILLADTLFFIGSIVMAAAINPAILIVGRVFVGLGVGMASMASPLYISEASPTRVRGALVSLNGFLITGGQFLSYVINLAFTSAPGTWRWMLGVAAVPALTQIILMVLLPESPRWLFRKGKQEEAKEILRRIYPPQDVEDEINALKESIETELNEEASASNKVSIMKLLKTKTVRRGLYAGMGLQIFQQFVGINTVMYYSPTIVQLAGFASNRVALLLSLVTAGLNAFGSILSIYFIDKTGRRKLLLFSLCGVVVSLVVLTVAFHETTTHSPMVSTIETSHFNNTCPDYSTAFNPGEWDCMKCLKASPECGFCASRANKVNVS

SEQ ID NO: 57484 - protein, 308 aa, Glycine max
  peptide (1)..(308): Ceres Seq. ID no. 15178160
  misc_feature (1)..(304): Pfam Name: Sugar (and other) transporter Pfam Description: Sugar (and other) transporter
  misc_feature (1)..(306): Homolog of NCBI NO: 25308955 NR Description: probable membrane transporter [imported] -
  misc_feature (1)..(306): Homolog of NCBI NO: 30689342 NR Description: sugar transporter family [Arabidopsis thaliana]
  misc_feature (1)..(249): Homolog of NCBI NO: 38347452 NR Description: OSJNBa0076N16.21 [Oryza sativa (japonica
  misc_feature (1)..(304): Homolog of NCBI NO: 15227479 NR Description: sugar transporter family [Arabidopsis thaliana]
  misc_feature (1)..(304): Homolog of NCBI NO: 9652184 NR Description: putative Na+/myo-inositol symporter
  misc_feature (1)..(300): Homolog of NCBI NO: 15235767 NR Description: sugar transporter family [Arabidopsis thaliana]
  misc_feature (1)..(305): Homolog of NCBI NO: 32488451 NR Description: OSJNBa0004N05.8 [Oryza sativa (japonica
  misc_feature (1)..(305): Homolog of NCBI NO: 9652186 NR Description: putative Na+/myo-inositol symporter
  misc_feature (1)..(300): Homolog of NCBI NO: 33146705 NR Description: putative proton myo-inositol transporter
  misc_feature (1)..(304): Homolog of NCBI NO: 15220697 NR Description: sugar transporter family [Arabidopsis thaliana]
MAAAINPAILIVGRVFVGLGVGMASMASPLYISEASPTRVRGALVSLNGFLITGGQFLSYVINLAFTSAPGTWRWMLGVAAVPALTQIILMVLLPESPRWLFRKGKQEEAKEILRRIYPPQDVEDEINALKESIETELNEEASASNKVSIMKLLKTKTVRRGLYAGMGLQIFQQFVGINTVMYYSPTIVQLAGFASNRVALLLSLVTAGLNAFGSILSIYFIDKTGRRKLLLFSLCGVVVSLVVLTVAFHETTTHSPMVSTIETSHFNNTCPDYSTAFNPGEWDCMKCLKASPECGFCASRANKVNVS

SEQ ID NO: 57485 - DNA, 1145 bp, Glycine max
  misc_feature (1)..(1145): Ceres Seq. ID no. 15170602
gtgttactgttctcagttcccttcatttcatccaaaaacaaaactctctcgttgtgttttgagacatggcatcctcgttggcacctgctaccaaagccgccactaatttgcgcctcacacactctctccgcttctctcctaaacccaacaacctacgctttgccaccaagcctggtaatacgctgttatgcgcaagggttaaggcccaattagatgaggttgcccttgatagttcctcaaatgctactcctcctatcaaagccaaatcaaaggaggaaccacccgcaaaacctttagctgaaccatcttcttcagtcttggcaactcaagaatcggtctctcagtttattactcaagttgcaagtcttgtcaagcttgttgattcgagagacattgtggagttgaagctgaagcagcatgatgttgaagtaacaattaggaaaaaggaggctatgcctcaaccaccacctcctcctcaacctgcggtggtgtattcatcccctccaccagtgttgccaccgccatccgtaccagcatctactccagcacctactctagctcgtgcaaccccttcaccaacttcagcccctgctgtgaagtcagctaaatcatcacttccgcctcttaaaagccccatggcagggacattctaccgaagtcctgcacccggtgaacctccctttgtgaaggttggagacaaagtaaagaaggggcaagttgtatgcatcattgaggcaatgaaattgatgaatgaaatagaagctgatcagtcaggaactatagttgaaattgttgcggaagatgccaaatctgtaagcgttgacactcccctatttgtgattcaaccatagagctcaaagtattcgaatggatggatgaagatctaagtcggtagttgaagtgtgaggctcatcaacccccccccccccccccccccccaccttcaaggtagagaggaagtgtaggaagattttgttctaaattgggatgacacggttgagaagaattattgcttacaatggatttattccttatttttcgcttttatatgattgcactatgttctagtgaaccttttttttgtttaggcaagttaaattgtatgatatttaatctcatgtagtttgtttttactttttgttttg

SEQ ID NO: 57486 - protein, 261 aa, Glycine max
  peptide (1)..(261): Ceres Seq. ID no. 15170603
  misc_feature (185)..(259): Pfam Name: Biotin-requiring enzyme Pfam Description: Biotin-requiring enzyme
MASSLAPATKAATNLRLTHSLRFSPKPNNLRFATKPGNTLLCARVKAQLDEVALDSSSNATPPIKAKSKEEPPAKPLAEPSSSVLATQESVSQFITQVASLVKLVDSRDIVELKLKQHDVEVTIRKKEAMPQPPPPPQPAVVYSSPPPVLPPPSVPASTPAPTLARATPSPTSAPAVKSAKSSLPPLKSPMAGTFYRSPAPGEPPFVKVGDKVKKGQVVCIIEAMKLMNEIEADQSGTIVEIVAEDAKSVSVDTPLFVIQP

SEQ ID NO: 57487 - protein, 132 aa, Glycine max
  peptide (1)..(132): Ceres Seq. ID no. 15170604
  misc_feature (56)..(130): Pfam Name: Biotin-requiring enzyme Pfam Description: Biotin-requiring enzyme
MPQPPPPPQPAVVYSSPPPVLPPPSVPASTPAPTLARATPSPTSAPAVKSAKSSLPPLKSPMAGTFYRSPAPGEPPFVKVGDKVKKGQVVCIIEAMKLMNEIEADQSGTIVEIVAEDAKSVSVDTPLFVIQP

SEQ ID NO: 57488 - DNA, 1586 bp, Glycine max
  misc_feature (1)..(1586): Ceres Seq. ID no. 13639645
agaacatcctaatcgaaaaaggaagtaacacaagccttcttcaagtgtttaattctcctctttaatttctctttagaatactcaacctttctcaagattctaatcaaaaggagagaaaaataaaatggccaccgaaaagcttagaggttgtgcaaatgtttttgcaagctctaaaccctacttggccatgatctctttacaatttggctatgcaggcatgaacattatcactaaggtttctctcaaccaaggcatgagccactatgtccttgtggtctatcgccacgcttttgccaccgctgtcatagctccttttgccattatttttgaaaggaaaggtcaaccgaagataacattcccagttttcatgcaaatttttattcttgctcttcttgggcctgtgattgatcaaaatttctactatgctgggttgaagctcacatccccaaccttctcatgtgcaatgagcaacatgcttccagccatgacttttgtgatggcagtgttttgccggatggagaagatagaaataaagaaggtgagatgcatggcaaagatagtgggaacattagtcacagtggcaggggctatgctgatgaccttatatagaggtcctatagtggagatggtatgggccaaacatccacacaataaaaccaatgcaacaaccacgacagaatcatttgacaaagattggttcttaggatgcacctttcttatcattgccaccctagcttgggcatccctatttgttttacaagccaaagctattcagacgtacaagaatcatcagttaagtctaacttcacttgtgtgctttattggcactcttcaagctattgctgttacttttgttgttgaacacaatccttctgtatggagaattggctgggatgtgagcttacttgctgctgcatatgctgggattgtgacatcaagcatatcatactatgtacaaggactggtaattaagatgaaaggacctgtctttgcaactgcctttagccctttaatgatgatcattgtggccatcatgggatccttcatccttgcggaacaaatttatcttggaggtgtaattggtgccatcttaatcgttatagggttatactcagttctgtggggaaagcacaaagaacaaatagagagcaaagtggcagatgaaattcccttgcctgtaaaagatgctcaaattgctgtaattgcagggccaatgattgatgccacagataattttactgaagaaaaatatggtcagaaaggagaagccaacaacaacaagctctcttcacacataataactatgcctattccagagcttcccactaaagctaaccaagagagaaagacttgagtaatttggaatgtgaataggaattaatgttttttaaatgtatgttccatcaaccccatttttccctttttagcaattattcctttctcctttctcttttttttttcttttttctttgctaccaaaagggtcttgtttgttgcatttaagcaatatataacatatataaatatgtaaaaaattccaacttgctagtcaaagtagaatagagaatcataaagcttatctctcc

SEQ ID NO: 57489 - protein, 409 aa, Glycine max
  peptide (1)..(409): Ceres Seq. ID no. 15220462
  misc_feature (27)..(160): Pfam Name: Integral membrane protein DUF6 Pfam Description: Integral membrane protein DUF6
  misc_feature (7)..(382): Homolog of NCBI NO: 6552743 NR Description: T26F17.11 [Arabidopsis thaliana]
  misc_feature (7)..(382): Homolog of NCBI NO: 17529004 NR Description: putative nodulin protein [Arabidopsis thaliana]
  misc_feature (7)..(382): Homolog of NCBI NO: 15219123 NR Description: nodulin N21 family protein [Arabidopsis thaliana]
  misc_feature (15)..(366): Homolog of NCBI NO: 21592817 NR Description: nodulin-like protein [Arabidopsis thaliana]
  misc_feature (15)..(366): Homolog of NCBI NO: 15228980 NR Description: nodulin MtN21 family protein [Arabidopsis
  misc_feature (15)..(389): Homolog of NCBI NO: 7487973 NR Description: probable integral membrane protein nodulin
  misc_feature (15)..(389): Homolog of NCBI NO: 30688451 NR Description: nodulin MtN21 family protein [Arabidopsis
  misc_feature (9)..(386): Homolog of NCBI NO: 34908998 NR Description: nodulin-like protein [Oryza sativa (japonica
  misc_feature (1)..(402): Homolog of NCBI NO: 15240683 NR Description: nodulin MtN21 family protein [Arabidopsis
  misc_feature (1)..(383): Homolog of NCBI NO: 2598575 NR Description: MtN21 [Medicago truncatula]
MATEKLRGCANVFASSKPYLAMISLQFGYAGMNIITKVSLNQGMSHYVLVVYRHAFATAVIAPFAIIFERKGQPKITFPVFMQIFILALLGPVIDQNFYYAGLKLTSPTFSCAMSNMLPAMTFVMAVFCRMEKIEIKKVRCMAKIVGTLVTVAGAMLMTLYRGPIVEMVWAKHPHNKTNATTTTESFDKDWFLGCTFLIIATLAWASLFVLQAKAIQTYKNHQLSLTSLVCFIGTLQAIAVTFVVEHNPSVWRIGWDVSLLAAAYAGIVTSSISYYVQGLVIKMKGPVFATAFSPLMMIIVAIMGSFILAEQIYLGGVIGAILIVIGLYSVLWGKHKEQIESKVADEIPLPVKDAQIAVIAGPMIDATDNFTEEKYGQKGEANNNKLSSHIITMPIPELPTKANQERKT

SEQ ID NO: 57490 - protein, 388 aa, Glycine max
  peptide (1)..(388): Ceres Seq. ID no. 15220463
  misc_feature (6)..(139): Pfam Name: Integral membrane protein DUF6 Pfam Description: Integral membrane protein DUF6
  misc_feature (1)..(361): Homolog of NCBI NO: 6552743 NR Description: T26F17.11 [Arabidopsis thaliana]
  misc_feature (1)..(361): Homolog of NCBI NO: 17529004 NR Description: putative nodulin protein [Arabidopsis thaliana]
  misc_feature (1)..(361): Homolog of NCBI NO: 15219123 NR Description: nodulin N21 family protein [Arabidopsis thaliana]
  misc_feature (1)..(345): Homolog of NCBI NO: 21592817 NR Description: nodulin-like protein [Arabidopsis thaliana]
  misc_feature (1)..(345): Homolog of NCBI NO: 15228980 NR Description: nodulin MtN21 family protein [Arabidopsis
  misc_feature (1)..(368): Homolog of NCBI NO: 7487973 NR Description: probable integral membrane protein nodulin
  misc_feature (1)..(368): Homolog of NCBI NO: 30688451 NR Description: nodulin MtN21 family protein [Arabidopsis
  misc_feature (1)..(365): Homolog of NCBI NO: 34908998 NR Description: nodulin-like protein [Oryza sativa (japonica
  misc_feature (1)..(381): Homolog of NCBI NO: 15240683 NR Description: nodulin MtN21 family protein [Arabidopsis
  misc_feature (1)..(362): Homolog of NCBI NO: 2598575 NR Description: MtN21 [Medicago truncatula]
MISLQFGYAGMNIITKVSLNQGMSHYVLVVYRHAFATAVIAPFAIIFERKGQPKITFPVFMQIFILALLGPVIDQNFYYAGLKLTSPTFSCAMSNMLPAMTFVMAVFCRMEKIEIKKVRCMAKIVGTLVTVAGAMLMTLYRGPIVEMVWAKHPHNKTNATTTTESFDKDWFLGCTFLIIATLAWASLFVLQAKAIQTYKNHQLSLTSLVCFIGTLQAIAVTFVVEHNPSVWRIGWDVSLLAAAYAGIVTSSISYYVQGLVIKMKGPVFATAFSPLMMIIVAIMGSFILAEQIYLGGVIGAILIVIGLYSVLWGKHKEQIESKVADEIPLPVKDAQIAVIAGPMIDATDNFTEEKYGQKGEANNNKLSSHIITMPIPELPTKANQERKT

SEQ ID NO: 57491 - protein, 378 aa, Glycine max
  peptide (1)..(378): Ceres Seq. ID no. 15220464
  misc_feature (1)..(129): Pfam Name: Integral membrane protein DUF6 Pfam Description: Integral membrane protein DUF6
  misc_feature (1)..(351): Homolog of NCBI NO: 6552743 NR Description: T26F17.11 [Arabidopsis thaliana]
  misc_feature (1)..(351): Homolog of NCBI NO: 17529004 NR Description: putative nodulin protein [Arabidopsis thaliana]
  misc_feature (1)..(351): Homolog of NCBI NO: 15219123 NR Description: nodulin N21 family protein [Arabidopsis thaliana]
  misc_feature (1)..(335): Homolog of NCBI NO: 21592817 NR Description: nodulin-like protein [Arabidopsis thaliana]
  misc_feature (1)..(335): Homolog of NCBI NO: 15228980 NR Description: nodulin MtN21 family protein [Arabidopsis
  misc_feature (1)..(358): Homolog of NCBI NO: 7487973 NR Description: probable integral membrane protein nodulin
  misc_feature (1)..(358): Homolog of NCBI NO: 30688451 NR Description: nodulin MtN21 family protein [Arabidopsis
  misc_feature (1)..(355): Homolog of NCBI NO: 34908998 NR Description: nodulin-like protein [Oryza sativa (japonica
  misc_feature (1)..(371): Homolog of NCBI NO: 15240683 NR Description: nodulin MtN21 family protein [Arabidopsis
  misc_feature (1)..(352): Homolog of NCBI NO: 2598575 NR Description: MtN21 [Medicago truncatula]
MNIITKVSLNQGMSHYVLVVYRHAFATAVIAPFAIIFERKGQPKITFPVFMQIFILALLGPVIDQNFYYAGLKLTSPTFSCAMSNMLPAMTFVMAVFCRMEKIEIKKVRCMAKIVGTLVTVAGAMLMTLYRGPIVEMVWAKHPHNKTNATTTTESFDKDWFLGCTFLIIATLAWASLFVLQAKAIQTYKNHQLSLTSLVCFIGTLQAIAVTFVVEHNPSVWRIGWDVSLLAAAYAGIVTSSISYYVQGLVIKMKGPVFATAFSPLMMIIVAIMGSFILAEQIYLGGVIGAILIVIGLYSVLWGKHKEQIESKVADEIPLPVKDAQIAVIAGPMIDATDNFTEEKYGQKGEANNNKLSSHIITMPIPELPTKANQERKT

SEQ ID NO: 57492 - DNA, 1132 bp, Glycine max
  misc_feature (1)..(1132): Ceres Seq. ID no. 14314252
gacactgcggtacagagagaggcaagtcccacatggatgttccaaacagcccggaaatctcggttgatgttcctccttaccttcgagtgcacaaagacagcacggtcgagagaattgccggcacccaagtcgttcccgcaggcctcgattccgacaccaacgttgtctccaaagacatcctcgtcgtccccgaaaccggcgtcactggcagactctaccgtcccaattccaccccgccaaccgccaataagctccctttacttgtctacttccacggcggcgccttctgcatctcctccgcctccgatcctctctaccacacctctctcaacaacctcgtcgccgaggccaacgttgtcgctctctccgtcaattacaggctcgcgccagaacaccctcttcccaccgcgtaccaagactcttggtccgcgattcaatgggtcgctgacgcctctcgtgctaaacaacaccaccaagaagattggatcagggacaacgttgactttgacagagtcttcctagcaggggacagcgcaggtgccaacctgggacactacatggccttaaaattgaataataattttccaacaaatgatggtttcgatttcaaggttgcgggtcttatcatggtgaacccttatttctggggaaaggaagcaattggagtggagattactgatccggagaggaagaagatggtggataagtggtggagttttgtttgtccttcggataaagggaacgatgaccctttgattaacccctttgtggaggaggctccgggtattgaaggggttgcttgcgatagggttcttgttactgttgcggagaaagacatactgagggaaagggggaagctttatcacaaaatgttgagtaacagtgactggagaggaactgctgagttccacgagactccaggggaggatcatgtgtttcacatcttcaaccccaactgcgagcaagcaaagagtttgattaaacgcattgctcatttcattaatgaacattgaatgtttactgtcattttgttcttttttcttgtgttgtgttgtgtgtggatccattaataaaattcaactttgacatttaggttttgattttgatggaatacaataagttttgattcctc

SEQ ID NO: 57493 - protein, 336 aa, Glycine max
  peptide (1)..(336): Ceres Seq. ID no. 14314253
  misc_feature (71)..(129): Pfam Name: Carboxylesterase Pfam Description: Carboxylesterase
  misc_feature (19)..(335): Homolog of NCBI NO: 15227669 NR Description: expressed protein [Arabidopsis thaliana]
  misc_feature (25)..(333): Homolog of NCBI NO: 15222791 NR Description: hypothetical protein [Arabidopsis thaliana]
  misc_feature (15)..(333): Homolog of NCBI NO: 21537287 NR Description: putative esterase [Arabidopsis thaliana]
  misc_feature (15)..(333): Homolog of NCBI NO: 18402731 NR Description: expressed protein [Arabidopsis thaliana]
  misc_feature (18)..(333): Homolog of NCBI NO: 15228426 NR Description: expressed protein [Arabidopsis thaliana]
  misc_feature (18)..(333): Homolog of NCBI NO: 18086341 NR Description: AT3g48690/T8P19_200 [Arabidopsis thaliana]
  misc_feature (18)..(333): Homolog of NCBI NO: 15222795 NR Description: expressed protein [Arabidopsis thaliana]
  misc_feature (18)..(333): Homolog of NCBI NO: 15228425 NR Description: expressed protein [Arabidopsis thaliana]
  misc_feature (18)..(335): Homolog of NCBI NO: 21536771 NR Description: unknown [Arabidopsis thaliana]
  misc_feature (18)..(335): Homolog of NCBI NO: 18401743 NR Description: expressed protein [Arabidopsis thaliana]
HCGTERGKSHMDVPNSPEISVDVPPYLRVHKDSTVERIAGTQVVPAGLDSDTNVVSKDILVVPETGVTGRLYRPNSTPPTANKLPLLVYFHGGAFCISSASDPLYHTSLNNLVAEANVVALSVNYRLAPEHPLPTAYQDSWSAIQWVADASRAKQHHQEDWIRDNVDFDRVFLAGDSAGANLGHYMALKLNNNFPTNDGFDFKVAGLIMVNPYFWGKEAIGVEITDPERKKMVDKWWSFVCPSDKGNDDPLINPFVEEAPGIEGVACDRVLVTVAEKDILRERGKLYHKMLSNSDWRGTAEFHETPGEDHVFHIFNPNCEQAKSLIKRIAHFINEH

SEQ ID NO: 57494 - protein, 326 aa, Glycine max
  peptide (1)..(326): Ceres Seq. ID no. 14314254
  misc_feature (61)..(119): Pfam Name: Carboxylesterase Pfam Description: Carboxylesterase
  misc_feature (9)..(325): Homolog of NCBI NO: 15227669 NR Description: expressed protein [Arabidopsis thaliana]
  misc_feature (15)..(323): Homolog of NCBI NO: 15222791 NR Description: hypothetical protein [Arabidopsis thaliana]
  misc_feature (5)..(323): Homolog of NCBI NO: 21537287 NR Description: putative esterase [Arabidopsis thaliana]
  misc_feature (5)..(323): Homolog of NCBI NO: 18402731 NR Description: expressed protein [Arabidopsis thaliana]
  misc_feature (8)..(323): Homolog of NCBI NO: 15228426 NR Description: expressed protein [Arabidopsis thaliana]
  misc_feature (8)..(323): Homolog of NCBI NO: 18086341 NR Description: AT3g48690/T8P19_200 [Arabidopsis thaliana]
  misc_feature (8)..(323): Homolog of NCBI NO: 15222795 NR Description: expressed protein [Arabidopsis thaliana]
  misc_feature (8)..(323): Homolog of NCBI NO: 15228425 NR Description: expressed protein [Arabidopsis thaliana]
  misc_feature (8)..(325): Homolog of NCBI NO: 21536771 NR Description: unknown [Arabidopsis thaliana]
  misc_feature (8)..(325): Homolog of NCBI NO: 18401743 NR Description: expressed protein [Arabidopsis thaliana]
MDVPNSPEISVDVPPYLRVHKDSTVERIAGTQVVPAGLDSDTNVVSKDILVVPETGVTGRLYRPNSTPPTANKLPLLVYFHGGAFCISSASDPLYHTSLNNLVAEANVVALSVNYRLAPEHPLPTAYQDSWSAIQWVADASRAKQHHQEDWIRDNVDFDRVFLAGDSAGANLGHYMALKLNNNFPTNDGFDFKVAGLIMVNPYFWGKEAIGVEITDPERKKMVDKWWSFVCPSDKGNDDPLINPFVEEAPGIEGVACDRVLVTVAEKDILRERGKLYHKMLSNSDWRGTAEFHETPGEDHVFHIFNPNCEQAKSLIKRIAHFINEH

SEQ ID NO: 57495 - protein, 173 aa, Glycine max
  peptide (1)..(173): Ceres Seq. ID no. 14314255
  misc_feature (36)..(136): Pfam Name: Extensin-like region Pfam Description: Extensin-like region
DTAVQREASPTWMFQTARKSRLMFLLTFECTKTARSRELPAPKSFPQASIPTPTLSPKTSSSSPKPASLADSTVPIPPRQPPISSLYLSTSTAAPSASPPPPILSTTPLSTTSSPRPTLSLSPSITGSRQNTLFPPRTKTLGPRFNGSLTPLVLNNTTKKIGSGTTLTLTESS

SEQ ID NO: 57496 - DNA, 1371 bp, Glycine max
  misc_feature (1)..(1371): Ceres Seq. ID no. 15172553
aaaccacgaaaggatgcgagaataagaatagctttatagttaacacacacttcgtcttgttgctgagacaagagtcataatcttggctgtaacaggttgaacactgcatcgcaaattctgaatggaaatgtgtggagccacagctctgacatggtctcacaccatctgtccatcgcttcaccttcctcgatccgtctctaccagggaggctaggaggagcttcagtgtttggtgtgtctctgatcaagaccccaagggaaataaaatgatcatatctgtaactggagcaacaggttttattggtagaaggttggtgcaaagattacatgcagacaatcacagtgttcatgtcttgacacgatccaaatctaacgcagaaacaatttttccggcaaaagactttcctggaatcaagatagcagaagagccggaatggaaagatagcattcagggctcaacgggggttgtgaatttggctggactgcccataagtacccgatggtctcctgagataaaaaaggaaatcaagcaaagcaggattcgagtgacctcaaaggttgtagaattgataaacagtgcaccagacgatattcgacctaaagtttttgttagtgctacagctgttggttattatggcaccagtgagacacaagtctttgatgaacaaagtccatcaggaaaggattacttggctgaggtttgtagggaatgggaatcgacagccctaaaggtaaacggaggtgttagagtggctctaattcgcattggtgttgttcttggtaaagatggtggagcattagctaaaatgatacctatgttcaagttgtttgctggtggacctctaggctctggaacacaatggttctcctggattcatttggaagacattgtcaatttaatatatgaaacgctgtcaaatccatcttacaaaggtgttatcaatggaactgcaccaaatcctgtgcgattggcagaattgtgtgatcagctgggacatgccttgggtcgtccctcatggctaccagtaccagactttgcgctcaaggctgtccttggagaaggtgctactgtggttttagaagggcagaaagtgcttcctactcaagctaagaagttgggtttcccattcaaatattcttacgtgaaggatgccctgcaagcaattctttcttgaaagctgcatagcagctactgccacattcttaattcttttgacatcagtggcattcaccgtattgagatttttgaaagcgatagatatacttctgaagatgtgattgaattgtaatctattttatttttggtcatgtgaattcaaaaacgtaactattaactaacaaaaaaaaaaaaaaaaaaaaaaaaaaaaaaaag

SEQ ID NO: 57497 - protein, 350 aa, Glycine max
  peptide (1)..(350): Ceres Seq. ID no. 15172554
  misc_feature (51)..(296): Pfam Name: NAD dependent epimerase/dehydratase family Pfam Description: NAD dependent epimerase/dehydratase family
  misc_feature (49)..(348): Homolog of NCBI NO: 33239592 NR Description: Predicted nucleoside-diphosphate sugar epimerase
  misc_feature (49)..(349): Homolog of NCBI NO: 22298008 NR Description: ORF_ID:tll0465~putative sugar nucleotide
  misc_feature (49)..(349): Homolog of NCBI NO: 16330099 NR Description: cell division inhibitor [Synechocystis sp. PCC
  misc_feature (49)..(349): Homolog of NCBI NO: 7388457 NR Description: Hypothetical protein slr1223
  misc_feature (49)..(349): Homolog of NCBI NO: 25019701 NR Description: unknown [Synechococcus sp. PCC 7942]
  misc_feature (49)..(350): Homolog of NCBI NO: 23130096 NR Description: hypothetical protein [Nostoc punctiforme]
  misc_feature (49)..(349): Homolog of NCBI NO: 17229882 NR Description: cell division inhibitor [Nostoc sp. PCC 7120]
  misc_feature (49)..(350): Homolog of NCBI NO: 23043197 NR Description: hypothetical protein [Trichodesmium erythraeum
  misc_feature (70)..(349): Homolog of NCBI NO: 25326146 NR Description: hypothetical protein At2g21280 [imported] -
  misc_feature (1)..(349): Homolog of NCBI NO: 18399648 NR Description: expressed protein [Arabidopsis thaliana]
MEMCGATALTWSHTICPSLHLPRSVSTREARRSFSVWCVSDQDPKGNKMIISVTGATGFIGRRLVQRLHADNHSVHVLTRSKSNAETIFPAKDFPGIKIAEEPEWKDSIQGSTGVVNLAGLPISTRWSPEIKKEIKQSRIRVTSKVVELINSAPDDIRPKVFVSATAVGYYGTSETQVFDEQSPSGKDYLAEVCREWESTALKVNGGVRVALIRIGVVLGKDGGALAKMIPMFKLFAGGPLGSGTQWFSWIHLEDIVNLIYETLSNPSYKGVINGTAPNPVRLAELCDQLGHALGRPSWLPVPDFALKAVLGEGATVVLEGQKVLPTQAKKLGFPFKYSYVKDALQAILS

SEQ ID NO: 57498 - protein, 348 aa, Glycine max
  peptide (1)..(348): Ceres Seq. ID no. 15172555
  misc_feature (49)..(294): Pfam Name: NAD dependent epimerase/dehydratase family Pfam Description: NAD dependent epimerase/dehydratase family
  misc_feature (47)..(346): Homolog of NCBI NO: 33239592 NR Description: Predicted nucleoside-diphosphate sugar epimerase
  misc_feature (47)..(347): Homolog of NCBI NO: 22298008 NR Description: ORF_ID:tll0465~putative sugar nucleotide
  misc_feature (47)..(347): Homolog of NCBI NO: 16330099 NR Description: cell division inhibitor [Synechocystis sp. PCC
  misc_feature (47)..(347): Homolog of NCBI NO: 7388457 NR Description: Hypothetical protein slr1223
  misc_feature (47)..(347): Homolog of NCBI NO: 25019701 NR Description: unknown [Synechococcus sp. PCC 7942]
  misc_feature (47)..(348): Homolog of NCBI NO: 23130096 NR Description: hypothetical protein [Nostoc punctiforme]
  misc_feature (47)..(347): Homolog of NCBI NO: 17229882 NR Description: cell division inhibitor [Nostoc sp. PCC 7120]
  misc_feature (47)..(348): Homolog of NCBI NO: 23043197 NR Description: hypothetical protein [Trichodesmium erythraeum
  misc_feature (68)..(347): Homolog of NCBI NO: 25326146 NR Description: hypothetical protein At2g21280 [imported] -
  misc_feature (1)..(347): Homolog of NCBI NO: 18399648 NR Description: expressed protein [Arabidopsis thaliana]
MCGATALTWSHTICPSLHLPRSVSTREARRSFSVWCVSDQDPKGNKMIISVTGATGFIGRRLVQRLHADNHSVHVLTRSKSNAETIFPAKDFPGIKIAEEPEWKDSIQGSTGVVNLAGLPISTRWSPEIKKEIKQSRIRVTSKVVELINSAPDDIRPKVFVSATAVGYYGTSETQVFDEQSPSGKDYLAEVCREWESTALKVNGGVRVALIRIGVVLGKDGGALAKMIPMFKLFAGGPLGSGTQWFSWIHLEDIVNLIYETLSNPSYKGVINGTAPNPVRLAELCDQLGHALGRPSWLPVPDFALKAVLGEGATVVLEGQKVLPTQAKKLGFPFKYSYVKDALQAILS

SEQ ID NO: 57499 - protein, 302 aa, Glycine max
  peptide (1)..(302): Ceres Seq. ID no. 15172556
  misc_feature (3)..(248): Pfam Name: NAD dependent epimerase/dehydratase family Pfam Description: NAD dependent epimerase/dehydratase family
  misc_feature (1)..(300): Homolog of NCBI NO: 33239592 NR Description: Predicted nucleoside-diphosphate sugar epimerase
  misc_feature (1)..(301): Homolog of NCBI NO: 22298008 NR Description: ORF_ID:tll0465~putative sugar nucleotide
  misc_feature (1)..(301): Homolog of NCBI NO: 16330099 NR Description: cell division inhibitor [Synechocystis sp. PCC
  misc_feature (1)..(301): Homolog of NCBI NO: 7388457 NR Description: Hypothetical protein slr1223
  misc_feature (1)..(301): Homolog of NCBI NO: 25019701 NR Description: unknown [Synechococcus sp. PCC 7942]
  misc_feature (1)..(302): Homolog of NCBI NO: 23130096 NR Description: hypothetical protein [Nostoc punctiforme]
  misc_feature (1)..(301): Homolog of NCBI NO: 17229882 NR Description: cell division inhibitor [Nostoc sp. PCC 7120]
  misc_feature (1)..(302): Homolog of NCBI NO: 23043197 NR Description: hypothetical protein [Trichodesmium erythraeum
  misc_feature (22)..(301): Homolog of NCBI NO: 25326146 NR Description: hypothetical protein At2g21280 [imported] -
  misc_feature (1)..(301): Homolog of NCBI NO: 18399648 NR Description: expressed protein [Arabidopsis thaliana]
MIISVTGATGFIGRRLVQRLHADNHSVHVLTRSKSNAETIFPAKDFPGIKIAEEPEWKDSIQGSTGVVNLAGLPISTRWSPEIKKEIKQSRIRVTSKVVELINSAPDDIRPKVFVSATAVGYYGTSETQVFDEQSPSGKDYLAEVCREWESTALKVNGGVRVALIRIGVVLGKDGGALAKMIPMFKLFAGGPLGSGTQWFSWIHLEDIVNLIYETLSNPSYKGVINGTAPNPVRLAELCDQLGHALGRPSWLPVPDFALKAVLGEGATVVLEGQKVLPTQAKKLGFPFKYSYVKDALQAILS

SEQ ID NO: 57500 - DNA, 1599 bp, Glycine max
  misc_feature (1)..(1599): Ceres Seq. ID no. 14314319
acccttttcgaagcttgaggaggaagagtgcctcggtattggcgatgaaaaaaatgaagactcaatcatggcgttgatgatgaataagcggggcagtaccttttttgaccaaagaaagaaagccaccacagttaaaataaaaaacttgtccctttgacaagcacttcttagctctctctccgccattctttctttattgctccctccctcctttcccctcctctcccacacgcttcttcttatcctcattccctttcttcaattccattttcacatccttccttcaacttccactgttagaaacttcacgtatgcaaccatgcttctttaccaaccacccaaagaagaggtagaaagaaccatgaagggcaacaacgttttggatctgaaaacgttaattgatgagcttgagtcatcatcaattgaagtcccttcggtttttatctgccctatttcacttgagccaatgctagacccggtgaccctttgcacgggacaaacctacgaccgttccaacatcctcagatggttctccctcggtcacaacacgtgtcccacaacaatgcaagagctttgggatgattcggtcacaccaaacaccacactccaccacttcatactctcttggttctctcacaagtacttggtcatgaagaagaagctcgaggacgttcaaggcacggccttggagctcttggacacgttaaagaaggtaaagggtcaaaatagagttcgagctctcaaacaacttcgccaactcgttgattcccacgtgtccacgaggaaaaccgttgaggaaaataatggttcttctttgatttcttccttgctgggtcctttcacttcccacgctgttggttcggaagcaattgggattctcgtgaatttggagttgggttcggagttgaagaggagtctcatggaccccgcgaaggtgtcgttgttggtggacatcatgaacgagggaacaattcagacaaagatgaattgtgccaaattgattcaaacgttgttggtagaaggtgacccctccgagacagttgttttatcaagtttgagtcttttggttggggtgttgaggttagtgagagataagaaacaccccactagtgttgtaaccggactcatattactcaaaattgtatcttcgcgtgaatccgttagaggctcaattataagcataggagcggtgcctcaattgattcagcttttacccactttgaataatgagtgtttggagatagcacttcatattcttgaggttttgtcaacacttcctgaagggagaatggctttgaaagagtgtccaaatattattcccaatgtggtcaagttgttgatgagagtttcagagagttgcacacaatttgcattgtcgatattgtgggctatttacaagcttgccccagaggaatgtgcttcgaaagctgtggaggcagggttggcggcgaagctactgctagtaattcagagtggttgcaacccggtgttaaagcagaaatctaccgagtttttgaaaatgtgcagcctagattactctactagtattttgatttccaagtgtatgcttactgcaacaatacaatgaaattcaaaacc

SEQ ID NO: 57501 - protein, 422 aa, Glycine max
  peptide (1)..(422): Ceres Seq. ID no. 14314320
  misc_feature (36)..(110): Pfam Name: U-box domain Pfam Description: U-box domain
  misc_feature (31)..(400): Homolog of NCBI NO: 13539578 NR Description: photoperiod responsive protein [Solanum tuberosum
  misc_feature (35)..(419): Homolog of NCBI NO: 30686609 NR Description: expressed protein [Arabidopsis thaliana]
  misc_feature (35)..(419): Homolog of NCBI NO: 25408431 NR Description: hypothetical protein At2g35930 [imported] -
  misc_feature (17)..(421): Homolog of NCBI NO: 20330772 NR Description: Unknown protein [Oryza sativa (japonica
  misc_feature (21)..(401): Homolog of NCBI NO: 11358045 NR Description: hypothetical protein T16K5.160 - Arabidopsis
  misc_feature (21)..(416): Homolog of NCBI NO: 7486518 NR Description: hypothetical protein F6H11.10 - Arabidopsis
  misc_feature (21)..(422): Homolog of NCBI NO: 17064800 NR Description: Unknown protein [Arabidopsis thaliana]
  misc_feature (21)..(422): Homolog of NCBI NO: 15239204 NR Description: expressed protein [Arabidopsis thaliana]
  misc_feature (21)..(422): Homolog of NCBI NO: 21536926 NR Description: unknown [Arabidopsis thaliana]
  misc_feature (21)..(422): Homolog of NCBI NO: 18408953 NR Description: expressed protein [Arabidopsis thaliana]
MLLYQPPKEEVERTMKGNNVLDLKTLIDELESSSIEVPSVFICPISLEPMLDPVTLCTGQTYDRSNILRWFSLGHNTCPTTMQELWDDSVTPNTTLHHFILSWFSHKYLVMKKKLEDVQGTALELLDTLKKVKGQNRVRALKQLRQLVDSHVSTRKTVEENNGSSLISSLLGPFTSHAVGSEAIGILVNLELGSELKRSLMDPAKVSLLVDIMNEGTIQTKMNCAKLIQTLLVEGDPSETVVLSSLSLLVGVLRLVRDKKHPTSVVTGLILLKIVSSRESVRGSIISIGAVPQLIQLLPTLNNECLEIALHILEVLSTLPEGRMALKECPNIIPNVVKLLMRVSESCTQFALSILWAIYKLAPEECASKAVEAGLAAKLLLVIQSGCNPVLKQKSTEFLKMCSLDYSTSILISKCMLTATIQ

SEQ ID NO: 57502 - protein, 408 aa, Glycine max
  peptide (1)..(408): Ceres Seq. ID no. 14314321
  misc_feature (22)..(96): Pfam Name: U-box domain Pfam Description: U-box domain
  misc_feature (17)..(386): Homolog of NCBI NO: 13539578 NR Description: photoperiod responsive protein [Solanum tuberosum
  misc_feature (21)..(405): Homolog of NCBI NO: 30686609 NR Description: expressed protein [Arabidopsis thaliana]
  misc_feature (21)..(405): Homolog of NCBI NO: 25408431 NR Description: hypothetical protein At2g35930 [imported] -
  misc_feature (3)..(407): Homolog of NCBI NO: 20330772 NR Description: Unknown protein [Oryza sativa (japonica
  misc_feature (7)..(387): Homolog of NCBI NO: 11358045 NR Description: hypothetical protein T16K5.160 - Arabidopsis
  misc_feature (7)..(402): Homolog of NCBI NO: 7486518 NR Description: hypothetical protein F6H11.10 - Arabidopsis
  misc_feature (7)..(408): Homolog of NCBI NO: 17064800 NR Description: Unknown protein [Arabidopsis thaliana]
  misc_feature (7)..(408): Homolog of NCBI NO: 15239204 NR Description: expressed protein [Arabidopsis thaliana]
  misc_feature (7)..(408): Homolog of NCBI NO: 21536926 NR Description: unknown [Arabidopsis thaliana]
  misc_feature (7)..(408): Homolog of NCBI NO: 18408953 NR Description: expressed protein [Arabidopsis thaliana]
MKGNNVLDLKTLIDELESSSIEVPSVFICPISLEPMLDPVTLCTGQTYDRSNILRWFSLGHNTCPTTMQELWDDSVTPNTTLHHFILSWFSHKYLVMKKKLEDVQGTALELLDTLKKVKGQNRVRALKQLRQLVDSHVSTRKTVEENNGSSLISSLLGPFTSHAVGSEAIGILVNLELGSELKRSLMDPAKVSLLVDIMNEGTIQTKMNCAKLIQTLLVEGDPSETVVLSSLSLLVGVLRLVRDKKHPTSVVTGLILLKIVSSRESVRGSIISIGAVPQLIQLLPTLNNECLEIALHILEVLSTLPEGRMALKECPNIIPNVVKLLMRVSESCTQFALSILWAIYKLAPEECASKAVEAGLAAKLLLVIQSGCNPVLKQKSTEFLKMCSLDYSTSILISKCMLTATIQ

SEQ ID NO: 57503 - protein, 373 aa, Glycine max
  peptide (1)..(373): Ceres Seq. ID no. 14314322
  misc_feature (1)..(61): Pfam Name: U-box domain Pfam Description: U-box domain
  misc_feature (1)..(351): Homolog of NCBI NO: 13539578 NR Description: photoperiod responsive protein [Solanum tuberosum
  misc_feature (1)..(370): Homolog of NCBI NO: 30686609 NR Description: expressed protein [Arabidopsis thaliana]
  misc_feature (1)..(370): Homolog of NCBI NO: 25408431 NR Description: hypothetical protein At2g35930 [imported] -
  misc_feature (1)..(372): Homolog of NCBI NO: 20330772 NR Description: Unknown protein [Oryza sativa (japonica
  misc_feature (1)..(352): Homolog of NCBI NO: 11358045 NR Description: hypothetical protein T16K5.160 - Arabidopsis
  misc_feature (1)..(367): Homolog of NCBI NO: 7486518 NR Description: hypothetical protein F6H11.10 - Arabidopsis
  misc_feature (1)..(373): Homolog of NCBI NO: 17064800 NR Description: Unknown protein [Arabidopsis thaliana]
  misc_feature (1)..(373): Homolog of NCBI NO: 15239204 NR Description: expressed protein [Arabidopsis thaliana]
  misc_feature (1)..(373): Homolog of NCBI NO: 21536926 NR Description: unknown [Arabidopsis thaliana]
  misc_feature (1)..(373): Homolog of NCBI NO: 18408953 NR Description: expressed protein [Arabidopsis thaliana]
MLDPVTLCTGQTYDRSNILRWFSLGHNTCPTTMQELWDDSVTPNTTLHHFILSWFSHKYLVMKKKLEDVQGTALELLDTLKKVKGQNRVRALKQLRQLVDSHVSTRKTVEENNGSSLISSLLGPFTSHAVGSEAIGILVNLELGSELKRSLMDPAKVSLLVDIMNEGTIQTKMNCAKLIQTLLVEGDPSETVVLSSLSLLVGVLRLVRDKKHPTSVVTGLILLKIVSSRESVRGSIISIGAVPQLIQLLPTLNNECLEIALHILEVLSTLPEGRMALKECPNIIPNVVKLLMRVSESCTQFALSILWAIYKLAPEECASKAVEAGLAAKLLLVIQSGCNPVLKQKSTEFLKMCSLDYSTSILISKCMLTATIQ

SEQ ID NO: 57504 - DNA, 1177 bp, Glycine max
  misc_feature (1)..(1177): Ceres Seq. ID no. 15177758
catctcaagtcttatcatcttcatctcccaagggattcaatacaataccaggctagaagaaactccactcatcaccatctcaagcaactaattaacaagctagtactctttgagtgtttggcaattggcttagatttcttgtacttggaacaagatggaaagcactgtcacatttgagactgatctcaacctcaaggcaaccgagcttagattggggcttccaggaacagaagaaattgttgaaaaaccacttcctgcaagtgctagaattaccaacaaaaggcctttgtctgaaacctctgaggagtgtgcttcaaagggttctagtgctccacatgtggaaactgaagcagcccctcctgccaaggctaagatagtggggtggccaccaatcagatcctacagaaagaacagccttcaggagaatgatggtgctgggatttatgtgaaagtgagcatggatggagctccttacctcagaaagatagacttgaaggtctatggaggctacacacaactcctcaaagctctagaaaacatgttcaagttgaccataggtgagtattctgaaaaagaaggttataagggatctgactatgcacctacatatgaagacaaagatggtgactggatgttagttggagatgttccatgggacatgtttgtgacttcttgcaaaaggctaagaatcatgaaaggatcagaggcaaggggtttgggttgtgctgtatgagaaaaccaaaccactaaaaattactatgagcagagaattaaaaaaagtgttttgggggtgaagggaaaaacatgctgaaaagcttgtgttctcggatctgaagggttttgacttttgaaatcactctagtgtgtgcttttggcatacctttatatggagttatactctgaagcaggagaagatggaagatacggtgcagtttcgatcttcctcaagtttggcaacttttatggttattattttggcatctgtggttggatgctatgcttatgatgttgtttccactgatcctttttgaagtttcatgtgagaaatcttagagatttcaaatgaaactttgtgtagaggagagatagaaaattaaaggttatatgtaatattgtttaatccaagttttttggttgtgttgatacaagaatacaatgtaatatactaagtgttggt

SEQ ID NO: 57505 - protein, 192 aa, Glycine max
  peptide (1)..(192): Ceres Seq. ID no. 15177759
  misc_feature (11)..(192): Pfam Name: AUX/IAA family Pfam Description: AUX/IAA family
  misc_feature (1)..(190): Homolog of NCBI NO: 15239950 NR Description: auxin-responsive protein IAA4 (Indoleacetic
  misc_feature (11)..(192): Homolog of NCBI NO: 15219692 NR Description: auxin-responsive protein IAA3 (Indoleacetic
  misc_feature (1)..(188): Homolog of NCBI NO: 4887018 NR Description: Nt-iaa4.5 deduced protein [Nicotiana tabacum]
  misc_feature (6)..(190): Homolog of NCBI NO: 11131105 NR Description: Auxin-induced protein 22E (Indole-3-acetic acid
  misc_feature (7)..(192): Homolog of NCBI NO: 20269063 NR Description: aux/IAA protein [Populus tremula x Populus
  misc_feature (1)..(190): Homolog of NCBI NO: 11131103 NR Description: Auxin-induced protein 22D (Indole-3-acetic acid
  misc_feature (11)..(192): Homolog of NCBI NO: 452777 NR Description: auxin-induced protein [Pisum sativum]
  misc_feature (1)..(192): Homolog of NCBI NO: 34550779 NR Description: Gbiaa-Re [Gossypium barbadense]
  misc_feature (11)..(192): Homolog of NCBI NO: 1352057 NR Description: AUXIN-INDUCED PROTEIN IAA4
  misc_feature (1)..(192): Homolog of NCBI NO: 416641 NR Description: Auxin-induced protein 22B (Indole-3-acetic acid
MESTVTFETDLNLKATELRLGLPGTEEIVEKPLPASARITNKRPLSETSEECASKGSSAPHVETEAAPPAKAKIVGWPPIRSYRKNSLQENDGAGIYVKVSMDGAPYLRKIDLKVYGGYTQLLKALENMFKLTIGEYSEKEGYKGSDYAPTYEDKDGDWMLVGDVPWDMFVTSCKRLRIMKGSEARGLGCAV

SEQ ID NO: 57506 - DNA, 1636 bp, Glycine max
  misc_feature (1)..(1636): Ceres Seq. ID no. 14315418
agagtgtaaagtgtaaaacgttggttttctctgagaatggcaatgcaggcaggggaactctgtcagcaccaaagtccacattgccctctcattttcttcaacccgattcccgattttggttccttcagcggagggttgtttctcgagcccaaaatccccgattccttcgttcgttccatttcgctgaagatccactccactcccttttcagaatccaatcctcgccgccaccggagaagggttccggcagcgtgctttctatcggtgagcttgccgagtgcaaatctcgttaccgaacccaaactgcaaaatggcgaacacgtgtcagaccaggtgacaacctcaaacggtgtcgttctgcaaagaaaggttagggtacgaggaggcaatgccgtcaacaccaccaaacatctctgggccggtgctgtagccgctatggtctctagaacttgtgtggctccacttgaaaggcttaagttggagtacatagtccgtggtgagaagaggagcatattcgagcttattagcaaaattgcttcttctcaagggttgagaggattttggaaaggcaaccttgtgaatattctgcggacagctccattcaaagcggttaatttttgtgcttacgatacttatagaaagcagctgcttaggttttctgggaatgaggaaactaccaattttgagaggtttattgctggtgctgctgctgggattactgctaccattatctgcctccctcttgacactatccgaaccaagttggtggcacctggtggagaagctttgggcggtgtaattggtgctttcagatacatgattcgaactgaaggattcttttctctttacaagggtttagtgccatcaattataaaaggaatgaagagaatccagaatatgcataaacagggtcaggaactgagtgcctttgaccaacttgagttgggaccggtaaggacattgttgaatggggctattgctggtgcttgtgcagaagctgctacatacccatttgaagtggtgagaaggcaacttcaattgcaagtccaggctacaaaattaagttcttttgcaacatttgccaaaatagttgaacagggaggcattccagctctctatgcaggacttattcccagcttattacaggtgcttccttcagcttccataagtttctttgtctatgagttcatgaagattgttctgaaagtggagtaggcaatgaacaaattcccaggtatatactgctaagaagctgcaccatgatttacgggcaagctgctaaaatagttacagaatagtaacattcaattttaattggcaatcatatttgatgtctgcctttgagggtgaaaggataattcaggtctgctatcccgtacaactgatcacagtatcaacagaatttttggattgactctacactcaatatacccaggcttcaagtctgcaaagtgaaaataaatttattttgttactcccagatcttgaatcctattctcattaggtttacacaattttgttagttttttttttccatctggcagtaagtcttgatcattatcatggggcgtacaagcaaagtccaattactttataagttataacctgaaatgtagcttataaattattcttgtgc

SEQ ID NO: 57507 - protein, 392 aa, Glycine max
  peptide (1)..(392): Ceres Seq. ID no. 14315419
  misc_feature (124)..(391): Homolog of NCBI NO: 11360341 NR Description: peroxisomal Ca-dependent solute carrier
  misc_feature (124)..(391): Homolog of NCBI NO: 33598954 NR Description: calcium-binding transporter [Homo sapiens]
  misc_feature (105)..(389): Homolog of NCBI NO: 34895726 NR Description: putative peroxisomal Ca-dependent solute carrier
  misc_feature (124)..(391): Homolog of NCBI NO: 33286910 NR Description: Calcium-binding transporter [Mus musculus]
  misc_feature (124)..(391): Homolog of NCBI NO: 27369998 NR Description: calcium-binding transporter [Mus musculus]
  misc_feature (31)..(239): Homolog of NCBI NO: 22330713 NR Description: mitochondrial carrier protein family [Arabidopsis
  misc_feature (267)..(392): Homolog of NCBI NO: 25406546 NR Description: hypothetical protein T11I11.12 [imported] -
  misc_feature (31)..(278): Homolog of NCBI NO: 25406546 NR Description: hypothetical protein T11I11.12 [imported] -
  misc_feature (266)..(392): Homolog of NCBI NO: 15238315 NR Description: mitochondrial carrier protein family [Arabidopsis
  misc_feature (32)..(279): Homolog of NCBI NO: 15238315 NR Description: mitochondrial carrier protein family [Arabidopsis
MAMQAGELCQHQSPHCPLIFFNPIPDFGSFSGGLFLEPKIPDSFVRSISLKIHSTPFSESNPRRHRRRVPAACFLSVSLPSANLVTEPKLQNGEHVSDQVTTSNGVVLQRKVRVRGGNAVNTTKHLWAGAVAAMVSRTCVAPLERLKLEYIVRGEKRSIFELISKIASSQGLRGFWKGNLVNILRTAPFKAVNFCAYDTYRKQLLRFSGNEETTNFERFIAGAAAGITATIICLPLDTIRTKLVAPGGEALGGVIGAFRYMIRTEGFFSLYKGLVPSIIKGMKRIQNMHKQGQELSAFDQLELGPVRTLLNGAIAGACAEAATYPFEVVRRQLQLQVQATKLSSFATFAKIVEQGGIPALYAGLIPSLLQVLPSASISFFVYEFMKIVLKVE

SEQ ID NO: 57508 - protein, 390 aa, Glycine max
  peptide (1)..(390): Ceres Seq. ID no. 14315420
  misc_feature (122)..(389): Homolog of NCBI NO: 11360341 NR Description: peroxisomal Ca-dependent solute carrier
  misc_feature (122)..(389): Homolog of NCBI NO: 33598954 NR Description: calcium-binding transporter [Homo sapiens]
  misc_feature (103)..(387): Homolog of NCBI NO: 34895726 NR Description: putative peroxisomal Ca-dependent solute carrier
  misc_feature (122)..(389): Homolog of NCBI NO: 33286910 NR Description: Calcium-binding transporter [Mus musculus]
  misc_feature (122)..(389): Homolog of NCBI NO: 27369998 NR Description: calcium-binding transporter [Mus musculus]
  misc_feature (29)..(237): Homolog of NCBI NO: 22330713 NR Description: mitochondrial carrier protein family [Arabidopsis
  misc_feature (265)..(390): Homolog of NCBI NO: 25406546 NR Description: hypothetical protein T11I11.12 [imported] -
  misc_feature (29)..(276): Homolog of NCBI NO: 25406546 NR Description: hypothetical protein T11I11.12 [imported] -
  misc_feature (264)..(390): Homolog of NCBI NO: 15238315 NR Description: mitochondrial carrier protein family [Arabidopsis
  misc_feature (30)..(277): Homolog of NCBI NO: 15238315 NR Description: mitochondrial carrier protein family [Arabidopsis
MQAGELCQHQSPHCPLIFFNPIPDFGSFSGGLFLEPKIPDSFVRSISLKIHSTPFSESNPRRHRRRVPAACFLSVSLPSANLVTEPKLQNGEHVSDQVTTSNGVVLQRKVRVRGGNAVNTTKHLWAGAVAAMVSRTCVAPLERLKLEYIVRGEKRSIFELISKIASSQGLRGFWKGNLVNILRTAPFKAVNFCAYDTYRKQLLRFSGNEETTNFERFIAGAAAGITATIICLPLDTIRTKLVAPGGEALGGVIGAFRYMIRTEGFFSLYKGLVPSIIKGMKRIQNMHKQGQELSAFDQLELGPVRTLLNGAIAGACAEAATYPFEVVRRQLQLQVQATKLSSFATFAKIVEQGGIPALYAGLIPSLLQVLPSASISFFVYEFMKIVLKVE

SEQ ID NO: 57509 - protein, 259 aa, Glycine max
  peptide (1)..(259): Ceres Seq. ID no. 14315421
  misc_feature (1)..(258): Homolog of NCBI NO: 11360341 NR Description: peroxisomal Ca-dependent solute carrier
  misc_feature (1)..(258): Homolog of NCBI NO: 33598954 NR Description: calcium-binding transporter [Homo sapiens]
  misc_feature (1)..(256): Homolog of NCBI NO: 34895726 NR Description: putative peroxisomal Ca-dependent solute carrier
  misc_feature (1)..(258): Homolog of NCBI NO: 33286910 NR Description: Calcium-binding transporter [Mus musculus]
  misc_feature (1)..(258): Homolog of NCBI NO: 27369998 NR Description: calcium-binding transporter [Mus musculus]
  misc_feature (1)..(106): Homolog of NCBI NO: 22330713 NR Description: mitochondrial carrier protein family [Arabidopsis
  misc_feature (134)..(259): Homolog of NCBI NO: 25406546 NR Description: hypothetical protein T11I11.12 [imported] -
  misc_feature (1)..(145): Homolog of NCBI NO: 25406546 NR Description: hypothetical protein T11I11.12 [imported] -
  misc_feature (133)..(259): Homolog of NCBI NO: 15238315 NR Description: mitochondrial carrier protein family [Arabidopsis
  misc_feature (1)..(146): Homolog of NCBI NO: 15238315 NR Description: mitochondrial carrier protein family [Arabidopsis
MVSRTCVAPLERLKLEYIVRGEKRSIFELISKIASSQGLRGFWKGNLVNILRTAPFKAVNFCAYDTYRKQLLRFSGNEETTNFERFIAGAAAGITATIICLPLDTIRTKLVAPGGEALGGVIGAFRYMIRTEGFFSLYKGLVPSIIKGMKRIQNMHKQGQELSAFDQLELGPVRTLLNGAIAGACAEAATYPFEVVRRQLQLQVQATKLSSFATFAKIVEQGGIPALYAGLIPSLLQVLPSASISFFVYEFMKIVLKVE

SEQ ID NO: 57510 - DNA, 1252 bp, Glycine max
  misc_feature (1)..(1252): Ceres Seq. ID no. 15170595
atgttcacaccaactaactacacatccgaatccatgaacaccaatctcataaggccttgtctctcgctctcgctctcgcgtcgctgctctattccgttcttcacgtgacatcacggcctcaagaaacgtcgtcgtattagagaaaggcgcgtaacgcatgaagagacaaatgttgcatgatctgattgagaatgcaggaggctgcgctgtcaccgatggaggattcgccacgcagctcgaaaagcatggagcctccatcaacgatcctctttggagcgccatctatttgatcaaagacccacatcttatcaaacaggttcacttggaatacttggaggctggtgctgatatattggttacttcatcataccaggctacacttcctggattttcatcgaagggtctatccattgaggaaggggaatcactactagagaagagtgtcaaattggcagttgaagcccgtgatggtttctggaattcagctataataaatcctgggaataaatacagaagagctttggttgcagcctccattggaagctacggatcttaccttgctgatggctcagaatacagtggctgctatggacctgatgtaaatttaaagaagttgaaggattttcatcgccgcagattgcaagttcttgttgaagctggtccagatttacttgcctttgagaccattccaaacaaacttgaagctcaggcttgtgtcgaattgcttgaagaagaaagtgtcaaaatcccatcttggatctgttttaccactgtagatggtgagaatgctccctcaggagagagtttcaaggactgccttgaagcattaaataagagtaacaaagtagatgctgttggtataaactgtgcacctccccatcttatggaaaatctcatttgcaaatttaagcagttaacaaagaaggccatcattgtttatcccaatagtggggaggtatgggatggtaaagccaagaaatggcttccatctaagtgttttcacgatgatgaatttggatttaatgcaacaaggtggcgtgatttgggagctaaaataataggaggttgttgccggactacaccctccaccattcaaattatttcaaatgctttaagagaaaaatcttgattgtgctagtagatgcaactttttttgacaaattgcaatatcttgtctagttattttctataatctatagtctaaatttaaattgtttaaaaaaaaaaaaaaaaaaaaaaaaaaaaaaaaaag

SEQ ID NO: 57511 - protein, 323 aa, Glycine max
  peptide (1)..(323): Ceres Seq. ID no. 15170596
  misc_feature (16)..(320): Pfam Name: Homocysteine S-methyltransferase Pfam Description: Homocysteine S-methyltransferase
  misc_feature (6)..(321): Homolog of NCBI NO: 10732791 NR Description: homocysteine S-methyltransferase-4 [Zea mays]
  misc_feature (10)..(321): Homolog of NCBI NO: 10732787 NR Description: homocysteine S-methyltransferase-2 [Zea mays]
  misc_feature (1)..(321): Homolog of NCBI NO: 10732789 NR Description: homocysteine S-methyltransferase-3 [Zea mays]
  misc_feature (5)..(322): Homolog of NCBI NO: 21593147 NR Description: putative selenocysteine methyltransferase
  misc_feature (6)..(319): Homolog of NCBI NO: 25453566 NR Description: homocysteine S-methyltransferase (EC 2.1.1.10)
  misc_feature (6)..(319): Homolog of NCBI NO: 15229396 NR Description: homocysteine S-methyltransferase AtHMT-2
  misc_feature (5)..(322): Homolog of NCBI NO: 18403505 NR Description: selenocysteine methyltransferase -related
  misc_feature (6)..(323): Homolog of NCBI NO: 22748320 NR Description: Putative homocysteine S-methyltransferase-1
  misc_feature (5)..(323): Homolog of NCBI NO: 10732785 NR Description: homocysteine S-methyltransferase-1 [Zea mays]
  misc_feature (1)..(322): Homolog of NCBI NO: 15230929 NR Description: homocysteine S-methyltransferase AtHMT-1
MKRQMLHDLIENAGGCAVTDGGFATQLEKHGASINDPLWSAIYLIKDPHLIKQVHLEYLEAGADILVTSSYQATLPGFSSKGLSIEEGESLLEKSVKLAVEARDGFWNSAIINPGNKYRRALVAASIGSYGSYLADGSEYSGCYGPDVNLKKLKDFHRRRLQVLVEAGPDLLAFETIPNKLEAQACVELLEEESVKIPSWICFTTVDGENAPSGESFKDCLEALNKSNKVDAVGINCAPPHLMENLICKFKQLTKKAIIVYPNSGEVWDGKAKKWLPSKCFHDDEFGFNATRWRDLGAKIIGGCCRTTPSTIQIISNALREKS

SEQ ID NO: 57512 - protein, 319 aa, Glycine max
  peptide (1)..(319): Ceres Seq. ID no. 15170597
  misc_feature (12)..(316): Pfam Name: Homocysteine S-methyltransferase Pfam Description: Homocysteine S-methyltransferase
  misc_feature (2)..(317): Homolog of NCBI NO: 10732791 NR Description: homocysteine S-methyltransferase-4 [Zea mays]
  misc_feature (6)..(317): Homolog of NCBI NO: 10732787 NR Description: homocysteine S-methyltransferase-2 [Zea mays]
  misc_feature (1)..(317): Homolog of NCBI NO: 10732789 NR Description: homocysteine S-methyltransferase-3 [Zea mays]
  misc_feature (1)..(318): Homolog of NCBI NO: 21593147 NR Description: putative selenocysteine methyltransferase
  misc_feature (2)..(315): Homolog of NCBI NO: 25453566 NR Description: homocysteine S-methyltransferase (EC 2.1.1.10)
  misc_feature (2)..(315): Homolog of NCBI NO: 15229396 NR Description: homocysteine S-methyltransferase AtHMT-2
  misc_feature (1)..(318): Homolog of NCBI NO: 18403505 NR Description: selenocysteine methyltransferase -related
  misc_feature (2)..(319): Homolog of NCBI NO: 22748320 NR Description: Putative homocysteine S-methyltransferase-1
  misc_feature (1)..(319): Homolog of NCBI NO: 10732785 NR Description: homocysteine S-methyltransferase-1 [Zea mays]
  misc_feature (1)..(318): Homolog of NCBI NO: 15230929 NR Description: homocysteine S-methyltransferase AtHMT-1
MLHDLIENAGGCAVTDGGFATQLEKHGASINDPLWSAIYLIKDPHLIKQVHLEYLEAGADILVTSSYQATLPGFSSKGLSIEEGESLLEKSVKLAVEARDGFWNSAIINPGNKYRRALVAASIGSYGSYLADGSEYSGCYGPDVNLKKLKDFHRRRLQVLVEAGPDLLAFETIPNKLEAQACVELLEEESVKIPSWICFTTVDGENAPSGESFKDCLEALNKSNKVDAVGINCAPPHLMENLICKFKQLTKKAIIVYPNSGEVWDGKAKKWLPSKCFHDDEFGFNATRWRDLGAKIIGGCCRTTPSTIQIISNALREKS

SEQ ID NO: 57513 - DNA, 1043 bp, Glycine max
  misc_feature (1)..(1043): Ceres Seq. ID no. 14306138
tctctgttagcactctcctctcgacgattccctgtgatctctctctctctttctctctctttctctctcagtcttctctcgctgtggttcagatttcagagcaggatccaaaagccttgcttggtcaagactcattcatgtctgttcctaatgaggaaaacttgtcgtcacattcccagctttcttctcattttttcttggatctccttgattccatcatagttgatgtagcatcagagtgtcacagagtagcaaggctggggcttgattctaatttggaagaagaagatgaagaattgaagctatcggcacaagccagggttagggtggctgatcctagtaacagtaatgaagcaaatggcaagtatgtggttgacatatttggacaaacccatcctcctgtggcaaatgaaatatttgattgcatgaattgtggtcgatccatcatgactgggaggtttgctccacatttggagaagtgcatgggaaagggtaggaaggcacgtctgaaagtgacaagaagcagcacagccgcgcagaaccggtattcacgaggcagtcctagtcctggttctacatattctccatattcaaattactctaccaatagcatgaatcggttggcaaatggaacctccacttttgcaggtgaggagcactcaaatgggacactggagtcatgaactagttcatgtgtaatggctggaatacaggatttctgtcataccttgaacttgtttcttcgccgggagatgtggctgaatttaattgtgtttgaaaataatatttcaaacattttggacctaaacataacaaccatcgttgcctacatcctcgaattgttgtctaccttaaaaaaaaaaaactttgctttttacagtgagttccattgtaattttattatgttttactcctagttccgttgtaattttattataattttactatctgttaacatatgtatattgtgtgcaactatgaactagtattgttcatggatgaaaagatgctcagggttgagatgaataatacacagacatttg

SEQ ID NO: 57514 - protein, 226 aa, Glycine max
  peptide (1)..(226): Ceres Seq. ID no. 14306139
  misc_feature (46)..(184): Homolog of NCBI NO: 26984622 NR Description: SI:dZ180G5.4 (novel protein) [Danio rerio]
  misc_feature (35)..(224): Homolog of NCBI NO: 8843778 NR Description: emb|CAB85555.1~gene_id:MZN1.2~similar to unknown
  misc_feature (51)..(224): Homolog of NCBI NO: 22327952 NR Description: expressed protein [Arabidopsis thaliana]
SVSTLLSTIPCDLSLSFSLFLSQSSLAVVQISEQDPKALLGQDSFMSVPNEENLSSHSQLSSHFFLDLLDSIIVDVASECHRVARLGLDSNLEEEDEELKLSAQARVRVADPSNSNEANGKYVVDIFGQTHPPVANEIFDCMNCGRSIMTGRFAPHLEKCMGKGRKARLKVTRSSTAAQNRYSRGSPSPGSTYSPYSNYSTNSMNRLANGTSTFAGEEHSNGTLES

SEQ ID NO: 57515 - protein, 181 aa, Glycine max
  peptide (1)..(181): Ceres Seq. ID no. 14306140
  misc_feature (1)..(139): Homolog of NCBI NO: 26984622 NR Description: SI:dZ180G5.4 (novel protein) [Danio rerio]
  misc_feature (1)..(179): Homolog of NCBI NO: 8843778 NR Description: emb|CAB85555.1~gene_id:MZN1.2~similar to unknown
  misc_feature (6)..(179): Homolog of NCBI NO: 22327952 NR Description: expressed protein [Arabidopsis thaliana]
MSVPNEENLSSHSQLSSHFFLDLLDSIIVDVASECHRVARLGLDSNLEEEDEELKLSAQARVRVADPSNSNEANGKYVVDIFGQTHPPVANEIFDCMNCGRSIMTGRFAPHLEKCMGKGRKARLKVTRSSTAAQNRYSRGSPSPGSTYSPYSNYSTNSMNRLANGTSTFAGEEHSNGTLES

SEQ ID NO: 57516 - DNA, 594 bp, Glycine max
  misc_feature (1)..(594): Ceres Seq. ID no. 15168472
aagtgaggatagaggctggggctgtggctgaggctgagttctgtaattgtgttttggctgtggacaatggctctgtcttctgggcttttcttgtgttcttcttcccgtgttctcccaccaccagaaacccacactttcatgaggaccaggccttcttctgctgccttgcgcaccatttccgttagctgttgcaccgtctctcagtcgtctaagccagcccgcaaaatccgtggtatcatgaaaccccgcaaagtctcccccgagatggaagacctcgtcggcgctcccgagatggctcgaacccaagtcctcaaacggatttgggcttacattaaggacaacaatcttcaggaccctacagacaagaggactataaattgcgatgagaagctgaagaaggtgtttgcagggaaagatcaagttgagatgctagagattgctcgcttgattagccctcacttccttaaaagtgaaagtgaaagttaagtttttgtatgaaggtcatgctttggtgtattgaacaattacatttggccttgagacatagtagcgtttagtttttgtggtactctgaaaacagaacgagccttgttg

SEQ ID NO: 57517 - protein, 139 aa, Glycine max
  peptide (1)..(139): Ceres Seq. ID no. 15168473
  misc_feature (57)..(133): Pfam Name: SWIB/MDM2 domain Pfam Description: SWIB/MDM2 domain
  misc_feature (49)..(139): Homolog of NCBI NO: 15222765 NR Description: hypothetical protein [Arabidopsis thaliana]
  misc_feature (45)..(135): Homolog of NCBI NO: 18396594 NR Description: expressed protein [Arabidopsis thaliana]
  misc_feature (9)..(135): Homolog of NCBI NO: 33667910 NR Description: SWIb domain-containing protein [Solanum chacoense]
  misc_feature (1)..(134): Homolog of NCBI NO: 14488372 NR Description: hypothetical protein [Oryza sativa (japonica
  misc_feature (1)..(133): Homolog of NCBI NO: 21553903 NR Description: unknown [Arabidopsis thaliana]
  misc_feature (1)..(133): Homolog of NCBI NO: 15235320 NR Description: expressed protein [Arabidopsis thaliana]
  misc_feature (1)..(133): Homolog of NCBI NO: 14423526 NR Description: putative protein [Arabidopsis thaliana]
  misc_feature (1)..(133): Homolog of NCBI NO: 21593713 NR Description: unknown [Arabidopsis thaliana]
  misc_feature (1)..(133): Homolog of NCBI NO: 18397658 NR Description: expressed protein [Arabidopsis thaliana]
  misc_feature (1)..(133): Homolog of NCBI NO: 19698859 NR Description: unknown protein [Arabidopsis thaliana]
MALSSGLFLCSSSRVLPPPETHTFMRTRPSSAALRTISVSCCTVSQSSKPARKIRGIMKPRKVSPEMEDLVGAPEMARTQVLKRIWAYIKDNNLQDPTDKRTINCDEKLKKVFAGKDQVEMLEIARLISPHFLKSESES

SEQ ID NO: 57518 - protein, 115 aa, Glycine max
  peptide (1)..(115): Ceres Seq. ID no. 15168474
  misc_feature (33)..(109): Pfam Name: SWIB/MDM2 domain Pfam Description: SWIB/MDM2 domain
  misc_feature (25)..(115): Homolog of NCBI NO: 15222765 NR Description: hypothetical protein [Arabidopsis thaliana]
  misc_feature (21)..(111): Homolog of NCBI NO: 18396594 NR Description: expressed protein [Arabidopsis thaliana]
  misc_feature (1)..(111): Homolog of NCBI NO: 33667910 NR Description: SWIb domain-containing protein [Solanum chacoense]
  misc_feature (1)..(110): Homolog of NCBI NO: 14488372 NR Description: hypothetical protein [Oryza sativa (japonica
  misc_feature (1)..(109): Homolog of NCBI NO: 21553903 NR Description: unknown [Arabidopsis thaliana]
  misc_feature (1)..(109): Homolog of NCBI NO: 15235320 NR Description: expressed protein [Arabidopsis thaliana]
  misc_feature (1)..(109): Homolog of NCBI NO: 14423526 NR Description: putative protein [Arabidopsis thaliana]
  misc_feature (1)..(109): Homolog of NCBI NO: 21593713 NR Description: unknown [Arabidopsis thaliana]
  misc_feature (1)..(109): Homolog of NCBI NO: 18397658 NR Description: expressed protein [Arabidopsis thaliana]
  misc_feature (1)..(109): Homolog of NCBI NO: 19698859 NR Description: unknown protein [Arabidopsis thaliana]
MRTRPSSAALRTISVSCCTVSQSSKPARKIRGIMKPRKVSPEMEDLVGAPEMARTQVLKRIWAYIKDNNLQDPTDKRTINCDEKLKKVFAGKDQVEMLEIARLISPHFLKSESES

SEQ ID NO: 57519 - protein, 82 aa, Glycine max
  peptide (1)..(82): Ceres Seq. ID no. 15168475
  misc_feature (1)..(76): Pfam Name: SWIB/MDM2 domain Pfam Description: SWIB/MDM2 domain
  misc_feature (1)..(82): Homolog of NCBI NO: 15222765 NR Description: hypothetical protein [Arabidopsis thaliana]
  misc_feature (1)..(78): Homolog of NCBI NO: 18396594 NR Description: expressed protein [Arabidopsis thaliana]
  misc_feature (1)..(78): Homolog of NCBI NO: 33667910 NR Description: SWIb domain-containing protein [Solanum chacoense]
  misc_feature (1)..(77): Homolog of NCBI NO: 14488372 NR Description: hypothetical protein [Oryza sativa (japonica
  misc_feature (1)..(76): Homolog of NCBI NO: 21553903 NR Description: unknown [Arabidopsis thaliana]
  misc_feature (1)..(76): Homolog of NCBI NO: 15235320 NR Description: expressed protein [Arabidopsis thaliana]
  misc_feature (1)..(76): Homolog of NCBI NO: 14423526 NR Description: putative protein [Arabidopsis thaliana]
  misc_feature (1)..(76): Homolog of NCBI NO: 21593713 NR Description: unknown [Arabidopsis thaliana]
  misc_feature (1)..(76): Homolog of NCBI NO: 18397658 NR Description: expressed protein [Arabidopsis thaliana]
  misc_feature (1)..(76): Homolog of NCBI NO: 19698859 NR Description: unknown protein [Arabidopsis thaliana]
MKPRKVSPEMEDLVGAPEMARTQVLKRIWAYIKDNNLQDPTDKRTINCDEKLKKVFAGKDQVEMLEIARLISPHFLKSESES

SEQ ID NO: 57520 - DNA, 749 bp, Glycine max
  misc_feature (1)..(749): Ceres Seq. ID no. 15173807
aaaaaaaatatttgagaggatcgtgagagggacggtagcagagattccgtgagttgcaaaaatgaaaacaattctttctgcagagaccatgaacatcccggacggcgtgagcgtcaaggttaatgccaaggtcatcgaagttgagggcccccgcggaaaattggtgcgagacttcaagcacttgaatctcgattttcagctcatcactgacgaaaacggtaaaaggaagctgaaggtggaggcctggttcggttctcggaaaacatccgccgccattcgcaccgccctgagccacgtggagaatctgatcaccggcgtcaccaagggctaccgctacaaaatgaggttcgtttatgcccattttcccatcaacgcaagcatcggcaacgacaacaagtctattgagatcagaaatttccttggcgaaaagaaggtgagaaaagtggaccttcttaacggtgtttccgttgttcgatctgaaaaagttaaagatgaattgattttggatgggaacgacattgaacttgtttctaggtcctgtgctctcattaaccagaaatgccatgttaaaaagaaggatatcaggaaatttctcgatggcatttatgttagtgagaagggaacaatactggaagagtagatgttgaaaacaacaagcaccttgattgtttagtttgggttgcttttttgttaactgtttgagattggattttacaattttgtgttgtcaaacttttccttttgcgaat

SEQ ID NO: 57521 - protein, 192 aa, Glycine max
  peptide (1)..(192): Ceres Seq. ID no. 15173808
  misc_feature (101)..(180): Pfam Name: Ribosomal protein L6 Pfam Description: Ribosomal protein L6
  misc_feature (1)..(191): Homolog of NCBI NO: 37779100 NR Description: ribosomal protein L9 [Pagrus major]
  misc_feature (33)..(165): Homolog of NCBI NO: 12322579 NR Description: ribosomal protein L9, 5' partial [Arabidopsis
  misc_feature (1)..(192): Homolog of NCBI NO: 2129720 NR Description: ribosomal protein L9, cytosolic - Arabidopsis
  misc_feature (1)..(192): Homolog of NCBI NO: 6174959 NR Description: 60S RIBOSOMAL PROTEIN L9
  misc_feature (1)..(192): Homolog of NCBI NO: 33087067 NR Description: ribosomal L9-like protein [Oryza sativa (japonica
  misc_feature (1)..(192): Homolog of NCBI NO: 15235114 NR Description: 60S ribosomal protein L9 (RPL90D) [Arabidopsis
  misc_feature (1)..(192): Homolog of NCBI NO: 21554945 NR Description: ribosomal protein L9, putative [Arabidopsis
  misc_feature (1)..(192): Homolog of NCBI NO: 18398753 NR Description: 60S ribosomal protein L9 (RPL90B) [Arabidopsis
  misc_feature (1)..(192): Homolog of NCBI NO: 6015604 NR Description: ribosomal protein L9 [Pisum sativum]
  misc_feature (1)..(192): Homolog of NCBI NO: 266945 NR Description: 60S ribosomal protein L9 (Gibberellin-regulated
MKTILSAETMNIPDGVSVKVNAKVIEVEGPRGKLVRDFKHLNLDFQLITDENGKRKLKVEAWFGSRKTSAAIRTALSHVENLITGVTKGYRYKMRFVYAHFPINASIGNDNKSIEIRNFLGEKKVRKVDLLNGVSVVRSEKVKDELILDGNDIELVSRSCALINQKCHVKKKDIRKFLDGIYVSEKGTILEE

SEQ ID NO: 57522 - protein, 183 aa, Glycine max
  peptide (1)..(183): Ceres Seq. ID no. 15173809
  misc_feature (92)..(171): Pfam Name: Ribosomal protein L6 Pfam Description: Ribosomal protein L6
  misc_feature (1)..(182): Homolog of NCBI NO: 37779100 NR Description: ribosomal protein L9 [Pagrus major]
  misc_feature (24)..(156): Homolog of NCBI NO: 12322579 NR Description: ribosomal protein L9, 5' partial [Arabidopsis
  misc_feature (1)..(183): Homolog of NCBI NO: 2129720 NR Description: ribosomal protein L9, cytosolic - Arabidopsis
  misc_feature (1)..(183): Homolog of NCBI NO: 6174959 NR Description: 60S RIBOSOMAL PROTEIN L9
  misc_feature (1)..(183): Homolog of NCBI NO: 33087067 NR Description: ribosomal L9-like protein [Oryza sativa (japonica
  misc_feature (1)..(183): Homolog of NCBI NO: 15235114 NR Description: 60S ribosomal protein L9 (RPL90D) [Arabidopsis
  misc_feature (1)..(183): Homolog of NCBI NO: 21554945 NR Description: ribosomal protein L9, putative [Arabidopsis
  misc_feature (1)..(183): Homolog of NCBI NO: 18398753 NR Description: 60S ribosomal protein L9 (RPL90B) [Arabidopsis
  misc_feature (1)..(183): Homolog of NCBI NO: 6015604 NR Description: ribosomal protein L9 [Pisum sativum]
  misc_feature (1)..(183): Homolog of NCBI NO: 266945 NR Description: 60S ribosomal protein L9 (Gibberellin-regulated
MNIPDGVSVKVNAKVIEVEGPRGKLVRDFKHLNLDFQLITDENGKRKLKVEAWFGSRKTSAAIRTALSHVENLITGVTKGYRYKMRFVYAHFPINASIGNDNKSIEIRNFLGEKKVRKVDLLNGVSVVRSEKVKDELILDGNDIELVSRSCALINQKCHVKKKDIRKFLDGIYVSEKGTILEE

SEQ ID NO: 57523 - protein, 99 aa, Glycine max
  peptide (1)..(99): Ceres Seq. ID no. 15173810
  misc_feature (8)..(87): Pfam Name: Ribosomal protein L6 Pfam Description: Ribosomal protein L6
  misc_feature (1)..(98): Homolog of NCBI NO: 37779100 NR Description: ribosomal protein L9 [Pagrus major]
  misc_feature (1)..(72): Homolog of NCBI NO: 12322579 NR Description: ribosomal protein L9, 5' partial [Arabidopsis
  misc_feature (1)..(99): Homolog of NCBI NO: 2129720 NR Description: ribosomal protein L9, cytosolic - Arabidopsis
  misc_feature (1)..(99): Homolog of NCBI NO: 6174959 NR Description: 60S RIBOSOMAL PROTEIN L9
  misc_feature (1)..(99): Homolog of NCBI NO: 33087067 NR Description: ribosomal L9-like protein [Oryza sativa (japonica
  misc_feature (1)..(99): Homolog of NCBI NO: 15235114 NR Description: 60S ribosomal protein L9 (RPL90D) [Arabidopsis
  misc_feature (1)..(99): Homolog of NCBI NO: 21554945 NR Description: ribosomal protein L9, putative [Arabidopsis
  misc_feature (1)..(99): Homolog of NCBI NO: 18398753 NR Description: 60S ribosomal protein L9 (RPL90B) [Arabidopsis
  misc_feature (1)..(99): Homolog of NCBI NO: 6015604 NR Description: ribosomal protein L9 [Pisum sativum]
  misc_feature (1)..(99): Homolog of NCBI NO: 266945 NR Description: 60S ribosomal protein L9 (Gibberellin-regulated
MRFVYAHFPINASIGNDNKSIEIRNFLGEKKVRKVDLLNGVSVVRSEKVKDELILDGNDIELVSRSCALINQKCHVKKKDIRKFLDGIYVSEKGTILEE

SEQ ID NO: 57524 - DNA, 1129 bp, Glycine max
  misc_feature (1)..(1129): Ceres Seq. ID no. 14306062
tccactccctcttcttctcttcttcccccaacaaactaaaccaaaccataccattaagaaacaacacatctatctcagtccccaaaccaagaaaccctaaattaaattcatgtgctcctccaggtctaccagtgctgcaccaacaagaccttgttacttggaacaaggccacggcttggcttccttaaaacacatggatgcgtgtcataatcgtgccaacaactttgtctctaggtccatgaccatgggttacggcacttcctaccacagaactagtttaaggaacaacaacaacaacaacaacaacaacgtttctgtttcttcaccaagatctgcgagattctacgacgccagattcgaagatcaacaccacccccacttcctctccgcttgtttcctctgcaaaaaatctctcggggacaatagagacatcttcatgtatagaggggacacaccgttttgtagcgaagagtgcaggcaagagcagattgagatagacgaagccaaagagaagaataggaacctttcttcatcgatgaaagctttaaggaacaaggagcagagaaataataataataaatccacgtcgccaaacaaggcgcaacaagactactcgttccgtacgggggcagttgcggcggcgtagggtacaagtacaacgtaggattcctcgagagaggaaccaacaaatgaacgaacggaactgagggcagtgttcccggaaaaggaaagaaaacatttttagaaaagaagaaaaaaaaagtgtgactgaaaaggaaagtaaacaaagggaagttaagttgcgagctttggtttacttctcttcctttttttctttctttctttccacgaacaaagggtctcaaagagaaaggggaattttgtgagctgtgaatggtatacgtgtggcaaagtgtgtgtgcttacaacagtgggagattctctctgccaaatgactcaaaattttcgggtttgctttttttttttttctttttcttttattttttatggggatcaaatttggttttgtttccttttgtatatcaccctacctcgttgagttatagtggttgtgctaatagtttcagttttcaaaaaacggaaactgaatacaatggaaattttctcc

SEQ ID NO: 57525 - protein, 178 aa, Glycine max
  peptide (1)..(178): Ceres Seq. ID no. 14306063
  misc_feature (75)..(134): Pfam Name: Protein of unknown function (DUF581) Pfam Description: Protein of unknown function (DUF581)
  misc_feature (68)..(138): Homolog of NCBI NO: 21593931 NR Description: unknown [Arabidopsis thaliana]
  misc_feature (76)..(161): Homolog of NCBI NO: 38344285 NR Description: OSJNBa0013K16.17 [Oryza sativa (japonica
  misc_feature (75)..(156): Homolog of NCBI NO: 38344282 NR Description: OSJNBa0013K16.14 [Oryza sativa (japonica
  misc_feature (76)..(178): Homolog of NCBI NO: 18406598 NR Description: senescence-associated protein -related
  misc_feature (90)..(165): Homolog of NCBI NO: 38344280 NR Description: OSJNBa0013K16.12 [Oryza sativa (japonica
  misc_feature (87)..(152): Homolog of NCBI NO: 38344283 NR Description: OSJNBa0013K16.15 [Oryza sativa (japonica
  misc_feature (79)..(178): Homolog of NCBI NO: 7485163 NR Description: hypothetical protein - Arabidopsis thaliana
  misc_feature (33)..(178): Homolog of NCBI NO: 15238001 NR Description: senescence-associated protein -related
  misc_feature (13)..(178): Homolog of NCBI NO: 18414940 NR Description: senescence-associated protein -related
  misc_feature (13)..(178): Homolog of NCBI NO: 21594214 NR Description: unknown [Arabidopsis thaliana]
MCSSRSTSAAPTRPCYLEQGHGLASLKHMDACHNRANNFVSRSMTMGYGTSYHRTSLRNNNNNNNNNVSVSSPRSARFYDARFEDQHHPHFLSACFLCKKSLGDNRDIFMYRGDTPFCSEECRQEQIEIDEAKEKNRNLSSSMKALRNKEQRNNNNKSTSPNKAQQDYSFRTGAVAAA

SEQ ID NO: 57526 - protein, 150 aa, Glycine max
  peptide (1)..(150): Ceres Seq. ID no. 14306064
  misc_feature (47)..(106): Pfam Name: Protein of unknown function (DUF581) Pfam Description: Protein of unknown function (DUF581)
  misc_feature (40)..(110): Homolog of NCBI NO: 21593931 NR Description: unknown [Arabidopsis thaliana]
  misc_feature (48)..(133): Homolog of NCBI NO: 38344285 NR Description: OSJNBa0013K16.17 [Oryza sativa (japonica
  misc_feature (47)..(128): Homolog of NCBI NO: 38344282 NR Description: OSJNBa0013K16.14 [Oryza sativa (japonica
  misc_feature (48)..(150): Homolog of NCBI NO: 18406598 NR Description: senescence-associated protein -related
  misc_feature (62)..(137): Homolog of NCBI NO: 38344280 NR Description: OSJNBa0013K16.12 [Oryza sativa (japonica
  misc_feature (59)..(124): Homolog of NCBI NO: 38344283 NR Description: OSJNBa0013K16.15 [Oryza sativa (japonica
  misc_feature (51)..(150): Homolog of NCBI NO: 7485163 NR Description: hypothetical protein - Arabidopsis thaliana
  misc_feature (5)..(150): Homolog of NCBI NO: 15238001 NR Description: senescence-associated protein -related
  misc_feature (1)..(150): Homolog of NCBI NO: 18414940 NR Description: senescence-associated protein -related
  misc_feature (1)..(150): Homolog of NCBI NO: 21594214 NR Description: unknown [Arabidopsis thaliana]
MDACHNRANNFVSRSMTMGYGTSYHRTSLRNNNNNNNNNVSVSSPRSARFYDARFEDQHHPHFLSACFLCKKSLGDNRDIFMYRGDTPFCSEECRQEQIEIDEAKEKNRNLSSSMKALRNKEQRNNNNKSTSPNKAQQDYSFRTGAVAAA

SEQ ID NO: 57527 - protein, 135 aa, Glycine max
  peptide (1)..(135): Ceres Seq. ID no. 14306065
  misc_feature (32)..(91): Pfam Name: Protein of unknown function (DUF581) Pfam Description: Protein of unknown function (DUF581)
  misc_feature (25)..(95): Homolog of NCBI NO: 21593931 NR Description: unknown [Arabidopsis thaliana]
  misc_feature (33)..(118): Homolog of NCBI NO: 38344285 NR Description: OSJNBa0013K16.17 [Oryza sativa (japonica
  misc_feature (32)..(113): Homolog of NCBI NO: 38344282 NR Description: OSJNBa0013K16.14 [Oryza sativa (japonica
  misc_feature (33)..(135): Homolog of NCBI NO: 18406598 NR Description: senescence-associated protein -related
  misc_feature (47)..(122): Homolog of NCBI NO: 38344280 NR Description: OSJNBa0013K16.12 [Oryza sativa (japonica
  misc_feature (44)..(109): Homolog of NCBI NO: 38344283 NR Description: OSJNBa0013K16.15 [Oryza sativa (japonica
  misc_feature (36)..(135): Homolog of NCBI NO: 7485163 NR Description: hypothetical protein - Arabidopsis thaliana
  misc_feature (1)..(135): Homolog of NCBI NO: 15238001 NR Description: senescence-associated protein -related
  misc_feature (1)..(135): Homolog of NCBI NO: 18414940 NR Description: senescence-associated protein -related
  misc_feature (1)..(135): Homolog of NCBI NO: 21594214 NR Description: unknown [Arabidopsis thaliana]
MTMGYGTSYHRTSLRNNNNNNNNNVSVSSPRSARFYDARFEDQHHPHFLSACFLCKKSLGDNRDIFMYRGDTPFCSEECRQEQIEIDEAKEKNRNLSSSMKALRNKEQRNNNNKSTSPNKAQQDYSFRTGAVAAA

SEQ ID NO: 57528 - DNA, 931 bp, Glycine max
  misc_feature (1)..(931): Ceres Seq. ID no. 13594252
ctctttcctcttgtgcgtgcagtagtgactagtgagcaaaaacgaaagaaagagccaccgtaaccgtaatcgcactgttagtaatatcaattctatagtttgttactgacgctgcacccaccgctaaactaaacttccccaatcaccatgggagattctaaacatatttccgttcaccgtcttctcggcgaaggcttaattgctgatgtggtgctgtggaagaattggcgcggagcggttgcggtgcttgtatctgccaccgcattgtggtacctcttcgagcgagccggttacaatttcttgtccttcgtcgccaatgtagtgttgcttcttgttgttattctctttttctgggccaaagctgctaaccttctcaatagacctcttcctcctctccccgatctggagatctcagaggaaactattgccagggttgctgatgcactgcaaatttggatgaatcgggctttgtccgttgcacatgacatagcaattgagaggaatttgctgctttgcctccaggttgttggtgtattgtgggtaatatcttacattggtagtttgttcaactttttgactttgatctattttggtgttcttctttgcttgtctcttcctgtgttgtatgacaagtaccaggaccaagttgatgacaggctgtgtgtgattcatgggattattcagacacagtatacaaaagttcacagtactgttttaagcaagattccaaaactctcaaacaaagaaaagaaggtgcagtaggaacatggtaagagcattctataatttggcatgtatttgatgcaaatagttactcaaaagcatattatcttacttatgtttgtagccaacttgtctattgaatgattaaatgtccatgattctactgttaatagcaatgtaacttattttagttctgcctgtggaagag

SEQ ID NO: 57529 - protein, 204 aa, Glycine max
  peptide (1)..(204): Ceres Seq. ID no. 13594253
  misc_feature (9)..(202): Homolog of NCBI NO: 34904202 NR Description: P0492F05.25 [Oryza sativa (japonica
  misc_feature (9)..(201): Homolog of NCBI NO: 18406991 NR Description: expressed protein [Arabidopsis thaliana]
  misc_feature (9)..(195): Homolog of NCBI NO: 15222616 NR Description: expressed protein [Arabidopsis thaliana]
  misc_feature (9)..(201): Homolog of NCBI NO: 15236556 NR Description: expressed protein [Arabidopsis thaliana]
  misc_feature (8)..(202): Homolog of NCBI NO: 34897094 NR Description: unknown protein [Oryza sativa (japonica
  misc_feature (23)..(204): Homolog of NCBI NO: 25411624 NR Description: hypothetical protein At2g15280 [imported] -
  misc_feature (8)..(204): Homolog of NCBI NO: 30679374 NR Description: expressed protein [Arabidopsis thaliana]
  misc_feature (1)..(204): Homolog of NCBI NO: 21593206 NR Description: unknown [Arabidopsis thaliana]
  misc_feature (1)..(204): Homolog of NCBI NO: 18402246 NR Description: expressed protein [Arabidopsis thaliana]
  misc_feature (1)..(204): Homolog of NCBI NO: 38345298 NR Description: OSJNBa0043A12.26 [Oryza sativa (japonica
MGDSKHISVHRLLGEGLIADVVLWKNWRGAVAVLVSATALWYLFERAGYNFLSFVANVVLLLVVILFFWAKAANLLNRPLPPLPDLEISEETIARVADALQIWMNRALSVAHDIAIERNLLLCLQVVGVLWVISYIGSLFNFLTLIYFGVLLCLSLPVLYDKYQDQVDDRLCVIHGIIQTQYTKVHSTVLSKIPKLSNKEKKVQ

SEQ ID NO: 57530 - DNA, 870 bp, Glycine max
  misc_feature (1)..(870): Ceres Seq. ID no. 12582457
accctttattctcttacgtctccaactaatcatacagatcgataatcataatcatatctatagctaattaacttaattattttcatccctctactcttcttctctcctctaaactctcttttccattcttgcttcctttgtgggttgtttgagttttctttccttcaatttaattgaaagatggcttgcttggtatctcgctcgggaagggaattgcagaggtacaacaacatgggtggccggcaagttgttgggtgcataccttatagatataaacaagacatagagggtaaaatgagcaacgaattggaagtactagtggttagttcacagaaaggtcaaggattgatgttccctaagggaggatgggaacttgatgaatccgtagaagaagcagcttatagggaatcccttgaagaagcaggagtaatgggaatgattgagcgtgaactggggcaatggaatttcattagcaaaagatatggcatatactatgaaggacacatgttccccatgtttgtcaaggaacaacttgatatatggcccgagaaaaatctacggagaagaatatggatgactgttgctgaagctagagaagtttgtcagcattggtggatgaaggaagcattagatatactggttcaaagaatcgtgtcttcacaacaacgaaaagaagatttatacagcatcggatgattctctaagttttaaaacaatttagtctaggtgggcctaggtcagattgccaagattttgaatcttcaaacattgagagttgttatacagaggattgatttagggagaggaacagaattgtagataaatatggaattgcaattcaatttaatttacacacttatagaacttacg

SEQ ID NO: 57531 - protein, 171 aa, Glycine max
  peptide (1)..(171): Ceres Seq. ID no. 12582458
  misc_feature (21)..(156): Pfam Name: NUDIX domain Pfam Description: NUDIX domain
  misc_feature (1)..(163): Homolog of NCBI NO: 25518008 NR Description: F13K23.14 protein - Arabidopsis thaliana
  misc_feature (1)..(163): Homolog of NCBI NO: 18391450 NR Description: expressed protein
  misc_feature (1)..(170): Homolog of NCBI NO: 15231598 NR Description: MutT-like protein; protein id: At3g26690.1
  misc_feature (1)..(150): Homolog of NCBI NO: 18399682 NR Description: expressed protein; protein id: At3g12600.1
  misc_feature (1)..(161): Homolog of NCBI NO: 25367539 NR Description: unknown protein [imported] - Arabidopsis thaliana
  misc_feature (1)..(161): Homolog of NCBI NO: 22330598 NR Description: unknown protein
  misc_feature (1)..(154): Homolog of NCBI NO: 15221055 NR Description: unknown protein; protein id: At1g18300.1
  misc_feature (1)..(166): Homolog of NCBI NO: 15223919 NR Description: hypothetical protein; protein id: At1g14860.1
  misc_feature (1)..(170): Homolog of NCBI NO: 21595695 NR Description: unknown [Arabidopsis thaliana]
  misc_feature (1)..(170): Homolog of NCBI NO: 18379275 NR Description: expressed protein
MACLVSRSGRELQRYNNMGGRQVVGCIPYRYKQDIEGKMSNELEVLVVSSQKGQGLMFPKGGWELDESVEEAAYRESLEEAGVMGMIERELGQWNFISKRYGIYYEGHMFPMFVKEQLDIWPEKNLRRRIWMTVAEAREVCQHWWMKEALDILVQRIVSSQQRKEDLYSIG

SEQ ID NO: 57532 - protein, 154 aa, Glycine max
  peptide (1)..(154): Ceres Seq. ID no. 12582459
  misc_feature (4)..(139): Pfam Name: NUDIX domain Pfam Description: NUDIX domain
  misc_feature (1)..(146): Homolog of NCBI NO: 25518008 NR Description: F13K23.14 protein - Arabidopsis thaliana
  misc_feature (1)..(146): Homolog of NCBI NO: 18391450 NR Description: expressed protein
  misc_feature (1)..(153): Homolog of NCBI NO: 15231598 NR Description: MutT-like protein; protein id: At3g26690.1
  misc_feature (1)..(133): Homolog of NCBI NO: 18399682 NR Description: expressed protein; protein id: At3g12600.1
  misc_feature (1)..(144): Homolog of NCBI NO: 25367539 NR Description: unknown protein [imported] - Arabidopsis thaliana
  misc_feature (1)..(144): Homolog of NCBI NO: 22330598 NR Description: unknown protein
  misc_feature (1)..(137): Homolog of NCBI NO: 15221055 NR Description: unknown protein; protein id: At1g18300.1
  misc_feature (1)..(149): Homolog of NCBI NO: 15223919 NR Description: hypothetical protein; protein id: At1g14860.1
  misc_feature (1)..(153): Homolog of NCBI NO: 21595695 NR Description: unknown [Arabidopsis thaliana]
  misc_feature (1)..(153): Homolog of NCBI NO: 18379275 NR Description: expressed protein
MGGRQVVGCIPYRYKQDIEGKMSNELEVLVVSSQKGQGLMFPKGGWELDESVEEAAYRESLEEAGVMGMIERELGQWNFISKRYGIYYEGHMFPMFVKEQLDIWPEKNLRRRIWMTVAEAREVCQHWWMKEALDILVQRIVSSQQRKEDLYSIG

SEQ ID NO: 57533 - protein, 133 aa, Glycine max
  peptide (1)..(133): Ceres Seq. ID no. 12582460
  misc_feature (1)..(118): Pfam Name: NUDIX domain Pfam Description: NUDIX domain
  misc_feature (1)..(125): Homolog of NCBI NO: 25518008 NR Description: F13K23.14 protein - Arabidopsis thaliana
  misc_feature (1)..(125): Homolog of NCBI NO: 18391450 NR Description: expressed protein
  misc_feature (1)..(132): Homolog of NCBI NO: 15231598 NR Description: MutT-like protein; protein id: At3g26690.1
  misc_feature (1)..(112): Homolog of NCBI NO: 18399682 NR Description: expressed protein; protein id: At3g12600.1
  misc_feature (1)..(123): Homolog of NCBI NO: 25367539 NR Description: unknown protein [imported] - Arabidopsis thaliana
  misc_feature (1)..(123): Homolog of NCBI NO: 22330598 NR Description: unknown protein
  misc_feature (1)..(116): Homolog of NCBI NO: 15221055 NR Description: unknown protein; protein id: At1g18300.1
  misc_feature (1)..(128): Homolog of NCBI NO: 15223919 NR Description: hypothetical protein; protein id: At1g14860.1
  misc_feature (1)..(132): Homolog of NCBI NO: 21595695 NR Description: unknown [Arabidopsis thaliana]
  misc_feature (1)..(132): Homolog of NCBI NO: 18379275 NR Description: expressed protein
MSNELEVLVVSSQKGQGLMFPKGGWELDESVEEAAYRESLEEAGVMGMIERELGQWNFISKRYGIYYEGHMFPMFVKEQLDIWPEKNLRRRIWMTVAEAREVCQHWWMKEALDILVQRIVSSQQRKEDLYSIG

SEQ ID NO: 57534 - DNA, 932 bp, Glycine max
  misc_feature (1)..(932): Ceres Seq. ID no. 13594254
aacttattcagccaacatagtaaggtgcaacagatagtaaccaagtgaagattccattcaagatgaaactctttgctcactttttctttatgttgttgttcttggtggccttttccaacatccaagtttgtttgggggactgtgataatcttcaggacacttgtccagcagttccacccaataagcagaccatattcatcaatggtcttcaatgcaaaaacccagttaatgtaacagctcaagatttcaggaccacagaactaagcaaaactggccctagagacatttttggtgcatctttgaaaattgtgagtgctgctgagttcattggcctcaatactcttggcctctccattggaagaactgaccttgatgggaatggcctggtgaacttccactatcatcctagggctactgagataatctatgtcaccaaaggggtgttgttggctggttttgttgacaccaaaaaccagtatttccagaagtttcttaaagtaggtgatgtctttgtgttccccaaggctttgttccacttctttctaaatactgattttgaagaagccactgttttctcagtgtacaacagccagaatcctggctttgtgtcccttagtcctacaacttttgacacaacattggagtcattggacaagatcaagaagagactcatctcactctctgcctctgaagctcaagctcaagctcaagatgtcaacagtttcatctctccagaattggaaaccatttacagttagccatttcaaattgcgtcaaattttgttatttacagcatttatttttcaaatatatagcgcttatccaaaaaagcgctgtatatattctccataacagcacttcaggcagtacatatatagcatttttttaaggagaagcgctatatattctggtatatatacagcacctgtttg

SEQ ID NO: 57535 - protein, 231 aa, Glycine max
  peptide (1)..(231): Ceres Seq. ID no. 13594255
  misc_feature (65)..(184): Pfam Name: Cupin Pfam Description: Cupin
  misc_feature (10)..(199): Homolog of NCBI NO: 15217561 NR Description: germin-like protein (GLP4) (GLP5) [Arabidopsis
  misc_feature (10)..(192): Homolog of NCBI NO: 25044823 NR Description: germin-like protein [Ananas comosus]
  misc_feature (8)..(206): Homolog of NCBI NO: 38637079 NR Description: putative germin A [Oryza sativa (japonica
  misc_feature (7)..(212): Homolog of NCBI NO: 15228673 NR Description: germin-like protein (GLP10) [Arabidopsis
  misc_feature (26)..(185): Homolog of NCBI NO: 22329473 NR Description: germin-like protein (GLP7) [Arabidopsis thaliana]
  misc_feature (9)..(210): Homolog of NCBI NO: 7447346 NR Description: germin-like protein - Monterey pine
  misc_feature (1)..(212): Homolog of NCBI NO: 18203442 NR Description: Rhicadhesin receptor precursor (Germin-like
  misc_feature (10)..(210): Homolog of NCBI NO: 2745849 NR Description: germin-like protein; PcGER1 [Pinus caribaea]
  misc_feature (9)..(210): Homolog of NCBI NO: 19071771 NR Description: germin-like protein [Pinus sylvestris]
  misc_feature (7)..(205): Homolog of NCBI NO: 15240338 NR Description: germin-like protein family [Arabidopsis thaliana]
MKLFAHFFFMLLFLVAFSNIQVCLGDCDNLQDTCPAVPPNKQTIFINGLQCKNPVNVTAQDFRTTELSKTGPRDIFGASLKIVSAAEFIGLNTLGLSIGRTDLDGNGLVNFHYHPRATEIIYVTKGVLLAGFVDTKNQYFQKFLKVGDVFVFPKALFHFFLNTDFEEATVFSVYNSQNPGFVSLSPTTFDTTLESLDKIKKRLISLSASEAQAQAQDVNSFISPELETIYS

SEQ ID NO: 57536 - protein, 222 aa, Glycine max
  peptide (1)..(222): Ceres Seq. ID no. 13594256
  misc_feature (56)..(175): Pfam Name: Cupin Pfam Description: Cupin
  misc_feature (1)..(190): Homolog of NCBI NO: 15217561 NR Description: germin-like protein (GLP4) (GLP5) [Arabidopsis
  misc_feature (1)..(183): Homolog of NCBI NO: 25044823 NR Description: germin-like protein [Ananas comosus]
  misc_feature (1)..(197): Homolog of NCBI NO: 38637079 NR Description: putative germin A [Oryza sativa (japonica
  misc_feature (1)..(203): Homolog of NCBI NO: 15228673 NR Description: germin-like protein (GLP10) [Arabidopsis
  misc_feature (17)..(176): Homolog of NCBI NO: 22329473 NR Description: germin-like protein (GLP7) [Arabidopsis thaliana]
  misc_feature (1)..(201): Homolog of NCBI NO: 7447346 NR Description: germin-like protein - Monterey pine
  misc_feature (1)..(203): Homolog of NCBI NO: 18203442 NR Description: Rhicadhesin receptor precursor (Germin-like
  misc_feature (1)..(201): Homolog of NCBI NO: 2745849 NR Description: germin-like protein; PcGER1 [Pinus caribaea]
  misc_feature (1)..(201): Homolog of NCBI NO: 19071771 NR Description: germin-like protein [Pinus sylvestris]
  misc_feature (1)..(196): Homolog of NCBI NO: 15240338 NR Description: germin-like protein family [Arabidopsis thaliana]
MLLFLVAFSNIQVCLGDCDNLQDTCPAVPPNKQTIFINGLQCKNPVNVTAQDFRTTELSKTGPRDIFGASLKIVSAAEFIGLNTLGLSIGRTDLDGNGLVNFHYHPRATEIIYVTKGVLLAGFVDTKNQYFQKFLKVGDVFVFPKALFHFFLNTDFEEATVFSVYNSQNPGFVSLSPTTFDTTLESLDKIKKRLISLSASEAQAQAQDVNSFISPELETIYS

SEQ ID NO: 57537 - DNA, 830 bp, Glycine max
  misc_feature (1)..(830): Ceres Seq. ID no. 15173757
attctgaaagagaagatagggagggtgggtggtttggtttggtgcaaatcaatggattccttagaagacagcggctattgggattttctcgattactctttcattgatcaagcgccccctgatttcctttggtccaataatactattagtgtgaacaccgaagttgacattccaggtgatgctgctgcgtgtcaagagaacaccaagaagaggggacatgctgattcaagctgccaggtgggatctaaagcttgccgtgagaagttgcggagggagagactcaatgaaaggttctgtgacttgagctctgttttggagccagggagacctgtgagaacagataaaccagctatacttgatgatgctatcagagtcttgagtcaacttaaaactgaagctcaggagctcaaaaaaacaaatgaaaaattactagaggaaataaaatgtttaaaggcagagaaaaatgaacttcgggaagagaaacttgttctgaaagcagataaggaaaggattgagaagcagttgaaggccttacccgttgcaccagcagggtatatgactccacctgtagctgctgctgcatatcaagcaggggttaacaagatggctctttatccaaactatggctacatcccaatgtggcaatatcttcctcaatctgtcagagacacatctcatgatcatgagctcaggcctcctgctgcatagttggttccttccattgttactctttggataattatttcacaacattggcgaagtattgacatgtaaatattgtcatccttcgatttttttttataataaaaatgagaaataattttgataat

SEQ ID NO: 57538 - protein, 235 aa, Glycine max
  peptide (1)..(235): Ceres Seq. ID no. 15173758
  misc_feature (81)..(130): Pfam Name: Helix-loop-helix DNA-binding domain Pfam Description: Helix-loop-helix DNA-binding domain
  misc_feature (45)..(235): Homolog of NCBI NO: 29367409 NR Description: helix-loop-helix-like protein
  misc_feature (27)..(235): Homolog of NCBI NO: 38636768 NR Description: helix-loop-helix-like protein
  misc_feature (65)..(235): Homolog of NCBI NO: 32352190 NR Description: hypothetical protein [Oryza sativa (japonica
  misc_feature (27)..(235): Homolog of NCBI NO: 15223710 NR Description: bHLH protein [Arabidopsis thaliana]
  misc_feature (31)..(235): Homolog of NCBI NO: 21592325 NR Description: bHLH transcription factor, putative [Arabidopsis
  misc_feature (31)..(235): Homolog of NCBI NO: 15239706 NR Description: bHLH protein [Arabidopsis thaliana]
  misc_feature (65)..(235): Homolog of NCBI NO: 22331274 NR Description: bHLH protein [Arabidopsis thaliana]
  misc_feature (65)..(235): Homolog of NCBI NO: 20127030 NR Description: putative bHLH transcription factor [Arabidopsis
  misc_feature (68)..(235): Homolog of NCBI NO: 30682847 NR Description: bHLH protein [Arabidopsis thaliana]
  misc_feature (68)..(235): Homolog of NCBI NO: 18414212 NR Description: bHLH protein [Arabidopsis thaliana]
ILKEKIGRVGGLVWCKSMDSLEDSGYWDFLDYSFIDQAPPDFLWSNNTISVNTEVDIPGDAAACQENTKKRGHADSSCQVGSKACREKLRRERLNERFCDLSSVLEPGRPVRTDKPAILDDAIRVLSQLKTEAQELKKTNEKLLEEIKCLKAEKNELREEKLVLKADKERIEKQLKALPVAPAGYMTPPVAAAAYQAGVNKMALYPNYGYIPMWQYLPQSVRDTSHDHELRPPAA

SEQ ID NO: 57539 - protein, 218 aa, Glycine max
  peptide (1)..(218): Ceres Seq. ID no. 15173759
  misc_feature (64)..(113): Pfam Name: Helix-loop-helix DNA-binding domain Pfam Description: Helix-loop-helix DNA-binding domain
  misc_feature (28)..(218): Homolog of NCBI NO: 29367409 NR Description: helix-loop-helix-like protein
  misc_feature (10)..(218): Homolog of NCBI NO: 38636768 NR Description: helix-loop-helix-like protein
  misc_feature (48)..(218): Homolog of NCBI NO: 32352190 NR Description: hypothetical protein [Oryza sativa (japonica
  misc_feature (10)..(218): Homolog of NCBI NO: 15223710 NR Description: bHLH protein [Arabidopsis thaliana]
  misc_feature (14)..(218): Homolog of NCBI NO: 21592325 NR Description: bHLH transcription factor, putative [Arabidopsis
  misc_feature (14)..(218): Homolog of NCBI NO: 15239706 NR Description: bHLH protein [Arabidopsis thaliana]
  misc_feature (48)..(218): Homolog of NCBI NO: 22331274 NR Description: bHLH protein [Arabidopsis thaliana]
  misc_feature (48)..(218): Homolog of NCBI NO: 20127030 NR Description: putative bHLH transcription factor [Arabidopsis
  misc_feature (51)..(218): Homolog of NCBI NO: 30682847 NR Description: bHLH protein [Arabidopsis thaliana]
  misc_feature (51)..(218): Homolog of NCBI NO: 18414212 NR Description: bHLH protein [Arabidopsis thaliana]
MDSLEDSGYWDFLDYSFIDQAPPDFLWSNNTISVNTEVDIPGDAAACQENTKKRGHADSSCQVGSKACREKLRRERLNERFCDLSSVLEPGRPVRTDKPAILDDAIRVLSQLKTEAQELKKTNEKLLEEIKCLKAEKNELREEKLVLKADKERIEKQLKALPVAPAGYMTPPVAAAAYQAGVNKMALYPNYGYIPMWQYLPQSVRDTSHDHELRPPAA

SEQ ID NO: 57540 - DNA, 943 bp, Glycine max
  misc_feature (1)..(943): Ceres Seq. ID no. 12608163
aaggtagcaattgaactgtcttcgaaatcaacaacaatctctctctgtctctggctatggctgctattcatgttcatgatgatggtgaagttggttttgaagaaggaatgctatggttaccctctcatgttctgaacgaggcatgcggcactaaggtatgtttgaggaaccgccaccaaaagttccaaaaccatcagcaaatgcatcagcagcgtcatcataaatcacctggagaaccaaaatcacagtactcaaaatctgcctcaagatcttcgtatcaaaggccaaaacttgccaatggtggacctggaatgcgagctattttcttaggatccacgcatagatcatgtggcactggtgtgttcttaccccaaagagcaggcacaaacttccaaccaagcaagaggccagcttgtgctcctatcctagttccagctggagttattcaagctctaaatcttaatgtgcgtgcattaggtctgcagatttcacccccgcaagttcagagttataacccaagatgcagggaagtatacaataataattcagaagaaaagaaaagtgatcagaaagattcgtccaagcaatgtcgttttatatctcagaatcaatgttctactccagagatatttctcccaaaggaatggacttactagctagcttttcattttcaaagagaaaatttaaatttgggaagcacacaaaggggagttaacatcggaccgtgtacatacaaataaaaaaaaaatgaaatcatgctttatgtagaatgctgggaaagtttaaagtgcaattaatttattgctagctgtactgttagattctttgatcatgtatagatgttagcttttgtaataatagattaatggcaacccaagtctcacgagggtcttgtttgtaattgcatgcttcagtattgatataattatattcagtggttctc

SEQ ID NO: 57541 - protein, 199 aa, Glycine max
  peptide (1)..(199): Ceres Seq. ID no. 12608164
  misc_feature (80)..(141): Homolog of NCBI NO: 20160564 NR Description: P0414E03.8 [Oryza sativa (japonica
  misc_feature (12)..(199): Homolog of NCBI NO: 15235509 NR Description: hypothetical protein; protein id: At4g02830.1
MAAIHVHDDGEVGFEEGMLWLPSHVLNEACGTKVCLRNRHQKFQNHQQMHQQRHHKSPGEPKSQYSKSASRSSYQRPKLANGGPGMRAIFLGSTHRSCGTGVFLPQRAGTNFQPSKRPACAPILVPAGVIQALNLNVRALGLQISPPQVQSYNPRCREVYNNNSEEKKSDQKDSSKQCRFISQNQCSTPEIFLPKEWTY

SEQ ID NO: 57542 - protein, 182 aa, Glycine max
  peptide (1)..(182): Ceres Seq. ID no. 12608165
  misc_feature (63)..(124): Homolog of NCBI NO: 20160564 NR Description: P0414E03.8 [Oryza sativa (japonica
  misc_feature (1)..(182): Homolog of NCBI NO: 15235509 NR Description: hypothetical protein; protein id: At4g02830.1
MLWLPSHVLNEACGTKVCLRNRHQKFQNHQQMHQQRHHKSPGEPKSQYSKSASRSSYQRPKLANGGPGMRAIFLGSTHRSCGTGVFLPQRAGTNFQPSKRPACAPILVPAGVIQALNLNVRALGLQISPPQVQSYNPRCREVYNNNSEEKKSDQKDSSKQCRFISQNQCSTPEIFLPKEWTY

SEQ ID NO: 57543 - protein, 151 aa, Glycine max
  peptide (1)..(151): Ceres Seq. ID no. 12608166
  misc_feature (32)..(93): Homolog of NCBI NO: 20160564 NR Description: P0414E03.8 [Oryza sativa (japonica
  misc_feature (1)..(151): Homolog of NCBI NO: 15235509 NR Description: hypothetical protein; protein id: At4g02830.1
MHQQRHHKSPGEPKSQYSKSASRSSYQRPKLANGGPGMRAIFLGSTHRSCGTGVFLPQRAGTNFQPSKRPACAPILVPAGVIQALNLNVRALGLQISPPQVQSYNPRCREVYNNNSEEKKSDQKDSSKQCRFISQNQCSTPEIFLPKEWTY

SEQ ID NO: 57544 - DNA, 1230 bp, Glycine max
  misc_feature (1)..(1230): Ceres Seq. ID no. 15175591
atgaatgatgtgttctagcaattttcctgtgtcgtatcatcaaagcgacggattggtgggggtggcgccttcggccattggcacgtacacctcctaaaaacgacaactcgtttccacggcttggtattttagcaggcaaaacgcaaggacctgggcgagtggcgaaatggcagttccagcagagaggaaccacaaccatttctcagttttgatcgtactctttcttttcctcgtccacaatgctctctgcattaggttcccggatcggatcgcccaacccgccctcgacccgctcgaccaacaccgcctgcgggtcgccgtcttcgccctcggaagcttctggagatccgaagcggtgttcggttgtttaccgggcgttgttcgcaccaccgtcggctacgccggcggatccaagtccaaccccgaataccgaagcctcggtgaccacgccgagtccgttaaggttgagtatgatccgcagctgattagctttagggaactcctggatgtcttttggtcaagtcacgatcctaggcaagtgtatggccaaggtcctgatgtgggtagtcagtacagatctattatttttgttaatggaaccgaagaatcaagaatggctgctgtcagcaaagaacaggaacaaaccctgtcaagaagcagcattgtgactacacaaattctgcaacttggaacattttaccctgcagagccagagcaccagaaatttgaactcaagcaaaataccatccttcttcagttaattgggaaccttccggcagaggagcttgagaggtctagcctggcaacgaaattgaatggatatgttgcagagctttgccctccaaatatccaaaagcaaattgatgccaagatcaacaatattattaaaaagggttggccaattttgagagatttgtagttggcctcgtgggaagttactcagattgtcaacttgtcatttttcaactaacctgcttcgtttcagtacctataggttttattcaatagcttgtatcagttgccgggcttgatttaacgattgtgttgtaattattgtacttgtaaagtcttgagtctccctgtcatccttcaaaaaagaaaccctttgattttttttatttattttttgttttcattcatttaccttttttatttatgaggacaacagagaacctttattattattttattactattattcaaaagagggacaaagaaactagtaattcc

SEQ ID NO: 57545 - protein, 250 aa, Glycine max
  peptide (1)..(250): Ceres Seq. ID no. 15175592
  misc_feature (51)..(201): Pfam Name: Peptide methionine sulfoxide reductase Pfam Description: Peptide methionine sulfoxide reductase
  misc_feature (51)..(187): Homolog of NCBI NO: 28829944 NR Description: similar to Arabidopsis thaliana (Mouse-ear
  misc_feature (34)..(191): Homolog of NCBI NO: 22968448 NR Description: hypothetical protein [Rhodospirillum rubrum]
  misc_feature (51)..(221): Homolog of NCBI NO: 24664631 NR Description: Ecdysone-induced protein 28/29kD CG7266-PB
  misc_feature (51)..(221): Homolog of NCBI NO: 28557615 NR Description: RE51574p [Drosophila melanogaster]
  misc_feature (51)..(221): Homolog of NCBI NO: 311724 NR Description: EIP29 [Drosophila melanogaster]
  misc_feature (51)..(221): Homolog of NCBI NO: 33089114 NR Description: methionine sulfoxide reductase [Apis mellifera
  misc_feature (51)..(221): Homolog of NCBI NO: 119251 NR Description: Ecdysone-induced protein 28/29 kDa
  misc_feature (51)..(221): Homolog of NCBI NO: 24664627 NR Description: Ecdysone-induced protein 28/29kD CG7266-PA
  misc_feature (51)..(221): Homolog of NCBI NO: 7937 NR Description: Eip28/29 (ecdysone inducible) [Drosophila
  misc_feature (1)..(250): Homolog of NCBI NO: 15227955 NR Description: peptide methionine sulfoxide reductase -related
MAVPAERNHNHFSVLIVLFLFLVHNALCIRFPDRIAQPALDPLDQHRLRVAVFALGSFWRSEAVFGCLPGVVRTTVGYAGGSKSNPEYRSLGDHAESVKVEYDPQLISFRELLDVFWSSHDPRQVYGQGPDVGSQYRSIIFVNGTEESRMAAVSKEQEQTLSRSSIVTTQILQLGTFYPAEPEHQKFELKQNTILLQLIGNLPAEELERSSLATKLNGYVAELCPPNIQKQIDAKINNIIKKGWPILRDL

SEQ ID NO: 57546 - DNA, 540 bp, Glycine max
  misc_feature (1)..(540): Ceres Seq. ID no. 13582542
caatgaatttttgttatacaataaagaatatatatgatgatatacttatgtgttattgcgtgcatgtgtgtatggtattgataggagctagagaatccttccgttttcggagaaggtcaacatcagatgcgtacgagaagacaggccagaacagatcaagctcttcttctcctttcgatgtgtgagaaatgagcctgaccactatatatcctccatggatcgatgactgaaataaaatatatatagtagtttgtttttctctagcctttgcggatgatgctgtatccatttttgtttatgttaattttgtgcatatatatagtatatagtatatagcatatgtatgaatatgtttacgagttcatcagttgagcgattgaagtcctgaaacgatcgaggtagctgtgtgtggtttaacagcttggtcttgttttattgttgaactggtttatggttcggaagctgtaaataagtaataacgtagtataggtgtgtttttgttacgtgtactttgtatatatataaaagcctttccattcc

SEQ ID NO: 57547 - protein, 60 aa, Glycine max
  peptide (1)..(60): Ceres Seq. ID no. 13582543
  misc_feature (28)..(60): Homolog of NCBI NO: 18476508 NR Description: ultraviolet-B-inducible auxin-related protein
  misc_feature (28)..(60): Homolog of NCBI NO: 21552998 NR Description: Drm3 [Pisum sativum]
  misc_feature (28)..(60): Homolog of NCBI NO: 21553000 NR Description: Drm4 [Pisum sativum]
MNFCYTIKNIYDDILMCYCVHVCMVLIGARESFRFRRRSTSDAYEKTGQNRSSSSSPFDV

SEQ ID NO: 57548 - protein, 45 aa, Glycine max
  peptide (1)..(45): Ceres Seq. ID no. 13582544
  misc_feature (13)..(45): Homolog of NCBI NO: 18476508 NR Description: ultraviolet-B-inducible auxin-related protein
  misc_feature (13)..(45): Homolog of NCBI NO: 21552998 NR Description: Drm3 [Pisum sativum]
  misc_feature (13)..(45): Homolog of NCBI NO: 21553000 NR Description: Drm4 [Pisum sativum]
MCYCVHVCMVLIGARESFRFRRRSTSDAYEKTGQNRSSSSSPFDV

SEQ ID NO: 57549 - protein, 37 aa, Glycine max
  peptide (1)..(37): Ceres Seq. ID no. 13582545
  misc_feature (5)..(37): Homolog of NCBI NO: 18476508 NR Description: ultraviolet-B-inducible auxin-related protein
  misc_feature (5)..(37): Homolog of NCBI NO: 21552998 NR Description: Drm3 [Pisum sativum]
  misc_feature (5)..(37): Homolog of NCBI NO: 21553000 NR Description: Drm4 [Pisum sativum]
MVLIGARESFRFRRRSTSDAYEKTGQNRSSSSSPFDV

SEQ ID NO: 57550 - DNA, 818 bp, Glycine max
  misc_feature (1)..(818): Ceres Seq. ID no. 15173764
gtagttctgttttgccagtgattgaagctagttagaacaagatgttgcagctactctacactgcgattttctccgaaatgcttttgattctcacgctcgtcttcaaaaccccactgagaaaactcgtcatcgtttccctcgatagtgtgaagcgcggtcgcggtcccgtggtggtttccaccgtgggcgccacattgatggtggttctcgcttcgagcctctacagcatggccaagatccagcaacgcaccctcgaggccggcatagtcaaccccaccgaccaagtcctcatgtccaagcacatgctcgaagcttctctcatggggtttctgctgttcctctctctgatgattgatagattgcaccattacataagagagcttcggtcactcaggaagaccatggaagctattaagaaacaaagccgaagttttgaagatggtaaaaatggaaattcagaggaacataaagcattgaatgaagaaattaccacattgaagtctaaaattaagaaactagaatctgaatgtgaggcaaaaggaagtcaagctaagactttggaaactgaagtagaggctcttaaaaagcaatccgaggggttccttatggaatatgatcgcctcttggaagacaatcagagtcttaggagtcagttgcaggccattgaccagagccctttgaattttgataataaaaagagtatgtgattgttgaaatatccagaaaacagtttttatcctttgttttaactcttgtttgagtgtcacatactttcttaatgaggttacagttgtaaataccaagtgtttacagacagg

SEQ ID NO: 57551 - protein, 221 aa, Glycine max
  peptide (1)..(221): Ceres Seq. ID no. 15173765
  misc_feature (4)..(192): Pfam Name: B-cell receptor-associated protein 31-like Pfam Description: B-cell receptor-associated protein 31-like
  misc_feature (1)..(126): Homolog of NCBI NO: 18402620 NR Description: expressed protein [Arabidopsis thaliana]
  misc_feature (1)..(205): Homolog of NCBI NO: 15231412 NR Description: expressed protein [Arabidopsis thaliana]
  misc_feature (1)..(155): Homolog of NCBI NO: 30682503 NR Description: expressed protein [Arabidopsis thaliana]
  misc_feature (1)..(205): Homolog of NCBI NO: 15239667 NR Description: hypothetical protein [Arabidopsis thaliana]
  misc_feature (1)..(205): Homolog of NCBI NO: 34897474 NR Description: unknown protein [Oryza sativa (japonica
  misc_feature (1)..(220): Homolog of NCBI NO: 22655198 NR Description: unknown protein [Arabidopsis thaliana]
  misc_feature (1)..(212): Homolog of NCBI NO: 9759015 NR Description: gene_id:K16E1.4~unknown protein [Arabidopsis
  misc_feature (1)..(221): Homolog of NCBI NO: 21553655 NR Description: unknown [Arabidopsis thaliana]
  misc_feature (1)..(221): Homolog of NCBI NO: 18422225 NR Description: expressed protein [Arabidopsis thaliana]
MLQLLYTAIFSEMLLILTLVFKTPLRKLVIVSLDSVKRGRGPVVVSTVGATLMVVLASSLYSMAKIQQRTLEAGIVNPTDQVLMSKHMLEASLMGFLLFLSLMIDRLHHYIRELRSLRKTMEAIKKQSRSFEDGKNGNSEEHKALNEEITTLKSKIKKLESECEAKGSQAKTLETEVEALKKQSEGFLMEYDRLLEDNQSLRSQLQAIDQSPLNFDNKKSM

SEQ ID NO: 57552 - protein, 209 aa, Glycine max
  peptide (1)..(209): Ceres Seq. ID no. 15173766
  misc_feature (1)..(180): Pfam Name: B-cell receptor-associated protein 31-like Pfam Description: B-cell receptor-associated protein 31-like
  misc_feature (1)..(114): Homolog of NCBI NO: 18402620 NR Description: expressed protein [Arabidopsis thaliana]
  misc_feature (1)..(193): Homolog of NCBI NO: 15231412 NR Description: expressed protein [Arabidopsis thaliana]
  misc_feature (1)..(143): Homolog of NCBI NO: 30682503 NR Description: expressed protein [Arabidopsis thaliana]
  misc_feature (1)..(193): Homolog of NCBI NO: 15239667 NR Description: hypothetical protein [Arabidopsis thaliana]
  misc_feature (1)..(193): Homolog of NCBI NO: 34897474 NR Description: unknown protein [Oryza sativa (japonica
  misc_feature (1)..(208): Homolog of NCBI NO: 22655198 NR Description: unknown protein [Arabidopsis thaliana]
  misc_feature (1)..(200): Homolog of NCBI NO: 9759015 NR Description: gene_id:K16E1.4~unknown protein [Arabidopsis
  misc_feature (1)..(209): Homolog of NCBI NO: 21553655 NR Description: unknown [Arabidopsis thaliana]
  misc_feature (1)..(209): Homolog of NCBI NO: 18422225 NR Description: expressed protein [Arabidopsis thaliana]
MLLILTLVFKTPLRKLVIVSLDSVKRGRGPVVVSTVGATLMVVLASSLYSMAKIQQRTLEAGIVNPTDQVLMSKHMLEASLMGFLLFLSLMIDRLHHYIRELRSLRKTMEAIKKQSRSFEDGKNGNSEEHKALNEEITTLKSKIKKLESECEAKGSQAKTLETEVEALKKQSEGFLMEYDRLLEDNQSLRSQLQAIDQSPLNFDNKKSM

SEQ ID NO: 57553 - protein, 169 aa, Glycine max
  peptide (1)..(169): Ceres Seq. ID no. 15173767
  misc_feature (1)..(140): Pfam Name: B-cell receptor-associated protein 31-like Pfam Description: B-cell receptor-associated protein 31-like
  misc_feature (1)..(74): Homolog of NCBI NO: 18402620 NR Description: expressed protein [Arabidopsis thaliana]
  misc_feature (1)..(153): Homolog of NCBI NO: 15231412 NR Description: expressed protein [Arabidopsis thaliana]
  misc_feature (1)..(103): Homolog of NCBI NO: 30682503 NR Description: expressed protein [Arabidopsis thaliana]
  misc_feature (1)..(153): Homolog of NCBI NO: 15239667 NR Description: hypothetical protein [Arabidopsis thaliana]
  misc_feature (1)..(153): Homolog of NCBI NO: 34897474 NR Description: unknown protein [Oryza sativa (japonica
  misc_feature (1)..(168): Homolog of NCBI NO: 22655198 NR Description: unknown protein [Arabidopsis thaliana]
  misc_feature (1)..(160): Homolog of NCBI NO: 9759015 NR Description: gene_id:K16E1.4~unknown protein [Arabidopsis
  misc_feature (1)..(169): Homolog of NCBI NO: 21553655 NR Description: unknown [Arabidopsis thaliana]
  misc_feature (1)..(169): Homolog of NCBI NO: 18422225 NR Description: expressed protein [Arabidopsis thaliana]
MVVLASSLYSMAKIQQRTLEAGIVNPTDQVLMSKHMLEASLMGFLLFLSLMIDRLHHYIRELRSLRKTMEAIKKQSRSFEDGKNGNSEEHKALNEEITTLKSKIKKLESECEAKGSQAKTLETEVEALKKQSEGFLMEYDRLLEDNQSLRSQLQAIDQSPLNFDNKKSM

SEQ ID NO: 57554 - DNA, 713 bp, Glycine max
  misc_feature (1)..(713): Ceres Seq. ID no. 15177004
acagctagaactttctactgtatccgatatactagtcttggtctttttcgctatatatactagtaagatgagacaaccctagtagtaacgtacagaaatgggtgctctggatcacatctctgagctctttgactgctcccataccagctccaagctcaagaagaagcgcaaacaattccagacggtggaggtgaaagtgaagatggactgcgaagggtgtgagagaaaggtgaagaaatcggtggagggaatgaaaggggtgacagaggtggaggtggatagaaaggccagcaaggtaactgtttccggctatgtggaaccctcaaaggtggtttctcgcatcgctcaccggactggtaagagagcggagctatggccatacttgccgtacgacgtcgttgcgcacccttacgcgccaggtgtctacgacaggaaagcgccatctggctacgtgcgaaacgctgatgtagaccctcggctcaccaacctcgcacgtgccagctccactgaggtcaagtacaccaccgctttcagcgacgacaaccccgccgcatgtgtcgttatgtgattattcattttctctcttgtatcatagtagcaaagaaaaacatcaaatgttcacgtggggaacgcttttggcacaatggacatgtatcctttaaagtgatgttcggaaatttgatatcttaagatggtaattaattaatgattcc

SEQ ID NO: 57555 - protein, 156 aa, Glycine max
  peptide (1)..(156): Ceres Seq. ID no. 15177005
MGALDHISELFDCSHTSSKLKKKRKQFQTVEVKVKMDCEGCERKVKKSVEGMKGVTEVEVDRKASKVTVSGYVEPSKVVSRIAHRTGKRAELWPYLPYDVVAHPYAPGVYDRKAPSGYVRNADVDPRLTNLARASSTEVKYTTAFSDDNPAACVVM

SEQ ID NO: 57556 - protein, 121 aa, Glycine max
  peptide (1)..(121): Ceres Seq. ID no. 15177006
MDCEGCERKVKKSVEGMKGVTEVEVDRKASKVTVSGYVEPSKVVSRIAHRTGKRAELWPYLPYDVVAHPYAPGVYDRKAPSGYVRNADVDPRLTNLARASSTEVKYTTAFSDDNPAACVVM

SEQ ID NO: 57557 - protein, 105 aa, Glycine max
  peptide (1)..(105): Ceres Seq. ID no. 15177007
MKGVTEVEVDRKASKVTVSGYVEPSKVVSRIAHRTGKRAELWPYLPYDVVAHPYAPGVYDRKAPSGYVRNADVDPRLTNLARASSTEVKYTTAFSDDNPAACVVM

SEQ ID NO: 57558 - DNA, 956 bp, Glycine max
  misc_feature (1)..(956): Ceres Seq. ID no. 13594260
attttagccgccaccatctccattgggaagattgaatttcacaaaccaatcatatctttgatcaccgcattgtcattttgcagatcccaagaagaagcataacaatcaacttcattcattctaatcttgcatttttacttgatgaaaccaaactgggaactcaaaaactgctgcaaccacgaccaggtggtgtttctggtcactgttgctgtctgcactgtcgttatacttgcactacggagaacagttttactcagaccctttaagcttgttgccgtatttcttcatgaggcaagccatgcaattgcttgtaaacttacttgcggtcatgtagaaggaatccaggttcatgcagatgaaggtggaacaacccaaacacgtggaggcatatactggttaatcttgccagctggatatcttggttcatctttctggggcatggtattgatacttgcatcaacaaatcttcttaccgctagaatagctgctggctgttttattgctgctctacttattgtcctcttcattgccaaaaattggactcttcggggactttgcattgtatatgatatttacgacgatctgatctcccgtagagtacattccagtgatgcagaaaaatttgcggaagtgtgcccctgtccttgtactggtgtaggatggggtgttatttgggggttaatatcttttgtgtttctttgcggagctgtgtatctgggtgctgtgatcttgtcataactgataaagaaagaagattgtaattcaagttctatgaccgctgagaagccatgtgattcaatccatctggctttactgcttttacagactaattctgaatattgtcgagtcaggtcctttggcagtttggcttcattcctaatcatattcagggtgatttataccagattaaaatgaaaaagtagttctgatataaatacccatttagtctagttttc

SEQ ID NO: 57559 - protein, 198 aa, Glycine max
  peptide (1)..(198): Ceres Seq. ID no. 15221328
  misc_feature (67)..(142): Homolog of NCBI NO: 23485893 NR Description: hypothetical protein [Plasmodium yoelii yoelii]
  misc_feature (12)..(144): Homolog of NCBI NO: 40740899 NR Description: hypothetical protein AN4854.2 [Aspergillus
  misc_feature (3)..(64): Homolog of NCBI NO: 26449599 NR Description: unknown protein [Arabidopsis thaliana]
  misc_feature (4)..(142): Homolog of NCBI NO: 23619420 NR Description: hypothetical protein, conserved [Plasmodium
  misc_feature (3)..(145): Homolog of NCBI NO: 15219816 NR Description: expressed protein [Arabidopsis thaliana]
MKPNWELKNCCNHDQVVFLVTVAVCTVVILALRRTVLLRPFKLVAVFLHEASHAIACKLTCGHVEGIQVHADEGGTTQTRGGIYWLILPAGYLGSSFWGMVLILASTNLLTARIAAGCFIAALLIVLFIAKNWTLRGLCIVYDIYDDLISRRVHSSDAEKFAEVCPCPCTGVGWGVIWGLISFVFLCGAVYLGAVILS

SEQ ID NO: 57560 - protein, 99 aa, Glycine max
  peptide (1)..(99): Ceres Seq. ID no. 15221329
  misc_feature (1)..(43): Homolog of NCBI NO: 23485893 NR Description: hypothetical protein [Plasmodium yoelii yoelii]
  misc_feature (1)..(45): Homolog of NCBI NO: 40740899 NR Description: hypothetical protein AN4854.2 [Aspergillus
  misc_feature (1)..(43): Homolog of NCBI NO: 23619420 NR Description: hypothetical protein, conserved [Plasmodium
  misc_feature (1)..(46): Homolog of NCBI NO: 15219816 NR Description: expressed protein [Arabidopsis thaliana]
MVLILASTNLLTARIAAGCFIAALLIVLFIAKNWTLRGLCIVYDIYDDLISRRVHSSDAEKFAEVCPCPCTGVGWGVIWGLISFVFLCGAVYLGAVILS

SEQ ID NO: 57561 - DNA, 1346 bp, Glycine max
  misc_feature (1)..(1346): Ceres Seq. ID no. 15177764
aaaaaaatagaaaaaagtattttggtccaccttccttcttctatcgtcgttgtcttccttcctccatcgtgttagggtttccactttgcagagtttcaatttactctcattatcatatcgcaattcctccgtgtttctgttttgataactcgtaaaaatcctactccatagcaccatatctcgttccctgaatactgattttgaacttcccctgatttttttttcagggaaacaaattattgccccttcctctcttttccaatcatctccagtgaaaaaaaaaaacaatacaaaaactatatctgaaacttattggggatcaggtattgggagatgcctcgagacttgtcgcgatcccgatcacctccctataggcggaggcattcaccatctcctgtgggacacaggtatagcaggaggagcagaagagacagaagcagatctccttattcatcctactcttacaacaggcgaaaaagtcgttctatttcaccaagaggtcacagaagtccttctactactccaagacgtcgtagaagccgaactccatctgctaaacgatacagaagacatagaagtaggagttcctcgttgtctcctactcgtaaatcttccagtccaagtcttgggtcagtagagcacaaaagtgccactgaaaaactaaagaaagaagaagagaagaaaaggcgtcaactagaagcagagttgaaattaatagaagaagagactgcaaagagagttgaagaagcaatccgtaagagagttgaagaaagcttgaaatctgaggaggttcaggtggagattgaaaggcggttggaagagggacggaagagacttaatgatgaagttgcagctcaacttgaaaaagaaaaggaagctgctattattgaggctaaacagaaggaggagcaagcccgtaaagagaaagaagatcttgaaaggatgcttgaggagaaccggaggaaggttgaagaagctcagagaagggaagctttagagcagcaaagaagggaggaagaaagatataaagagctagaagagatgcaaagacagaaggaagaagccatgcgaaggaagaaacacgaggaggagcaagaacgtctaaaccaaataaagttgttgggtaaaaacaaatcccgaccaaaattgtcatttgctcttggatccaaatgaccatgggcttcggcaacatgtgtctatttatttagtctaaagtgtgtatgggcttaatttaattccctatttgtgtctgtaatttgaggaaattatacagccctcctcagctatagtgtgacagcgttgttactgtttccagtttgcattagatttcattgtttgtcattgcc

SEQ ID NO: 57562 - protein, 279 aa, Glycine max
  peptide (1)..(279): Ceres Seq. ID no. 15177765
  misc_feature (92)..(269): Pfam Name: Caldesmon Pfam Description: Caldesmon
  misc_feature (29)..(276): Homolog of NCBI NO: 27881860 NR Description: Unknown (protein for MGC:55375) [Danio rerio]
  misc_feature (29)..(276): Homolog of NCBI NO: 38541231 NR Description: Unknown (protein for MGC:77695) [Danio rerio]
  misc_feature (6)..(276): Homolog of NCBI NO: 28278343 NR Description: Unknown (protein for MGC:55548) [Danio rerio]
  misc_feature (15)..(278): Homolog of NCBI NO: 39795605 NR Description: Unknown (protein for MGC:76303) [Silurana
  misc_feature (32)..(276): Homolog of NCBI NO: 31234644 NR Description: ENSANGP00000022336 [Anopheles gambiae]
  misc_feature (6)..(276): Homolog of NCBI NO: 8922259 NR Description: hypothetical protein FLJ10154 [Homo sapiens]
  misc_feature (6)..(276): Homolog of NCBI NO: 34879649 NR Description: similar to hypothetical protein FLJ10154 [Rattus
  misc_feature (118)..(266): Homolog of NCBI NO: 37532486 NR Description: hypothetical protein [Oryza sativa (japonica
  misc_feature (30)..(277): Homolog of NCBI NO: 15240607 NR Description: hypothetical protein [Arabidopsis thaliana]
  misc_feature (46)..(279): Homolog of NCBI NO: 15220234 NR Description: F-box protein family [Arabidopsis thaliana]
MPRDLSRSRSPPYRRRHSPSPVGHRYSRRSRRDRSRSPYSSYSYNRRKSRSISPRGHRSPSTTPRRRRSRTPSAKRYRRHRSRSSSLSPTRKSSSPSLGSVEHKSATEKLKKEEEKKRRQLEAELKLIEEETAKRVEEAIRKRVEESLKSEEVQVEIERRLEEGRKRLNDEVAAQLEKEKEAAIIEAKQKEEQARKEKEDLERMLEENRRKVEEAQRREALEQQRREEERYKELEEMQRQKEEAMRRKKHEEEQERLNQIKLLGKNKSRPKLSFALGSK

SEQ ID NO: 57563 - DNA, 923 bp, Glycine max
  misc_feature (1)..(923): Ceres Seq. ID no. 15175041
attttcaccagctaccatatttagttatcagcaatggacttctactttggaaaccctcatccttatcccaatattcatcaatatcatgctcataattctgtagtcagcatgactccatcttcccctgagatcgcactatctgattatctcatgctcgatgactatgttgatcatcaagattctcgatcatcacaaagcactgagtcatcagaaaaagcaaccttctgtgatcccactcacggattcagcactggtgcaacctctaagaacaataacatgaagtgcaaaaatgggattaatgaaaacaaaagaggagtgggtccaaggatcgcgttcagaaccaaatcagagcttgagatcatggatgatggatacaagtggaggaagtacggcaagaagtctgtgaagagcaatcccaatctaaggaactactacaaatgttcaagtggaggatgcagtgtgaagaaaagggtggaaagggatagagatgactccagctatgtgataacaacttatgaaggtgtgcacaatcatgagagcccatttaccacatactacagccccatctccttcgtacattctgatactactttcaaatgacaccatctccaaccccttttctgctcttacacctccctagcttaattatgtgccgagaaaaagcttggaagattcgatcgagcaagggaagctgtgtcaatgcattgtctaattaatcttaattattttcatgctgtaataggttgaagagagtttctttacccttctttttccattttgtttttagatgagtttaatatctcacttaatgaaaaatcaacctttgttagttcatgtgacaaagaacatgattttccatgtgtaaagttgttcaaatcttaaaatagaatggaatgcttcgtcttgttacagttaataaattc

SEQ ID NO: 57564 - protein, 188 aa, Glycine max
  peptide (1)..(188): Ceres Seq. ID no. 15175042
  misc_feature (110)..(169): Pfam Name: WRKY DNA -binding domain Pfam Description: WRKY DNA -binding domain
  misc_feature (10)..(172): Homolog of NCBI NO: 15220582 NR Description: WRKY family transcription factor [Arabidopsis
  misc_feature (97)..(188): Homolog of NCBI NO: 7484759 NR Description: SP8 binding protein homolog - cucumber
  misc_feature (21)..(172): Homolog of NCBI NO: 15239913 NR Description: WRKY family transcription factor [Arabidopsis
  misc_feature (26)..(179): Homolog of NCBI NO: 21536889 NR Description: putative WRKY-type DNA binding protein
  misc_feature (26)..(179): Homolog of NCBI NO: 15226550 NR Description: WRKY family transcription factor [Arabidopsis
  misc_feature (87)..(170): Homolog of NCBI NO: 34912126 NR Description: OSJNBb0024F06.15 [Oryza sativa (japonica
  misc_feature (98)..(170): Homolog of NCBI NO: 34906314 NR Description: unnamed protein product [Oryza sativa (japonica
  misc_feature (98)..(176): Homolog of NCBI NO: 34910570 NR Description: B1131B07.13 [Oryza sativa (japonica
  misc_feature (31)..(169): Homolog of NCBI NO: 22327079 NR Description: WRKY family transcription factor [Arabidopsis
  misc_feature (48)..(188): Homolog of NCBI NO: 22328061 NR Description: WRKY family transcription factor [Arabidopsis
MDFYFGNPHPYPNIHQYHAHNSVVSMTPSSPEIALSDYLMLDDYVDHQDSRSSQSTESSEKATFCDPTHGFSTGATSKNNNMKCKNGINENKRGVGPRIAFRTKSELEIMDDGYKWRKYGKKSVKSNPNLRNYYKCSSGGCSVKKRVERDRDDSSYVITTYEGVHNHESPFTTYYSPISFVHSDTTFK

SEQ ID NO: 57565 - protein, 163 aa, Glycine max
  peptide (1)..(163): Ceres Seq. ID no. 15175043
  misc_feature (85)..(144): Pfam Name: WRKY DNA -binding domain Pfam Description: WRKY DNA -binding domain
  misc_feature (1)..(147): Homolog of NCBI NO: 15220582 NR Description: WRKY family transcription factor [Arabidopsis
  misc_feature (72)..(163): Homolog of NCBI NO: 7484759 NR Description: SP8 binding protein homolog - cucumber
  misc_feature (1)..(147): Homolog of NCBI NO: 15239913 NR Description: WRKY family transcription factor [Arabidopsis
  misc_feature (1)..(154): Homolog of NCBI NO: 21536889 NR Description: putative WRKY-type DNA binding protein
  misc_feature (1)..(154): Homolog of NCBI NO: 15226550 NR Description: WRKY family transcription factor [Arabidopsis
  misc_feature (62)..(145): Homolog of NCBI NO: 34912126 NR Description: OSJNBb0024F06.15 [Oryza sativa (japonica
  misc_feature (73)..(145): Homolog of NCBI NO: 34906314 NR Description: unnamed protein product [Oryza sativa (japonica
  misc_feature (73)..(151): Homolog of NCBI NO: 34910570 NR Description: B1131B07.13 [Oryza sativa (japonica
  misc_feature (6)..(144): Homolog of NCBI NO: 22327079 NR Description: WRKY family transcription factor [Arabidopsis
  misc_feature (23)..(163): Homolog of NCBI NO: 22328061 NR Description: WRKY family transcription factor [Arabidopsis
MTPSSPEIALSDYLMLDDYVDHQDSRSSQSTESSEKATFCDPTHGFSTGATSKNNNMKCKNGINENKRGVGPRIAFRTKSELEIMDDGYKWRKYGKKSVKSNPNLRNYYKCSSGGCSVKKRVERDRDDSSYVITTYEGVHNHESPFTTYYSPISFVHSDTTFK

SEQ ID NO: 57566 - protein, 149 aa, Glycine max
  peptide (1)..(149): Ceres Seq. ID no. 15175044
  misc_feature (71)..(130): Pfam Name: WRKY DNA -binding domain Pfam Description: WRKY DNA -binding domain
  misc_feature (1)..(133): Homolog of NCBI NO: 15220582 NR Description: WRKY family transcription factor [Arabidopsis
  misc_feature (58)..(149): Homolog of NCBI NO: 7484759 NR Description: SP8 binding protein homolog - cucumber
  misc_feature (1)..(133): Homolog of NCBI NO: 15239913 NR Description: WRKY family transcription factor [Arabidopsis
  misc_feature (1)..(140): Homolog of NCBI NO: 21536889 NR Description: putative WRKY-type DNA binding protein
  misc_feature (1)..(140): Homolog of NCBI NO: 15226550 NR Description: WRKY family transcription factor [Arabidopsis
  misc_feature (48)..(131): Homolog of NCBI NO: 34912126 NR Description: OSJNBb0024F06.15 [Oryza sativa (japonica
  misc_feature (59)..(131): Homolog of NCBI NO: 34906314 NR Description: unnamed protein product [Oryza sativa (japonica
  misc_feature (59)..(137): Homolog of NCBI NO: 34910570 NR Description: B1131B07.13 [Oryza sativa (japonica
  misc_feature (1)..(130): Homolog of NCBI NO: 22327079 NR Description: WRKY family transcription factor [Arabidopsis
  misc_feature (9)..(149): Homolog of NCBI NO: 22328061 NR Description: WRKY family transcription factor [Arabidopsis
MLDDYVDHQDSRSSQSTESSEKATFCDPTHGFSTGATSKNNNMKCKNGINENKRGVGPRIAFRTKSELEIMDDGYKWRKYGKKSVKSNPNLRNYYKCSSGGCSVKKRVERDRDDSSYVITTYEGVHNHESPFTTYYSPISFVHSDTTFK

SEQ ID NO: 57567 - DNA, 1007 bp, Glycine max
  misc_feature (1)..(1007): Ceres Seq. ID no. 14316539
aaaggagtccagagtttaggataagagatatgcgccagagttgaagcgagaaggaagggtccgcgcgccatggctggcatcaccacctcccccttcaaactctctcactttccgactctcttctcttcttctgattccaaactcttcggccttcccctctccaatccctattccctcaaattcgacccttcttctctctccactacctctctctcctacgtcaaagcccgctactacggcggcggcggcggccctccccgctcccccaacgactcccgcttccgcgagtcctccgattccgacgacgacgataaagctctcgacctctccactctcaggtcagataccgtgaggcttattgatcagagccagaatatggtcggagtagtgtcaattgatgacgccattcaaatggctgaagatgtcgaacttgacttggtaatattatccccagatgcagatcctcctgttgttagaataatggattacagcaaatatagatatgaacagcaaaagaagaaaagaggacagcagaagaaaagtgctgctaatcggatggatttgaaggagctcaaaatgggatacaacatagatgaacatgattattcagtgcgtttgaaagctgcacagaaatttttgaaagatggcaacaaggttaaggtcatagtaaacctcaagggtcgtgaaaatgaattccggaatatggctattgcgcttattacacgttttcagaatgatgttggggagcttggaatagaggagacaaaaaacttccgtgacagaaatatcttcataattttggttccaaataaagttgctgtgcagaaaactcaagaaccaccaaagaaaagagacaagtcagctgcagatgaagtctccgttagtgcccaagcataaccgcaaacttccacgctagtttctaattgtagaatggatattgtgagtaacttgtattggtccgagttggaaaattttccgagcattatataattgtataattcatgtgt

SEQ ID NO: 57568 - protein, 275 aa, Glycine max
  peptide (1)..(275): Ceres Seq. ID no. 14316540
  misc_feature (162)..(248): Pfam Name: Translation initiation factor IF-3, C-terminal domain Pfam Description: Translation initiation factor IF-3, C-terminal
  misc_feature (89)..(248): Homolog of NCBI NO: 20808119 NR Description: Translation initiation factor IF3
  misc_feature (73)..(248): Homolog of NCBI NO: 14194835 NR Description: Translation initiation factor IF-3, chloroplast
  misc_feature (94)..(256): Homolog of NCBI NO: 33241247 NR Description: Translation initiation factor 3
  misc_feature (89)..(249): Homolog of NCBI NO: 16329482 NR Description: initiation factor IF-3 [Synechocystis sp. PCC
  misc_feature (89)..(248): Homolog of NCBI NO: 23128110 NR Description: hypothetical protein [Nostoc punctiforme]
  misc_feature (89)..(248): Homolog of NCBI NO: 20138475 NR Description: Translation initiation factor IF-3
  misc_feature (89)..(248): Homolog of NCBI NO: 17232115 NR Description: translation initiation factor IF-3 [Nostoc sp.
  misc_feature (1)..(158): Homolog of NCBI NO: 25407671 NR Description: hypothetical protein AT4g30690 [imported] -
  misc_feature (12)..(273): Homolog of NCBI NO: 15224088 NR Description: chloroplast initiation factor 3 -related
  misc_feature (1)..(272): Homolog of NCBI NO: 18417644 NR Description: expressed protein [Arabidopsis thaliana]
MAGITTSPFKLSHFPTLFSSSDSKLFGLPLSNPYSLKFDPSSLSTTSLSYVKARYYGGGGGPPRSPNDSRFRESSDSDDDDKALDLSTLRSDTVRLIDQSQNMVGVVSIDDAIQMAEDVELDLVILSPDADPPVVRIMDYSKYRYEQQKKKRGQQKKSAANRMDLKELKMGYNIDEHDYSVRLKAAQKFLKDGNKVKVIVNLKGRENEFRNMAIALITRFQNDVGELGIEETKNFRDRNIFIILVPNKVAVQKTQEPPKKRDKSAADEVSVSAQA

SEQ ID NO: 57569 - protein, 173 aa, Glycine max
  peptide (1)..(173): Ceres Seq. ID no. 14316541
  misc_feature (60)..(146): Pfam Name: Translation initiation factor IF-3, C-terminal domain Pfam Description: Translation initiation factor IF-3, C-terminal
  misc_feature (1)..(146): Homolog of NCBI NO: 20808119 NR Description: Translation initiation factor IF3
  misc_feature (1)..(146): Homolog of NCBI NO: 14194835 NR Description: Translation initiation factor IF-3, chloroplast
  misc_feature (1)..(154): Homolog of NCBI NO: 33241247 NR Description: Translation initiation factor 3
  misc_feature (1)..(147): Homolog of NCBI NO: 16329482 NR Description: initiation factor IF-3 [Synechocystis sp. PCC
  misc_feature (1)..(146): Homolog of NCBI NO: 23128110 NR Description: hypothetical protein [Nostoc punctiforme]
  misc_feature (1)..(146): Homolog of NCBI NO: 20138475 NR Description: Translation initiation factor IF-3
  misc_feature (1)..(146): Homolog of NCBI NO: 17232115 NR Description: translation initiation factor IF-3 [Nostoc sp.
  misc_feature (1)..(56): Homolog of NCBI NO: 25407671 NR Description: hypothetical protein AT4g30690 [imported] -
  misc_feature (1)..(171): Homolog of NCBI NO: 15224088 NR Description: chloroplast initiation factor 3 -related
  misc_feature (1)..(170): Homolog of NCBI NO: 18417644 NR Description: expressed protein [Arabidopsis thaliana]
MVGVVSIDDAIQMAEDVELDLVILSPDADPPVVRIMDYSKYRYEQQKKKRGQQKKSAANRMDLKELKMGYNIDEHDYSVRLKAAQKFLKDGNKVKVIVNLKGRENEFRNMAIALITRFQNDVGELGIEETKNFRDRNIFIILVPNKVAVQKTQEPPKKRDKSAADEVSVSAQA

SEQ ID NO: 57570 - protein, 161 aa, Glycine max
  peptide (1)..(161): Ceres Seq. ID no. 14316542
  misc_feature (48)..(134): Pfam Name: Translation initiation factor IF-3, C-terminal domain Pfam Description: Translation initiation factor IF-3, C-terminal
  misc_feature (1)..(134): Homolog of NCBI NO: 20808119 NR Description: Translation initiation factor IF3
  misc_feature (1)..(134): Homolog of NCBI NO: 14194835 NR Description: Translation initiation factor IF-3, chloroplast
  misc_feature (1)..(142): Homolog of NCBI NO: 33241247 NR Description: Translation initiation factor 3
  misc_feature (1)..(135): Homolog of NCBI NO: 16329482 NR Description: initiation factor IF-3 [Synechocystis sp. PCC
  misc_feature (1)..(134): Homolog of NCBI NO: 23128110 NR Description: hypothetical protein [Nostoc punctiforme]
  misc_feature (1)..(134): Homolog of NCBI NO: 20138475 NR Description: Translation initiation factor IF-3
  misc_feature (1)..(134): Homolog of NCBI NO: 17232115 NR Description: translation initiation factor IF-3 [Nostoc sp.
  misc_feature (1)..(44): Homolog of NCBI NO: 25407671 NR Description: hypothetical protein AT4g30690 [imported] -
  misc_feature (1)..(159): Homolog of NCBI NO: 15224088 NR Description: chloroplast initiation factor 3 -related
  misc_feature (1)..(158): Homolog of NCBI NO: 18417644 NR Description: expressed protein [Arabidopsis thaliana]
MAEDVELDLVILSPDADPPVVRIMDYSKYRYEQQKKKRGQQKKSAANRMDLKELKMGYNIDEHDYSVRLKAAQKFLKDGNKVKVIVNLKGRENEFRNMAIALITRFQNDVGELGIEETKNFRDRNIFIILVPNKVAVQKTQEPPKKRDKSAADEVSVSAQA

SEQ ID NO: 57571 - DNA, 1296 bp, Glycine max
  misc_feature (1)..(1296): Ceres Seq. ID no. 14315989
acaattccacgcatcaaccaaatctaactctctttctctgtcccccacacccctccctcctatgtcctatcccattctgaagaaacacaattacaggttagaaccccccatatcaaagctaaagtcttttggagccaaacttgaagttttattcatcatcttcacctcgaatcagatgagggagaagttcctattattcaacttttgttagcagtaaaagctctcttctttatttttttatttatttattttgtttctaataaggagttaaagacaatttgttgttggtgttgccatgagggagtttccttcttgttttggagaaaatggggttcagattgctgactcatcctcatcaagcaccacaagagcagctcaaaatgtggttacgtgtgtctatcagtgcaaattaagaggccgttcatgcctgattacagtctggtggacaaaaactctgatgggtcaaggcttgagtgtgggaatagatgacttgggaaaccattgcctctgcaaggtggagataaagccatggctcttctcgaagagaaaagggtcaaagaatttggaggtccaatctggtaaagttgacatcttttgggatttgagttgtgccaagtttggttcagggcctgagccattggaggggttctacttagcggttgtgttcaacaaggagatggtgttgctcctaggggatctgaaaaaggaggcatgcaagaagattgagagtgattgtgccttttctcactgtggtgctgtttgcattgcaaagagagagcacattattgggaagaagttttatggtgcaaaggctcagttttgtgacaaggggcaggtgcatgatgtcacaattgagtgtgacactttggggcccagcgatccctctcttgtgattcgaattgatagcaagacagtgatgcaggtgaagcgtctcaagtggaagttccgagggaatcacaccattttggtggatggtgttccggttgaagtgttttgggatgtgcacagttggctctttgggaatgctatgggcaatgcagtgttcatgttccaaacatgcatttcaaatgataagatgtgggaaggccaatcagtttctgatccctctgcattaacatgggcttcttctcagcagtttagggattctcaattgcaaggctttgggttctctctcattttttatgtttggaaacatgagtaatcaatagaggtgttaagtcttattcctcaatgttacatttatattgacagccacatttttcaacaatgaaactgatcaacttgcccctttttccc

SEQ ID NO: 57572 - protein, 301 aa, Glycine max
  peptide (1)..(301): Ceres Seq. ID no. 14315990
  misc_feature (27)..(299): Pfam Name: Plant protein of unknown function (DUF868) Pfam Description: Plant protein of unknown function (DUF868)
  misc_feature (16)..(299): Homolog of NCBI NO: 14719318 NR Description: hypothetical protein [Oryza sativa]
  misc_feature (23)..(301): Homolog of NCBI NO: 15235452 NR Description: expressed protein [Arabidopsis thaliana]
  misc_feature (23)..(264): Homolog of NCBI NO: 15228105 NR Description: hypothetical protein [Arabidopsis thaliana]
  misc_feature (5)..(68): Homolog of NCBI NO: 20804936 NR Description: P0456E05.14 [Oryza sativa (japonica
  misc_feature (67)..(301): Homolog of NCBI NO: 20804936 NR Description: P0456E05.14 [Oryza sativa (japonica
  misc_feature (1)..(301): Homolog of NCBI NO: 34394221 NR Description: unknown protein [Oryza sativa (japonica
  misc_feature (1)..(301): Homolog of NCBI NO: 21593854 NR Description: unknown [Arabidopsis thaliana]
  misc_feature (1)..(301): Homolog of NCBI NO: 18397034 NR Description: expressed protein [Arabidopsis thaliana]
  misc_feature (1)..(301): Homolog of NCBI NO: 15241702 NR Description: expressed protein [Arabidopsis thaliana]
  misc_feature (1)..(301): Homolog of NCBI NO: 30102999 NR Description: hypothetical protein [Oryza sativa (japonica
MREFPSCFGENGVQIADSSSSSTTRAAQNVVTCVYQCKLRGRSCLITVWWTKTLMGQGLSVGIDDLGNHCLCKVEIKPWLFSKRKGSKNLEVQSGKVDIFWDLSCAKFGSGPEPLEGFYLAVVFNKEMVLLLGDLKKEACKKIESDCAFSHCGAVCIAKREHIIGKKFYGAKAQFCDKGQVHDVTIECDTLGPSDPSLVIRIDSKTVMQVKRLKWKFRGNHTILVDGVPVEVFWDVHSWLFGNAMGNAVFMFQTCISNDKMWEGQSVSDPSALTWASSQQFRDSQLQGFGFSLIFYVWKHE

SEQ ID NO: 57573 - protein, 247 aa, Glycine max
  peptide (1)..(247): Ceres Seq. ID no. 14315991
  misc_feature (1)..(245): Pfam Name: Plant protein of unknown function (DUF868) Pfam Description: Plant protein of unknown function (DUF868)
  misc_feature (1)..(245): Homolog of NCBI NO: 14719318 NR Description: hypothetical protein [Oryza sativa]
  misc_feature (1)..(247): Homolog of NCBI NO: 15235452 NR Description: expressed protein [Arabidopsis thaliana]
  misc_feature (1)..(210): Homolog of NCBI NO: 15228105 NR Description: hypothetical protein [Arabidopsis thaliana]
  misc_feature (1)..(14): Homolog of NCBI NO: 20804936 NR Description: P0456E05.14 [Oryza sativa (japonica
  misc_feature (13)..(247): Homolog of NCBI NO: 20804936 NR Description: P0456E05.14 [Oryza sativa (japonica
  misc_feature (1)..(247): Homolog of NCBI NO: 34394221 NR Description: unknown protein [Oryza sativa (japonica
  misc_feature (1)..(247): Homolog of NCBI NO: 21593854 NR Description: unknown [Arabidopsis thaliana]
  misc_feature (1)..(247): Homolog of NCBI NO: 18397034 NR Description: expressed protein [Arabidopsis thaliana]
  misc_feature (1)..(247): Homolog of NCBI NO: 15241702 NR Description: expressed protein [Arabidopsis thaliana]
  misc_feature (1)..(247): Homolog of NCBI NO: 30102999 NR Description: hypothetical protein [Oryza sativa (japonica
MGQGLSVGIDDLGNHCLCKVEIKPWLFSKRKGSKNLEVQSGKVDIFWDLSCAKFGSGPEPLEGFYLAVVFNKEMVLLLGDLKKEACKKIESDCAFSHCGAVCIAKREHIIGKKFYGAKAQFCDKGQVHDVTIECDTLGPSDPSLVIRIDSKTVMQVKRLKWKFRGNHTILVDGVPVEVFWDVHSWLFGNAMGNAVFMFQTCISNDKMWEGQSVSDPSALTWASSQQFRDSQLQGFGFSLIFYVWKHE

SEQ ID NO: 57574 - protein, 174 aa, Glycine max
  peptide (1)..(174): Ceres Seq. ID no. 14315992
  misc_feature (1)..(172): Pfam Name: Plant protein of unknown function (DUF868) Pfam Description: Plant protein of unknown function (DUF868)
  misc_feature (1)..(174): Homolog of NCBI NO: 15238927 NR Description: hypothetical protein [Arabidopsis thaliana]
  misc_feature (1)..(172): Homolog of NCBI NO: 14719318 NR Description: hypothetical protein [Oryza sativa]
  misc_feature (1)..(174): Homolog of NCBI NO: 15235452 NR Description: expressed protein [Arabidopsis thaliana]
  misc_feature (1)..(137): Homolog of NCBI NO: 15228105 NR Description: hypothetical protein [Arabidopsis thaliana]
  misc_feature (1)..(174): Homolog of NCBI NO: 20804936 NR Description: P0456E05.14 [Oryza sativa (japonica
  misc_feature (1)..(174): Homolog of NCBI NO: 34394221 NR Description: unknown protein [Oryza sativa (japonica
  misc_feature (1)..(174): Homolog of NCBI NO: 21593854 NR Description: unknown [Arabidopsis thaliana]
  misc_feature (1)..(174): Homolog of NCBI NO: 18397034 NR Description: expressed protein [Arabidopsis thaliana]
  misc_feature (1)..(174): Homolog of NCBI NO: 15241702 NR Description: expressed protein [Arabidopsis thaliana]
  misc_feature (1)..(174): Homolog of NCBI NO: 30102999 NR Description: hypothetical protein [Oryza sativa (japonica
MVLLLGDLKKEACKKIESDCAFSHCGAVCIAKREHIIGKKFYGAKAQFCDKGQVHDVTIECDTLGPSDPSLVIRIDSKTVMQVKRLKWKFRGNHTILVDGVPVEVFWDVHSWLFGNAMGNAVFMFQTCISNDKMWEGQSVSDPSALTWASSQQFRDSQLQGFGFSLIFYVWKHE

SEQ ID NO: 57575 - DNA, 774 bp, Glycine max
  misc_feature (1)..(774): Ceres Seq. ID no. 12583650
gttctgccctggatcaacattaactgaaacagaaaacgtgttttttcctgtcatggatcatttgacttcgattgatttttaaatgggtattgctatgtcgttgttgaatgaatggggttgttgctagaagcagtcttccatgtgggttttgattgtcctgtactgaaagacttcataacatactgtgtgtgtgagggactcggtgctgctttaattactgctcttgtgaaggtgaactgtgaacttggttggtcagagcttgccaacaggcagaaagttgctgaagtccctcaattgtgcttccctgcctcctttcccaaagtctctgtctggtgcaatggtttatataactgagtgggacaagtttgtggagcaatccattgagctgttccgtgcagatcctgattctacaaggtatgtcatgaagtacaggcactgtgatggcaagttggtactcaaggtcactgataaccgacagtgtctaaagtataagacaggccaagcacaagaggctaagaagatggagaaactgaataatatgttctttgctttgatggctcgtggtcccgatgttgatctatcagaagtcccgggaaaagagcaaatggatgctcagcccaccaagaaaggaagaggaaggaagcaataacttacttggccttttgctagacaagatggttttatgaatccctggactaagaatttgaatagttatatttttttccctacctaatgattacttcagattcttatgatgtgagaggtttatatttg

SEQ ID NO: 57576 - protein, 103 aa, Glycine max
  peptide (1)..(103): Ceres Seq. ID no. 12583651
  misc_feature (2)..(78): Pfam Name: Signal recognition particle 9 kDa protein (SRP9) Pfam Description: Signal recognition particle 9 kDa protein (SRP9)
  misc_feature (7)..(73): Homolog of NCBI NO: 6755662 NR Description: signal recognition particle; signal recognition
  misc_feature (1)..(73): Homolog of NCBI NO: 134890 NR Description: SIGNAL RECOGNITION PARTICLE 9 KD PROTEIN (SRP9)
  misc_feature (1)..(67): Homolog of NCBI NO: 39585011 NR Description: Hypothetical protein CBG06800 [Caenorhabditis
  misc_feature (7)..(73): Homolog of NCBI NO: 11513832 NR Description: Chain A, Core Of The Alu Domain Of The Mammalian
  misc_feature (7)..(73): Homolog of NCBI NO: 4507217 NR Description: signal recognition particle 9kDa; signal
  misc_feature (1)..(73): Homolog of NCBI NO: 5107800 NR Description: Signal Recognition Particle Alu Rna Binding
  misc_feature (1)..(67): Homolog of NCBI NO: 17556953 NR Description: Signal recognition particle (8.8 kD)
  misc_feature (1)..(73): Homolog of NCBI NO: 29436534 NR Description: Similar to signal recognition particle 9kDa
  misc_feature (1)..(103): Homolog of NCBI NO: 12230624 NR Description: Signal recognition particle 9 kDa protein (SRP9)
  misc_feature (1)..(103): Homolog of NCBI NO: 15229083 NR Description: signal recognition particle subunit 9 - like
MVYITEWDKFVEQSIELFRADPDSTRYVMKYRHCDGKLVLKVTDNRQCLKYKTGQAQEAKKMEKLNNMFFALMARGPDVDLSEVPGKEQMDAQPTKKGRGRKQ

SEQ ID NO: 57577 - protein, 80 aa, Glycine max
  peptide (1)..(80): Ceres Seq. ID no. 12583652
MGLLLEAVFHVGFDCPVLKDFITYCVCEGLGAALITALVKVNCELGWSELANRQKVAEVPQLCFPASFPKVSVWCNGLYN

SEQ ID NO: 57578 - protein, 75 aa, Glycine max
  peptide (1)..(75): Ceres Seq. ID no. 12583653
  misc_feature (1)..(45): Homolog of NCBI NO: 6755662 NR Description: signal recognition particle; signal recognition
  misc_feature (1)..(45): Homolog of NCBI NO: 134890 NR Description: SIGNAL RECOGNITION PARTICLE 9 KD PROTEIN (SRP9)
  misc_feature (1)..(39): Homolog of NCBI NO: 39585011 NR Description: Hypothetical protein CBG06800 [Caenorhabditis
  misc_feature (1)..(45): Homolog of NCBI NO: 11513832 NR Description: Chain A, Core Of The Alu Domain Of The Mammalian
  misc_feature (1)..(45): Homolog of NCBI NO: 4507217 NR Description: signal recognition particle 9kDa; signal
  misc_feature (1)..(45): Homolog of NCBI NO: 5107800 NR Description: Signal Recognition Particle Alu Rna Binding
  misc_feature (1)..(39): Homolog of NCBI NO: 17556953 NR Description: Signal recognition particle (8.8 kD)
  misc_feature (1)..(45): Homolog of NCBI NO: 29436534 NR Description: Similar to signal recognition particle 9kDa
  misc_feature (1)..(75): Homolog of NCBI NO: 12230624 NR Description: Signal recognition particle 9 kDa protein (SRP9)
  misc_feature (1)..(75): Homolog of NCBI NO: 15229083 NR Description: signal recognition particle subunit 9 - like
MKYRHCDGKLVLKVTDNRQCLKYKTGQAQEAKKMEKLNNMFFALMARGPDVDLSEVPGKEQMDAQPTKKGRGRKQ

SEQ ID NO: 57579 - DNA, 1004 bp, Glycine max
  misc_feature (1)..(1004): Ceres Seq. ID no. 12608127
actgttttctcttaccataatcatcaatggcttccttatccctctcctctcccccatctctctcttccgcacaccacaacgcctccacgcgccttattctacgcacccctaactcccttaaactgcgcactccaccccactccctccccgccatccgcgccatcaccctcacccaggacgacctcaagagactcgccgccgacaaggccgtggagtccgtcaagagcggcatggtcctcggcctaggcaccggctccactgctgccttcgtcgtcctgggtgagggtgatggcgcggaatgcacggagtacgtgaaggagtacatgaccgggaaggggtacgcggtcgacctcgaaatggtctccaaagaggcggaggagttcgcgaggagtgtgcctctcggcggcgacgggaaggacgcgtggattttcgacatcgacgagactctcctctccaatctcccctattatgccgcacacggatacgggcttgaggtctttgaccacgagaagtttaacaattgggtggagaagggtgtagctccagccattgaacccagtttaaagctctatgaagatgttttgaatctgggattcaaggttattctactgacaggacggagtgaaaggcacaggagtgtcactgttgataatttgatcaatgctgggtttaaggaatgggaccagctcatactaagaaactcagatgatcaagggaaacgagctgtactctacaaatcagagaagaggagtgagatggagaaagatggatacaggattcttggaaattctggtgaccagtggagcgatttattaggttcttcagtatctgttcggtccttcaagcttccaaatcccatgtattacattccatagtaaatgtctcattcatttgcaaataattgctgtttgaattgtacataacgaaagtggatcaattcgtatactgaatatcattgcaaataattcataaactgaatgtcattgaaattctaatacataccg

SEQ ID NO: 57580 - protein, 282 aa, Glycine max
  peptide (1)..(282): Ceres Seq. ID no. 12608128
  misc_feature (91)..(282): Pfam Name: HAD superfamily, subfamily IIIB (Acid phosphatase) Pfam Description: HAD superfamily, subfamily IIIB (Acid
  misc_feature (91)..(248): Homolog of NCBI NO: 7705154 NR Description: acid phosphatase-1(1); Apase-1(1) [Lycopersicon
  misc_feature (92)..(282): Homolog of NCBI NO: 15233504 NR Description: acid phosphatase-like protein
  misc_feature (90)..(281): Homolog of NCBI NO: 15233526 NR Description: acid phosphatase-like protein
  misc_feature (91)..(281): Homolog of NCBI NO: 130718 NR Description: Acid phosphatase precursor 1
  misc_feature (91)..(281): Homolog of NCBI NO: 445113 NR Description: acid phosphatase 1
  misc_feature (91)..(282): Homolog of NCBI NO: 15241412 NR Description: acid phosphatase; protein id: At5g51260.1
  misc_feature (90)..(282): Homolog of NCBI NO: 15234949 NR Description: acid phosphatase - like protein
MASLSLSSPPSLSSAHHNASTRLILRTPNSLKLRTPPHSLPAIRAITLTQDDLKRLAADKAVESVKSGMVLGLGTGSTAAFVVLGEGDGAECTEYVKEYMTGKGYAVDLEMVSKEAEEFARSVPLGGDGKDAWIFDIDETLLSNLPYYAAHGYGLEVFDHEKFNNWVEKGVAPAIEPSLKLYEDVLNLGFKVILLTGRSERHRSVTVDNLINAGFKEWDQLILRNSDDQGKRAVLYKSEKRSEMEKDGYRILGNSGDQWSDLLGSSVSVRSFKLPNPMYYIP

SEQ ID NO: 57581 - protein, 214 aa, Glycine max
  peptide (1)..(214): Ceres Seq. ID no. 12608129
  misc_feature (23)..(214): Pfam Name: HAD superfamily, subfamily IIIB (Acid phosphatase) Pfam Description: HAD superfamily, subfamily IIIB (Acid
  misc_feature (23)..(180): Homolog of NCBI NO: 7705154 NR Description: acid phosphatase-1(1); Apase-1(1) [Lycopersicon
  misc_feature (24)..(214): Homolog of NCBI NO: 15233504 NR Description: acid phosphatase-like protein
  misc_feature (22)..(213): Homolog of NCBI NO: 15233526 NR Description: acid phosphatase-like protein
  misc_feature (23)..(213): Homolog of NCBI NO: 130718 NR Description: Acid phosphatase precursor 1
  misc_feature (23)..(213): Homolog of NCBI NO: 445113 NR Description: acid phosphatase 1
  misc_feature (23)..(214): Homolog of NCBI NO: 15241412 NR Description: acid phosphatase; protein id: At5g51260.1
  misc_feature (22)..(214): Homolog of NCBI NO: 15234949 NR Description: acid phosphatase - like protein
MVLGLGTGSTAAFVVLGEGDGAECTEYVKEYMTGKGYAVDLEMVSKEAEEFARSVPLGGDGKDAWIFDIDETLLSNLPYYAAHGYGLEVFDHEKFNNWVEKGVAPAIEPSLKLYEDVLNLGFKVILLTGRSERHRSVTVDNLINAGFKEWDQLILRNSDDQGKRAVLYKSEKRSEMEKDGYRILGNSGDQWSDLLGSSVSVRSFKLPNPMYYIP

SEQ ID NO: 57582 - protein, 183 aa, Glycine max
  peptide (1)..(183): Ceres Seq. ID no. 12608130
  misc_feature (1)..(183): Pfam Name: HAD superfamily, subfamily IIIB (Acid phosphatase) Pfam Description: HAD superfamily, subfamily IIIB (Acid
  misc_feature (1)..(149): Homolog of NCBI NO: 7705154 NR Description: acid phosphatase-1(1); Apase-1(1) [Lycopersicon
  misc_feature (1)..(183): Homolog of NCBI NO: 15233504 NR Description: acid phosphatase-like protein
  misc_feature (1)..(182): Homolog of NCBI NO: 15233526 NR Description: acid phosphatase-like protein
  misc_feature (1)..(182): Homolog of NCBI NO: 130718 NR Description: Acid phosphatase precursor 1
  misc_feature (1)..(182): Homolog of NCBI NO: 445113 NR Description: acid phosphatase 1
  misc_feature (1)..(183): Homolog of NCBI NO: 15241412 NR Description: acid phosphatase; protein id: At5g51260.1
  misc_feature (1)..(183): Homolog of NCBI NO: 15234949 NR Description: acid phosphatase - like protein
MTGKGYAVDLEMVSKEAEEFARSVPLGGDGKDAWIFDIDETLLSNLPYYAAHGYGLEVFDHEKFNNWVEKGVAPAIEPSLKLYEDVLNLGFKVILLTGRSERHRSVTVDNLINAGFKEWDQLILRNSDDQGKRAVLYKSEKRSEMEKDGYRILGNSGDQWSDLLGSSVSVRSFKLPNPMYYIP

SEQ ID NO: 57583 - DNA, 1164 bp, Glycine max
  misc_feature (1)..(1164): Ceres Seq. ID no. 14315915
cacttcactcgccgccactctccactcacaatgcaaccccttcaccgtctcgcatcctgcacgcgccgcgtcgccacatcgtcgctccgtcacgacagcctccttccccgagccccttcaggaatcctctccttctccaccgacgcgcccgccggaggaggaggctccttcgacgcggcatgggagagcgcctcctcgtggtcgacgggcctcgccggcgaccacttcaacggccaggccccgtccgaggtcctcgcgtacctccaggacacggaggacaggctccgcgagctggaggcggagaaccgccgagggaaggcctactgtgacagctggaagagtcgcttggaggagacgacggtgcttctgaagcaggttcaggagcccggcgcgcgaggctcgtatctgaaggattccgagaaggcggagatgtaccggctgcacaagaagaaccctcaggtctacaccgtggagaagctcgctagggattacaggatcatgcggcagagggttcacgccatcctctggctcaaggagatcgaggaggaggaagagaagaggctcggccacccgctcgacgattccgtcgagcagttgctcgattcttgccctgagttttttaattcgcatgatagggagtttcatgtggcgtctctgccgtacaagccggacttcaaggttatgccggaggggtgggatggcattaccaaggatgtggatgaggtgcattatgagatctccatgaaggaggatgagatgctctatcgggagtttgtcgagaagatgaacttcaataaaaagaaaatggctggagaggtaaaatgccataagtatagtcgacgacgcccttcagatggatggacttttacagtagagaaattgggacatcagggaaagcgtggaggtggtggtggctggaagtttgctagcatgccagatggatcaagccgaccactgaatgatatggagaaaatgtatgtgaagcgagagacaccacgccggcgacgcaggattcttccttgattacttgatttttttttttggaagttttgattagctgttaaaattagattttttacccattgtattcaatggtttgggatgtgtagtgtcaattgttgtcttttttcttttggatgagttattgtattagaagatttactt

SEQ ID NO: 57584 - protein, 340 aa, Glycine max
  peptide (1)..(340): Ceres Seq. ID no. 14315916
  misc_feature (161)..(337): Homolog of NCBI NO: 18071389 NR Description: putative mucin [Oryza sativa]
  misc_feature (11)..(321): Homolog of NCBI NO: 15227059 NR Description: mucin -related [Arabidopsis thaliana]
  misc_feature (72)..(327): Homolog of NCBI NO: 15241764 NR Description: hypothetical protein [Arabidopsis thaliana]
  misc_feature (72)..(339): Homolog of NCBI NO: 8809640 NR Description: gb|AAC32909.1~gene_id:MMI9.10~similar to unknown
  misc_feature (33)..(339): Homolog of NCBI NO: 34908962 NR Description: P0003D09.18 [Oryza sativa (japonica
HFTRRHSPLTMQPLHRLASCTRRVATSSLRHDSLLPRAPSGILSFSTDAPAGGGGSFDAAWESASSWSTGLAGDHFNGQAPSEVLAYLQDTEDRLRELEAENRRGKAYCDSWKSRLEETTVLLKQVQEPGARGSYLKDSEKAEMYRLHKKNPQVYTVEKLARDYRIMRQRVHAILWLKEIEEEEEKRLGHPLDDSVEQLLDSCPEFFNSHDREFHVASLPYKPDFKVMPEGWDGITKDVDEVHYEISMKEDEMLYREFVEKMNFNKKKMAGEVKCHKYSRRRPSDGWTFTVEKLGHQGKRGGGGGWKFASMPDGSSRPLNDMEKMYVKRETPRRRRRILP

SEQ ID NO: 57585 - protein, 330 aa, Glycine max
  peptide (1)..(330): Ceres Seq. ID no. 14315917
  misc_feature (151)..(327): Homolog of NCBI NO: 18071389 NR Description: putative mucin [Oryza sativa]
  misc_feature (1)..(311): Homolog of NCBI NO: 15227059 NR Description: mucin -related [Arabidopsis thaliana]
  misc_feature (62)..(317): Homolog of NCBI NO: 15241764 NR Description: hypothetical protein [Arabidopsis thaliana]
  misc_feature (62)..(329): Homolog of NCBI NO: 8809640 NR Description: gb|AAC32909.1~gene_id:MMI9.10~similar to unknown
  misc_feature (23)..(329): Homolog of NCBI NO: 34908962 NR Description: P0003D09.18 [Oryza sativa (japonica
MQPLHRLASCTRRVATSSLRHDSLLPRAPSGILSFSTDAPAGGGGSFDAAWESASSWSTGLAGDHFNGQAPSEVLAYLQDTEDRLRELEAENRRGKAYCDSWKSRLEETTVLLKQVQEPGARGSYLKDSEKAEMYRLHKKNPQVYTVEKLARDYRIMRQRVHAILWLKEIEEEEEKRLGHPLDDSVEQLLDSCPEFFNSHDREFHVASLPYKPDFKVMPEGWDGITKDVDEVHYEISMKEDEMLYREFVEKMNFNKKKMAGEVKCHKYSRRRPSDGWTFTVEKLGHQGKRGGGGGWKFASMPDGSSRPLNDMEKMYVKRETPRRRRRILP

SEQ ID NO: 57586 - protein, 197 aa, Glycine max
  peptide (1)..(197): Ceres Seq. ID no. 14315918
  misc_feature (18)..(194): Homolog of NCBI NO: 18071389 NR Description: putative mucin [Oryza sativa]
  misc_feature (1)..(178): Homolog of NCBI NO: 15227059 NR Description: mucin -related [Arabidopsis thaliana]
  misc_feature (1)..(184): Homolog of NCBI NO: 15241764 NR Description: hypothetical protein [Arabidopsis thaliana]
  misc_feature (1)..(196): Homolog of NCBI NO: 8809640 NR Description: gb|AAC32909.1~gene_id:MMI9.10~similar to unknown
  misc_feature (1)..(196): Homolog of NCBI NO: 34908962 NR Description: P0003D09.18 [Oryza sativa (japonica
MYRLHKKNPQVYTVEKLARDYRIMRQRVHAILWLKEIEEEEEKRLGHPLDDSVEQLLDSCPEFFNSHDREFHVASLPYKPDFKVMPEGWDGITKDVDEVHYEISMKEDEMLYREFVEKMNFNKKKMAGEVKCHKYSRRRPSDGWTFTVEKLGHQGKRGGGGGWKFASMPDGSSRPLNDMEKMYVKRETPRRRRRILP

SEQ ID NO: 57587 - DNA, 656 bp, Glycine max
  misc_feature (1)..(656): Ceres Seq. ID no. 13638232
ttcattcccttacccgagaaaatgaggtggagctcactctttgtgccctcttttctactccatattcttcttctatcttgcatttttttcacaccaactgattcctctgatggggatggggatggggatttggtagaccaaatatgcaaaaaaacacccttttatgacctttgcagctccatcttacactcaaatcccttagcccccaaaagtgatccaaagggtatggccctcataatggtcaatggaattctgacaaatgctactgacacactcagttacattgaagagcttatcaagcagacctcagatgaacaattagagcaacagttggctttctgtgctgagtcatacatcccagttgtgaagtacattctcccacaagcagctgatgccataaaccaaggtcgatttgggtttgccagttactgcatagttgatgctcagaaggaagtaaatgcttgcgacaagaaattctcgggctcaactcaagcacccttaagtgatagaaatgacattatgcagaagctggtggatgtggctgctgccataattaaactattattaaatggctgatttatttttctcttcctcctttccagcctcatttcttgtagaatatagcaattattagtgcccttatcttatccaataaa

SEQ ID NO: 57588 - protein, 191 aa, Glycine max
  peptide (1)..(191): Ceres Seq. ID no. 13638233
  misc_feature (12)..(188): Homolog of NCBI NO: 7670039 NR Description: invertase inhibitor-like protein [Arabidopsis
  misc_feature (11)..(188): Homolog of NCBI NO: 27544454 NR Description: pectinmethylesterase inhibitor [Actinidia
  misc_feature (11)..(188): Homolog of NCBI NO: 27544452 NR Description: pectinmethylesterase inhibitor [Actinidia
  misc_feature (45)..(188): Homolog of NCBI NO: 34894526 NR Description: B1011A07.9 [Oryza sativa (japonica
  misc_feature (33)..(189): Homolog of NCBI NO: 22212790 NR Description: invertase inhibitor-like protein [Ipomoea batatas]
  misc_feature (17)..(159): Homolog of NCBI NO: 15237747 NR Description: invertase/pectin methylesterase inhibitor -
  misc_feature (43)..(189): Homolog of NCBI NO: 7489160 NR Description: invertase inhibitor precursor - common tobacco
  misc_feature (40)..(189): Homolog of NCBI NO: 7489025 NR Description: invertase inhibitor precursor - tomato
  misc_feature (41)..(189): Homolog of NCBI NO: 18401982 NR Description: invertase/pectin methylesterase inhibitor -
  misc_feature (20)..(191): Homolog of NCBI NO: 15228972 NR Description: hypothetical protein [Arabidopsis thaliana]
FIPLPEKMRWSSLFVPSFLLHILLLSCIFFTPTDSSDGDGDGDLVDQICKKTPFYDLCSSILHSNPLAPKSDPKGMALIMVNGILTNATDTLSYIEELIKQTSDEQLEQQLAFCAESYIPVVKYILPQAADAINQGRFGFASYCIVDAQKEVNACDKKFSGSTQAPLSDRNDIMQKLVDVAAAIIKLLLNG

SEQ ID NO: 57589 - protein, 184 aa, Glycine max
  peptide (1)..(184): Ceres Seq. ID no. 13638234
  misc_feature (5)..(181): Homolog of NCBI NO: 7670039 NR Description: invertase inhibitor-like protein [Arabidopsis
  misc_feature (4)..(181): Homolog of NCBI NO: 27544454 NR Description: pectinmethylesterase inhibitor [Actinidia
  misc_feature (4)..(181): Homolog of NCBI NO: 27544452 NR Description: pectinmethylesterase inhibitor [Actinidia
  misc_feature (38)..(181): Homolog of NCBI NO: 34894526 NR Description: B1011A07.9 [Oryza sativa (japonica
  misc_feature (26)..(182): Homolog of NCBI NO: 22212790 NR Description: invertase inhibitor-like protein [Ipomoea batatas]
  misc_feature (10)..(152): Homolog of NCBI NO: 15237747 NR Description: invertase/pectin methylesterase inhibitor -
  misc_feature (36)..(182): Homolog of NCBI NO: 7489160 NR Description: invertase inhibitor precursor - common tobacco
  misc_feature (33)..(182): Homolog of NCBI NO: 7489025 NR Description: invertase inhibitor precursor - tomato
  misc_feature (34)..(182): Homolog of NCBI NO: 18401982 NR Description: invertase/pectin methylesterase inhibitor -
  misc_feature (13)..(184): Homolog of NCBI NO: 15228972 NR Description: hypothetical protein [Arabidopsis thaliana]
MRWSSLFVPSFLLHILLLSCIFFTPTDSSDGDGDGDLVDQICKKTPFYDLCSSILHSNPLAPKSDPKGMALIMVNGILTNATDTLSYIEELIKQTSDEQLEQQLAFCAESYIPVVKYILPQAADAINQGRFGFASYCIVDAQKEVNACDKKFSGSTQAPLSDRNDIMQKLVDVAAAIIKLLLNG

SEQ ID NO: 57590 - protein, 116 aa, Glycine max
  peptide (1)..(116): Ceres Seq. ID no. 13638235
  misc_feature (1)..(113): Homolog of NCBI NO: 7670039 NR Description: invertase inhibitor-like protein [Arabidopsis
  misc_feature (1)..(113): Homolog of NCBI NO: 27544454 NR Description: pectinmethylesterase inhibitor [Actinidia
  misc_feature (1)..(113): Homolog of NCBI NO: 27544452 NR Description: pectinmethylesterase inhibitor [Actinidia
  misc_feature (1)..(113): Homolog of NCBI NO: 34894526 NR Description: B1011A07.9 [Oryza sativa (japonica
  misc_feature (1)..(114): Homolog of NCBI NO: 22212790 NR Description: invertase inhibitor-like protein [Ipomoea batatas]
  misc_feature (1)..(84): Homolog of NCBI NO: 15237747 NR Description: invertase/pectin methylesterase inhibitor -
  misc_feature (1)..(114): Homolog of NCBI NO: 7489160 NR Description: invertase inhibitor precursor - common tobacco
  misc_feature (1)..(114): Homolog of NCBI NO: 7489025 NR Description: invertase inhibitor precursor - tomato
  misc_feature (1)..(114): Homolog of NCBI NO: 18401982 NR Description: invertase/pectin methylesterase inhibitor -
  misc_feature (1)..(116): Homolog of NCBI NO: 15228972 NR Description: hypothetical protein [Arabidopsis thaliana]
MALIMVNGILTNATDTLSYIEELIKQTSDEQLEQQLAFCAESYIPVVKYILPQAADAINQGRFGFASYCIVDAQKEVNACDKKFSGSTQAPLSDRNDIMQKLVDVAAAIIKLLLNG

SEQ ID NO: 57591 - DNA, 760 bp, Glycine max
  misc_feature (1)..(760): Ceres Seq. ID no. 15169960
acattcatcgtgaaccatcgcgaacatcccaatgaccaaaaatcctccaatatatatatataacttccccgttctctcacactcaacagaaaattgaaaaccaacataacaatgtcgttgattccaagtttcttcggcaccgggcgaagaaccaacgtcttcgaccccttctccctcgacgtgtgggacccattccatggcttccccggcaccaccgccctctccgctccgcgctccgagacggcggccttcgccaacacgcgtatcgactggaaggagacggcggaggcgcacgtgttcaaggcagacctgccggggctgaagaaggaagaggtgaaggtggagatcgaggaggagggaagggtgctgcagataagcggacagagaacaaaggagaaggaggacaagaacgacacgtggcaccgcctcgaacgctccagcggcagctttctccgccgcttccgcctgccggagaacgcgaaactcgatcaggtgaaggccggcatggagaacggagtgctcactgtcactgttcccaaggtggatgtcaagaagcccgatgtcaagcccgttcagatcactgaaggctaagttgtgttctcaatcaatcaaaattcatgtgtctcaataattgagtttgaggtgtgttgtgtgagatattattaccatgtattgttatagtgtggtgaactgttggtcgtgttgtgtaactttttttaataataaagaatattgatatatgaatatttttattttaaac

SEQ ID NO: 57592 - protein, 159 aa, Glycine max
  peptide (1)..(159): Ceres Seq. ID no. 15169961
  misc_feature (1)..(157): Homolog of NCBI NO: 123538 NR Description: 17.5 KD CLASS I HEAT SHOCK PROTEIN (HSP 17.5-M)
  misc_feature (1)..(157): Homolog of NCBI NO: 123548 NR Description: 17.8 KD CLASS I HEAT SHOCK PROTEIN (CLONE
  misc_feature (1)..(157): Homolog of NCBI NO: 71495 NR Description: heat shock protein (clone DChsp17.7) - carrot
  misc_feature (3)..(157): Homolog of NCBI NO: 7441300 NR Description: probable heat shock protein - garden pea
  misc_feature (1)..(157): Homolog of NCBI NO: 123556 NR Description: 18.2 KD CLASS I HEAT SHOCK PROTEIN
  misc_feature (1)..(157): Homolog of NCBI NO: 16930753 NR Description: small heat shock protein [Retama raetam]
MSLIPSFFGTGRRTNVFDPFSLDVWDPFHGFPGTTALSAPRSETAAFANTRIDWKETAEAHVFKADLPGLKKEEVKVEIEEEGRVLQISGQRTKEKEDKNDTWHRLERSSGSFLRRFRLPENAKLDQVKAGMENGVLTVTVPKVDVKKPDVKPVQITEG

SEQ ID NO: 57593 - DNA, 974 bp, Glycine max
  misc_feature (1)..(974): Ceres Seq. ID no. 15171634
ccattgttcaaaaccttcattcatttcaagcaaataatagtttcacatgcatatgtacgtgccctaaacattcaaaaccctacgtacgtcaacatctccgaaaaataaaaatggcgaaaaggagcatgtgtgtttttttgtgcgtgactttgttcatggttgggttttcggagtgttcgagcacgagcacgttcctctacagcgggtgcacgcagcaacggtacactcccaactcgccctacgagtggaatatcaactcgctactcacctcgctggtgaactcagcgacgtactcggcttataacaacttcactgtggtggggtccactcagcaggacgcggtgtacgggctctaccagtgtcgcggcgacctcgccatgccggactgcgccgcgtgcgtggcgcgcgccgtcacccgcgccggcgacatctgccgcggcacgtgcggtggctcggtgcagctcgacggctgcttcgtgaagtacgacaacgcgacgttcctcggcgcgcaggacaaggcggtggtgctgaagaagtgcgggccgtcggtagggtacaaccccgatgccatggggagtcgcgacgccgtgctggccggactcgccgccgccggggggaactttcgcgtcggcgggtctggcggggttcacggcgtggcgcagtgcaccggcgatctcagctacggcgagtgccaggactgcgtggcggaggcgatctcgcggctgaagagcgattgcggcacggcggattacggggacatgtttctcgggaagtgctacgcgaggtactcagtgggtggggcccacgatgagtccaaggcccacggtaaggcccagcatcgtcgcatgcttcctcttctcttactacctctcatgggtttcaagttttaaattcgcttgtagattgaaattgatgtaaaaaaaatgaaaattgtaattttctttgtgaagttgtaagaatcaaaggtttaagag

SEQ ID NO: 57594 - protein, 295 aa, Glycine max
  peptide (1)..(295): Ceres Seq. ID no. 15171635
  misc_feature (116)..(168): Pfam Name: Domain of unknown function DUF26 Pfam Description: Domain of unknown function DUF26
  misc_feature (62)..(263): Homolog of NCBI NO: 25408259 NR Description: hypothetical protein At2g33330 [imported] -
  misc_feature (62)..(263): Homolog of NCBI NO: 18403243 NR Description: expressed protein [Arabidopsis thaliana]
  misc_feature (35)..(268): Homolog of NCBI NO: 18409653 NR Description: expressed protein [Arabidopsis thaliana]
  misc_feature (35)..(286): Homolog of NCBI NO: 25406066 NR Description: unknown protein F5A18.13 [imported] - Arabidopsis
  misc_feature (35)..(268): Homolog of NCBI NO: 21593606 NR Description: unknown [Arabidopsis thaliana]
  misc_feature (44)..(275): Homolog of NCBI NO: 21554153 NR Description: unknown [Arabidopsis thaliana]
  misc_feature (44)..(275): Homolog of NCBI NO: 25410919 NR Description: hypothetical protein At2g01660 [imported] -
  misc_feature (44)..(275): Homolog of NCBI NO: 18379273 NR Description: expressed protein [Arabidopsis thaliana]
  misc_feature (37)..(274): Homolog of NCBI NO: 30693130 NR Description: expressed protein [Arabidopsis thaliana]
  misc_feature (37)..(274): Homolog of NCBI NO: 9757976 NR Description: contains similarity to secretory
IVQNLHSFQANNSFTCICTCPKHSKPYVRQHLRKIKMAKRSMCVFLCVTLFMVGFSECSSTSTFLYSGCTQQRYTPNSPYEWNINSLLTSLVNSATYSAYNNFTVVGSTQQDAVYGLYQCRGDLAMPDCAACVARAVTRAGDICRGTCGGSVQLDGCFVKYDNATFLGAQDKAVVLKKCGPSVGYNPDAMGSRDAVLAGLAAAGGNFRVGGSGGVHGVAQCTGDLSYGECQDCVAEAISRLKSDCGTADYGDMFLGKCYARYSVGGAHDESKAHGKAQHRRMLPLLLLPLMGFKF

SEQ ID NO: 57595 - protein, 259 aa, Glycine max
  peptide (1)..(259): Ceres Seq. ID no. 15171636
  misc_feature (80)..(132): Pfam Name: Domain of unknown function DUF26 Pfam Description: Domain of unknown function DUF26
  misc_feature (26)..(227): Homolog of NCBI NO: 25408259 NR Description: hypothetical protein At2g33330 [imported] -
  misc_feature (26)..(227): Homolog of NCBI NO: 18403243 NR Description: expressed protein [Arabidopsis thaliana]
  misc_feature (1)..(232): Homolog of NCBI NO: 18409653 NR Description: expressed protein [Arabidopsis thaliana]
  misc_feature (1)..(250): Homolog of NCBI NO: 25406066 NR Description: unknown protein F5A18.13 [imported] - Arabidopsis
  misc_feature (1)..(232): Homolog of NCBI NO: 21593606 NR Description: unknown [Arabidopsis thaliana]
  misc_feature (8)..(239): Homolog of NCBI NO: 21554153 NR Description: unknown [Arabidopsis thaliana]
  misc_feature (8)..(239): Homolog of NCBI NO: 25410919 NR Description: hypothetical protein At2g01660 [imported] -
  misc_feature (8)..(239): Homolog of NCBI NO: 18379273 NR Description: expressed protein [Arabidopsis thaliana]
  misc_feature (1)..(238): Homolog of NCBI NO: 30693130 NR Description: expressed protein [Arabidopsis thaliana]
  misc_feature (1)..(238): Homolog of NCBI NO: 9757976 NR Description: contains similarity to secretory
MAKRSMCVFLCVTLFMVGFSECSSTSTFLYSGCTQQRYTPNSPYEWNINSLLTSLVNSATYSAYNNFTVVGSTQQDAVYGLYQCRGDLAMPDCAACVARAVTRAGDICRGTCGGSVQLDGCFVKYDNATFLGAQDKAVVLKKCGPSVGYNPDAMGSRDAVLAGLAAAGGNFRVGGSGGVHGVAQCTGDLSYGECQDCVAEAISRLKSDCGTADYGDMFLGKCYARYSVGGAHDESKAHGKAQHRRMLPLLLLPLMGFKF

SEQ ID NO: 57596 - protein, 254 aa, Glycine max
  peptide (1)..(254): Ceres Seq. ID no. 15171637
  misc_feature (75)..(127): Pfam Name: Domain of unknown function DUF26 Pfam Description: Domain of unknown function DUF26
  misc_feature (21)..(222): Homolog of NCBI NO: 25408259 NR Description: hypothetical protein At2g33330 [imported] -
  misc_feature (21)..(222): Homolog of NCBI NO: 18403243 NR Description: expressed protein [Arabidopsis thaliana]
  misc_feature (1)..(227): Homolog of NCBI NO: 18409653 NR Description: expressed protein [Arabidopsis thaliana]
  misc_feature (1)..(245): Homolog of NCBI NO: 25406066 NR Description: unknown protein F5A18.13 [imported] - Arabidopsis
  misc_feature (1)..(227): Homolog of NCBI NO: 21593606 NR Description: unknown [Arabidopsis thaliana]
  misc_feature (3)..(234): Homolog of NCBI NO: 21554153 NR Description: unknown [Arabidopsis thaliana]
  misc_feature (3)..(234): Homolog of NCBI NO: 25410919 NR Description: hypothetical protein At2g01660 [imported] -
  misc_feature (3)..(234): Homolog of NCBI NO: 18379273 NR Description: expressed protein [Arabidopsis thaliana]
  misc_feature (1)..(233): Homolog of NCBI NO: 30693130 NR Description: expressed protein [Arabidopsis thaliana]
  misc_feature (1)..(233): Homolog of NCBI NO: 9757976 NR Description: contains similarity to secretory
MCVFLCVTLFMVGFSECSSTSTFLYSGCTQQRYTPNSPYEWNINSLLTSLVNSATYSAYNNFTVVGSTQQDAVYGLYQCRGDLAMPDCAACVARAVTRAGDICRGTCGGSVQLDGCFVKYDNATFLGAQDKAVVLKKCGPSVGYNPDAMGSRDAVLAGLAAAGGNFRVGGSGGVHGVAQCTGDLSYGECQDCVAEAISRLKSDCGTADYGDMFLGKCYARYSVGGAHDESKAHGKAQHRRMLPLLLLPLMGFKF

SEQ ID NO: 57597 - DNA, 1138 bp, Glycine max
  misc_feature (1)..(1138): Ceres Seq. ID no. 14315896
ctgtccaacaaaaatctcgaccaatagctatattctctcatggctggagattaggtagagacaaaattgggcaagagatatggggtagtttttatgatgctttggggaatgaatttaatatccatctatcgagaatgagtttgatgtcagcactggaatggtggctggtataccatcccagcatccagaagttctcatggaagcctcctcacacccctttctcctcccctctcttccttagtctctccatcctcagctacctctccctcaccctcctcctcaccctcctccctctcccacccttcccacaccgcctcctgaagcccatcaccgccctccacaacctcctcctcctcctcctctccctcctcatgctcctgggctgctccctcaccctcctcatccacacccctcacctccgctgggccgtctgcttcccaccccacaccaatcccaccgggcccctcttcttctgggcctacatcttctacctctccaaaatcctcgaattcctcgacacgctcttcatcgtcctctcccgctccttccgacgcctctccttcctccacgtctaccaccacgccaccgtcctcctcatgtgctacctctggctccaaacctcccaatccctcttccccgtcgcgctcctcaccaatgcctccgtccacgtcatcatgtacggttactacttcctcagcgccctcggcatccgcccctcctggaagcgcgccgtcaccgactgccagatcatccagttcgtcttcagcttcgcaatttcgggtctcatgctccactaccacttctccggatccggatgctccgggatttggggctggtgcttcaatgcggtttttaatgcctctctcttggccctctttgttgattttcatctcaagagttatgctaagaaacgcactcttaataaggactcatgaattcctcgtccatttcattggtagcatactttatcttctgtaagacaagagaaaaaaaatattcattggaattcaatgacaatgttttttttttcctcctccttgttaaaggattattacaagataataatgccttacattacctgtcatctttattttctttcctttttccttaccattcaagggatgcaacttttaatccg

SEQ ID NO: 57598 - protein, 310 aa, Glycine max
  peptide (1)..(310): Ceres Seq. ID no. 14315897
  misc_feature (46)..(305): Pfam Name: GNS1/SUR4 family Pfam Description: GNS1/SUR4 family
  misc_feature (106)..(305): Homolog of NCBI NO: 6319882 NR Description: Elongase II elongates palmitoyl-CoA and up to C22 fatty acids, and is also involved in the synthesis of
  misc_feature (101)..(303): Homolog of NCBI NO: 27948812 NR Description: FEN1 [Kluyveromyces delphensis]
  misc_feature (40)..(310): Homolog of NCBI NO: 467698 NR Description: SUR4 [Saccharomyces cerevisiae]
  misc_feature (41)..(310): Homolog of NCBI NO: 28828933 NR Description: similar to GNS1/SUR4 family protein
  misc_feature (46)..(308): Homolog of NCBI NO: 15234538 NR Description: expressed protein [Arabidopsis thaliana]
  misc_feature (52)..(308): Homolog of NCBI NO: 19569971 NR Description: Hypothetical 36.2 kDa protein in UBP12-CDC6
  misc_feature (48)..(310): Homolog of NCBI NO: 15222085 NR Description: hypothetical protein [Arabidopsis thaliana]
  misc_feature (42)..(301): Homolog of NCBI NO: 19033556 NR Description: putative long chain fatty acid elongation enzyme
  misc_feature (46)..(305): Homolog of NCBI NO: 15230725 NR Description: expressed protein [Arabidopsis thaliana]
  misc_feature (46)..(305): Homolog of NCBI NO: 15230729 NR Description: expressed protein [Arabidopsis thaliana]
VQQKSRPIAIFSHGWRLGRDKIGQEIWGSFYDALGNEFNIHLSRMSLMSALEWWLVYHPSIQKFSWKPPHTPFSSPLFLSLSILSYLSLTLLLTLLPLPPFPHRLLKPITALHNLLLLLLSLLMLLGCSLTLLIHTPHLRWAVCFPPHTNPTGPLFFWAYIFYLSKILEFLDTLFIVLSRSFRRLSFLHVYHHATVLLMCYLWLQTSQSLFPVALLTNASVHVIMYGYYFLSALGIRPSWKRAVTDCQIIQFVFSFAISGLMLHYHFSGSGCSGIWGWCFNAVFNASLLALFVDFHLKSYAKKRTLNKDS

SEQ ID NO: 57599 - protein, 266 aa, Glycine max
  peptide (1)..(266): Ceres Seq. ID no. 14315898
  misc_feature (2)..(261): Pfam Name: GNS1/SUR4 family Pfam Description: GNS1/SUR4 family
  misc_feature (62)..(261): Homolog of NCBI NO: 6319882 NR Description: Elongase II elongates palmitoyl-CoA and up to C22 fatty acids, and is also involved in the synthesis of
  misc_feature (57)..(259): Homolog of NCBI NO: 27948812 NR Description: FEN1 [Kluyveromyces delphensis]
  misc_feature (1)..(266): Homolog of NCBI NO: 467698 NR Description: SUR4 [Saccharomyces cerevisiae]
  misc_feature (1)..(266): Homolog of NCBI NO: 28828933 NR Description: similar to GNS1/SUR4 family protein
  misc_feature (2)..(264): Homolog of NCBI NO: 15234538 NR Description: expressed protein [Arabidopsis thaliana]
  misc_feature (8)..(264): Homolog of NCBI NO: 19569971 NR Description: Hypothetical 36.2 kDa protein in UBP12-CDC6
  misc_feature (4)..(266): Homolog of NCBI NO: 15222085 NR Description: hypothetical protein [Arabidopsis thaliana]
  misc_feature (1)..(257): Homolog of NCBI NO: 19033556 NR Description: putative long chain fatty acid elongation enzyme
  misc_feature (2)..(261): Homolog of NCBI NO: 15230725 NR Description: expressed protein [Arabidopsis thaliana]
  misc_feature (2)..(261): Homolog of NCBI NO: 15230729 NR Description: expressed protein [Arabidopsis thaliana]
MSLMSALEWWLVYHPSIQKFSWKPPHTPFSSPLFLSLSILSYLSLTLLLTLLPLPPFPHRLLKPITALHNLLLLLLSLLMLLGCSLTLLIHTPHLRWAVCFPPHTNPTGPLFFWAYIFYLSKILEFLDTLFIVLSRSFRRLSFLHVYHHATVLLMCYLWLQTSQSLFPVALLTNASVHVIMYGYYFLSALGIRPSWKRAVTDCQIIQFVFSFAISGLMLHYHFSGSGCSGIWGWCFNAVFNASLLALFVDFHLKSYAKKRTLNKDS

SEQ ID NO: 57600 - protein, 263 aa, Glycine max
  peptide (1)..(263): Ceres Seq. ID no. 14315899
  misc_feature (1)..(258): Pfam Name: GNS1/SUR4 family Pfam Description: GNS1/SUR4 family
  misc_feature (59)..(258): Homolog of NCBI NO: 6319882 NR Description: Elongase II elongates palmitoyl-CoA and up to C22 fatty acids, and is also involved in the synthesis of
  misc_feature (54)..(256): Homolog of NCBI NO: 27948812 NR Description: FEN1 [Kluyveromyces delphensis]
  misc_feature (1)..(263): Homolog of NCBI NO: 467698 NR Description: SUR4 [Saccharomyces cerevisiae]
  misc_feature (1)..(263): Homolog of NCBI NO: 28828933 NR Description: similar to GNS1/SUR4 family protein
  misc_feature (1)..(261): Homolog of NCBI NO: 15234538 NR Description: expressed protein [Arabidopsis thaliana]
  misc_feature (5)..(261): Homolog of NCBI NO: 19569971 NR Description: Hypothetical 36.2 kDa protein in UBP12-CDC6
  misc_feature (1)..(263): Homolog of NCBI NO: 15222085 NR Description: hypothetical protein [Arabidopsis thaliana]
  misc_feature (1)..(254): Homolog of NCBI NO: 19033556 NR Description: putative long chain fatty acid elongation enzyme
  misc_feature (1)..(258): Homolog of NCBI NO: 15230725 NR Description: expressed protein [Arabidopsis thaliana]
  misc_feature (1)..(258): Homolog of NCBI NO: 15230729 NR Description: expressed protein [Arabidopsis thaliana]
MSALEWWLVYHPSIQKFSWKPPHTPFSSPLFLSLSILSYLSLTLLLTLLPLPPFPHRLLKPITALHNLLLLLLSLLMLLGCSLTLLIHTPHLRWAVCFPPHTNPTGPLFFWAYIFYLSKILEFLDTLFIVLSRSFRRLSFLHVYHHATVLLMCYLWLQTSQSLFPVALLTNASVHVIMYGYYFLSALGIRPSWKRAVTDCQIIQFVFSFAISGLMLHYHFSGSGCSGIWGWCFNAVFNASLLALFVDFHLKSYAKKRTLNKDS

SEQ ID NO: 57601 - DNA, 1312 bp, Glycine max
  misc_feature (1)..(1312): Ceres Seq. ID no. 14314378
aaggatcctccaaaacctcgtccaaggtttgtgttgtgttgggtgagattttattctaacatcgtttcatcaaatggcttttatgtctggagttcagcgtctgcttcgccgcactccacttgttcattcccactatgcttctattcgtctcagctcaactctcacttcccccaattttttttttttttttgtaacacaaattgaatttgctgctttattactaataattattgcaaacacaacaacagggtacaacacaaaaatgccacaataaatagaaaagcaatcatacacgaccatattaatctatgaacaaataaattaaagagatcactaaaaatggactgtacttttcacatttacttggcatttacatttcaaatctctctttcctgtttggatttgtccgtcacttgaacacaataagatcaggacgtgcaagatggccatcaaacaaatagaatcaacctgatctgaatcataaacattgtagcatagagatgacacattcagacttttattcaaagaacttggacaggaagatagatgtttcacttgactccaaatagagcttgcctttattcctcgataaaaactagaacatgatttatcgtgaatggtgcttccgcaattcgaacttacttgtagataggtggaggtggggaagcatatatgtaaactggaggtggaggtgatttgtaaatgtacttgggagcgggagctggggaaggaggaggtggtgatgtgtaatggtatggtggaggaggagatggagaaggtggtggagggctcacatagtggtaaggtggaggagcataagaagaaagtggaggccaaaaatgcattggaaaattatgcctataacatgaggaacacaatcaaggatgacaagattgcttccaaactgtcttctgatgataagaagaaaattgaagatgcgattgagcaggctatccaatggctagatggaaaccaacttgctgaggctgacgaatttgaggataagatgaaggagttggagagcatttgtaatcccatcatagcaaagatgtaccagggtgctggtggtgatgcgggtggagccatggatgaggatggtcctgcagctggcagtggaagcggtgctggacccaaaattgaggaagtcgattaagcagaagattctcatgggttgttcttgattttgtcaaagacccttttgaagtttagataacagcgtgtcattatgtttttattgcgattttatttttctcttttttttttaatgtacttttccccgtttctacttgaacaatgatataagtttttgctc

SEQ ID NO: 57602 - protein, 136 aa, Glycine max
  peptide (1)..(136): Ceres Seq. ID no. 14314379
  misc_feature (1)..(105): Pfam Name: Hsp70 protein Pfam Description: Hsp70 protein
  misc_feature (1)..(136): Homolog of NCBI NO: 3962377 NR Description: heat shock protein 70 [Arabidopsis thaliana]
  misc_feature (8)..(136): Homolog of NCBI NO: 38488578 NR Description: heat shock protein 70 [Nicotiana benthamiana]
  misc_feature (1)..(136): Homolog of NCBI NO: 29124135 NR Description: heat shock protein cognate 70
  misc_feature (1)..(136): Homolog of NCBI NO: 21664287 NR Description: heat shock protein 70 [Oryza sativa (indica
  misc_feature (1)..(136): Homolog of NCBI NO: 1076746 NR Description: dnaK-type molecular chaperone hsp70 - rice
  misc_feature (1)..(136): Homolog of NCBI NO: 34908140 NR Description: putative HSP70 [Oryza sativa (japonica
  misc_feature (1)..(136): Homolog of NCBI NO: 6969976 NR Description: high molecular weight heat shock protein [Malus x
  misc_feature (1)..(136): Homolog of NCBI NO: 30025966 NR Description: heat shock protein 70 [Nicotiana tabacum]
  misc_feature (1)..(136): Homolog of NCBI NO: 2119719 NR Description: dnaK-type molecular chaperone hsc70-3 - tomato
  misc_feature (1)..(136): Homolog of NCBI NO: 7488736 NR Description: dnaK-type molecular chaperone hsp70 - alfalfa
MCNGMVEEEMEKVVEGSHSGKVEEHKKKVEAKNALENYAYNMRNTIKDDKIASKLSSDDKKKIEDAIEQAIQWLDGNQLAEADEFEDKMKELESICNPIIAKMYQGAGGDAGGAMDEDGPAAGSGSGAGPKIEEVD

SEQ ID NO: 57603 - protein, 132 aa, Glycine max
  peptide (1)..(132): Ceres Seq. ID no. 14314380
  misc_feature (1)..(101): Pfam Name: Hsp70 protein Pfam Description: Hsp70 protein
  misc_feature (1)..(132): Homolog of NCBI NO: 3962377 NR Description: heat shock protein 70 [Arabidopsis thaliana]
  misc_feature (4)..(132): Homolog of NCBI NO: 38488578 NR Description: heat shock protein 70 [Nicotiana benthamiana]
  misc_feature (1)..(132): Homolog of NCBI NO: 29124135 NR Description: heat shock protein cognate 70
  misc_feature (1)..(132): Homolog of NCBI NO: 21664287 NR Description: heat shock protein 70 [Oryza sativa (indica
  misc_feature (1)..(132): Homolog of NCBI NO: 1076746 NR Description: dnaK-type molecular chaperone hsp70 - rice
  misc_feature (1)..(132): Homolog of NCBI NO: 34908140 NR Description: putative HSP70 [Oryza sativa (japonica
  misc_feature (1)..(132): Homolog of NCBI NO: 6969976 NR Description: high molecular weight heat shock protein [Malus x
  misc_feature (1)..(132): Homolog of NCBI NO: 30025966 NR Description: heat shock protein 70 [Nicotiana tabacum]
  misc_feature (1)..(132): Homolog of NCBI NO: 2119719 NR Description: dnaK-type molecular chaperone hsc70-3 - tomato
  misc_feature (1)..(132): Homolog of NCBI NO: 7488736 NR Description: dnaK-type molecular chaperone hsp70 - alfalfa
MVEEEMEKVVEGSHSGKVEEHKKKVEAKNALENYAYNMRNTIKDDKIASKLSSDDKKKIEDAIEQAIQWLDGNQLAEADEFEDKMKELESICNPIIAKMYQGAGGDAGGAMDEDGPAAGSGSGAGPKIEEVD

SEQ ID NO: 57604 - protein, 127 aa, Glycine max
  peptide (1)..(127): Ceres Seq. ID no. 14314381
  misc_feature (1)..(96): Pfam Name: Hsp70 protein Pfam Description: Hsp70 protein
  misc_feature (1)..(127): Homolog of NCBI NO: 3962377 NR Description: heat shock protein 70 [Arabidopsis thaliana]
  misc_feature (1)..(127): Homolog of NCBI NO: 38488578 NR Description: heat shock protein 70 [Nicotiana benthamiana]
  misc_feature (1)..(127): Homolog of NCBI NO: 29124135 NR Description: heat shock protein cognate 70
  misc_feature (1)..(127): Homolog of NCBI NO: 21664287 NR Description: heat shock protein 70 [Oryza sativa (indica
  misc_feature (1)..(127): Homolog of NCBI NO: 1076746 NR Description: dnaK-type molecular chaperone hsp70 - rice
  misc_feature (1)..(127): Homolog of NCBI NO: 34908140 NR Description: putative HSP70 [Oryza sativa (japonica
  misc_feature (1)..(127): Homolog of NCBI NO: 6969976 NR Description: high molecular weight heat shock protein [Malus x
  misc_feature (1)..(127): Homolog of NCBI NO: 30025966 NR Description: heat shock protein 70 [Nicotiana tabacum]
  misc_feature (1)..(127): Homolog of NCBI NO: 2119719 NR Description: dnaK-type molecular chaperone hsc70-3 - tomato
  misc_feature (1)..(127): Homolog of NCBI NO: 7488736 NR Description: dnaK-type molecular chaperone hsp70 - alfalfa
MEKVVEGSHSGKVEEHKKKVEAKNALENYAYNMRNTIKDDKIASKLSSDDKKKIEDAIEQAIQWLDGNQLAEADEFEDKMKELESICNPIIAKMYQGAGGDAGGAMDEDGPAAGSGSGAGPKIEEVD

SEQ ID NO: 57605 - DNA, 789 bp, Glycine max
  misc_feature (1)..(789): Ceres Seq. ID no. 15173608
gaaaaatttctctcgtcaaatttatccattcaccacagagtttcttcaatggcccagcctcaaccagagtcccacgccaccaatggctcacacgagccattgctcaaaatcccaaagctccaccaaaacggcgacgtttccgcaaccgctccctttctccgcgtcaagaagctctccgacaaggccgttttgccctctagggcttcccctctctccgccggttacgatctctctagcgcggtggagacgaaggtcccggcgagagggaaggctctggtggccactgacatcagcatcgcgattccagagggcacatatgctcgcgttgcgccgcgttcggggttggcgtggaagcactcgatcgacgtgggtgcgggggtgatagatgcggattacaggggtccggttggggttatacttttcaaccattcggacacggattttgaggtgaaggttggggacagggttgcgcaacttatcattgagaagattgtgacaccgaatgttgttacagaggtcgaggatttggatgagactgttagaggtgaaggtgggtttggatccaccggtgtttgattttgttctgttctcttggtaattttgtagagcagttggtgggtgtaatcgaatgaagaacctgtctttatcttttggcttgttagtgttctgtgtgtgtccaagttatgatggtattgatttggtcatcggggaatggcagtaggtattaggtaaatgctttcaaagctagaaaactttattgaacaagataattaattttattattgtctt

SEQ ID NO: 57606 - protein, 191 aa, Glycine max
  peptide (1)..(191): Ceres Seq. ID no. 15173609
  misc_feature (60)..(190): Pfam Name: dUTPase Pfam Description: dUTPase
  misc_feature (53)..(190): Homolog of NCBI NO: 1169437 NR Description: Deoxyuridine 5'-triphosphate nucleotidohydrolase
  misc_feature (53)..(191): Homolog of NCBI NO: 24583610 NR Description: CG4584-PB [Drosophila melanogaster]
  misc_feature (53)..(191): Homolog of NCBI NO: 38047903 NR Description: similar to Drosophila melanogaster BcDNA:LD08534
  misc_feature (53)..(191): Homolog of NCBI NO: 19921126 NR Description: CG4584-PA [Drosophila melanogaster]
  misc_feature (11)..(190): Homolog of NCBI NO: 40746988 NR Description: hypothetical protein AN0271.2 [Aspergillus
  misc_feature (55)..(191): Homolog of NCBI NO: 19114785 NR Description: deoxyuridine 5'-triphosphate nucleotidohydrolase
  misc_feature (50)..(191): Homolog of NCBI NO: 38566986 NR Description: probable dUTP pyrophosphatase [Neurospora crassa]
  misc_feature (46)..(191): Homolog of NCBI NO: 31126720 NR Description: putative deoxyuridine triphosphatase
  misc_feature (32)..(191): Homolog of NCBI NO: 416922 NR Description: Deoxyuridine 5'-triphosphate nucleotidohydrolase
  misc_feature (31)..(191): Homolog of NCBI NO: 15232681 NR Description: dUTP pyrophosphatase-related protein [Arabidopsis
EKFLSSNLSIHHRVSSMAQPQPESHATNGSHEPLLKIPKLHQNGDVSATAPFLRVKKLSDKAVLPSRASPLSAGYDLSSAVETKVPARGKALVATDISIAIPEGTYARVAPRSGLAWKHSIDVGAGVIDADYRGPVGVILFNHSDTDFEVKVGDRVAQLIIEKIVTPNVVTEVEDLDETVRGEGGFGSTGV

SEQ ID NO: 57607 - protein, 175 aa, Glycine max
  peptide (1)..(175): Ceres Seq. ID no. 15173610
  misc_feature (44)..(174): Pfam Name: dUTPase Pfam Description: dUTPase
  misc_feature (37)..(174): Homolog of NCBI NO: 1169437 NR Description: Deoxyuridine 5'-triphosphate nucleotidohydrolase
  misc_feature (37)..(175): Homolog of NCBI NO: 24583610 NR Description: CG4584-PB [Drosophila melanogaster]
  misc_feature (37)..(175): Homolog of NCBI NO: 38047903 NR Description: similar to Drosophila melanogaster BcDNA:LD08534
  misc_feature (37)..(175): Homolog of NCBI NO: 19921126 NR Description: CG4584-PA [Drosophila melanogaster]
  misc_feature (1)..(174): Homolog of NCBI NO: 40746988 NR Description: hypothetical protein AN0271.2 [Aspergillus
  misc_feature (39)..(175): Homolog of NCBI NO: 19114785 NR Description: deoxyuridine 5'-triphosphate nucleotidohydrolase
  misc_feature (34)..(175): Homolog of NCBI NO: 38566986 NR Description: probable dUTP pyrophosphatase [Neurospora crassa]
  misc_feature (30)..(175): Homolog of NCBI NO: 31126720 NR Description: putative deoxyuridine triphosphatase
  misc_feature (16)..(175): Homolog of NCBI NO: 416922 NR Description: Deoxyuridine 5'-triphosphate nucleotidohydrolase
  misc_feature (15)..(175): Homolog of NCBI NO: 15232681 NR Description: dUTP pyrophosphatase-related protein [Arabidopsis
MAQPQPESHATNGSHEPLLKIPKLHQNGDVSATAPFLRVKKLSDKAVLPSRASPLSAGYDLSSAVETKVPARGKALVATDISIAIPEGTYARVAPRSGLAWKHSIDVGAGVIDADYRGPVGVILFNHSDTDFEVKVGDRVAQLIIEKIVTPNVVTEVEDLDETVRGEGGFGSTGV

SEQ ID NO: 57608 - protein, 126 aa, Glycine max
  peptide (1)..(126): Ceres Seq. ID no. 15173611
KNFSRQIYPFTTEFLQWPSLNQSPTPPMAHTSHCSKSQSSTKTATFPQPLPFSASRSSPTRPFCPLGLPLSPPVTISLARWRRRSRREGRLWWPLTSASRFQRAHMLALRRVRGWRGSTRSTWVRG

SEQ ID NO: 57609 - DNA, 1073 bp, Glycine max
  misc_feature (1)..(1073): Ceres Seq. ID no. 13504447
ttatcaggtaggactgtgttattgaagagtagagaccgaatccgtatcgtagcaaaacgcacacgttagggggcggcgatgggagggtcatcggaggatttctcggtggtggtgctggcgtcggacctcggcgtcgatgcacgacccttcctcgaacacgaccaacagcaacaagaagaagagaattggcacgactgttcccagtacctctcccccgacgaggacttctccgatctcgatcagttgcaattcctccgcctccaaggctccgacaaaaactccaatcgcattctccgcatcgtcggcaagtactttcccgcaaccgttgtgagtgcggagcggctgaagaggtatgtgttccacaaaatttgcagtgagttgccagaggggccattttgtattgtttacatgcacagcaccgttcagaaggaggacaattcccctggcatcaccatcttgaggtggatctatgaagaacttcctgctgatttcaaggacaggcttcagactgtgtatttcgtccaccctggctttcggtcccggctagtcatcgctactcttggccgctttttcttgagtggaggattatattggaagatcaagtatgtaagccggcttcagtacctttgggatgacataaagaaaggagagattgagataccggattttgtgaaaagtcatgatgatattctggagaatagaccactcactgattatggcattgaacctgacccctttcacttgactgggatgccttcaactacctactcatttggaaagtacgaggagagatgggcgggaaggaattatgtgtcttagtatgtgtattgtcttattacatgatgaacccaaaccttttgtacagaatgactctagtattgtatttgtatttcctatactctcatctttgagtttctttgtttgtttagttaaacttgactgtgtacgaataggaggactacatgttttctatgccataagaaacttttatgtaagttgtatgctgtgtactgcacgattatcaccttcctgtgagcttttgaaataagaaacatgcagcttgtttttactgt

SEQ ID NO: 57610 - protein, 246 aa, Glycine max
  peptide (1)..(246): Ceres Seq. ID no. 15223285
  misc_feature (2)..(202): Homolog of NCBI NO: 24586357 NR Description: CG18812-PA [Drosophila melanogaster]
  misc_feature (30)..(218): Homolog of NCBI NO: 22094097 NR Description: ganglioside-induced
  misc_feature (30)..(218): Homolog of NCBI NO: 8923143 NR Description: ganglioside induced differentiation associated
  misc_feature (53)..(216): Homolog of NCBI NO: 38345848 NR Description: OSJNBa0084K11.12 [Oryza sativa (japonica
  misc_feature (41)..(218): Homolog of NCBI NO: 21553817 NR Description: unknown [Arabidopsis thaliana]
  misc_feature (41)..(218): Homolog of NCBI NO: 15237117 NR Description: expressed protein [Arabidopsis thaliana]
  misc_feature (1)..(80): Homolog of NCBI NO: 22830926 NR Description: P0466H10.24 [Oryza sativa (japonica
  misc_feature (80)..(240): Homolog of NCBI NO: 22830926 NR Description: P0466H10.24 [Oryza sativa (japonica
  misc_feature (5)..(239): Homolog of NCBI NO: 21593697 NR Description: unknown [Arabidopsis thaliana]
  misc_feature (5)..(239): Homolog of NCBI NO: 18398797 NR Description: expressed protein [Arabidopsis thaliana]
MGGSSEDFSVVVLASDLGVDARPFLEHDQQQQEEENWHDCSQYLSPDEDFSDLDQLQFLRLQGSDKNSNRILRIVGKYFPATVVSAERLKRYVFHKICSELPEGPFCIVYMHSTVQKEDNSPGITILRWIYEELPADFKDRLQTVYFVHPGFRSRLVIATLGRFFLSGGLYWKIKYVSRLQYLWDDIKKGEIEIPDFVKSHDDILENRPLTDYGIEPDPFHLTGMPSTTYSFGKYEERWAGRNYVS

SEQ ID NO: 57611 - protein, 136 aa, Glycine max
  peptide (1)..(136): Ceres Seq. ID no. 15223286
  misc_feature (1)..(92): Homolog of NCBI NO: 24586355 NR Description: CG18812-PB [Drosophila melanogaster]
  misc_feature (1)..(92): Homolog of NCBI NO: 24586357 NR Description: CG18812-PA [Drosophila melanogaster]
  misc_feature (1)..(108): Homolog of NCBI NO: 22094097 NR Description: ganglioside-induced
  misc_feature (1)..(108): Homolog of NCBI NO: 8923143 NR Description: ganglioside induced differentiation associated
  misc_feature (1)..(106): Homolog of NCBI NO: 38345848 NR Description: OSJNBa0084K11.12 [Oryza sativa (japonica
  misc_feature (1)..(108): Homolog of NCBI NO: 21553817 NR Description: unknown [Arabidopsis thaliana]
  misc_feature (1)..(108): Homolog of NCBI NO: 15237117 NR Description: expressed protein [Arabidopsis thaliana]
  misc_feature (1)..(130): Homolog of NCBI NO: 22830926 NR Description: P0466H10.24 [Oryza sativa (japonica
  misc_feature (1)..(129): Homolog of NCBI NO: 21593697 NR Description: unknown [Arabidopsis thaliana]
  misc_feature (1)..(129): Homolog of NCBI NO: 18398797 NR Description: expressed protein [Arabidopsis thaliana]
MHSTVQKEDNSPGITILRWIYEELPADFKDRLQTVYFVHPGFRSRLVIATLGRFFLSGGLYWKIKYVSRLQYLWDDIKKGEIEIPDFVKSHDDILENRPLTDYGIEPDPFHLTGMPSTTYSFGKYEERWAGRNYVS

SEQ ID NO: 57612 - DNA, 804 bp, Glycine max
  misc_feature (1)..(804): Ceres Seq. ID no. 15173567
cttccaaactctttaatctctcttctttcttgaatcaaactaaattcctttgttcagagacaaagaacaacaacaacaactgtaaccatgcttgtctaccaagatcttcttacaggtgacgagcttctctctgactcattcccgtacaaggaaactgagaatggaatgctgtgggaagtggaaggaaagtgggttgttcaaggagcagtcaatgtagatattggtgctaacccttctgcagaaggtggggatgaggacgagggagttgatgatcaagctgtcaaagtagttgatattgttgacacttttaggcttcaggaacaaccaccctttgataagaaacaatttattacttatatgaagagatatattaagttgctgacggccaaattagagggtgagcagcaagagttgttcaagaagcacatcgagggagcaactaagtccctcctatcaaagctcaaagacctccaattttttgtgggggagagtatgcacgatgatggaagccttgtctttgcttactacaaggaaggtgctactgatccaacttttatctactttgcctatggattgaaggaaatcaagtgctgagcacatgcaatgcatgccccttagttatcttttatctgagttgaaaaattgtctttaattttagttcttgtgttttgggttttggttatgttattaggacttaggaggttgtttcaagagtttaatttgtatgcgtttttatgttggttggtatgagaggaacatgttatcgtataatagtaatttaaaagagtatcatgtgttttagtc

SEQ ID NO: 57613 - protein, 168 aa, Glycine max
  peptide (1)..(168): Ceres Seq. ID no. 15173568
  misc_feature (1)..(165): Pfam Name: Translationally controlled tumour protein Pfam Description: Translationally controlled tumour protein
  misc_feature (1)..(168): Homolog of NCBI NO: 549063 NR Description: Translationally controlled tumor protein homolog
  misc_feature (1)..(168): Homolog of NCBI NO: 9979196 NR Description: Translationally controlled tumor protein homolog
MLVYQDLLTGDELLSDSFPYKETENGMLWEVEGKWVVQGAVNVDIGANPSAEGGDEDEGVDDQAVKVVDIVDTFRLQEQPPFDKKQFITYMKRYIKLLTAKLEGEQQELFKKHIEGATKSLLSKLKDLQFFVGESMHDDGSLVFAYYKEGATDPTFIYFAYGLKEIKC

SEQ ID NO: 57614 - protein, 142 aa, Glycine max
  peptide (1)..(142): Ceres Seq. ID no. 15173569
  misc_feature (1)..(139): Pfam Name: Translationally controlled tumour protein Pfam Description: Translationally controlled tumour protein
  misc_feature (1)..(142): Homolog of NCBI NO: 549063 NR Description: Translationally controlled tumor protein homolog
  misc_feature (1)..(142): Homolog of NCBI NO: 9979196 NR Description: Translationally controlled tumor protein homolog
MLWEVEGKWVVQGAVNVDIGANPSAEGGDEDEGVDDQAVKVVDIVDTFRLQEQPPFDKKQFITYMKRYIKLLTAKLEGEQQELFKKHIEGATKSLLSKLKDLQFFVGESMHDDGSLVFAYYKEGATDPTFIYFAYGLKEIKC

SEQ ID NO: 57615 - DNA, 649 bp, Glycine max
  misc_feature (1)..(649): Ceres Seq. ID no. 13532783
gtttatattgtgtgctagttctttgaagaataagcagtgccacaagttcacacaccccataccacctgccaatttcagaagaattcctgacccaaccacagcacaactagagagagtgagagggatggaggcgtttccaagagaccaacgaggttcgctcgaagtgttcaacccttcttcttcttactccaccgagaagtcggtgaactcgcctgtgcgtgttcaatccacgtggaagacgtggattgacgagttaccggaacaacaacaacaacaacaatgtggtggtactaacgaggtgaccgccacgtcatggatggcgcttaaggactccgctcctccaccgccgacgctcgccgcagtgctgggcgagtctctgtcagcggcggtgggggaggttggcaacgccgcgaagcgcgcggcggagtggggcctggtgctgaagacggacacggagaccgggaagccgcagggagtgaaggttcggacctccggcggggaggagctgggctttgtcccaaacatctttattttttcattcttctgagtcgcatgagtaacctgtacgttgacttaaggacaagttactccttcctttgaattcgatgtttcttaactgtgaaagtagaatatcgaagtcttgtgtgtt

SEQ ID NO: 57616 - protein, 181 aa, Glycine max
  peptide (1)..(181): Ceres Seq. ID no. 13532784
  misc_feature (131)..(168): Homolog of NCBI NO: 24899170 NR Description: phototropin [Vicia faba]
  misc_feature (31)..(176): Homolog of NCBI NO: 20338415 NR Description: phototropin 1 [Pisum sativum]
  misc_feature (31)..(176): Homolog of NCBI NO: 12040650 NR Description: phototropin-like protein PsPK4 [Pisum sativum]
  misc_feature (86)..(166): Homolog of NCBI NO: 7489362 NR Description: serine/threonine protein kinase (EC 2.7.1.-) 2,
  misc_feature (46)..(168): Homolog of NCBI NO: 15231245 NR Description: nonphototropic hypocotyl 1 [Arabidopsis thaliana]
  misc_feature (42)..(166): Homolog of NCBI NO: 24899168 NR Description: phototropin [Vicia faba]
  misc_feature (42)..(166): Homolog of NCBI NO: 34224025 NR Description: phototropin-like protein [Pisum sativum]
FILCASSLKNKQCHKFTHPIPPANFRRIPDPTTAQLERVRGMEAFPRDQRGSLEVFNPSSSYSTEKSVNSPVRVQSTWKTWIDELPEQQQQQQCGGTNEVTATSWMALKDSAPPPPTLAAVLGESLSAAVGEVGNAAKRAAEWGLVLKTDTETGKPQGVKVRTSGGEELGFVPNIFIFSFF

SEQ ID NO: 57617 - protein, 140 aa, Glycine max
  peptide (1)..(140): Ceres Seq. ID no. 13532785
  misc_feature (90)..(127): Homolog of NCBI NO: 24899170 NR Description: phototropin [Vicia faba]
  misc_feature (1)..(135): Homolog of NCBI NO: 20338415 NR Description: phototropin 1 [Pisum sativum]
  misc_feature (1)..(135): Homolog of NCBI NO: 12040650 NR Description: phototropin-like protein PsPK4 [Pisum sativum]
  misc_feature (45)..(125): Homolog of NCBI NO: 7489362 NR Description: serine/threonine protein kinase (EC 2.7.1.-) 2,
  misc_feature (5)..(127): Homolog of NCBI NO: 15231245 NR Description: nonphototropic hypocotyl 1 [Arabidopsis thaliana]
  misc_feature (1)..(125): Homolog of NCBI NO: 24899168 NR Description: phototropin [Vicia faba]
  misc_feature (1)..(125): Homolog of NCBI NO: 34224025 NR Description: phototropin-like protein [Pisum sativum]
MEAFPRDQRGSLEVFNPSSSYSTEKSVNSPVRVQSTWKTWIDELPEQQQQQQCGGTNEVTATSWMALKDSAPPPPTLAAVLGESLSAAVGEVGNAAKRAAEWGLVLKTDTETGKPQGVKVRTSGGEELGFVPNIFIFSFF

SEQ ID NO: 57618 - DNA, 1412 bp, Glycine max
  misc_feature (1)..(1412): Ceres Seq. ID no. 14315430
atcccttcttttcaaaaccctaattcctcttttctctcttccaatctcatttctcaagatcgctttcgctgcttcctcaggaattatgtcttttgtgcggaattatcaagcagaagatcgtagtttacatagtggttactggtccacctttgatggaaacaactatggtaacaacaataggaaaagaagcaggaacaattattataacaggaattgtaacatttacaatgataaccggacaaaatttggggaccattttaatttttacaatgctgatcatgctaattatgctagatatgatgctgttcgatcatctttgaaaaggagaaaatattcagcccctgtttggcaagaaagccagcagtactatgttccacccatggtccatgacaatatcccttcagcctataatttccaaggtcctccgacaagatctgatggtgatgcctctacatcagctagctgcaagcgtgattgctctatttttgaagatgataaacctgtcttcatgtcaagggacgaaattgatagacactctccatcaagaaaagatggtattgatgtacatcatgagacacacttgcggtactcctattgtgccttccttcagaatcttggaatgcgtcttgagctgcctcaaaacatcattgggacagctatggttctgtgccaccgtttctttgttcgacgatcacatgcttgccatgatagatttttgattgctactgctgctctttttcttactgcaaagtcagaggaagctccacgtcatttgaataacgtattgagaacatccagtgaaattttatataaacaagattttgctttgttatcctaccggtttcctgttgattggtttgaacagtatcgggagcgggtgcttgaggctgaacaactgatacttactactctaaattttgaactcaatgtgcaacatccatatgtacctcttacatctgttcttaacaagttgggtctatcaaagactgttttggtgaatctggcattaaacttggtcagtgaagggcttcggagttctctgtggcttcaatttaaaccccatcatattgctgctggagctgcatatcttgctgccaagtttctgaacatggatctcgcagcttatcagaacatctggcaagagttccagacaacaccatccatacttcaagatgtctcgcagcaattaatggagctcttttaaaagtatggaagaactggattacagcgttcttcttagtagagtaggttttgagtatataattcaaaatgttatttactttggagggagacattaggaactatgacatatttggtgagttacaggattagtggttgtgtgacctacggatttttaagttttaccaacttctctgaatcttctgctaacatgtcgagcatgccttgcgttc

SEQ ID NO: 57619 - protein, 400 aa, Glycine max
  peptide (1)..(400): Ceres Seq. ID no. 14315431
  misc_feature (169)..(309): Pfam Name: Cyclin, N-terminal domain Pfam Description: Cyclin, N-terminal domain
  misc_feature (179)..(400): Homolog of NCBI NO: 26374818 NR Description: unnamed protein product [Mus musculus]
  misc_feature (220)..(399): Homolog of NCBI NO: 6693016 NR Description: T22C5.8 [Arabidopsis thaliana]
  misc_feature (164)..(400): Homolog of NCBI NO: 15219592 NR Description: cyclin family [Arabidopsis thaliana]
  misc_feature (145)..(392): Homolog of NCBI NO: 15235087 NR Description: cyclin family [Arabidopsis thaliana]
  misc_feature (145)..(400): Homolog of NCBI NO: 7486085 NR Description: hypothetical protein F24J7.161 - Arabidopsis
  misc_feature (157)..(399): Homolog of NCBI NO: 21618277 NR Description: putative cyclin [Arabidopsis thaliana]
  misc_feature (157)..(399): Homolog of NCBI NO: 15217663 NR Description: cyclin family [Arabidopsis thaliana]
  misc_feature (169)..(400): Homolog of NCBI NO: 9759604 NR Description: contains similarity to cyclin~gene_id:K18C1.7
  misc_feature (169)..(400): Homolog of NCBI NO: 30694715 NR Description: cyclin family [Arabidopsis thaliana]
  misc_feature (145)..(400): Homolog of NCBI NO: 30684822 NR Description: cyclin family [Arabidopsis thaliana]
SLLFKTLIPLFSLPISFLKIAFAASSGIMSFVRNYQAEDRSLHSGYWSTFDGNNYGNNNRKRSRNNYYNRNCNIYNDNRTKFGDHFNFYNADHANYARYDAVRSSLKRRKYSAPVWQESQQYYVPPMVHDNIPSAYNFQGPPTRSDGDASTSASCKRDCSIFEDDKPVFMSRDEIDRHSPSRKDGIDVHHETHLRYSYCAFLQNLGMRLELPQNIIGTAMVLCHRFFVRRSHACHDRFLIATAALFLTAKSEEAPRHLNNVLRTSSEILYKQDFALLSYRFPVDWFEQYRERVLEAEQLILTTLNFELNVQHPYVPLTSVLNKLGLSKTVLVNLALNLVSEGLRSSLWLQFKPHHIAAGAAYLAAKFLNMDLAAYQNIWQEFQTTPSILQDVSQQLMELF

SEQ ID NO: 57620 - protein, 372 aa, Glycine max
  peptide (1)..(372): Ceres Seq. ID no. 14315432
  misc_feature (141)..(281): Pfam Name: Cyclin, N-terminal domain Pfam Description: Cyclin, N-terminal domain
  misc_feature (151)..(372): Homolog of NCBI NO: 26374818 NR Description: unnamed protein product [Mus musculus]
  misc_feature (192)..(371): Homolog of NCBI NO: 6693016 NR Description: T22C5.8 [Arabidopsis thaliana]
  misc_feature (136)..(372): Homolog of NCBI NO: 15219592 NR Description: cyclin family [Arabidopsis thaliana]
  misc_feature (117)..(364): Homolog of NCBI NO: 15235087 NR Description: cyclin family [Arabidopsis thaliana]
  misc_feature (117)..(372): Homolog of NCBI NO: 7486085 NR Description: hypothetical protein F24J7.161 - Arabidopsis
  misc_feature (129)..(371): Homolog of NCBI NO: 21618277 NR Description: putative cyclin [Arabidopsis thaliana]
  misc_feature (129)..(371): Homolog of NCBI NO: 15217663 NR Description: cyclin family [Arabidopsis thaliana]
  misc_feature (141)..(372): Homolog of NCBI NO: 9759604 NR Description: contains similarity to cyclin~gene_id:K18C1.7
  misc_feature (141)..(372): Homolog of NCBI NO: 30694715 NR Description: cyclin family [Arabidopsis thaliana]
  misc_feature (117)..(372): Homolog of NCBI NO: 30684822 NR Description: cyclin family [Arabidopsis thaliana]
MSFVRNYQAEDRSLHSGYWSTFDGNNYGNNNRKRSRNNYYNRNCNIYNDNRTKFGDHFNFYNADHANYARYDAVRSSLKRRKYSAPVWQESQQYYVPPMVHDNIPSAYNFQGPPTRSDGDASTSASCKRDCSIFEDDKPVFMSRDEIDRHSPSRKDGIDVHHETHLRYSYCAFLQNLGMRLELPQNIIGTAMVLCHRFFVRRSHACHDRFLIATAALFLTAKSEEAPRHLNNVLRTSSEILYKQDFALLSYRFPVDWFEQYRERVLEAEQLILTTLNFELNVQHPYVPLTSVLNKLGLSKTVLVNLALNLVSEGLRSSLWLQFKPHHIAAGAAYLAAKFLNMDLAAYQNIWQEFQTTPSILQDVSQQLMELF

SEQ ID NO: 57621 - protein, 274 aa, Glycine max
  peptide (1)..(274): Ceres Seq. ID no. 14315433
  misc_feature (43)..(183): Pfam Name: Cyclin, N-terminal domain Pfam Description: Cyclin, N-terminal domain
  misc_feature (53)..(274): Homolog of NCBI NO: 26374818 NR Description: unnamed protein product [Mus musculus]
  misc_feature (94)..(273): Homolog of NCBI NO: 6693016 NR Description: T22C5.8 [Arabidopsis thaliana]
  misc_feature (38)..(274): Homolog of NCBI NO: 15219592 NR Description: cyclin family [Arabidopsis thaliana]
  misc_feature (19)..(266): Homolog of NCBI NO: 15235087 NR Description: cyclin family [Arabidopsis thaliana]
  misc_feature (19)..(274): Homolog of NCBI NO: 7486085 NR Description: hypothetical protein F24J7.161 - Arabidopsis
  misc_feature (31)..(273): Homolog of NCBI NO: 21618277 NR Description: putative cyclin [Arabidopsis thaliana]
  misc_feature (31)..(273): Homolog of NCBI NO: 15217663 NR Description: cyclin family [Arabidopsis thaliana]
  misc_feature (43)..(274): Homolog of NCBI NO: 9759604 NR Description: contains similarity to cyclin~gene_id:K18C1.7
  misc_feature (43)..(274): Homolog of NCBI NO: 30694715 NR Description: cyclin family [Arabidopsis thaliana]
  misc_feature (19)..(274): Homolog of NCBI NO: 30684822 NR Description: cyclin family [Arabidopsis thaliana]
MVHDNIPSAYNFQGPPTRSDGDASTSASCKRDCSIFEDDKPVFMSRDEIDRHSPSRKDGIDVHHETHLRYSYCAFLQNLGMRLELPQNIIGTAMVLCHRFFVRRSHACHDRFLIATAALFLTAKSEEAPRHLNNVLRTSSEILYKQDFALLSYRFPVDWFEQYRERVLEAEQLILTTLNFELNVQHPYVPLTSVLNKLGLSKTVLVNLALNLVSEGLRSSLWLQFKPHHIAAGAAYLAAKFLNMDLAAYQNIWQEFQTTPSILQDVSQQLMELF

SEQ ID NO: 57622 - DNA, 1292 bp, Glycine max
  misc_feature (1)..(1292): Ceres Seq. ID no. 14316091
aaaaaaaacacaacacaacgagtagatccagaaagagcgttgaaacattgaaccttttgaatgagttggacggtttcgcagaaattgacgtttgaattgtagtcgcacgcacgtttcatcatcctctcgcaatcgccaatactccgatccccaaccagagaaaacctaagcgaacaacaacatgagtgctgacgccccaccccaaacccaagccaccaacaccaaaccggaagaatctcaatctcaatctcagtctcagcctcagcgtcactccggcgattatgctccataccctaaactggaccccaccgatgttgcgccaccacaacaaccactgaacactgaatctcgcgctcccatttccgaagatgctgccactactatgcccaaagactccaatccctatgtcactcctgctcccgtcactgcttcttctactaagactactttagattcggtgaaagacgttctcgggaaatgggggaagaaagccgccgaggccaccaagaaggccgaggatctcgccggcaacatgtggcagcacttgaaaacgggaccgagttttgctgatgctgccgtggggaggattgctcagggaactaaggttcttgcagaaggagggtatgaaaagatctttaggcaaacatttgagacagttccggaggagcagcttctcaaaacttatgcatgctacttgtctacctcggctggacctgtgatgggagtcttatatttgtcaacggctaagctggcattttgtagtgataacccactttcttaccaagtgggtgaccagactcaatggagctattataaggtggtcattccattgcaccagctgagagctgtaaacgcatccacaagcaaaaccaaccaatctgaaaaatatatacagattatctctgttgacaaccatgaattttggtttatgggctttgtgcactatgacagcgctgttaaaaatattcaaggagcattgcagcctcattgacaaacaagggattgaaaagcaccatgtattgtttataccagagatgaggtttgtgttgataaattatccatccatcaaagaaacatttatatgtttatctttacgtggttagttcgctagtctagtttgtggagctgttattattgtattaaaattgaaactcattcagtgttcacatgatatatttgctttaccttgttgctttctgaaagcgagagtcaattgatttgttgtaagttgaattgatatatagacggtggatttacatttaaatctattaaaatatcttttttttttgtat

SEQ ID NO: 57623 - protein, 269 aa, Glycine max
  peptide (1)..(269): Ceres Seq. ID no. 14316092
  misc_feature (150)..(226): Pfam Name: GRAM domain Pfam Description: GRAM domain
  misc_feature (2)..(262): Homolog of NCBI NO: 15240044 NR Description: GRAM domain-containing protein [Arabidopsis
  misc_feature (91)..(267): Homolog of NCBI NO: 34906818 NR Description: contains EST C91668(E31216)~similar to FH protein
  misc_feature (213)..(267): Homolog of NCBI NO: 15236123 NR Description: GRAM domain-containing protein [Arabidopsis
  misc_feature (52)..(197): Homolog of NCBI NO: 15236123 NR Description: GRAM domain-containing protein [Arabidopsis
  misc_feature (47)..(267): Homolog of NCBI NO: 29788871 NR Description: putative ABA-responsive protein
  misc_feature (56)..(267): Homolog of NCBI NO: 26452129 NR Description: unknown protein [Arabidopsis thaliana]
  misc_feature (56)..(267): Homolog of NCBI NO: 21592789 NR Description: unknown [Arabidopsis thaliana]
  misc_feature (56)..(267): Homolog of NCBI NO: 18399985 NR Description: GRAM domain-containing protein [Arabidopsis
  misc_feature (31)..(267): Homolog of NCBI NO: 34902414 NR Description: Putative FH protein interacting protein FIP1
  misc_feature (19)..(269): Homolog of NCBI NO: 15217869 NR Description: GRAM domain-containing protein [Arabidopsis
MSADAPPQTQATNTKPEESQSQSQSQPQRHSGDYAPYPKLDPTDVAPPQQPLNTESRAPISEDAATTMPKDSNPYVTPAPVTASSTKTTLDSVKDVLGKWGKKAAEATKKAEDLAGNMWQHLKTGPSFADAAVGRIAQGTKVLAEGGYEKIFRQTFETVPEEQLLKTYACYLSTSAGPVMGVLYLSTAKLAFCSDNPLSYQVGDQTQWSYYKVVIPLHQLRAVNASTSKTNQSEKYIQIISVDNHEFWFMGFVHYDSAVKNIQGALQPH

SEQ ID NO: 57624 - protein, 202 aa, Glycine max
  peptide (1)..(202): Ceres Seq. ID no. 14316093
  misc_feature (83)..(159): Pfam Name: GRAM domain Pfam Description: GRAM domain
  misc_feature (1)..(195): Homolog of NCBI NO: 15240044 NR Description: GRAM domain-containing protein [Arabidopsis
  misc_feature (24)..(200): Homolog of NCBI NO: 34906818 NR Description: contains EST C91668(E31216)~similar to FH protein
  misc_feature (146)..(200): Homolog of NCBI NO: 15236123 NR Description: GRAM domain-containing protein [Arabidopsis
  misc_feature (1)..(130): Homolog of NCBI NO: 15236123 NR Description: GRAM domain-containing protein [Arabidopsis
  misc_feature (1)..(200): Homolog of NCBI NO: 29788871 NR Description: putative ABA-responsive protein
  misc_feature (1)..(200): Homolog of NCBI NO: 26452129 NR Description: unknown protein [Arabidopsis thaliana]
  misc_feature (1)..(200): Homolog of NCBI NO: 21592789 NR Description: unknown [Arabidopsis thaliana]
  misc_feature (1)..(200): Homolog of NCBI NO: 18399985 NR Description: GRAM domain-containing protein [Arabidopsis
  misc_feature (1)..(200): Homolog of NCBI NO: 34902414 NR Description: Putative FH protein interacting protein FIP1
  misc_feature (1)..(202): Homolog of NCBI NO: 15217869 NR Description: GRAM domain-containing protein [Arabidopsis
MPKDSNPYVTPAPVTASSTKTTLDSVKDVLGKWGKKAAEATKKAEDLAGNMWQHLKTGPSFADAAVGRIAQGTKVLAEGGYEKIFRQTFETVPEEQLLKTYACYLSTSAGPVMGVLYLSTAKLAFCSDNPLSYQVGDQTQWSYYKVVIPLHQLRAVNASTSKTNQSEKYIQIISVDNHEFWFMGFVHYDSAVKNIQGALQPH

SEQ ID NO: 57625 - protein, 152 aa, Glycine max
  peptide (1)..(152): Ceres Seq. ID no. 14316094
  misc_feature (33)..(109): Pfam Name: GRAM domain Pfam Description: GRAM domain
  misc_feature (1)..(145): Homolog of NCBI NO: 15240044 NR Description: GRAM domain-containing protein [Arabidopsis
  misc_feature (1)..(150): Homolog of NCBI NO: 34906818 NR Description: contains EST C91668(E31216)~similar to FH protein
  misc_feature (96)..(150): Homolog of NCBI NO: 15236123 NR Description: GRAM domain-containing protein [Arabidopsis
  misc_feature (1)..(80): Homolog of NCBI NO: 15236123 NR Description: GRAM domain-containing protein [Arabidopsis
  misc_feature (1)..(150): Homolog of NCBI NO: 29788871 NR Description: putative ABA-responsive protein
  misc_feature (1)..(150): Homolog of NCBI NO: 26452129 NR Description: unknown protein [Arabidopsis thaliana]
  misc_feature (1)..(150): Homolog of NCBI NO: 21592789 NR Description: unknown [Arabidopsis thaliana]
  misc_feature (1)..(150): Homolog of NCBI NO: 18399985 NR Description: GRAM domain-containing protein [Arabidopsis
  misc_feature (1)..(150): Homolog of NCBI NO: 34902414 NR Description: Putative FH protein interacting protein FIP1
  misc_feature (1)..(152): Homolog of NCBI NO: 15217869 NR Description: GRAM domain-containing protein [Arabidopsis
MWQHLKTGPSFADAAVGRIAQGTKVLAEGGYEKIFRQTFETVPEEQLLKTYACYLSTSAGPVMGVLYLSTAKLAFCSDNPLSYQVGDQTQWSYYKVVIPLHQLRAVNASTSKTNQSEKYIQIISVDNHEFWFMGFVHYDSAVKNIQGALQPH

SEQ ID NO: 57626 - DNA, 985 bp, Glycine max
  misc_feature (1)..(985): Ceres Seq. ID no. 14316367
tttttctttcgctcttcttccattccacactaaaaagtaacagtttcggagggaaacacaatacaacacaaaaagccccccccacaaagcaaatcacctttttttcctttcaaaatgttcgccgaagagaatggcctcaagggagaccccagactccaagccatttcccaagccatcagagtcgtccctcacttccccaaacatggaataatgttccaagacataacgacattgctgttggatcacaaggcgtttaaagacaccgtcgacatttttgtcgatcgttacagagacatgcacatttccgtagttgctggaattgaggcaagggggttcatgtttggtccctcaattgcgttgggcattggtgcaaagtttgttcctttacgcaaaccacggaagctgccaggtgaagtaatttcagaaaaatatgctctagaatatggaactgattgcttggagttgcatgttggtgctgcccagcccggtgaacgggccataataattgatgacttggtggccacaggtggaactctgtcagcaggagtaaaacttctagaacgtgttggggctgaagtggtggaatgtgcttgtgtcattggtgtgcctgatgtcaaggggcagtgcaggagtattggaaagccactttatgttcttgttgagccacgtaaagcagataaatgtcaagctcaagcagataaatgttactgagatgtgatgttggttcgatcttgaactgacatacaaaaaggacgcttagtgtgagaaacacaggccataatgtgatccttaagttttcggctgatggagagttgtgttcatggcaattgccaaatatcatcctgggaaatgttcccccttttcatatctttttatctttgtacatgttagccatcatgttatgtggccagcagtttagaacaataacaatcattaaagaagggatggattttatggcattttataaaatgtcaatttaaggtcc

SEQ ID NO: 57627 - protein, 198 aa, Glycine max
  peptide (1)..(198): Ceres Seq. ID no. 14316368
  misc_feature (3)..(182): Homolog of NCBI NO: 32492063 NR Description: adenine phosphoribosyltransferase [Brassica napus]
  misc_feature (11)..(185): Homolog of NCBI NO: 21536749 NR Description: adenine phosphoribosyltransferase (EC
  misc_feature (11)..(185): Homolog of NCBI NO: 15235709 NR Description: adenine phosphoribosyltransferase (EC 2.4.2.7) -
  misc_feature (11)..(186): Homolog of NCBI NO: 40019121 NR Description: adenine phosphoribosyltransferase [Zea mays]
  misc_feature (5)..(185): Homolog of NCBI NO: 15234553 NR Description: adenine phosphoribosyltransferase -related
  misc_feature (3)..(183): Homolog of NCBI NO: 33354190 NR Description: putative adenine phosphoribosyl transferase
  misc_feature (4)..(186): Homolog of NCBI NO: 29826070 NR Description: adenine phosphoribosyltransferase form 2
  misc_feature (1)..(189): Homolog of NCBI NO: 1402894 NR Description: adenine phosphoribosyltransferase [Arabidopsis
  misc_feature (1)..(189): Homolog of NCBI NO: 15220047 NR Description: adenine phosphoribosyltransferase [Arabidopsis
  misc_feature (1)..(189): Homolog of NCBI NO: 15238973 NR Description: adenine phosphoribosyltransferase - like protein
MFAEENGLKGDPRLQAISQAIRVVPHFPKHGIMFQDITTLLLDHKAFKDTVDIFVDRYRDMHISVVAGIEARGFMFGPSIALGIGAKFVPLRKPRKLPGEVISEKYALEYGTDCLELHVGAAQPGERAIIIDDLVATGGTLSAGVKLLERVGAEVVECACVIGVPDVKGQCRSIGKPLYVLVEPRKADKCQAQADKCY

SEQ ID NO: 57628 - protein, 166 aa, Glycine max
  peptide (1)..(166): Ceres Seq. ID no. 14316369
  misc_feature (1)..(150): Homolog of NCBI NO: 32492063 NR Description: adenine phosphoribosyltransferase [Brassica napus]
  misc_feature (1)..(153): Homolog of NCBI NO: 21536749 NR Description: adenine phosphoribosyltransferase (EC
  misc_feature (1)..(153): Homolog of NCBI NO: 15235709 NR Description: adenine phosphoribosyltransferase (EC 2.4.2.7) -
  misc_feature (1)..(154): Homolog of NCBI NO: 40019121 NR Description: adenine phosphoribosyltransferase [Zea mays]
  misc_feature (1)..(153): Homolog of NCBI NO: 15234553 NR Description: adenine phosphoribosyltransferase -related
  misc_feature (1)..(151): Homolog of NCBI NO: 33354190 NR Description: putative adenine phosphoribosyl transferase
  misc_feature (1)..(154): Homolog of NCBI NO: 29826070 NR Description: adenine phosphoribosyltransferase form 2
  misc_feature (1)..(157): Homolog of NCBI NO: 1402894 NR Description: adenine phosphoribosyltransferase [Arabidopsis
  misc_feature (1)..(157): Homolog of NCBI NO: 15220047 NR Description: adenine phosphoribosyltransferase [Arabidopsis
  misc_feature (1)..(157): Homolog of NCBI NO: 15238973 NR Description: adenine phosphoribosyltransferase - like protein
MFQDITTLLLDHKAFKDTVDIFVDRYRDMHISVVAGIEARGFMFGPSIALGIGAKFVPLRKPRKLPGEVISEKYALEYGTDCLELHVGAAQPGERAIIIDDLVATGGTLSAGVKLLERVGAEVVECACVIGVPDVKGQCRSIGKPLYVLVEPRKADKCQAQADKCY

SEQ ID NO: 57629 - protein, 138 aa, Glycine max
  peptide (1)..(138): Ceres Seq. ID no. 14316370
  misc_feature (1)..(122): Homolog of NCBI NO: 32492063 NR Description: adenine phosphoribosyltransferase [Brassica napus]
  misc_feature (1)..(125): Homolog of NCBI NO: 21536749 NR Description: adenine phosphoribosyltransferase (EC
  misc_feature (1)..(125): Homolog of NCBI NO: 15235709 NR Description: adenine phosphoribosyltransferase (EC 2.4.2.7) -
  misc_feature (1)..(126): Homolog of NCBI NO: 40019121 NR Description: adenine phosphoribosyltransferase [Zea mays]
  misc_feature (1)..(125): Homolog of NCBI NO: 15234553 NR Description: adenine phosphoribosyltransferase -related
  misc_feature (1)..(123): Homolog of NCBI NO: 33354190 NR Description: putative adenine phosphoribosyl transferase
  misc_feature (1)..(126): Homolog of NCBI NO: 29826070 NR Description: adenine phosphoribosyltransferase form 2
  misc_feature (1)..(129): Homolog of NCBI NO: 1402894 NR Description: adenine phosphoribosyltransferase [Arabidopsis
  misc_feature (1)..(129): Homolog of NCBI NO: 15220047 NR Description: adenine phosphoribosyltransferase [Arabidopsis
  misc_feature (1)..(129): Homolog of NCBI NO: 15238973 NR Description: adenine phosphoribosyltransferase - like protein
MHISVVAGIEARGFMFGPSIALGIGAKFVPLRKPRKLPGEVISEKYALEYGTDCLELHVGAAQPGERAIIIDDLVATGGTLSAGVKLLERVGAEVVECACVIGVPDVKGQCRSIGKPLYVLVEPRKADKCQAQADKCY

SEQ ID NO: 57630 - DNA, 1974 bp, Glycine max
  misc_feature (1)..(1974): Ceres Seq. ID no. 14315204
aaattttacgtatttataagcgctcgcaaagcagtgaagacttgagagagggagagagagaatccaaattcggatttttgaaacgggatcgactccattcctcttcttcttcactgtcacacacactcacacactcctgtccatcgtttctccccactgattcacgaaaccctaatttttcgtggttcctcttctggggagcgaagatttagggttagattgagctgaggtggcagatgcagcagcatctcctctgagaaaaaaaatggaaggtggcaagagaattacggtgagccctcgaccttgctgcggccgcagaatcgttgccgcgaagaagagaccgcgtgcgaacgatggcttcgtcaacagcgtcaagaaactacagagacgcgaaatcagctccaagcgtgatcgcgctttcaccatgagcgacgctcaagagagattccggaatattcgcttgcaggaagaatatgatacgcatgatccgaaaggtccttcatctatggtgttgccgtttctgagaaaaagatcaaagattattgagattgtagcagcacgcgatattgtttttgctcttgcacaatcgggtgtttgtgcggcatttagccgagagaccaatcaacggatatgctttttgaatgttagtcctgatgaagttataagaagtctgttttataacaaaaataacgactcacttatcacagtttctgtatatgcttcagacagttacagttctttgaagtgcagaagcacaaggattgaatatataaggaggggtacaccagatgctggctttgctctttttgaatccgagtctctgaagtggccaggttttgttgagtttgatgatgtaaatgggaaggtattaacgtactctgctcaagacagcatatacaaggtatttgacctgaaaaactatacgatgctgtactctatttcggataaaaatgtccaagagattaagatcagcccgggaatcatgttgttgatttatgctaaagcaagtagccatgtcccccttaaaatcctttcaatagaagatggtactattttgaagtcattcagtcatctcctttatcggaataagaaggtagattttattgaacagttcaacgaaaagctacttgtaaagcaagaaaacgagaacctccaaattcttgatgtgcggacttttgaacatacggaagtttgcagaagtgaatttatgacaccgtctgcatttatttttctatatgagaaccaattgttcctaacatttcgaaatcgtactgtggctgtgtggaacttccgtggagagctggtaacttcttttgaggatcacctcttgtggcatcctgactgcaacaccaacaatatatatataaccagtgaccaggatcttatcatatcctactgtaaagctgattctgatgattcgttgtctgaaggaaatgcaggttccatcaacgtcagcaacatcttaactggcaagtgtctggccaaaataagagcaagtaacagctttccagtggataacagttgcagtgacaatccttcaggtagctgttgttgtaattcaaagaagcgaaaacatggatccaagacgaggagcactgttgcagaagccttggaagacattactgctctcttctatgatgaagagcgcaatgaaatctatacaggcaacaggcatggactagttcatgtctggtccaactaatggatatattattgaatgttctgttgcactttgtttttcttagtgggtacattgattattctgatctgctattgagaacttttggggggatgtaactataagtgcctttgaatcattcatttttttttctcttgacatttacgccttaggcgagtttgttcggtagttgtaagaggtgtatgaagatgctgttaactcaccggatgttgcttctgctgtaatctatatttttacattaatggagcggcttcgatggaatttagcatgtgaat

SEQ ID NO: 57631 - protein, 478 aa, Glycine max
  peptide (1)..(478): Ceres Seq. ID no. 14315205
  misc_feature (390)..(478): Homolog of NCBI NO: 34909262 NR Description: B1148D12.19 [Oryza sativa (japonica
  misc_feature (390)..(478): Homolog of NCBI NO: 15128395 NR Description: P0454H12.13 [Oryza sativa (japonica
  misc_feature (1)..(412): Homolog of NCBI NO: 34909262 NR Description: B1148D12.19 [Oryza sativa (japonica
  misc_feature (1)..(412): Homolog of NCBI NO: 15128395 NR Description: P0454H12.13 [Oryza sativa (japonica
  misc_feature (1)..(478): Homolog of NCBI NO: 11281174 NR Description: hypothetical protein F24B22.150 - Arabidopsis
  misc_feature (1)..(478): Homolog of NCBI NO: 30687585 NR Description: expressed protein [Arabidopsis thaliana]
  misc_feature (1)..(478): Homolog of NCBI NO: 25344227 NR Description: hypothetical protein At2g38630 [imported] -
  misc_feature (1)..(478): Homolog of NCBI NO: 18410015 NR Description: expressed protein [Arabidopsis thaliana]
MEGGKRITVSPRPCCGRRIVAAKKRPRANDGFVNSVKKLQRREISSKRDRAFTMSDAQERFRNIRLQEEYDTHDPKGPSSMVLPFLRKRSKIIEIVAARDIVFALAQSGVCAAFSRETNQRICFLNVSPDEVIRSLFYNKNNDSLITVSVYASDSYSSLKCRSTRIEYIRRGTPDAGFALFESESLKWPGFVEFDDVNGKVLTYSAQDSIYKVFDLKNYTMLYSISDKNVQEIKISPGIMLLIYAKASSHVPLKILSIEDGTILKSFSHLLYRNKKVDFIEQFNEKLLVKQENENLQILDVRTFEHTEVCRSEFMTPSAFIFLYENQLFLTFRNRTVAVWNFRGELVTSFEDHLLWHPDCNTNNIYITSDQDLIISYCKADSDDSLSEGNAGSINVSNILTGKCLAKIRASNSFPVDNSCSDNPSGSCCCNSKKRKHGSKTRSTVAEALEDITALFYDEERNEIYTGNRHGLVHVWSN

SEQ ID NO: 57632 - protein, 425 aa, Glycine max
  peptide (1)..(425): Ceres Seq. ID no. 14315206
  misc_feature (337)..(425): Homolog of NCBI NO: 34909262 NR Description: B1148D12.19 [Oryza sativa (japonica
  misc_feature (337)..(425): Homolog of NCBI NO: 15128395 NR Description: P0454H12.13 [Oryza sativa (japonica
  misc_feature (1)..(359): Homolog of NCBI NO: 34909262 NR Description: B1148D12.19 [Oryza sativa (japonica
  misc_feature (1)..(359): Homolog of NCBI NO: 15128395 NR Description: P0454H12.13 [Oryza sativa (japonica
  misc_feature (1)..(425): Homolog of NCBI NO: 11281174 NR Description: hypothetical protein F24B22.150 - Arabidopsis
  misc_feature (1)..(425): Homolog of NCBI NO: 30687585 NR Description: expressed protein [Arabidopsis thaliana]
  misc_feature (1)..(425): Homolog of NCBI NO: 25344227 NR Description: hypothetical protein At2g38630 [imported] -
  misc_feature (1)..(425): Homolog of NCBI NO: 18410015 NR Description: expressed protein [Arabidopsis thaliana]
MSDAQERFRNIRLQEEYDTHDPKGPSSMVLPFLRKRSKIIEIVAARDIVFALAQSGVCAAFSRETNQRICFLNVSPDEVIRSLFYNKNNDSLITVSVYASDSYSSLKCRSTRIEYIRRGTPDAGFALFESESLKWPGFVEFDDVNGKVLTYSAQDSIYKVFDLKNYTMLYSISDKNVQEIKISPGIMLLIYAKASSHVPLKILSIEDGTILKSFSHLLYRNKKVDFIEQFNEKLLVKQENENLQILDVRTFEHTEVCRSEFMTPSAFIFLYENQLFLTFRNRTVAVWNFRGELVTSFEDHLLWHPDCNTNNIYITSDQDLIISYCKADSDDSLSEGNAGSINVSNILTGKCLAKIRASNSFPVDNSCSDNPSGSCCCNSKKRKHGSKTRSTVAEALEDITALFYDEERNEIYTGNRHGLVHVWSN

SEQ ID NO: 57633 - protein, 398 aa, Glycine max
  peptide (1)..(398): Ceres Seq. ID no. 14315207
  misc_feature (310)..(398): Homolog of NCBI NO: 34909262 NR Description: B1148D12.19 [Oryza sativa (japonica
  misc_feature (310)..(398): Homolog of NCBI NO: 15128395 NR Description: P0454H12.13 [Oryza sativa (japonica
  misc_feature (1)..(332): Homolog of NCBI NO: 34909262 NR Description: B1148D12.19 [Oryza sativa (japonica
  misc_feature (1)..(332): Homolog of NCBI NO: 15128395 NR Description: P0454H12.13 [Oryza sativa (japonica
  misc_feature (1)..(398): Homolog of NCBI NO: 11281174 NR Description: hypothetical protein F24B22.150 - Arabidopsis
  misc_feature (1)..(398): Homolog of NCBI NO: 30687585 NR Description: expressed protein [Arabidopsis thaliana]
  misc_feature (1)..(398): Homolog of NCBI NO: 25344227 NR Description: hypothetical protein At2g38630 [imported] -
  misc_feature (1)..(398): Homolog of NCBI NO: 18410015 NR Description: expressed protein [Arabidopsis thaliana]
MVLPFLRKRSKIIEIVAARDIVFALAQSGVCAAFSRETNQRICFLNVSPDEVIRSLFYNKNNDSLITVSVYASDSYSSLKCRSTRIEYIRRGTPDAGFALFESESLKWPGFVEFDDVNGKVLTYSAQDSIYKVFDLKNYTMLYSISDKNVQEIKISPGIMLLIYAKASSHVPLKILSIEDGTILKSFSHLLYRNKKVDFIEQFNEKLLVKQENENLQILDVRTFEHTEVCRSEFMTPSAFIFLYENQLFLTFRNRTVAVWNFRGELVTSFEDHLLWHPDCNTNNIYITSDQDLIISYCKADSDDSLSEGNAGSINVSNILTGKCLAKIRASNSFPVDNSCSDNPSGSCCCNSKKRKHGSKTRSTVAEALEDITALFYDEERNEIYTGNRHGLVHVWSN

SEQ ID NO: 57634 - DNA, 1263 bp, Glycine max
  misc_feature (1)..(1263): Ceres Seq. ID no. 14315951
ttttgttctctgttctcgcgatttcggaagggtcgtgtttccctgcttcagtttcagcttcggcttcgagaagcgtcgattgggtccttaagctgttccttctctgtttctgctttggagcatcttggagcaaatgagcaatggagcttgtggagcacggctcacctcaaggattgctctcttgacaaactgtataactcctatcaaacatgagcggtcgcttttctcgcacaatttatgtcggcaacctgccctctgatataagagagtcagaaattgaagatctattctacaagtatggccgtataatggatattgaattgaaggttcctccccgccctccatgttattgctttgttgagtttgataatgctcgagatgccgaagatgcaattcggggtcgagatggatacaactttgatggttgtcggttaagagtggagcttgctcatggtggtagagggccatcatcaagtgatcgacgtggatatggaggaggaggtggtaatggtggagcaggcgggggtcgttttggcatctcacgccattctgaatttcgagttattgttcgtggactcccatcttctgcatcttggcaagatttgaaggatcatatgcgaaaagctggggacgtgtgttttgctgaggtttcccgtgatagtgaagggacttttggcattgttgattacactaattatgatgacatgaagtatgccattcggaaattggatgacactgagtttagaaatccctgggcgagagcttatattcgggtgaggaagtatgagagtagtcgttctaggagccgcagcaggagccccagcaggagccccagcaggagcagaagtccaaaaagagttagaagatctctggagcgttctgtgtctaggtcacgatctagatctcaatcagcatcaccaatcaaatcttctaggccaagatcacgatcccgatcacgatcacgatctggatctggatctcctcatcaggtcctgtcaggtagtggttgaatttctgacaaagctggtggttctctggtgatattgttccattctggtgggcagtatcggaattatattggagttggactaaattgttttaagggaaaattattgatgtgcctaggctgtttggtgattgtcttatttcttttaaattaaaatgttggacattggccttgccctttgtaccttagcaaacacaagaatatctttagtcctcgcaaactgtgaatccaatttgaatggttttaaacagatttat

SEQ ID NO: 57635 - protein, 266 aa, Glycine max
  peptide (1)..(266): Ceres Seq. ID no. 14315952
  misc_feature (9)..(77): Pfam Name: RNA recognition motif. (a.k.a. RRM, RBD, or RNP domain) Pfam Description: RNA recognition motif. (a.k.a. RRM, RBD, or RNP
  misc_feature (1)..(258): Homolog of NCBI NO: 5815239 NR Description: splicing factor SR1E [Arabidopsis thaliana]
  misc_feature (1)..(258): Homolog of NCBI NO: 5815237 NR Description: splicing factor SR1C [Arabidopsis thaliana]
  misc_feature (1)..(258): Homolog of NCBI NO: 5815236 NR Description: splicing factor SR1B [Arabidopsis thaliana]
  misc_feature (1)..(265): Homolog of NCBI NO: 5815235 NR Description: splicing factor SR1 [Arabidopsis thaliana]
  misc_feature (1)..(258): Homolog of NCBI NO: 30678395 NR Description: pre-mRNA splicing factor SF2 (SR1 protein)
  misc_feature (1)..(258): Homolog of NCBI NO: 2443473 NR Description: ASF/SF2 homolog [Arabidopsis thaliana]
  misc_feature (1)..(258): Homolog of NCBI NO: 30678391 NR Description: pre-mRNA splicing factor SF2 (SR1 protein)
  misc_feature (1)..(258): Homolog of NCBI NO: 33146854 NR Description: putative pre-mRNA splicing factor SF2
  misc_feature (1)..(258): Homolog of NCBI NO: 22331714 NR Description: arginine/serine-rich splicing factor (atSRp34),
  misc_feature (1)..(258): Homolog of NCBI NO: 12324445 NR Description: putative splicing factor; 53460-55514
MSGRFSRTIYVGNLPSDIRESEIEDLFYKYGRIMDIELKVPPRPPCYCFVEFDNARDAEDAIRGRDGYNFDGCRLRVELAHGGRGPSSSDRRGYGGGGGNGGAGGGRFGISRHSEFRVIVRGLPSSASWQDLKDHMRKAGDVCFAEVSRDSEGTFGIVDYTNYDDMKYAIRKLDDTEFRNPWARAYIRVRKYESSRSRSRSRSPSRSPSRSRSPKRVRRSLERSVSRSRSRSQSASPIKSSRPRSRSRSRSRSGSGSPHQVLSGSG

SEQ ID NO: 57636 - protein, 233 aa, Glycine max
  peptide (1)..(233): Ceres Seq. ID no. 14315953
  misc_feature (1)..(225): Homolog of NCBI NO: 5815239 NR Description: splicing factor SR1E [Arabidopsis thaliana]
  misc_feature (1)..(225): Homolog of NCBI NO: 5815237 NR Description: splicing factor SR1C [Arabidopsis thaliana]
  misc_feature (1)..(225): Homolog of NCBI NO: 5815236 NR Description: splicing factor SR1B [Arabidopsis thaliana]
  misc_feature (1)..(232): Homolog of NCBI NO: 5815235 NR Description: splicing factor SR1 [Arabidopsis thaliana]
  misc_feature (1)..(225): Homolog of NCBI NO: 30678395 NR Description: pre-mRNA splicing factor SF2 (SR1 protein)
  misc_feature (1)..(225): Homolog of NCBI NO: 2443473 NR Description: ASF/SF2 homolog [Arabidopsis thaliana]
  misc_feature (1)..(225): Homolog of NCBI NO: 30678391 NR Description: pre-mRNA splicing factor SF2 (SR1 protein)
  misc_feature (1)..(225): Homolog of NCBI NO: 33146854 NR Description: putative pre-mRNA splicing factor SF2
  misc_feature (1)..(225): Homolog of NCBI NO: 22331714 NR Description: arginine/serine-rich splicing factor (atSRp34),
  misc_feature (1)..(225): Homolog of NCBI NO: 12324445 NR Description: putative splicing factor; 53460-55514
MDIELKVPPRPPCYCFVEFDNARDAEDAIRGRDGYNFDGCRLRVELAHGGRGPSSSDRRGYGGGGGNGGAGGGRFGISRHSEFRVIVRGLPSSASWQDLKDHMRKAGDVCFAEVSRDSEGTFGIVDYTNYDDMKYAIRKLDDTEFRNPWARAYIRVRKYESSRSRSRSRSPSRSPSRSRSPKRVRRSLERSVSRSRSRSQSASPIKSSRPRSRSRSRSRSGSGSPHQVLSGSG

SEQ ID NO: 57637 - DNA, 1220 bp, Glycine max
  misc_feature (1)..(1220): Ceres Seq. ID no. 14315973
atgcatccaacgtgacatccacactcaactcaaaaaccaattccaataatggcgaccttatctatgtcatcttgatcgtaatccccgtcatcaaactctttctttattctacgattcacaatcaaaacccaacaacttcaactctccaatctctatcctcaattcaacccttttggtggcaacttctatttatgctacaaaaaatgctgcgattgcacttcaccaccgcactctctcactttgcttccaaggcctcaccttttcctctcacacccgtttccgttaccgtttccagagctattgtttgcaacaaccccaccaggttcagatcgcaaatgggttctttctccacttcctcttcctcttcctccaaactcttgttccgccagctttttgagaaggaatcttccacctacacttaccttctcgctgatgcctcgcacccagaaaaacctgcacttctgattgacccagttgataggacagtagacagggacttgtcgatcattgagcaactggggttgaagcttgtgtatgccatgaacacacatgtgcatgcggatcatgtcactgggactggccttatcaagagcaaagttccttctgtaaaatctgttatttcaaaagcaagtggtgcaacggcagatctttatgtggagccaggtgataaggtccaaattggtgatctttttctagagggtgggagttcagagcagctttacaaatcaatccattcacagattttaacactgcccaagagtacgttaatctatccagctcatgactacaaaggattcactgtgagcactgttggagaggagctgcaaaacaatccacgcataacaaaggatgaggaaactttcaagaacatcatgggaaatcttaacctgtcatatcctaaaatgattgacatagctgtcccagctaatatggtttgcggaatccaatccaatccaaagcaagctgaggcttcataagccttatctgagagtcacacactgatgttatttgacacaaagaccttgcaagcaaaagggggaaaaattgttatagccctttgaattgaagagaaaaatggaaattgtaaataaataaaatggtatttgtgttgtggcccaatataattagaattaggttccagtgattatgctgtgtttctgttgtatctgattgtttatgttaaaacttcctaatcctatacttcaaagccaaattttcag

SEQ ID NO: 57638 - protein, 324 aa, Glycine max
  peptide (1)..(324): Ceres Seq. ID no. 14315974
  misc_feature (136)..(232): Pfam Name: Metallo-beta-lactamase superfamily Pfam Description: Metallo-beta-lactamase superfamily
  misc_feature (50)..(232): Homolog of NCBI NO: 34910930 NR Description: putative glyoxalase II [Oryza sativa (japonica
  misc_feature (246)..(267): Homolog of NCBI NO: 8671869 NR Description: Contains similarity to an unknown glyoxalase II Arabidopsis thaliana gb|U74610 and contains a PF|00753 domain. ESTs gb|AI999524, gb|AI100252, gb|AI099807,
  misc_feature (267)..(321): Homolog of NCBI NO: 8671869 NR Description: Contains similarity to an unknown glyoxalase II Arabidopsis thaliana gb|U74610 and contains a PF|00753 domain. ESTs gb|AI999524, gb|AI100252, gb|AI099807,
  misc_feature (77)..(232): Homolog of NCBI NO: 8671869 NR Description: Contains similarity to an unknown glyoxalase II Arabidopsis thaliana gb|U74610 and contains a PF|00753 domain. ESTs gb|AI999524, gb|AI100252, gb|AI099807,
  misc_feature (221)..(321): Homolog of NCBI NO: 18404530 NR Description: glyoxalase II, putative (hydroxyacylglutathione
  misc_feature (112)..(232): Homolog of NCBI NO: 18404530 NR Description: glyoxalase II, putative (hydroxyacylglutathione
  misc_feature (221)..(321): Homolog of NCBI NO: 1644427 NR Description: glyoxalase II [Arabidopsis thaliana]
  misc_feature (112)..(232): Homolog of NCBI NO: 1644427 NR Description: glyoxalase II [Arabidopsis thaliana]
  misc_feature (221)..(321): Homolog of NCBI NO: 25405648 NR Description: probable glyoxalase II, 78941-80643
  misc_feature (77)..(232): Homolog of NCBI NO: 25405648 NR Description: probable glyoxalase II, 78941-80643
ASNVTSTLNSKTNSNNGDLIYVILIVIPVIKLFLYSTIHNQNPTTSTLQSLSSIQPFWWQLLFMLQKMLRLHFTTALSHFASKASPFPLTPVSVTVSRAIVCNNPTRFRSQMGSFSTSSSSSSKLLFRQLFEKESSTYTYLLADASHPEKPALLIDPVDRTVDRDLSIIEQLGLKLVYAMNTHVHADHVTGTGLIKSKVPSVKSVISKASGATADLYVEPGDKVQIGDLFLEGGSSEQLYKSIHSQILTLPKSTLIYPAHDYKGFTVSTVGEELQNNPRITKDEETFKNIMGNLNLSYPKMIDIAVPANMVCGIQSNPKQAEAS

SEQ ID NO: 57639 - protein, 261 aa, Glycine max
  peptide (1)..(261): Ceres Seq. ID no. 14315975
  misc_feature (73)..(169): Pfam Name: Metallo-beta-lactamase superfamily Pfam Description: Metallo-beta-lactamase superfamily
  misc_feature (1)..(169): Homolog of NCBI NO: 34910930 NR Description: putative glyoxalase II [Oryza sativa (japonica
  misc_feature (183)..(204): Homolog of NCBI NO: 8671869 NR Description: Contains similarity to an unknown glyoxalase II Arabidopsis thaliana gb|U74610 and contains a PF|00753 domain. ESTs gb|AI999524, gb|AI100252, gb|AI099807,
  misc_feature (204)..(258): Homolog of NCBI NO: 8671869 NR Description: Contains similarity to an unknown glyoxalase II Arabidopsis thaliana gb|U74610 and contains a PF|00753 domain. ESTs gb|AI999524, gb|AI100252, gb|AI099807,
  misc_feature (14)..(169): Homolog of NCBI NO: 8671869 NR Description: Contains similarity to an unknown glyoxalase II Arabidopsis thaliana gb|U74610 and contains a PF|00753 domain. ESTs gb|AI999524, gb|AI100252, gb|AI099807,
  misc_feature (158)..(258): Homolog of NCBI NO: 18404530 NR Description: glyoxalase II, putative (hydroxyacylglutathione
  misc_feature (49)..(169): Homolog of NCBI NO: 18404530 NR Description: glyoxalase II, putative (hydroxyacylglutathione
  misc_feature (158)..(258): Homolog of NCBI NO: 1644427 NR Description: glyoxalase II [Arabidopsis thaliana]
  misc_feature (49)..(169): Homolog of NCBI NO: 1644427 NR Description: glyoxalase II [Arabidopsis thaliana]
  misc_feature (158)..(258): Homolog of NCBI NO: 25405648 NR Description: probable glyoxalase II, 78941-80643
  misc_feature (14)..(169): Homolog of NCBI NO: 25405648 NR Description: probable glyoxalase II, 78941-80643
MLQKMLRLHFTTALSHFASKASPFPLTPVSVTVSRAIVCNNPTRFRSQMGSFSTSSSSSSKLLFRQLFEKESSTYTYLLADASHPEKPALLIDPVDRTVDRDLSIIEQLGLKLVYAMNTHVHADHVTGTGLIKSKVPSVKSVISKASGATADLYVEPGDKVQIGDLFLEGGSSEQLYKSIHSQILTLPKSTLIYPAHDYKGFTVSTVGEELQNNPRITKDEETFKNIMGNLNLSYPKMIDIAVPANMVCGIQSNPKQAEAS

SEQ ID NO: 57640 - protein, 257 aa, Glycine max
  peptide (1)..(257): Ceres Seq. ID no. 14315976
  misc_feature (69)..(165): Pfam Name: Metallo-beta-lactamase superfamily Pfam Description: Metallo-beta-lactamase superfamily
  misc_feature (1)..(165): Homolog of NCBI NO: 34910930 NR Description: putative glyoxalase II [Oryza sativa (japonica
  misc_feature (179)..(200): Homolog of NCBI NO: 8671869 NR Description: Contains similarity to an unknown glyoxalase II Arabidopsis thaliana gb|U74610 and contains a PF|00753 domain. ESTs gb|AI999524, gb|AI100252, gb|AI099807,
  misc_feature (200)..(254): Homolog of NCBI NO: 8671869 NR Description: Contains similarity to an unknown glyoxalase II Arabidopsis thaliana gb|U74610 and contains a PF|00753 domain. ESTs gb|AI999524, gb|AI100252, gb|AI099807,
  misc_feature (10)..(165): Homolog of NCBI NO: 8671869 NR Description: Contains similarity to an unknown glyoxalase II Arabidopsis thaliana gb|U74610 and contains a PF|00753 domain. ESTs gb|AI999524, gb|AI100252, gb|AI099807,
  misc_feature (154)..(254): Homolog of NCBI NO: 18404530 NR Description: glyoxalase II, putative (hydroxyacylglutathione
  misc_feature (45)..(165): Homolog of NCBI NO: 18404530 NR Description: glyoxalase II, putative (hydroxyacylglutathione
  misc_feature (154)..(254): Homolog of NCBI NO: 1644427 NR Description: glyoxalase II [Arabidopsis thaliana]
  misc_feature (45)..(165): Homolog of NCBI NO: 1644427 NR Description: glyoxalase II [Arabidopsis thaliana]
  misc_feature (154)..(254): Homolog of NCBI NO: 25405648 NR Description: probable glyoxalase II, 78941-80643
  misc_feature (10)..(165): Homolog of NCBI NO: 25405648 NR Description: probable glyoxalase II, 78941-80643
MLRLHFTTALSHFASKASPFPLTPVSVTVSRAIVCNNPTRFRSQMGSFSTSSSSSSKLLFRQLFEKESSTYTYLLADASHPEKPALLIDPVDRTVDRDLSIIEQLGLKLVYAMNTHVHADHVTGTGLIKSKVPSVKSVISKASGATADLYVEPGDKVQIGDLFLEGGSSEQLYKSIHSQILTLPKSTLIYPAHDYKGFTVSTVGEELQNNPRITKDEETFKNIMGNLNLSYPKMIDIAVPANMVCGIQSNPKQAEAS

SEQ ID NO: 57641 - DNA, 1019 bp, Glycine max
  misc_feature (1)..(1019): Ceres Seq. ID no. 14316404
aaccaaatgttattccctcctttcttagtctgctgtgttttctctttctagagaatccaagcctaccattgaagtggaattctgtgaggctaagtaaaatggggtaccagccattggaaaagggaaaaccaaaacataagaaggggttatggtcacctgaagaagacaacaaactcagaaaccacatccttaaacatggtcatggctgttggagttctgtccccattaaggcaggcttgcaaaggaatggaaagagctgtagattaaggtggattaactatctaaggccaggattaaagagagggaaattcagcaaacaggaagaggagacaatcctcacccttcaccacatgctaggcaacaagtggtcacggatatcacagcatttgcctggaaggacagacaatgagattaaaaactattggcattcatatttgaaaaagagagtggccaaagctaaggaaatggaatctcataaccaaattaagtatgctagctcaagctcagatactatggactcttcacattctctccaaaatcttgcaactcaatgcccactgaattataacttcaccaaagaggcttctcaaagttccttaccaaaactgttatttgctgagtggctttcactggatcatttaaactctgcaaattcagttgactctttgggtttgaggaatggatttgatcaaaattcatcttttcatgaagctgcaattcatgacatgtcagaggtaccctttggtggagagtataatagatgtgtaagtaacatttcagcccctgagatgttcaattcacagcttaagtatggaaatcaaatggtggaaaatggttacattcattgtatgcctggggttgacttaagtagcaatttcagcataagcaatgatgcaataatgtacatatgagagctaagtttccgggctggtcagcaaggaataatatcattttctaattttatacatactgaaaacaatcaaactttagcaatatatataaaataataattccattgc

SEQ ID NO: 57642 - protein, 302 aa, Glycine max
  peptide (1)..(302): Ceres Seq. ID no. 14316405
  misc_feature (47)..(94): Pfam Name: Myb-like DNA-binding domain Pfam Description: Myb-like DNA-binding domain
  misc_feature (41)..(259): Homolog of NCBI NO: 19059 NR Description: MybHv33 [Hordeum vulgare subsp. vulgare]
  misc_feature (42)..(183): Homolog of NCBI NO: 30690317 NR Description: myb transcription factor (ATMYB4) [Arabidopsis
  misc_feature (42)..(183): Homolog of NCBI NO: 2280530 NR Description: ATMYB4 [Arabidopsis thaliana]
  misc_feature (42)..(184): Homolog of NCBI NO: 28927688 NR Description: putative Myb-like DNA-binding protein
  misc_feature (42)..(246): Homolog of NCBI NO: 33320067 NR Description: transcription factor Myb [Capsicum annuum]
  misc_feature (44)..(171): Homolog of NCBI NO: 25387539 NR Description: myb-like protein [imported] - Arabidopsis
  misc_feature (44)..(171): Homolog of NCBI NO: 15235149 NR Description: myb family transcription factor [Arabidopsis
  misc_feature (39)..(183): Homolog of NCBI NO: 15242947 NR Description: myb family transcription factor(MYB19)
  misc_feature (33)..(153): Homolog of NCBI NO: 32489825 NR Description: OSJNBb0039L24.8 [Oryza sativa (japonica
  misc_feature (40)..(212): Homolog of NCBI NO: 15229055 NR Description: myb family transcription factor [Arabidopsis
PNVIPSFLSLLCFLFLENPSLPLKWNSVRLSKMGYQPLEKGKPKHKKGLWSPEEDNKLRNHILKHGHGCWSSVPIKAGLQRNGKSCRLRWINYLRPGLKRGKFSKQEEETILTLHHMLGNKWSRISQHLPGRTDNEIKNYWHSYLKKRVAKAKEMESHNQIKYASSSSDTMDSSHSLQNLATQCPLNYNFTKEASQSSLPKLLFAEWLSLDHLNSANSVDSLGLRNGFDQNSSFHEAAIHDMSEVPFGGEYNRCVSNISAPEMFNSQLKYGNQMVENGYIHCMPGVDLSSNFSISNDAIMYI

SEQ ID NO: 57643 - protein, 270 aa, Glycine max
  peptide (1)..(270): Ceres Seq. ID no. 14316406
  misc_feature (15)..(62): Pfam Name: Myb-like DNA-binding domain Pfam Description: Myb-like DNA-binding domain
  misc_feature (9)..(227): Homolog of NCBI NO: 19059 NR Description: MybHv33 [Hordeum vulgare subsp. vulgare]
  misc_feature (10)..(151): Homolog of NCBI NO: 30690317 NR Description: myb transcription factor (ATMYB4) [Arabidopsis
  misc_feature (10)..(151): Homolog of NCBI NO: 2280530 NR Description: ATMYB4 [Arabidopsis thaliana]
  misc_feature (10)..(152): Homolog of NCBI NO: 28927688 NR Description: putative Myb-like DNA-binding protein
  misc_feature (10)..(214): Homolog of NCBI NO: 33320067 NR Description: transcription factor Myb [Capsicum annuum]
  misc_feature (12)..(139): Homolog of NCBI NO: 25387539 NR Description: myb-like protein [imported] - Arabidopsis
  misc_feature (12)..(139): Homolog of NCBI NO: 15235149 NR Description: myb family transcription factor [Arabidopsis
  misc_feature (7)..(151): Homolog of NCBI NO: 15242947 NR Description: myb family transcription factor(MYB19)
  misc_feature (1)..(121): Homolog of NCBI NO: 32489825 NR Description: OSJNBb0039L24.8 [Oryza sativa (japonica
  misc_feature (8)..(180): Homolog of NCBI NO: 15229055 NR Description: myb family transcription factor [Arabidopsis
MGYQPLEKGKPKHKKGLWSPEEDNKLRNHILKHGHGCWSSVPIKAGLQRNGKSCRLRWINYLRPGLKRGKFSKQEEETILTLHHMLGNKWSRISQHLPGRTDNEIKNYWHSYLKKRVAKAKEMESHNQIKYASSSSDTMDSSHSLQNLATQCPLNYNFTKEASQSSLPKLLFAEWLSLDHLNSANSVDSLGLRNGFDQNSSFHEAAIHDMSEVPFGGEYNRCVSNISAPEMFNSQLKYGNQMVENGYIHCMPGVDLSSNFSISNDAIMYI

SEQ ID NO: 57644 - protein, 186 aa, Glycine max
  peptide (1)..(186): Ceres Seq. ID no. 14316407
  misc_feature (1)..(143): Homolog of NCBI NO: 19059 NR Description: MybHv33 [Hordeum vulgare subsp. vulgare]
  misc_feature (1)..(67): Homolog of NCBI NO: 30690317 NR Description: myb transcription factor (ATMYB4) [Arabidopsis
  misc_feature (1)..(67): Homolog of NCBI NO: 2280530 NR Description: ATMYB4 [Arabidopsis thaliana]
  misc_feature (1)..(68): Homolog of NCBI NO: 28927688 NR Description: putative Myb-like DNA-binding protein
  misc_feature (1)..(130): Homolog of NCBI NO: 33320067 NR Description: transcription factor Myb [Capsicum annuum]
  misc_feature (1)..(55): Homolog of NCBI NO: 25387539 NR Description: myb-like protein [imported] - Arabidopsis
  misc_feature (1)..(55): Homolog of NCBI NO: 15235149 NR Description: myb family transcription factor [Arabidopsis
  misc_feature (1)..(67): Homolog of NCBI NO: 15242947 NR Description: myb family transcription factor(MYB19)
  misc_feature (1)..(37): Homolog of NCBI NO: 32489825 NR Description: OSJNBb0039L24.8 [Oryza sativa (japonica
  misc_feature (1)..(96): Homolog of NCBI NO: 15229055 NR Description: myb family transcription factor [Arabidopsis
MLGNKWSRISQHLPGRTDNEIKNYWHSYLKKRVAKAKEMESHNQIKYASSSSDTMDSSHSLQNLATQCPLNYNFTKEASQSSLPKLLFAEWLSLDHLNSANSVDSLGLRNGFDQNSSFHEAAIHDMSEVPFGGEYNRCVSNISAPEMFNSQLKYGNQMVENGYIHCMPGVDLSSNFSISNDAIMYI

SEQ ID NO: 57645 - DNA, 1486 bp, Glycine max
  misc_feature (1)..(1486): Ceres Seq. ID no. 15171681
aaaactccaatcaaatcgcagaaccaaaaccaaaaccaaaccctttccctctcttcaattcaaccttctccatgtctctgaaaccgtcgaattcgtcggagaatctgatgctcccggtgtctgatcctcccaagagccacgacgctgacgacaagctcttcaaaggctccgccatgaccaaacgcggagccttcgccgccgtctcctacatgtcctgcgccgttttgttggtgatgttcaataaagcagcgctttcgtcttataactttccgtccgctaacgtcatcacacttcttcagatggtatgttcgtgttgctttctctatttattgagacgctggaggatgatttctttctcaacaggtgaatccttacacatatcagataactcgacaaaatttgtatcattgaagactttgaagcacactcttcctctgtcaggagcttatttattttacatgctagtcaccatggagtctgttcgtggagtaaatgttccaatgtacacaactcttaggaggaccacagtggtatttacaatgcttgtagagtttgttctggtggggcagagatatacaccttctgttattttcagtgttggcttgattgtctttggtgcgtttgttgctggagcacgggatttatcttttgatgcttatggctatgctgttgttttcatgtcgaacatcgccacagcaatatatcttgcaaccatagcccgcattgggaaaactagtggtcttaatagctttggcctaatgtggtgcaatggtattatatgtgggcctgttttgctcatctggacatttgttcgtggtgacttgatgacaacaatcaattttccgtacctcttctcacctggttttattgttattttgcttttttcctgcgtgctggcattcttcttgaattactgtatttttctgaacacaacactaaattcagctgtgacacagacaatttgtggtaatctgaaggatctctttactattggccttggctggataatttttggtgggctaccatttgatttttggaatataattgggcaatttctcggttttgccggatctggcttatacgcctactacaagctcattggcaagtaacttattcaagtcctctagatgatgtctttttttcaatttgggagtgccatgtgcttcagtcttctgcccatctctgcatcccttgagaagggagaagaatctgaatcaaactcaggtttgggaacttgtgatcgactaatcttatactatggggaagttttgctaatacaagttgacatacaaacagtttctggggaatcagacgagcaaggctggtcatggctttaatgtattcaaacatcaaacttctaattatctaatagtatgttcacccattgcatttgatgaatctcatgcatatctttgtaagatgtaactgttaacaagcactgtattctgatctaagagaaaatttaaatctagcaattcatttcatt

SEQ ID NO: 57646 - protein, 368 aa, Glycine max
  peptide (1)..(368): Ceres Seq. ID no. 15171682
  misc_feature (285)..(362): Pfam Name: Integral membrane protein DUF6 Pfam Description: Integral membrane protein DUF6
  misc_feature (56)..(362): Homolog of NCBI NO: 17647441 NR Description: fringe connection CG3874-PA [Drosophila
  misc_feature (65)..(364): Homolog of NCBI NO: 18417838 NR Description: expressed protein [Arabidopsis thaliana]
  misc_feature (65)..(362): Homolog of NCBI NO: 14028875 NR Description: solute carrier family 35 (UDP-glucuronic
  misc_feature (65)..(362): Homolog of NCBI NO: 1665787 NR Description: Similar to a C.elegans protein encoded in cosmid
  misc_feature (65)..(362): Homolog of NCBI NO: 39590273 NR Description: Hypothetical protein CBG11203 [Caenorhabditis
  misc_feature (65)..(362): Homolog of NCBI NO: 31210267 NR Description: ENSANGP00000010400 [Anopheles gambiae]
  misc_feature (64)..(362): Homolog of NCBI NO: 32766366 NR Description: Unknown (protein for MGC:63651) [Danio rerio]
  misc_feature (64)..(362): Homolog of NCBI NO: 17535737 NR Description: SQuashed Vulva SQV-7, putative protein, with at
  misc_feature (34)..(73): Homolog of NCBI NO: 15236724 NR Description: expressed protein [Arabidopsis thaliana]
  misc_feature (288)..(358): Homolog of NCBI NO: 15236724 NR Description: expressed protein [Arabidopsis thaliana]
NSNQIAEPKPKPNPFPLFNSTFSMSLKPSNSSENLMLPVSDPPKSHDADDKLFKGSAMTKRGAFAAVSYMSCAVLLVMFNKAALSSYNFPSANVITLLQMVCSCCFLYLLRRWRMISFSTGESLHISDNSTKFVSLKTLKHTLPLSGAYLFYMLVTMESVRGVNVPMYTTLRRTTVVFTMLVEFVLVGQRYTPSVIFSVGLIVFGAFVAGARDLSFDAYGYAVVFMSNIATAIYLATIARIGKTSGLNSFGLMWCNGIICGPVLLIWTFVRGDLMTTINFPYLFSPGFIVILLFSCVLAFFLNYCIFLNTTLNSAVTQTICGNLKDLFTIGLGWIIFGGLPFDFWNIIGQFLGFAGSGLYAYYKLIGK

SEQ ID NO: 57647 - protein, 345 aa, Glycine max
  peptide (1)..(345): Ceres Seq. ID no. 15171683
  misc_feature (262)..(339): Pfam Name: Integral membrane protein DUF6 Pfam Description: Integral membrane protein DUF6
  misc_feature (33)..(339): Homolog of NCBI NO: 17647441 NR Description: fringe connection CG3874-PA [Drosophila
  misc_feature (42)..(341): Homolog of NCBI NO: 18417838 NR Description: expressed protein [Arabidopsis thaliana]
  misc_feature (42)..(339): Homolog of NCBI NO: 14028875 NR Description: solute carrier family 35 (UDP-glucuronic
  misc_feature (42)..(339): Homolog of NCBI NO: 1665787 NR Description: Similar to a C.elegans protein encoded in cosmid
  misc_feature (42)..(339): Homolog of NCBI NO: 39590273 NR Description: Hypothetical protein CBG11203 [Caenorhabditis
  misc_feature (42)..(339): Homolog of NCBI NO: 31210267 NR Description: ENSANGP00000010400 [Anopheles gambiae]
  misc_feature (41)..(339): Homolog of NCBI NO: 32766366 NR Description: Unknown (protein for MGC:63651) [Danio rerio]
  misc_feature (41)..(339): Homolog of NCBI NO: 17535737 NR Description: SQuashed Vulva SQV-7, putative protein, with at
  misc_feature (11)..(50): Homolog of NCBI NO: 15236724 NR Description: expressed protein [Arabidopsis thaliana]
  misc_feature (265)..(335): Homolog of NCBI NO: 15236724 NR Description: expressed protein [Arabidopsis thaliana]
MSLKPSNSSENLMLPVSDPPKSHDADDKLFKGSAMTKRGAFAAVSYMSCAVLLVMFNKAALSSYNFPSANVITLLQMVCSCCFLYLLRRWRMISFSTGESLHISDNSTKFVSLKTLKHTLPLSGAYLFYMLVTMESVRGVNVPMYTTLRRTTVVFTMLVEFVLVGQRYTPSVIFSVGLIVFGAFVAGARDLSFDAYGYAVVFMSNIATAIYLATIARIGKTSGLNSFGLMWCNGIICGPVLLIWTFVRGDLMTTINFPYLFSPGFIVILLFSCVLAFFLNYCIFLNTTLNSAVTQTICGNLKDLFTIGLGWIIFGGLPFDFWNIIGQFLGFAGSGLYAYYKLIGK

SEQ ID NO: 57648 - protein, 333 aa, Glycine max
  peptide (1)..(333): Ceres Seq. ID no. 15171684
  misc_feature (250)..(327): Pfam Name: Integral membrane protein DUF6 Pfam Description: Integral membrane protein DUF6
  misc_feature (21)..(327): Homolog of NCBI NO: 17647441 NR Description: fringe connection CG3874-PA [Drosophila
  misc_feature (30)..(329): Homolog of NCBI NO: 18417838 NR Description: expressed protein [Arabidopsis thaliana]
  misc_feature (30)..(327): Homolog of NCBI NO: 14028875 NR Description: solute carrier family 35 (UDP-glucuronic
  misc_feature (30)..(327): Homolog of NCBI NO: 1665787 NR Description: Similar to a C.elegans protein encoded in cosmid
  misc_feature (30)..(327): Homolog of NCBI NO: 39590273 NR Description: Hypothetical protein CBG11203 [Caenorhabditis
  misc_feature (30)..(327): Homolog of NCBI NO: 31210267 NR Description: ENSANGP00000010400 [Anopheles gambiae]
  misc_feature (29)..(327): Homolog of NCBI NO: 32766366 NR Description: Unknown (protein for MGC:63651) [Danio rerio]
  misc_feature (29)..(327): Homolog of NCBI NO: 17535737 NR Description: SQuashed Vulva SQV-7, putative protein, with at
  misc_feature (1)..(38): Homolog of NCBI NO: 15236724 NR Description: expressed protein [Arabidopsis thaliana]
  misc_feature (253)..(323): Homolog of NCBI NO: 15236724 NR Description: expressed protein [Arabidopsis thaliana]
MLPVSDPPKSHDADDKLFKGSAMTKRGAFAAVSYMSCAVLLVMFNKAALSSYNFPSANVITLLQMVCSCCFLYLLRRWRMISFSTGESLHISDNSTKFVSLKTLKHTLPLSGAYLFYMLVTMESVRGVNVPMYTTLRRTTVVFTMLVEFVLVGQRYTPSVIFSVGLIVFGAFVAGARDLSFDAYGYAVVFMSNIATAIYLATIARIGKTSGLNSFGLMWCNGIICGPVLLIWTFVRGDLMTTINFPYLFSPGFIVILLFSCVLAFFLNYCIFLNTTLNSAVTQTICGNLKDLFTIGLGWIIFGGLPFDFWNIIGQFLGFAGSGLYAYYKLIGK

SEQ ID NO: 57649 - DNA, 1359 bp, Glycine max
  misc_feature (1)..(1359): Ceres Seq. ID no. 13595748
aaaattctgggagaattgaagaagccccgaattagatcggggtttgtggcaagagtgcaaattcgtgtctggagttttggtcaacagagagaaagtagggaaaagaaaaaaagcctcatcaccgacttcggcgaaatggatccgccgccggtaccgatccggtggcgcgcaaccgccatcccattctttgtgttggttctctttctatccaccatctccccttcgcgcgcaatctactgcgacgaagatgattgctacgatctacttggggttactcaaagtgccaatgcttccgaaatcaaaaaagcttactacaaactctccttgaagtatcacccggacaaaaaccctgatccggaatcgcgaaagctgtttgtaaaagtcgccaatgcttatgagattttgaaggatgaggccacgcgagagcaatatgattatgcaattgcacatccggaggaggtgttttataatactgcacgctattatcgggcttactatggtcacaagacggatccccgtgctgtgttggtcggccttcttcttattctttcaggttttcaatatctaaatcaatcaacaaggtataatcaggctgtagccatggtcaagaagacacctgcatataaaaataaactaagggcattggaacttgaacgcagtggaggggttacaaacaagaagaagagtcagaagaatatggacaagaaaacggaagaagaccttagcaaagaactcgatctgcagataactggagctgaaatgccctctgtatggaaacttcttggcgtccgctttgttctattaccgtataccttaggcaagctgctgttgtggactgcctgttggttttggagatacaaagtgaaaaagtacccttattccttggaagatgcttcttatctgacacaaagatccctcagtattcctctcgatagatggagaaatatagatgaagcaacaaaggaagatcttgtgctcagacgcttatgggagaaatcaaatctggagaactatgtagcagagatgcggaaagaatcaaagcgcagaagatagttgcattagtcggctctgccgcttttaaattactaaattttgttgcaaattgattttcggggtgggggtgataaaagcagaattattcgtggcaaccacgaaattgtggaatcatatacgtagtttattacgtttacacatgttattgttgctctctaacagtctgtaaacaatgaacaccaaagaatactgctttagatattgcttttattctttcaatgaatcgggtacataagcctcaatcttgctacaatcgcatgtttggtagtaattttgagtgcctctagttcaataattttaagggtt

SEQ ID NO: 57650 - protein, 350 aa, Glycine max
  peptide (1)..(350): Ceres Seq. ID no. 15221656
  misc_feature (84)..(148): Pfam Name: DnaJ domain Pfam Description: DnaJ domain
  misc_feature (79)..(347): Homolog of NCBI NO: 23508632 NR Description: hypothetical protein, conserved [Plasmodium
  misc_feature (57)..(341): Homolog of NCBI NO: 17538212 NR Description: DNaJ domain (prokaryotic heat shock protein)
  misc_feature (57)..(341): Homolog of NCBI NO: 39593758 NR Description: Hypothetical protein CBG06069 [Caenorhabditis
  misc_feature (65)..(349): Homolog of NCBI NO: 34868434 NR Description: similar to bA16L21.2.1 (novel DnaJ domain protein to Drosophila, C. elegans and Arabidopsis predicted proteins
  misc_feature (78)..(349): Homolog of NCBI NO: 38078426 NR Description: RIKEN cDNA 2010203O07 [Mus musculus]
  misc_feature (54)..(349): Homolog of NCBI NO: 12313893 NR Description: bA16L21.2.1 (novel DnaJ domain protein similar to
  misc_feature (64)..(349): Homolog of NCBI NO: 18859921 NR Description: CG7872-PA [Drosophila melanogaster]
  misc_feature (152)..(350): Homolog of NCBI NO: 19347731 NR Description: unknown protein [Arabidopsis thaliana]
  misc_feature (49)..(316): Homolog of NCBI NO: 25404348 NR Description: hypothetical protein T13M11.13 [imported] -
  misc_feature (49)..(350): Homolog of NCBI NO: 30696610 NR Description: DnaJ protein family [Arabidopsis thaliana]
KILGELKKPRIRSGFVARVQIRVWSFGQQRESREKKKSLITDFGEMDPPPVPIRWRATAIPFFVLVLFLSTISPSRAIYCDEDDCYDLLGVTQSANASEIKKAYYKLSLKYHPDKNPDPESRKLFVKVANAYEILKDEATREQYDYAIAHPEEVFYNTARYYRAYYGHKTDPRAVLVGLLLILSGFQYLNQSTRYNQAVAMVKKTPAYKNKLRALELERSGGVTNKKKSQKNMDKKTEEDLSKELDLQITGAEMPSVWKLLGVRFVLLPYTLGKLLLWTACWFWRYKVKKYPYSLEDASYLTQRSLSIPLDRWRNIDEATKEDLVLRRLWEKSNLENYVAEMRKESKRRR

SEQ ID NO: 57651 - protein, 305 aa, Glycine max
  peptide (1)..(305): Ceres Seq. ID no. 15221657
  misc_feature (39)..(103): Pfam Name: DnaJ domain Pfam Description: DnaJ domain
  misc_feature (34)..(302): Homolog of NCBI NO: 23508632 NR Description: hypothetical protein, conserved [Plasmodium
  misc_feature (12)..(296): Homolog of NCBI NO: 17538212 NR Description: DNaJ domain (prokaryotic heat shock protein)
  misc_feature (12)..(296): Homolog of NCBI NO: 39593758 NR Description: Hypothetical protein CBG06069 [Caenorhabditis
  misc_feature (20)..(304): Homolog of NCBI NO: 34868434 NR Description: similar to bA16L21.2.1 (novel DnaJ domain protein to Drosophila, C. elegans and Arabidopsis predicted proteins
  misc_feature (33)..(304): Homolog of NCBI NO: 38078426 NR Description: RIKEN cDNA 2010203O07 [Mus musculus]
  misc_feature (9)..(304): Homolog of NCBI NO: 12313893 NR Description: bA16L21.2.1 (novel DnaJ domain protein similar to
  misc_feature (19)..(304): Homolog of NCBI NO: 18859921 NR Description: CG7872-PA [Drosophila melanogaster]
  misc_feature (107)..(305): Homolog of NCBI NO: 19347731 NR Description: unknown protein [Arabidopsis thaliana]
  misc_feature (4)..(271): Homolog of NCBI NO: 25404348 NR Description: hypothetical protein T13M11.13 [imported] -
  misc_feature (4)..(305): Homolog of NCBI NO: 30696610 NR Description: DnaJ protein family [Arabidopsis thaliana]
MDPPPVPIRWRATAIPFFVLVLFLSTISPSRAIYCDEDDCYDLLGVTQSANASEIKKAYYKLSLKYHPDKNPDPESRKLFVKVANAYEILKDEATREQYDYAIAHPEEVFYNTARYYRAYYGHKTDPRAVLVGLLLILSGFQYLNQSTRYNQAVAMVKKTPAYKNKLRALELERSGGVTNKKKSQKNMDKKTEEDLSKELDLQITGAEMPSVWKLLGVRFVLLPYTLGKLLLWTACWFWRYKVKKYPYSLEDASYLTQRSLSIPLDRWRNIDEATKEDLVLRRLWEKSNLENYVAEMRKESKRRR

SEQ ID NO: 57652 - DNA, 2222 bp, Glycine max
  misc_feature (1)..(2222): Ceres Seq. ID no. 15177274
ctgatgtttcaatagggtttcgaatttttctctgtttccctctgagactctctctatgctttggttttctcagatttttccaaattcgcggctcttccaggttgaatttggtagttttttcaatctagggttagggttttgtgcgtgctagtcaatggtttgttgcgtgcaaatttcatgaagagtgttatttatatttccgtacccgcttcagtttcttcgtaggttctgttgcagtgagaattgggcactttctcctttcgattttccggtcgaatcaagcatcaaaatctgagatttttcttttttgcaagtggtttttttagatttggggtagattttttttttgttttctttttattttgggcttcgtagtgcattgaattggcgcggcattcactggaatttgcgacgtgggagctggagaagctgcgatgaagtgtggtgcttggagggtattcttaaagtagcactcaattcgaggtttaatgtttggtcagagcatggattctgcaaggaatgcgggtggtgtggcagggacagtgctaattcccatgcgttttgtgtggccatatggaggaaggagtgtgtttctcagtggttctttcacaaggtggttggagcttctaccgatgtcgccagtggaaggttgtccaactgtgtttcaagtgatttataacttgccacccgggtaccatcagtacaagttttttgttgatggagaatggcgccatgatgaacatcaaccttatgtacctggagattatgggatagtcaacactgtcttcttggccactgatcctaactacatacctgttttacccccagacgttgcttctggaaatagcatggatgtggataatgatgcttttcgacgaatggtccgtctgaccgatggaacactgagtgaggtgctgccaagaatatcagatactgatgtacagatctcccgtcagcgtatttctgcatttctatcttcacacaccgcttatgaattacttcctgagtcaggcaaggttgttgctttggatgttgatctacccgtgaaacaggcatttcatatattgcatgagcagggaattttcatggctcctctttgggacttctgcaaagggcaatttgttggtgttcttagtgctttggattttattttaattttaagagagctggggaatcatggatctaatctgacagaagaggagcttgaaacacataccatatcagcttggaaagaaggaaagtcgtacttaaatagacagaacaatggacatggaactatgttttcaagacgatttatccatgcaggaccatatgataatctgaaagatattgccatgaagatcttgcaaaaggaggtttcaacagttcctattatccattcatcttctgaagatgcttcatttccacagttactacatcttgcttcactttcaggaatacttaaatgcatttgtaggtattttaggcactgctctagttccctgcctgtacttcaacttccaatctgtgcaatacctgtgggcacgtgggtgcccaaaattggggaatcaaatcggcagcctctagcaatgttgagaccaaccgcttctcttgcgtcagccctaaatttattagttcaagcccaagtaagctcaataccaatagttgatgataatgactcattactggatatatattgtcggagtgacataacagctttggcaaagaacagagcatatgcacatattaatcttgatgaaatgacagttcatcaggctttgcagttgggccaggacgcatatagtccctatgagcttagaagtcaaagatgtcagatgtgtttgcgttctgatcctctgcataaagtgatggaacgcttggcaaatccaggtgtcaggcggcttgtcatcgtggaagctggcagcaagcgtgtagaaggcattgtttcattgagggacatattcaagttcttcattggtgattagttttggattggtgaatggaaaagtaaaatggtatgtgctgtggttatgatactagagcatccatacaaccagccaccatcacttgtccaaccattgaaagtgctttctacacggtgattttatctctcatttcattgtaatacaattggattggcctcttgctttattgccttttttaagattttaggctgagaaagaggcctgtaaattcagagtatttgattgccccaaatttattcatctctccccattcgtatt

SEQ ID NO: 57653 - protein, 491 aa, Glycine max
  peptide (1)..(491): Ceres Seq. ID no. 15177275
  misc_feature (171)..(225): Pfam Name: CBS domain Pfam Description: CBS domain
  misc_feature (108)..(296): Homolog of NCBI NO: 24648663 NR Description: SNF4/AMP-activated protein kinase gamma subunit
  misc_feature (270)..(489): Homolog of NCBI NO: 24648663 NR Description: SNF4/AMP-activated protein kinase gamma subunit
  misc_feature (20)..(490): Homolog of NCBI NO: 21740621 NR Description: OSJNBb0012E08.3 [Oryza sativa (japonica
  misc_feature (197)..(461): Homolog of NCBI NO: 25402511 NR Description: hypothetical protein [imported] - Arabidopsis
  misc_feature (113)..(490): Homolog of NCBI NO: 9965729 NR Description: putative activator subunit of SNF1-related
  misc_feature (16)..(490): Homolog of NCBI NO: 29887975 NR Description: AKIN betagamma [Medicago truncatula]
  misc_feature (1)..(489): Homolog of NCBI NO: 11139546 NR Description: protein kinase AKINbetagamma-1 [Zea mays]
  misc_feature (1)..(489): Homolog of NCBI NO: 30102976 NR Description: putative protein kinase AKINbetagamma
  misc_feature (1)..(489): Homolog of NCBI NO: 11139548 NR Description: protein kinase AKINbetagamma-2 [Zea mays]
  misc_feature (1)..(490): Homolog of NCBI NO: 18390971 NR Description: protein kinase, putative [Arabidopsis thaliana]
MFGQSMDSARNAGGVAGTVLIPMRFVWPYGGRSVFLSGSFTRWLELLPMSPVEGCPTVFQVIYNLPPGYHQYKFFVDGEWRHDEHQPYVPGDYGIVNTVFLATDPNYIPVLPPDVASGNSMDVDNDAFRRMVRLTDGTLSEVLPRISDTDVQISRQRISAFLSSHTAYELLPESGKVVALDVDLPVKQAFHILHEQGIFMAPLWDFCKGQFVGVLSALDFILILRELGNHGSNLTEEELETHTISAWKEGKSYLNRQNNGHGTMFSRRFIHAGPYDNLKDIAMKILQKEVSTVPIIHSSSEDASFPQLLHLASLSGILKCICRYFRHCSSSLPVLQLPICAIPVGTWVPKIGESNRQPLAMLRPTASLASALNLLVQAQVSSIPIVDDNDSLLDIYCRSDITALAKNRAYAHINLDEMTVHQALQLGQDAYSPYELRSQRCQMCLRSDPLHKVMERLANPGVRRLVIVEAGSKRVEGIVSLRDIFKFFIGD

SEQ ID NO: 57654 - protein, 486 aa, Glycine max
  peptide (1)..(486): Ceres Seq. ID no. 15177276
  misc_feature (166)..(220): Pfam Name: CBS domain Pfam Description: CBS domain
  misc_feature (103)..(291): Homolog of NCBI NO: 24648663 NR Description: SNF4/AMP-activated protein kinase gamma subunit
  misc_feature (265)..(484): Homolog of NCBI NO: 24648663 NR Description: SNF4/AMP-activated protein kinase gamma subunit
  misc_feature (15)..(485): Homolog of NCBI NO: 21740621 NR Description: OSJNBb0012E08.3 [Oryza sativa (japonica
  misc_feature (192)..(456): Homolog of NCBI NO: 25402511 NR Description: hypothetical protein [imported] - Arabidopsis
  misc_feature (108)..(485): Homolog of NCBI NO: 9965729 NR Description: putative activator subunit of SNF1-related
  misc_feature (11)..(485): Homolog of NCBI NO: 29887975 NR Description: AKIN betagamma [Medicago truncatula]
  misc_feature (1)..(484): Homolog of NCBI NO: 11139546 NR Description: protein kinase AKINbetagamma-1 [Zea mays]
  misc_feature (1)..(484): Homolog of NCBI NO: 30102976 NR Description: putative protein kinase AKINbetagamma
  misc_feature (1)..(484): Homolog of NCBI NO: 11139548 NR Description: protein kinase AKINbetagamma-2 [Zea mays]
  misc_feature (1)..(485): Homolog of NCBI NO: 18390971 NR Description: protein kinase, putative [Arabidopsis thaliana]
MDSARNAGGVAGTVLIPMRFVWPYGGRSVFLSGSFTRWLELLPMSPVEGCPTVFQVIYNLPPGYHQYKFFVDGEWRHDEHQPYVPGDYGIVNTVFLATDPNYIPVLPPDVASGNSMDVDNDAFRRMVRLTDGTLSEVLPRISDTDVQISRQRISAFLSSHTAYELLPESGKVVALDVDLPVKQAFHILHEQGIFMAPLWDFCKGQFVGVLSALDFILILRELGNHGSNLTEEELETHTISAWKEGKSYLNRQNNGHGTMFSRRFIHAGPYDNLKDIAMKILQKEVSTVPIIHSSSEDASFPQLLHLASLSGILKCICRYFRHCSSSLPVLQLPICAIPVGTWVPKIGESNRQPLAMLRPTASLASALNLLVQAQVSSIPIVDDNDSLLDIYCRSDITALAKNRAYAHINLDEMTVHQALQLGQDAYSPYELRSQRCQMCLRSDPLHKVMERLANPGVRRLVIVEAGSKRVEGIVSLRDIFKFFIGD

SEQ ID NO: 57655 - protein, 469 aa, Glycine max
  peptide (1)..(469): Ceres Seq. ID no. 15177277
  misc_feature (149)..(203): Pfam Name: CBS domain Pfam Description: CBS domain
  misc_feature (86)..(274): Homolog of NCBI NO: 24648663 NR Description: SNF4/AMP-activated protein kinase gamma subunit
  misc_feature (248)..(467): Homolog of NCBI NO: 24648663 NR Description: SNF4/AMP-activated protein kinase gamma subunit
  misc_feature (1)..(468): Homolog of NCBI NO: 21740621 NR Description: OSJNBb0012E08.3 [Oryza sativa (japonica
  misc_feature (175)..(439): Homolog of NCBI NO: 25402511 NR Description: hypothetical protein [imported] - Arabidopsis
  misc_feature (91)..(468): Homolog of NCBI NO: 9965729 NR Description: putative activator subunit of SNF1-related
  misc_feature (1)..(468): Homolog of NCBI NO: 29887975 NR Description: AKIN betagamma [Medicago truncatula]
  misc_feature (1)..(467): Homolog of NCBI NO: 11139546 NR Description: protein kinase AKINbetagamma-1 [Zea mays]
  misc_feature (1)..(467): Homolog of NCBI NO: 30102976 NR Description: putative protein kinase AKINbetagamma
  misc_feature (1)..(467): Homolog of NCBI NO: 11139548 NR Description: protein kinase AKINbetagamma-2 [Zea mays]
  misc_feature (1)..(468): Homolog of NCBI NO: 18390971 NR Description: protein kinase, putative [Arabidopsis thaliana]
MRFVWPYGGRSVFLSGSFTRWLELLPMSPVEGCPTVFQVIYNLPPGYHQYKFFVDGEWRHDEHQPYVPGDYGIVNTVFLATDPNYIPVLPPDVASGNSMDVDNDAFRRMVRLTDGTLSEVLPRISDTDVQISRQRISAFLSSHTAYELLPESGKVVALDVDLPVKQAFHILHEQGIFMAPLWDFCKGQFVGVLSALDFILILRELGNHGSNLTEEELETHTISAWKEGKSYLNRQNNGHGTMFSRRFIHAGPYDNLKDIAMKILQKEVSTVPIIHSSSEDASFPQLLHLASLSGILKCICRYFRHCSSSLPVLQLPICAIPVGTWVPKIGESNRQPLAMLRPTASLASALNLLVQAQVSSIPIVDDNDSLLDIYCRSDITALAKNRAYAHINLDEMTVHQALQLGQDAYSPYELRSQRCQMCLRSDPLHKVMERLANPGVRRLVIVEAGSKRVEGIVSLRDIFKFFIGD

SEQ ID NO: 57656 - DNA, 1438 bp, Glycine max
  misc_feature (1)..(1438): Ceres Seq. ID no. 13594269
agttaaacctctggtcttcggcatgaacgaaaacctgttcgaacgaatgttgtgctccttcaaagcttctagtgttcttccaatttcgctccttcaacacttcggccccaattgctgttagtggtcgtcttctttgttcaaccacgcttctctctagtctctatgaatagcgcgcatttgtagaatctgttctggagatacgagtaagcccacagattttttttttgtttttcctgtgggtgtgcatggtttacatgtgatgcaaggtttctgttaagctagcttggcaatcatttggctggcatggacatagcacattgctatttaaagggtaatgctgatgctgtggagttttgtccacatgatccctaccataatgttttagcagtatccacttacacattacaagaaggttctcagccctgtcgacatggaagcatttcactcttcaatgttgatgtggaaccaggtcaccttgacatggtttttagtgaggaaactgctgggatttttgacataaagtggaatccacctggcgggcatgcaagtccttttctagctcaagcagatgctgatggatacttgagaattaaaatgctggagggttgctgtaatggagtggaaggggttaatctaaaggagatcacaaatgaaaaaatcagtaactctatgtgcttgtacctggattggaacccttcagccacatccatcacagtggggctttctgacggctctgtgtctattgtttcttttcttgaatccaagctggaaattcaagaagagtggaaagctcatgattatgaactttggacaacctcctttgatatccaccaaccaaatttggtatacactggctctgatgattgtaaattcagttgttgggatttgcgagataaacctcccaatgtggtatttcagagctctaaagtccacaaaatgggtgtttgttgcattgagaagagtccacatgacccaaataccttgttaactggcagttatgatgaattcctaagggtatgggatttaagatcaatctcaaaaccccttaattcaattaacttggggggaggagtttggagggttaagcaccaccccttcattccaggcttggttttggctgcttgtatgcacaatggttttgctattgtcgccattaaaggcaacaatgccgaagtgtcggaaacttacaagaagcatgattctcttgcctatggagcagattggcagaaaggagaagcaaatcacataggtgggaataccaaaccactggtggctacttgctcattctacgacaaacttgttcgggtgtggaggccaggaaatgatcttatcttgtagaatgtagattgatgcttaacgttaagtcatgaacccacttgaaaatgtgatacgtagtttatttattgaattatggttgaattacatgacactttcattt

SEQ ID NO: 57657 - protein, 344 aa, Glycine max
  peptide (1)..(344): Ceres Seq. ID no. 13594270
  misc_feature (228)..(307): Homolog of NCBI NO: 25455692 NR Description: Similar to hypothetical protein BC017335 [Homo
  misc_feature (23)..(336): Homolog of NCBI NO: 23612162 NR Description: hypothetical protein, conserved [Plasmodium
  misc_feature (121)..(307): Homolog of NCBI NO: 26352908 NR Description: unnamed protein product [Mus musculus]
  misc_feature (120)..(336): Homolog of NCBI NO: 19075894 NR Description: hypothetical protein [Schizosaccharomyces pombe]
  misc_feature (36)..(307): Homolog of NCBI NO: 34853114 NR Description: similar to RIKEN cDNA 2810443J12 [Rattus
  misc_feature (36)..(307): Homolog of NCBI NO: 24308452 NR Description: hypothetical protein BC017335 [Homo sapiens]
  misc_feature (36)..(307): Homolog of NCBI NO: 21313066 NR Description: RIKEN cDNA 2810443J12 [Mus musculus]
  misc_feature (11)..(337): Homolog of NCBI NO: 18858115 NR Description: CG3184-PA [Drosophila melanogaster]
  misc_feature (1)..(264): Homolog of NCBI NO: 26450621 NR Description: unknown protein [Arabidopsis thaliana]
  misc_feature (1)..(341): Homolog of NCBI NO: 15242588 NR Description: WD-40 repeat protein family [Arabidopsis
MDIAHCYLKGNADAVEFCPHDPYHNVLAVSTYTLQEGSQPCRHGSISLFNVDVEPGHLDMVFSEETAGIFDIKWNPPGGHASPFLAQADADGYLRIKMLEGCCNGVEGVNLKEITNEKISNSMCLYLDWNPSATSITVGLSDGSVSIVSFLESKLEIQEEWKAHDYELWTTSFDIHQPNLVYTGSDDCKFSCWDLRDKPPNVVFQSSKVHKMGVCCIEKSPHDPNTLLTGSYDEFLRVWDLRSISKPLNSINLGGGVWRVKHHPFIPGLVLAACMHNGFAIVAIKGNNAEVSETYKKHDSLAYGADWQKGEANHIGGNTKPLVATCSFYDKLVRVWRPGNDLIL

SEQ ID NO: 57658 - protein, 285 aa, Glycine max
  peptide (1)..(285): Ceres Seq. ID no. 13594271
  misc_feature (169)..(248): Homolog of NCBI NO: 25455692 NR Description: Similar to hypothetical protein BC017335 [Homo
  misc_feature (1)..(277): Homolog of NCBI NO: 23612162 NR Description: hypothetical protein, conserved [Plasmodium
  misc_feature (62)..(248): Homolog of NCBI NO: 26352908 NR Description: unnamed protein product [Mus musculus]
  misc_feature (61)..(277): Homolog of NCBI NO: 19075894 NR Description: hypothetical protein [Schizosaccharomyces pombe]
  misc_feature (1)..(248): Homolog of NCBI NO: 34853114 NR Description: similar to RIKEN cDNA 2810443J12 [Rattus
  misc_feature (1)..(248): Homolog of NCBI NO: 24308452 NR Description: hypothetical protein BC017335 [Homo sapiens]
  misc_feature (1)..(248): Homolog of NCBI NO: 21313066 NR Description: RIKEN cDNA 2810443J12 [Mus musculus]
  misc_feature (1)..(278): Homolog of NCBI NO: 18858115 NR Description: CG3184-PA [Drosophila melanogaster]
  misc_feature (1)..(205): Homolog of NCBI NO: 26450621 NR Description: unknown protein [Arabidopsis thaliana]
  misc_feature (1)..(282): Homolog of NCBI NO: 15242588 NR Description: WD-40 repeat protein family [Arabidopsis
MVFSEETAGIFDIKWNPPGGHASPFLAQADADGYLRIKMLEGCCNGVEGVNLKEITNEKISNSMCLYLDWNPSATSITVGLSDGSVSIVSFLESKLEIQEEWKAHDYELWTTSFDIHQPNLVYTGSDDCKFSCWDLRDKPPNVVFQSSKVHKMGVCCIEKSPHDPNTLLTGSYDEFLRVWDLRSISKPLNSINLGGGVWRVKHHPFIPGLVLAACMHNGFAIVAIKGNNAEVSETYKKHDSLAYGADWQKGEANHIGGNTKPLVATCSFYDKLVRVWRPGNDLIL

SEQ ID NO: 57659 - protein, 247 aa, Glycine max
  peptide (1)..(247): Ceres Seq. ID no. 13594272
  misc_feature (131)..(210): Homolog of NCBI NO: 25455692 NR Description: Similar to hypothetical protein BC017335 [Homo
  misc_feature (1)..(239): Homolog of NCBI NO: 23612162 NR Description: hypothetical protein, conserved [Plasmodium
  misc_feature (24)..(210): Homolog of NCBI NO: 26352908 NR Description: unnamed protein product [Mus musculus]
  misc_feature (23)..(239): Homolog of NCBI NO: 19075894 NR Description: hypothetical protein [Schizosaccharomyces pombe]
  misc_feature (1)..(210): Homolog of NCBI NO: 34853114 NR Description: similar to RIKEN cDNA 2810443J12 [Rattus
  misc_feature (1)..(210): Homolog of NCBI NO: 24308452 NR Description: hypothetical protein BC017335 [Homo sapiens]
  misc_feature (1)..(210): Homolog of NCBI NO: 21313066 NR Description: RIKEN cDNA 2810443J12 [Mus musculus]
  misc_feature (1)..(240): Homolog of NCBI NO: 18858115 NR Description: CG3184-PA [Drosophila melanogaster]
  misc_feature (1)..(167): Homolog of NCBI NO: 26450621 NR Description: unknown protein [Arabidopsis thaliana]
  misc_feature (1)..(244): Homolog of NCBI NO: 15242588 NR Description: WD-40 repeat protein family [Arabidopsis
MLEGCCNGVEGVNLKEITNEKISNSMCLYLDWNPSATSITVGLSDGSVSIVSFLESKLEIQEEWKAHDYELWTTSFDIHQPNLVYTGSDDCKFSCWDLRDKPPNVVFQSSKVHKMGVCCIEKSPHDPNTLLTGSYDEFLRVWDLRSISKPLNSINLGGGVWRVKHHPFIPGLVLAACMHNGFAIVAIKGNNAEVSETYKKHDSLAYGADWQKGEANHIGGNTKPLVATCSFYDKLVRVWRPGNDLIL

SEQ ID NO: 57660 - DNA, 613 bp, Glycine max
  misc_feature (1)..(613): Ceres Seq. ID no. 13638275
tttattatcatagtagatattcattccccttatctttctctcttctctctccccgcccaaaccctaactccctaccctattccgctttctctcatccatcatgaaaggaggaaagtccaagaccgaatctaagagagccgatgccaaacttgctgtgaataagaagggcgccgccaccaagactaggaaacccgccggaaaggggaaggcagcgaaagatcctaacaagccaaagaggcctccaagtgctttcttcgttttcatggaggaattcaggaaggtgttcaacaaggaacatcccgacaacaaagcagtgtctgctgtgggcaaagctgctggagcaaaatggaagacgatgaaagcacttggatttgagtcataaccatctctgtggcaagattccccttggctctccttttgatcatctcgaagcctcctcctttgtctacaacgattgtctctgcgggaagcccctcaaaccttgctactagctcaccattacatgcaaactcaaatatcttggaaaaatatatgtatatttgcagttagaccagtgtgtaccatccttagttaactcatcggtccgtttcatgtatycaatttgttgtttgtc

SEQ ID NO: 57661 - protein, 93 aa, Glycine max
  peptide (1)..(93): Ceres Seq. ID no. 15219404
MKGGKSKTESKRADAKLAVNKKGAATKTRKPAGKGKAAKDPNKPKRPPSAFFVFMEEFRKVFNKEHPDNKAVSAVGKAAGAKWKTMKALGFES

SEQ ID NO: 57662 - DNA, 1299 bp, Glycine max
  misc_feature (1)..(1299): Ceres Seq. ID no. 14316550
ctcaagatcagatcctcatctaccaccattccaggtgtagccatcaaaacaacgtttgtttaacaaaacccattatcagatcagatccgatcagatcctcttcagattcggatcaccgccgagtccatgagcacgccagcgctttcagggggcacgggcctcttctctggattcacgcgtttatgcaagggccttgcggtggtgcttgtttgcggtcacattgcggttcagtttatcccttcagctgttaactatcttgctcttattcccgccaggacaatcccatttgcctggaatctcattacagctggatatgttgaacaatctatatatggggtagtggtcagcacattaagtctcctgtttattgggaagctgcttgaaccaatatggggctccagggaattctttaaatttatctttgtggttaatcttctaacttcagtatgtttattcatcactgctattgccttatactacattacaaggctggagacttacctttacatgccactttctggatttcatggagttgtatctggtttcttggttggcattaagcaaattataccagatcaagagcttcctttcattaagataaaaacaaagtggttgccatctatcactgtattgctttccattgctattagcttctggacactagaggctacagcatatcttccaaccattatatctggcacgtatataagctggatttatcttagatactggcagaggaaaccagaaactaaacatagaggtgatctgagtgaagattttgctttctccacatttttcccagaatttttaagaccagtcatagaccctatcgcttcaatatttcatcgaatgctctgtggaagatatgatgcttctaatgatggtcaaggcaacagtctggaaagtgagcctttaccaggttcggactcaattgaggcatccaggagacgagaaagaggtgctcgagcactggaagaacgattggctgcagagaggttggctgttgcacgacgtgagttgcaaagagaggctgaggaaaatgtataattccccagcgtttgtaaattttggatcagttcaggcaatatgcacctattaggagtgatattttcagaggtcgtacagtaattagaaattttttgtttaggtcaaggaaaattttaatgtggttttgccatggactatgatctttacaaaaccgaaggtttctctttcttttgtcagataaatatatttgactttcttgtgtactttacacaaatacatagaatctaaagagtttttcagttgttgtctccc

SEQ ID NO: 57663 - protein, 306 aa, Glycine max
  peptide (1)..(306): Ceres Seq. ID no. 14316551
  misc_feature (41)..(246): Homolog of NCBI NO: 32413290 NR Description: hypothetical protein [Neurospora crassa]
  misc_feature (1)..(275): Homolog of NCBI NO: 31197821 NR Description: ENSANGP00000018642 [Anopheles gambiae]
  misc_feature (23)..(288): Homolog of NCBI NO: 19920824 NR Description: CG9536-PA [Drosophila melanogaster]
  misc_feature (23)..(286): Homolog of NCBI NO: 34865897 NR Description: similar to PL6 protein [Rattus norvegicus]
  misc_feature (23)..(286): Homolog of NCBI NO: 9790165 NR Description: PL6 protein; PL-6; placental protein 6 [Mus
  misc_feature (23)..(286): Homolog of NCBI NO: 5902022 NR Description: PL6 protein [Homo sapiens]
  misc_feature (1)..(292): Homolog of NCBI NO: 21741573 NR Description: OSJNBa0094O15.3 [Oryza sativa (japonica
  misc_feature (1)..(306): Homolog of NCBI NO: 34395257 NR Description: putative placental protein 6
  misc_feature (9)..(306): Homolog of NCBI NO: 6648207 NR Description: unknown protein [Arabidopsis thaliana]
  misc_feature (7)..(306): Homolog of NCBI NO: 18398108 NR Description: expressed protein [Arabidopsis thaliana]
MSTPALSGGTGLFSGFTRLCKGLAVVLVCGHIAVQFIPSAVNYLALIPARTIPFAWNLITAGYVEQSIYGVVVSTLSLLFIGKLLEPIWGSREFFKFIFVVNLLTSVCLFITAIALYYITRLETYLYMPLSGFHGVVSGFLVGIKQIIPDQELPFIKIKTKWLPSITVLLSIAISFWTLEATAYLPTIISGTYISWIYLRYWQRKPETKHRGDLSEDFAFSTFFPEFLRPVIDPIASIFHRMLCGRYDASNDGQGNSLESEPLPGSDSIEASRRRERGARALEERLAAERLAVARRELQREAEENV

SEQ ID NO: 57664 - protein, 179 aa, Glycine max
  peptide (1)..(179): Ceres Seq. ID no. 14316552
  misc_feature (1)..(119): Homolog of NCBI NO: 32413290 NR Description: hypothetical protein [Neurospora crassa]
  misc_feature (1)..(148): Homolog of NCBI NO: 31197821 NR Description: ENSANGP00000018642 [Anopheles gambiae]
  misc_feature (1)..(161): Homolog of NCBI NO: 19920824 NR Description: CG9536-PA [Drosophila melanogaster]
  misc_feature (1)..(159): Homolog of NCBI NO: 34865897 NR Description: similar to PL6 protein [Rattus norvegicus]
  misc_feature (1)..(159): Homolog of NCBI NO: 9790165 NR Description: PL6 protein; PL-6; placental protein 6 [Mus
  misc_feature (1)..(159): Homolog of NCBI NO: 5902022 NR Description: PL6 protein [Homo sapiens]
  misc_feature (1)..(165): Homolog of NCBI NO: 21741573 NR Description: OSJNBa0094O15.3 [Oryza sativa (japonica
  misc_feature (1)..(179): Homolog of NCBI NO: 34395257 NR Description: putative placental protein 6
  misc_feature (1)..(179): Homolog of NCBI NO: 6648207 NR Description: unknown protein [Arabidopsis thaliana]
  misc_feature (1)..(179): Homolog of NCBI NO: 18398108 NR Description: expressed protein [Arabidopsis thaliana]
MPLSGFHGVVSGFLVGIKQIIPDQELPFIKIKTKWLPSITVLLSIAISFWTLEATAYLPTIISGTYISWIYLRYWQRKPETKHRGDLSEDFAFSTFFPEFLRPVIDPIASIFHRMLCGRYDASNDGQGNSLESEPLPGSDSIEASRRRERGARALEERLAAERLAVARRELQREAEENV

SEQ ID NO: 57665 - DNA, 1269 bp, Glycine max
  misc_feature (1)..(1269): Ceres Seq. ID no. 14303116
gtttataaacttgaaagaaaaaaaagaaaaagctaccctcaagcggaaagaatcaaccttcttccctttcatttctcactttcagtgttcactcactcatctccactgtgcttcttcttcatcatcattcatcttcttcttctccctctccctctcttcccttcccaatgtcctctctccaccttcttcccggcgccaccaccgcccccaactccgcattcctcctccgcccccattctcccctcttcccctccaaaaccctaacccccaaaaaacccaaacctccctccgccctcctccagtggaatcgcaagcccgagctctccggctccaccccccgcgtcgccgtcatcacctccggcaagggtggcgtgggcaagaccaccaccaccgccaacatcggcctctccctcgcccgtctcggcttctccgtggtcgccatcgacgccgacgtcggcctccgcaacctcgacctcctcctcggcctcgagaaccgcgtcaactacaccgtgatcgaggtcctgaatggcgaatgccgcctcgaccaagccctcgtccgcgacaagcgctggtccaacttcgaactcctctgcatctccaaaccccgatccaaactccccctcggattcggcggcaaggccctcacctggctcgtggacgcgctgaaagcacgttcacagggctgccccgacttcatcctcatcgactgccccgccggcattgacgccggcttcatcaccgccatcacgcccgccaacgaggccgtcctcatcactacccccgacatcaccagcctccgcgacgccgaccgcgtcaccggcctcctcgaatgcgacggaattcgggacatcaagatgatcgtcaaccgggttcggaccgacatgatcaaaggggaggacatgatgtcggtgttggacgtgcaagagatgttagggttgcctttgctcggggttattcctgaggatagtgaggttattagaagcaccaatagaggtttccctcttgtgctcaacaagcctcccactttggccggattggcgttcgaacaagccgcgtggaggctcgtggagcaagatagcatgcaggccgtggtggtggaagaacaacccaaacgtgggtttttctccttttttggtgggtaggatttaaacaaggttatgcgtaatggtgtgtatagttagttggttgggttagagcatgtttggatgagtgttgacaaaattgattttgaattgaattgatttgatttatgtttgaatggtttttatt

SEQ ID NO: 57666 - protein, 324 aa, Glycine max
  peptide (1)..(324): Ceres Seq. ID no. 14303117
  misc_feature (65)..(301): Pfam Name: 4Fe-4S iron sulfur cluster binding proteins, Pfam Description: 4Fe-4S iron sulfur cluster binding proteins,
  misc_feature (58)..(303): Homolog of NCBI NO: 11467635 NR Description: septum-site determining protein [Guillardia
  misc_feature (57)..(303): Homolog of NCBI NO: 5748667 NR Description: cell division inhibitor MinD [Prototheca
  misc_feature (51)..(320): Homolog of NCBI NO: 11467859 NR Description: septum-site determining protein [Nephroselmis
  misc_feature (58)..(323): Homolog of NCBI NO: 23452400 NR Description: cell division inhibitor MinD [Chlamydomonas
  misc_feature (58)..(319): Homolog of NCBI NO: 7524873 NR Description: septum site-determining protein [Chlorella
  misc_feature (45)..(300): Homolog of NCBI NO: 11466429 NR Description: septum-site determining protein [Mesostigma
  misc_feature (27)..(324): Homolog of NCBI NO: 34897748 NR Description: Similar to Chlorella vulgaris C-27 chloroplast
  misc_feature (1)..(92): Homolog of NCBI NO: 9971822 NR Description: minD [Tagetes erecta]
  misc_feature (89)..(324): Homolog of NCBI NO: 9971822 NR Description: minD [Tagetes erecta]
  misc_feature (24)..(324): Homolog of NCBI NO: 15237874 NR Description: septum site-determining MinD (dbj|BAA90261.1)
MSSLHLLPGATTAPNSAFLLRPHSPLFPSKTLTPKKPKPPSALLQWNRKPELSGSTPRVAVITSGKGGVGKTTTTANIGLSLARLGFSVVAIDADVGLRNLDLLLGLENRVNYTVIEVLNGECRLDQALVRDKRWSNFELLCISKPRSKLPLGFGGKALTWLVDALKARSQGCPDFILIDCPAGIDAGFITAITPANEAVLITTPDITSLRDADRVTGLLECDGIRDIKMIVNRVRTDMIKGEDMMSVLDVQEMLGLPLLGVIPEDSEVIRSTNRGFPLVLNKPPTLAGLAFEQAAWRLVEQDSMQAVVVEEQPKRGFFSFFGG

SEQ ID NO: 57667 - protein, 240 aa, Glycine max
  peptide (1)..(240): Ceres Seq. ID no. 14303118
  misc_feature (59)..(240): Homolog of NCBI NO: 34784016 NR Description: Unknown (protein for MGC:63802) [Danio rerio]
FINLKEKKEKATLKRKESTFFPFISHFQCSLTHLHCASSSSSFIFFFSLSLSSLPNVLSPPSSRRHHRPQLRIPPPPPFSPLPLQNPNPQKTQTSLRPPPVESQARALRLHPPRRRHHLRQGWRGQDHHHRQHRPLPRPSRLLRGRHRRRRRPPQPRPPPRPREPRQLHRDRGPEWRMPPRPSPRPRQALVQLRTPLHLQTPIQTPPRIRRQGPHLARGRAESTFTGLPRLHPHRLPRRH

SEQ ID NO: 57668 - DNA, 803 bp, Glycine max
  misc_feature (1)..(803): Ceres Seq. ID no. 14315039
ctcattgttgttcttctctttcttttattgcttcctttcccattcttcatcttcttctctctgaaccgtactcaaactcactttcccacttatttatacaatgtcggcttacaaagaccaggatccccgtcttcatggcatcaaaactaagattcgtgtcgtccccaatttccccaaatccggtcttatgttcctagacattactactctattgcttgatcccaaagcatttaaggactcaatagatttgttcgtggagcggtacaagggcaaaaacatttctgttgttgcaggaattgaagctcgaggttttatttttggtccccccattgcgctggctataggagcaaagtttgtaccattgaggaaaccaaagaagttgcctggaaaagttatttctcaagaatatattctggaatatggaagggactgtcttgagatgcatgttggagctgttgatgatttgattgcaactggcggaacactctgtgccgctatggacttgttagaacgtgtgggagcagaagtagtggagtgtgcatgtgtaattgaattaccagaattgaagggtcgtgaacgtttgaacgggaagcccttgtgcgtgttggtggaatatgtggatatatgattatgaagaagtgggcaaaagaatattaagatgtagatttgggagatgatgtgtctttcagtgggtgctttcccattctgattacaattctagcttgtagtaggaacgatcaaatcaaattaatgcatttgtatgacccactctttgggctcatcttctcatctctttttcgaat

SEQ ID NO: 57669 - protein, 175 aa, Glycine max
  peptide (1)..(175): Ceres Seq. ID no. 14315040
  misc_feature (44)..(175): Homolog of NCBI NO: 3776082 NR Description: MtN30 [Medicago truncatula]
  misc_feature (7)..(171): Homolog of NCBI NO: 30689934 NR Description: adenine phosphoribosyltransferase 1, APRT
  misc_feature (1)..(171): Homolog of NCBI NO: 18396344 NR Description: adenine phosphoribosyltransferase 1, APRT
  misc_feature (8)..(171): Homolog of NCBI NO: 9711921 NR Description: Adenine phosphoribosyltransferase [Hordeum
  misc_feature (8)..(171): Homolog of NCBI NO: 2499932 NR Description: Adenine phosphoribosyltransferase 1 (APRT)
  misc_feature (2)..(170): Homolog of NCBI NO: 32492063 NR Description: adenine phosphoribosyltransferase [Brassica napus]
  misc_feature (7)..(171): Homolog of NCBI NO: 33354190 NR Description: putative adenine phosphoribosyl transferase
  misc_feature (1)..(172): Homolog of NCBI NO: 15234553 NR Description: adenine phosphoribosyltransferase -related
  misc_feature (1)..(172): Homolog of NCBI NO: 21536749 NR Description: adenine phosphoribosyltransferase (EC
  misc_feature (1)..(172): Homolog of NCBI NO: 15235709 NR Description: adenine phosphoribosyltransferase (EC 2.4.2.7) -
MSAYKDQDPRLHGIKTKIRVVPNFPKSGLMFLDITTLLLDPKAFKDSIDLFVERYKGKNISVVAGIEARGFIFGPPIALAIGAKFVPLRKPKKLPGKVISQEYILEYGRDCLEMHVGAVDDLIATGGTLCAAMDLLERVGAEVVECACVIELPELKGRERLNGKPLCVLVEYVDI

SEQ ID NO: 57670 - protein, 146 aa, Glycine max
  peptide (1)..(146): Ceres Seq. ID no. 14315041
  misc_feature (15)..(146): Homolog of NCBI NO: 3776082 NR Description: MtN30 [Medicago truncatula]
  misc_feature (1)..(142): Homolog of NCBI NO: 30689934 NR Description: adenine phosphoribosyltransferase 1, APRT
  misc_feature (1)..(142): Homolog of NCBI NO: 18396344 NR Description: adenine phosphoribosyltransferase 1, APRT
  misc_feature (1)..(142): Homolog of NCBI NO: 9711921 NR Description: Adenine phosphoribosyltransferase [Hordeum
  misc_feature (1)..(142): Homolog of NCBI NO: 2499932 NR Description: Adenine phosphoribosyltransferase 1 (APRT)
  misc_feature (1)..(141): Homolog of NCBI NO: 32492063 NR Description: adenine phosphoribosyltransferase [Brassica napus]
  misc_feature (1)..(142): Homolog of NCBI NO: 33354190 NR Description: putative adenine phosphoribosyl transferase
  misc_feature (1)..(143): Homolog of NCBI NO: 15234553 NR Description: adenine phosphoribosyltransferase -related
  misc_feature (1)..(143): Homolog of NCBI NO: 21536749 NR Description: adenine phosphoribosyltransferase (EC
  misc_feature (1)..(143): Homolog of NCBI NO: 15235709 NR Description: adenine phosphoribosyltransferase (EC 2.4.2.7) -
MFLDITTLLLDPKAFKDSIDLFVERYKGKNISVVAGIEARGFIFGPPIALAIGAKFVPLRKPKKLPGKVISQEYILEYGRDCLEMHVGAVDDLIATGGTLCAAMDLLERVGAEVVECACVIELPELKGRERLNGKPLCVLVEYVDI

SEQ ID NO: 57671 - DNA, 1066 bp, Glycine max
  misc_feature (1)..(1066): Ceres Seq. ID no. 15168506
aataatttaatagtgtaatgtccgaagatcaaaaccctctgatggggcatcgtatttgattggtcggtcatagcaattagcaactccacccttcaaacttgaaaggaaaaaaggactttggttatccacgccacaccacgctgtaattaactaaactttctagaatcttcttctctcgccatggccgcgccgtcgtcctccgccgcggcaaacatcatgctggcgatctccgagaagaagacgaacagtgtagatctgtatcgccctctccgcaactacgtggccttccactactcggagcgagaggcgcagaacctcgagtatgatctccaaaccctgaagcaactccgctccgatgtggagcgccactccgatccatcgctcccggcgcgccgtgatctcctccaatcctactacaaatctctctgcctcgtggagacgcggttccctatctcttccgaccccgatcacgtcaacgccctcaccttcgtctggttcgacgccttcaagcccaagcagaaggcctcgcagcagaacatccacctcgagaaggcctccgtgctcttcaatttgggtgccgtttacagccagattggtttgtcctatgatcggaacactgtagatggccgccgtcaggcctcccacgccttcatcgcggctgccggatccttcgccttccttcgcgacaatgcttccctgaaggcctccgttgggagttccaccactgtggatttgtccgttgagtgcgccgggatgctggagaagctcatgctcgcgcaggcgcaggagtgcgtcttcgagaacaccattgccaaagggagcactcccggtgtctatgccaagatctctaggcaggtccggtgctagtttgttctatgttttaacttataatcattctttcatgtttgatacttgagttgagtgattatgaagatggttggtacaatttcgatttcgttattatagttttgctctcatttgtgttgttttttgatgttgaaatggtttttctttatgcatgggcaatgagtttcaatgtattaggggtatccgcgcttattgaagc

SEQ ID NO: 57672 - protein, 228 aa, Glycine max
  peptide (1)..(228): Ceres Seq. ID no. 15168507
  misc_feature (12)..(170): Pfam Name: BRO1-like domain Pfam Description: BRO1-like domain
  misc_feature (6)..(207): Homolog of NCBI NO: 19343951 NR Description: Similar to GTP-rho binding protein 1 [Homo
  misc_feature (6)..(207): Homolog of NCBI NO: 15620917 NR Description: KIAA1929 protein [Homo sapiens]
  misc_feature (4)..(218): Homolog of NCBI NO: 34866821 NR Description: similar to rhophilin [Rattus norvegicus]
  misc_feature (1)..(218): Homolog of NCBI NO: 6680085 NR Description: rhophilin, Rho GTPase binding protein 1
  misc_feature (1)..(218): Homolog of NCBI NO: 30354357 NR Description: Rhpn1 protein [Mus musculus]
  misc_feature (13)..(226): Homolog of NCBI NO: 19880054 NR Description: ALG-2 interacting protein X [Dictyostelium
  misc_feature (7)..(226): Homolog of NCBI NO: 37535674 NR Description: putative signal tranduction protein
  misc_feature (5)..(226): Homolog of NCBI NO: 23297205 NR Description: At1g15130/F9L1_7 [Arabidopsis thaliana]
  misc_feature (5)..(227): Homolog of NCBI NO: 25518358 NR Description: hypothetical protein F9L1.7 [imported] -
  misc_feature (5)..(226): Homolog of NCBI NO: 15218061 NR Description: proline-rich protein family [Arabidopsis thaliana]
MAAPSSSAAANIMLAISEKKTNSVDLYRPLRNYVAFHYSEREAQNLEYDLQTLKQLRSDVERHSDPSLPARRDLLQSYYKSLCLVETRFPISSDPDHVNALTFVWFDAFKPKQKASQQNIHLEKASVLFNLGAVYSQIGLSYDRNTVDGRRQASHAFIAAAGSFAFLRDNASLKASVGSSTTVDLSVECAGMLEKLMLAQAQECVFENTIAKGSTPGVYAKISRQVRC

SEQ ID NO: 57673 - protein, 216 aa, Glycine max
  peptide (1)..(216): Ceres Seq. ID no. 15168508
  misc_feature (1)..(158): Pfam Name: BRO1-like domain Pfam Description: BRO1-like domain
  misc_feature (1)..(195): Homolog of NCBI NO: 19343951 NR Description: Similar to GTP-rho binding protein 1 [Homo
  misc_feature (1)..(195): Homolog of NCBI NO: 15620917 NR Description: KIAA1929 protein [Homo sapiens]
  misc_feature (1)..(206): Homolog of NCBI NO: 34866821 NR Description: similar to rhophilin [Rattus norvegicus]
  misc_feature (1)..(206): Homolog of NCBI NO: 6680085 NR Description: rhophilin, Rho GTPase binding protein 1
  misc_feature (1)..(206): Homolog of NCBI NO: 30354357 NR Description: Rhpn1 protein [Mus musculus]
  misc_feature (1)..(214): Homolog of NCBI NO: 19880054 NR Description: ALG-2 interacting protein X [Dictyostelium
  misc_feature (1)..(214): Homolog of NCBI NO: 37535674 NR Description: putative signal tranduction protein
  misc_feature (1)..(214): Homolog of NCBI NO: 23297205 NR Description: At1g15130/F9L1_7 [Arabidopsis thaliana]
  misc_feature (1)..(215): Homolog of NCBI NO: 25518358 NR Description: hypothetical protein F9L1.7 [imported] -
  misc_feature (1)..(214): Homolog of NCBI NO: 15218061 NR Description: proline-rich protein family [Arabidopsis thaliana]
MLAISEKKTNSVDLYRPLRNYVAFHYSEREAQNLEYDLQTLKQLRSDVERHSDPSLPARRDLLQSYYKSLCLVETRFPISSDPDHVNALTFVWFDAFKPKQKASQQNIHLEKASVLFNLGAVYSQIGLSYDRNTVDGRRQASHAFIAAAGSFAFLRDNASLKASVGSSTTVDLSVECAGMLEKLMLAQAQECVFENTIAKGSTPGVYAKISRQVRC

SEQ ID NO: 57674 - DNA, 1039 bp, Glycine max
  misc_feature (1)..(1039): Ceres Seq. ID no. 13638279
agcattaccggattacccggtcactagtcccttcccacgacaacacccacagtcctatttccacacccatcgaaatcgttaaagcagcacagtcactctctaaatcgttcaacctcacacccactcctccgatattcttttctgctttaatcttcgctctgttttcgggggtcagatcttaatgccgaaggcttcgtattctgtttgaattttgttatctattgggagtggagtagtatttgagatcgagcgtaaaatatataaaaataataaaagaagcaaaggcgatgtttttgtttgattggttttatgggattctggcatcgcttgggttgtggcagaaggaggccaagatcttattcttaggtctcgataatgccggaaagaccaccttgcttcacatgctcaaagacgagagactagttcagcatcagcctacacagtatccaacatcagaggagttgagtattgggaggatcaagtttaaagcttttgatctcgggggtcaccagattgcacgaagagtctggaaagattactatgctaaggtagatgcagtggtctacttggtagattcatatgacaaggaacgatttgccgagtctaaaaaagagttagatgctctgctctctgatgagtctttgactactgtccctttccttatccttggaaacaagatagatattccatatgctgcctcagaagaagagttgcgttaccatttgggcctgaccaatttcactacgggcaagggaaatgtaaatttgtcagattctaatgtccgtcctatggaggttttcatgtgcagtattgtgaagaaaatgggttacggagatggtttcaaatggctctctcagtacatcaaataaatagtccatgtagtaagagatggcttggtatcctgtttctagacgcttattcctatagttatgctatagaaatgttgttagtacaaattgctgttaaacattttttttagtacaaaaaattgtttaaagaatattttattaaaagaaaatgacacttatccctttctttc

SEQ ID NO: 57675 - protein, 193 aa, Glycine max
  peptide (1)..(193): Ceres Seq. ID no. 13638280
  misc_feature (5)..(192): Pfam Name: ADP-ribosylation factor family Pfam Description: ADP-ribosylation factor family
  misc_feature (1)..(193): Homolog of NCBI NO: 7438455 NR Description: GTP-binding protein Sar1, pollination-induced -
  misc_feature (1)..(192): Homolog of NCBI NO: 25294172 NR Description: ras-like small monomeric GTP-binding protein
  misc_feature (1)..(193): Homolog of NCBI NO: 1549222 NR Description: NtSar1 protein [Nicotiana tabacum]
  misc_feature (1)..(193): Homolog of NCBI NO: 7438457 NR Description: GTP-binding protein - curled-leaved tobacco
  misc_feature (1)..(193): Homolog of NCBI NO: 3334321 NR Description: GTP-binding protein SAR1A
  misc_feature (1)..(193): Homolog of NCBI NO: 25294173 NR Description: small GTP-binding protein Sar1BNt [imported] -
  misc_feature (1)..(193): Homolog of NCBI NO: 34894960 NR Description: putative GTP-binding protein
  misc_feature (1)..(192): Homolog of NCBI NO: 15223516 NR Description: GTP-binding protein SAR1B [Arabidopsis thaliana]
  misc_feature (1)..(193): Homolog of NCBI NO: 34902852 NR Description: unnamed protein product [Oryza sativa (japonica
  misc_feature (1)..(193): Homolog of NCBI NO: 15235226 NR Description: GTP-binding protein SAR1A [Arabidopsis thaliana]
MFLFDWFYGILASLGLWQKEAKILFLGLDNAGKTTLLHMLKDERLVQHQPTQYPTSEELSIGRIKFKAFDLGGHQIARRVWKDYYAKVDAVVYLVDSYDKERFAESKKELDALLSDESLTTVPFLILGNKIDIPYAASEEELRYHLGLTNFTTGKGNVNLSDSNVRPMEVFMCSIVKKMGYGDGFKWLSQYIK

SEQ ID NO: 57676 - protein, 155 aa, Glycine max
  peptide (1)..(155): Ceres Seq. ID no. 13638281
  misc_feature (1)..(154): Pfam Name: ADP-ribosylation factor family Pfam Description: ADP-ribosylation factor family
  misc_feature (1)..(155): Homolog of NCBI NO: 7438455 NR Description: GTP-binding protein Sar1, pollination-induced -
  misc_feature (1)..(154): Homolog of NCBI NO: 25294172 NR Description: ras-like small monomeric GTP-binding protein
  misc_feature (1)..(155): Homolog of NCBI NO: 1549222 NR Description: NtSar1 protein [Nicotiana tabacum]
  misc_feature (1)..(155): Homolog of NCBI NO: 7438457 NR Description: GTP-binding protein - curled-leaved tobacco
  misc_feature (1)..(155): Homolog of NCBI NO: 3334321 NR Description: GTP-binding protein SAR1A
  misc_feature (1)..(155): Homolog of NCBI NO: 25294173 NR Description: small GTP-binding protein Sar1BNt [imported] -
  misc_feature (1)..(155): Homolog of NCBI NO: 34894960 NR Description: putative GTP-binding protein
  misc_feature (1)..(154): Homolog of NCBI NO: 15223516 NR Description: GTP-binding protein SAR1B [Arabidopsis thaliana]
  misc_feature (1)..(155): Homolog of NCBI NO: 34902852 NR Description: unnamed protein product [Oryza sativa (japonica
  misc_feature (1)..(155): Homolog of NCBI NO: 15235226 NR Description: GTP-binding protein SAR1A [Arabidopsis thaliana]
MLKDERLVQHQPTQYPTSEELSIGRIKFKAFDLGGHQIARRVWKDYYAKVDAVVYLVDSYDKERFAESKKELDALLSDESLTTVPFLILGNKIDIPYAASEEELRYHLGLTNFTTGKGNVNLSDSNVRPMEVFMCSIVKKMGYGDGFKWLSQYIK

SEQ ID NO: 57677 - DNA, 1002 bp, Glycine max
  misc_feature (1)..(1002): Ceres Seq. ID no. 13595782
attttcttgttgaggaagaaagatgctgatgaaattcaaataccctcgtcgatcacacgcacccaagaccaagaactcaagaagggtaccacattcgctttatcactattaacttcataacttagtttctcttctagtccagaagtacaagtaagtgatggtggtgtttccggtggtgaagctagcaacactcgctctgagaaccgcgtgcaaaccaatcgccaacaggctcaagaaggaggccggttaccaccccaagttccgaaatttcatcatcagcattgcccaggccaatcatagattgacgacgagagtgcagagacgaatttacggtcatgccactgatgttgcaatccaccctctgaacgaggagaaggctgtgcaagctgctgctgatctgcttggagaactctttgtcttctcggttgcaggagctgccatcatctttgaggtgcaaagaagttcaagatcagaagcaagaaaagaagaattacgtagacaggagatacaggaaataaagactaagaatgaagaattggctagagaaattgaacttcttgcacaaaagcttgaagagctggaacaactttccaggggacgaggactacttggcactcttaacttcagacacactcgtgtctctgaagatagaaaatccaattgattgttgcaattgttaagcattgcacacagattttgattaacaagcaatacctcttggtgtggcaagaagcatgatattgacaatgtgcagatgggttactgtatattatatatggaggtacaatcagagctaaaaccaaattttaggtgtggtgaggggctttgaggattttttttttgagaggggctttgaggattaatcttgttcatacgaaataaaacaaaattgtacaacacatttatgaatgcgttctttttgaaaatttcctttccagggacaaattcagcctgctaactacagttttctagccttttggataatctacatttgtttcctcc

SEQ ID NO: 57678 - protein, 168 aa, Glycine max
  peptide (1)..(168): Ceres Seq. ID no. 13595783
  misc_feature (3)..(130): Homolog of NCBI NO: 23482917 NR Description: Arabidopsis thaliana At1g28510/F3M18_5
  misc_feature (1)..(142): Homolog of NCBI NO: 39849948 NR Description: Unknown (protein for MGC:75494) [Homo sapiens]
  misc_feature (1)..(144): Homolog of NCBI NO: 24649440 NR Description: CG13601-PA [Drosophila melanogaster]
  misc_feature (1)..(139): Homolog of NCBI NO: 13376717 NR Description: OPA3 protein; Optic atrophy 3 (Iraqi-Jewish
  misc_feature (1)..(145): Homolog of NCBI NO: 26342969 NR Description: unnamed protein product [Mus musculus]
  misc_feature (1)..(145): Homolog of NCBI NO: 27676608 NR Description: similar to OPA3 protein
  misc_feature (7)..(137): Homolog of NCBI NO: 19112998 NR Description: hypothetical coiled-coil protein
  misc_feature (2)..(146): Homolog of NCBI NO: 15230967 NR Description: hypothetical protein [Arabidopsis thaliana]
  misc_feature (2)..(157): Homolog of NCBI NO: 18396819 NR Description: expressed protein [Arabidopsis thaliana]
  misc_feature (5)..(167): Homolog of NCBI NO: 34904528 NR Description: B1066G12.9 [Oryza sativa (japonica
MVVFPVVKLATLALRTACKPIANRLKKEAGYHPKFRNFIISIAQANHRLTTRVQRRIYGHATDVAIHPLNEEKAVQAAADLLGELFVFSVAGAAIIFEVQRSSRSEARKEELRRQEIQEIKTKNEELAREIELLAQKLEELEQLSRGRGLLGTLNFRHTRVSEDRKSN

SEQ ID NO: 57679 - DNA, 709 bp, Glycine max
  misc_feature (1)..(709): Ceres Seq. ID no. 15175098
aatcgaccttcaaggtattttcatcgattgcaaacaattagacagaaacttccaacctcgaacacttttttcaggcaaaccaacacacataaccgcacacaaacatcacatgtgtgtgggtggtcactgttgtttttcttgcttgtcttgttcctacacatgttttcttaatttttattttcttcattttatcttgatatgaaaattaaacataagccaacatattaattaagcatgtgcttgtccgtttcaggttaggaaggagaaattaggtgacagaattaccgcccttcatcaactcgtttccccattcggaaagactgacacggcttctgtcttattagaagctattggctatatcagattccttcagagtcaaattgaggcccttagcttaccatacttgggcagtggatcaggaaacatgaggcagcaacaatccgttcaaggagagaacaattgtatattccctgaagaccccggtcagttgctgaatgaaaactgtttgaagaggaaagcagctagtgagcaggattctcaagaagaacaaaagaaagacctgaggagtagagggttatgcttggttccagtgtcatgcacgctgcaagttggaagtgacaatggagctgactattgggctcctgcttttggtgggggatttcggtagattgcttaacttactattaataggttatcatatgcagcatac

SEQ ID NO: 57680 - protein, 80 aa, Glycine max
  peptide (1)..(80): Ceres Seq. ID no. 15175099
  misc_feature (33)..(76): Homolog of NCBI NO: 14488370 NR Description: putative ethylene-responsive protein
  misc_feature (32)..(80): Homolog of NCBI NO: 34910130 NR Description: B1070A12.8 [Oryza sativa (japonica
  misc_feature (44)..(77): Homolog of NCBI NO: 21536756 NR Description: unknown [Arabidopsis thaliana]
  misc_feature (44)..(77): Homolog of NCBI NO: 18402256 NR Description: expressed protein [Arabidopsis thaliana]
  misc_feature (33)..(80): Homolog of NCBI NO: 9294343 NR Description: gene_id:F3H11.2~unknown protein [Arabidopsis
  misc_feature (33)..(80): Homolog of NCBI NO: 15232315 NR Description: bHLH transcription factor (bHLH123) -related
  misc_feature (33)..(78): Homolog of NCBI NO: 15217667 NR Description: hypothetical protein [Arabidopsis thaliana]
  misc_feature (1)..(76): Homolog of NCBI NO: 33111977 NR Description: putative bHLH133 transcription factor
  misc_feature (1)..(76): Homolog of NCBI NO: 11045087 NR Description: putative protein [Brassica napus]
  misc_feature (1)..(79): Homolog of NCBI NO: 15233452 NR Description: bHLH068 putative bHLH transcription factor
MRQQQSVQGENNCIFPEDPGQLLNENCLKRKAASEQDSQEEQKKDLRSRGLCLVPVSCTLQVGSDNGADYWAPAFGGGFR

SEQ ID NO: 57681 - protein, 66 aa, Glycine max
  peptide (1)..(66): Ceres Seq. ID no. 15175100
IDLQGIFIDCKQLDRNFQPRTLFSGKPTHITAHKHHMCVGGHCCFSCLSCSYTCFLNFYFLHFILI

SEQ ID NO: 57682 - protein, 56 aa, Glycine max
  peptide (1)..(56): Ceres Seq. ID no. 15175101
NRPSRYFHRLQTIRQKLPTSNTFFRQTNTHNRTQTSHVCGWSLLFFLLVLFLHMFS

SEQ ID NO: 57683 - DNA, 2220 bp, Glycine max
  misc_feature (1)..(2220): Ceres Seq. ID no. 14314411
cacttatcaagaaaccctaatacagatacagtttccctctctctttctcaagcaatccaaagtcacaacccacacacactgtacgggttgtgcagatcagagggtgttggtacactctatctatcttttttctcccataagcagaaacaccctctctaatgtttctctctttgtcccatacccatacctcattctgcaagcgtccccttaaataataaatacaccgcgtgtgtgtgtgtatgtgagagagagagagtaagaaataaagcaaatctctctgctgtttctcttacgtctttctattttgggctctcatggattcgggtaacagtgggagtatgcaatcttccagcaccgccggtgatgaagagtacgattcacgcgccgacccatctttgtcgtcatcaatctctgcgttctttaatagtaactcccatccttcagctccaccacaaccaacaacgttaacaaaccacgttggtcctcctttctctactcagcaccaccacgtgttcgaccctttatcatccaattacttggatccgacacaaagatcgccgcaatcaaaccaaatcctcaacctcgacatggtgcggtccaaggttgccgccagatccggacccgattttagctccttcataccttcatcttccccacacaacaacaacaaccaagcttttctgttaactcaattgggaggaggaggagttaacaacgttggtgcttttcccagtaccactctccctccagaaagtggaggaggcggattagtaatgaatgaacaagtaaacagtagcaacaccaacaaaaacatggttcgaaacccgaagaaaaggtcaagagcttctaggcgtgcacccaccactgttctcactacggacaccacgaatttccgagccatggttcaggaattcactggcatcccagcacctcctttcacttcctcctcctcgtctttcccaagaacaaggttagatctctttgccacctctaatgcttcttcttcatccattattagagaacaaacaccttcttatcttcttcgcccctttgcacacaaagtccaagctcaagtaccttcttcaatcccaccaccctcttcctttcaacccatgttgaacaactaccaccaccaccaccaccagcataacccaattctcagcttccaatccattctccaaccgcatcaactcattggttctaaaactcaacaacaaccctccttggaaataccgcctagtgctcttgggttggaggaattaggattgaaccatgctcatcatcaaaacatcaacatgcgttcgtcttcatcggatggaacattgtcaagggtcaacaacgacaataacaacatgcgtggtccttcggcagattgggcccaggcccaggcccaaagaattgataacaatgatggaggacttttggggtctcttactggtgccaccttaaactacagaagcaatattgtttcggatcagcgagtcaaggttactaataattcggattttcatggagaaaaaggaccggaatgtgttgtggctgtacgaagcgaaggtatggtcgaatcgtggattaattgttcttctgattgagagcagaaataagcaaccatcaaatgggaaaagaatatatgaacaaagaaaaaaagggagattcataaatatattttcctcacacggtttaaagcaactgatgatggtagtatactaattcatgagagacagaatcttggtaattggtatcctcagcttaaccatgaccgtcaaattaattaaacacctttttcttcttcttttatttggttctttgtgtccattagaattatgcgtaaataactagcagctaccttgtctttctctactcctttattttattttatttgttttcttctcaaaatctcaattgtggttttgatcgatattatatacagctatatacgaattagaatcctggagggttttcgtttcgacgtacgtttgtttcatcgtaatttgtgtctctatttggtaaactagagagctacatacatacaatggcagcatcatatgatcagtttgtggttcgtgtcactgtatatggattttggttttgactacttgtgtgaaattatggttcagagaatgtacaatgtgcacagcatagaatgaacaacacagacaaaactgtatgtatcctctcttttcctgttttgtcgcaccttctattctctgattttacctc

SEQ ID NO: 57684 - protein, 425 aa, Glycine max
  peptide (1)..(425): Ceres Seq. ID no. 14314412
  misc_feature (179)..(207): Pfam Name: VQ motif Pfam Description: VQ motif
  misc_feature (105)..(207): Homolog of NCBI NO: 22324429 NR Description: unknown protein [Oryza sativa (japonica
  misc_feature (161)..(231): Homolog of NCBI NO: 21593100 NR Description: unknown [Arabidopsis thaliana]
  misc_feature (117)..(280): Homolog of NCBI NO: 18403283 NR Description: expressed protein [Arabidopsis thaliana]
  misc_feature (161)..(231): Homolog of NCBI NO: 18414384 NR Description: expressed protein [Arabidopsis thaliana]
  misc_feature (169)..(283): Homolog of NCBI NO: 15220238 NR Description: hypothetical protein [Arabidopsis thaliana]
  misc_feature (115)..(353): Homolog of NCBI NO: 15235990 NR Description: expressed protein [Arabidopsis thaliana]
  misc_feature (1)..(76): Homolog of NCBI NO: 15238363 NR Description: expressed protein [Arabidopsis thaliana]
  misc_feature (169)..(372): Homolog of NCBI NO: 15238363 NR Description: expressed protein [Arabidopsis thaliana]
MDSGNSGSMQSSSTAGDEEYDSRADPSLSSSISAFFNSNSHPSAPPQPTTLTNHVGPPFSTQHHHVFDPLSSNYLDPTQRSPQSNQILNLDMVRSKVAARSGPDFSSFIPSSSPHNNNNQAFLLTQLGGGGVNNVGAFPSTTLPPESGGGGLVMNEQVNSSNTNKNMVRNPKKRSRASRRAPTTVLTTDTTNFRAMVQEFTGIPAPPFTSSSSSFPRTRLDLFATSNASSSSIIREQTPSYLLRPFAHKVQAQVPSSIPPPSSFQPMLNNYHHHHHQHNPILSFQSILQPHQLIGSKTQQQPSLEIPPSALGLEELGLNHAHHQNINMRSSSSDGTLSRVNNDNNNMRGPSADWAQAQAQRIDNNDGGLLGSLTGATLNYRSNIVSDQRVKVTNNSDFHGEKGPECVVAVRSEGMVESWINCSSD

SEQ ID NO: 57685 - protein, 417 aa, Glycine max
  peptide (1)..(417): Ceres Seq. ID no. 14314413
  misc_feature (171)..(199): Pfam Name: VQ motif Pfam Description: VQ motif
  misc_feature (97)..(199): Homolog of NCBI NO: 22324429 NR Description: unknown protein [Oryza sativa (japonica
  misc_feature (153)..(223): Homolog of NCBI NO: 21593100 NR Description: unknown [Arabidopsis thaliana]
  misc_feature (109)..(272): Homolog of NCBI NO: 18403283 NR Description: expressed protein [Arabidopsis thaliana]
  misc_feature (153)..(223): Homolog of NCBI NO: 18414384 NR Description: expressed protein [Arabidopsis thaliana]
  misc_feature (161)..(275): Homolog of NCBI NO: 15220238 NR Description: hypothetical protein [Arabidopsis thaliana]
  misc_feature (107)..(345): Homolog of NCBI NO: 15235990 NR Description: expressed protein [Arabidopsis thaliana]
  misc_feature (1)..(68): Homolog of NCBI NO: 15238363 NR Description: expressed protein [Arabidopsis thaliana]
  misc_feature (161)..(364): Homolog of NCBI NO: 15238363 NR Description: expressed protein [Arabidopsis thaliana]
MQSSSTAGDEEYDSRADPSLSSSISAFFNSNSHPSAPPQPTTLTNHVGPPFSTQHHHVFDPLSSNYLDPTQRSPQSNQILNLDMVRSKVAARSGPDFSSFIPSSSPHNNNNQAFLLTQLGGGGVNNVGAFPSTTLPPESGGGGLVMNEQVNSSNTNKNMVRNPKKRSRASRRAPTTVLTTDTTNFRAMVQEFTGIPAPPFTSSSSSFPRTRLDLFATSNASSSSIIREQTPSYLLRPFAHKVQAQVPSSIPPPSSFQPMLNNYHHHHHQHNPILSFQSILQPHQLIGSKTQQQPSLEIPPSALGLEELGLNHAHHQNINMRSSSSDGTLSRVNNDNNNMRGPSADWAQAQAQRIDNNDGGLLGSLTGATLNYRSNIVSDQRVKVTNNSDFHGEKGPECVVAVRSEGMVESWINCSSD

SEQ ID NO: 57686 - protein, 334 aa, Glycine max
  peptide (1)..(334): Ceres Seq. ID no. 14314414
  misc_feature (88)..(116): Pfam Name: VQ motif Pfam Description: VQ motif
  misc_feature (14)..(116): Homolog of NCBI NO: 22324429 NR Description: unknown protein [Oryza sativa (japonica
  misc_feature (70)..(140): Homolog of NCBI NO: 21593100 NR Description: unknown [Arabidopsis thaliana]
  misc_feature (26)..(189): Homolog of NCBI NO: 18403283 NR Description: expressed protein [Arabidopsis thaliana]
  misc_feature (70)..(140): Homolog of NCBI NO: 18414384 NR Description: expressed protein [Arabidopsis thaliana]
  misc_feature (78)..(192): Homolog of NCBI NO: 15220238 NR Description: hypothetical protein [Arabidopsis thaliana]
  misc_feature (24)..(262): Homolog of NCBI NO: 15235990 NR Description: expressed protein [Arabidopsis thaliana]
  misc_feature (78)..(281): Homolog of NCBI NO: 15238363 NR Description: expressed protein [Arabidopsis thaliana]
MVRSKVAARSGPDFSSFIPSSSPHNNNNQAFLLTQLGGGGVNNVGAFPSTTLPPESGGGGLVMNEQVNSSNTNKNMVRNPKKRSRASRRAPTTVLTTDTTNFRAMVQEFTGIPAPPFTSSSSSFPRTRLDLFATSNASSSSIIREQTPSYLLRPFAHKVQAQVPSSIPPPSSFQPMLNNYHHHHHQHNPILSFQSILQPHQLIGSKTQQQPSLEIPPSALGLEELGLNHAHHQNINMRSSSSDGTLSRVNNDNNNMRGPSADWAQAQAQRIDNNDGGLLGSLTGATLNYRSNIVSDQRVKVTNNSDFHGEKGPECVVAVRSEGMVESWINCSSD

SEQ ID NO: 57687 - DNA, 1130 bp, Glycine max
  misc_feature (1)..(1130): Ceres Seq. ID no. 14305671
aaaaaagcctcctcctctttctcttgttcaaccttcccacaaacactgcatgcgtctttgaccacaactgcttcttcaatttccaatctttttggacaccctctattgctattcctcccttggtgttgtttgtgttaaagggtatctctctacttaatataaagttccattgtctcttgaggcaattttcaaccttagttgtgtgtttcggagagtttttttgtgttgttttgttgaggttgggtttgtgagtgagagaatggtgggtgctctatctgttgtgggttcatcagtgatggactctcacactggcccttgtttgtgtgttgatgctctcccaacaactagtgttaatctcaagagtggtggagatgttttgtgcaagaatttgatgggaaggaagcataatttggtgaagcatggtggtgggaccatgaagttgagcagttcatttgttgatcctggaagagagtggaggctctttgttaacaaaagttgcaagaggcagcgcaaggataggagagtgaccattgttaatgaacttggaggacaatatgaggacacttttgaagatgttaaagcgcaaatgctcaactatttcacatacaaggctgtgaggactgttcttcatcagttgtatgagatgaatccacctaaatacacgtggttctataattttgttgcttcaaacaaaccagcagatgggaaacgttttattcgatcacttgggaaggagcaacaagagcttgctgaaagagtgatggtaactcggcttcacctttatggaaaatgggtcaagaaatgtaatcatgctgagatatatcaagaaatctctgatgaaaacttggagttaatgagggaacggctcatggagacagtaatatggccctcagatgacacaaacacggaaaagattggctgataattcatctcaaatttttactttctgtcttcaacctcttcctagtctaggtatattttttgtttcaatatcaatctgttttgtttccaaaattgtcatttgtgtcattttcctttgataggattctcagttttacgttatgtaaattatgtatatatttgtaccttgttaaatacacaatccattatatatcgctagtttcagatgt

SEQ ID NO: 57688 - protein, 220 aa, Glycine max
  peptide (1)..(220): Ceres Seq. ID no. 14305672
  misc_feature (104)..(215): Pfam Name: RbcX protein Pfam Description: RbcX protein
  misc_feature (104)..(203): Homolog of NCBI NO: 2463304 NR Description: rbcX [Nostoc flagelliforme]
  misc_feature (99)..(219): Homolog of NCBI NO: 15282295 NR Description: RbcX protein [Anabaena solitaria]
  misc_feature (104)..(203): Homolog of NCBI NO: 541323 NR Description: hypothetical 15.2K protein - Anabaena sp
  misc_feature (104)..(203): Homolog of NCBI NO: 2463298 NR Description: rbcX [Nostoc commune]
  misc_feature (104)..(203): Homolog of NCBI NO: 2126547 NR Description: rbcX protein - Anabaena sp
  misc_feature (104)..(215): Homolog of NCBI NO: 2463319 NR Description: rbcX [Nostoc sp.]
  misc_feature (104)..(174): Homolog of NCBI NO: 23040626 NR Description: hypothetical protein [Trichodesmium erythraeum
  misc_feature (73)..(216): Homolog of NCBI NO: 33146778 NR Description: unknown protein [Oryza sativa (japonica
  misc_feature (81)..(220): Homolog of NCBI NO: 30103018 NR Description: unknown protein [Oryza sativa (japonica
  misc_feature (1)..(216): Homolog of NCBI NO: 18420050 NR Description: expressed protein [Arabidopsis thaliana]
MVGALSVVGSSVMDSHTGPCLCVDALPTTSVNLKSGGDVLCKNLMGRKHNLVKHGGGTMKLSSSFVDPGREWRLFVNKSCKRQRKDRRVTIVNELGGQYEDTFEDVKAQMLNYFTYKAVRTVLHQLYEMNPPKYTWFYNFVASNKPADGKRFIRSLGKEQQELAERVMVTRLHLYGKWVKKCNHAEIYQEISDENLELMRERLMETVIWPSDDTNTEKIG

SEQ ID NO: 57689 - protein, 208 aa, Glycine max
  peptide (1)..(208): Ceres Seq. ID no. 14305673
  misc_feature (92)..(203): Pfam Name: RbcX protein Pfam Description: RbcX protein
  misc_feature (92)..(191): Homolog of NCBI NO: 2463304 NR Description: rbcX [Nostoc flagelliforme]
  misc_feature (87)..(207): Homolog of NCBI NO: 15282295 NR Description: RbcX protein [Anabaena solitaria]
  misc_feature (92)..(191): Homolog of NCBI NO: 541323 NR Description: hypothetical 15.2K protein - Anabaena sp
  misc_feature (92)..(191): Homolog of NCBI NO: 2463298 NR Description: rbcX [Nostoc commune]
  misc_feature (92)..(191): Homolog of NCBI NO: 2126547 NR Description: rbcX protein - Anabaena sp
  misc_feature (92)..(203): Homolog of NCBI NO: 2463319 NR Description: rbcX [Nostoc sp.]
  misc_feature (92)..(162): Homolog of NCBI NO: 23040626 NR Description: hypothetical protein [Trichodesmium erythraeum
  misc_feature (61)..(204): Homolog of NCBI NO: 33146778 NR Description: unknown protein [Oryza sativa (japonica
  misc_feature (69)..(208): Homolog of NCBI NO: 30103018 NR Description: unknown protein [Oryza sativa (japonica
  misc_feature (1)..(204): Homolog of NCBI NO: 18420050 NR Description: expressed protein [Arabidopsis thaliana]
MDSHTGPCLCVDALPTTSVNLKSGGDVLCKNLMGRKHNLVKHGGGTMKLSSSFVDPGREWRLFVNKSCKRQRKDRRVTIVNELGGQYEDTFEDVKAQMLNYFTYKAVRTVLHQLYEMNPPKYTWFYNFVASNKPADGKRFIRSLGKEQQELAERVMVTRLHLYGKWVKKCNHAEIYQEISDENLELMRERLMETVIWPSDDTNTEKIG

SEQ ID NO: 57690 - protein, 176 aa, Glycine max
  peptide (1)..(176): Ceres Seq. ID no. 14305674
  misc_feature (60)..(171): Pfam Name: RbcX protein Pfam Description: RbcX protein
  misc_feature (60)..(159): Homolog of NCBI NO: 2463304 NR Description: rbcX [Nostoc flagelliforme]
  misc_feature (55)..(175): Homolog of NCBI NO: 15282295 NR Description: RbcX protein [Anabaena solitaria]
  misc_feature (60)..(159): Homolog of NCBI NO: 541323 NR Description: hypothetical 15.2K protein - Anabaena sp
  misc_feature (60)..(159): Homolog of NCBI NO: 2463298 NR Description: rbcX [Nostoc commune]
  misc_feature (60)..(159): Homolog of NCBI NO: 2126547 NR Description: rbcX protein - Anabaena sp
  misc_feature (60)..(171): Homolog of NCBI NO: 2463319 NR Description: rbcX [Nostoc sp.]
  misc_feature (60)..(130): Homolog of NCBI NO: 23040626 NR Description: hypothetical protein [Trichodesmium erythraeum
  misc_feature (29)..(172): Homolog of NCBI NO: 33146778 NR Description: unknown protein [Oryza sativa (japonica
  misc_feature (37)..(176): Homolog of NCBI NO: 30103018 NR Description: unknown protein [Oryza sativa (japonica
  misc_feature (1)..(172): Homolog of NCBI NO: 18420050 NR Description: expressed protein [Arabidopsis thaliana]
MGRKHNLVKHGGGTMKLSSSFVDPGREWRLFVNKSCKRQRKDRRVTIVNELGGQYEDTFEDVKAQMLNYFTYKAVRTVLHQLYEMNPPKYTWFYNFVASNKPADGKRFIRSLGKEQQELAERVMVTRLHLYGKWVKKCNHAEIYQEISDENLELMRERLMETVIWPSDDTNTEKIG

SEQ ID NO: 57691 - DNA, 1377 bp, Glycine max
  misc_feature (1)..(1377): Ceres Seq. ID no. 14314400
aggaatgtgtcactactgaactgtgcaatatgagtgcttgcaaaaccctttcatgtttctccctctcttcttcctcttccttcttcaaacccacccttctccaccctcgccaacgtctaaccctaactcggagatgttccacgtcagccctactcgaagaaccggaaccccaatctccgagcgttcagcacctcctcacgagtcccgacggcgtctccacgctgatgaagatggaccgcaagcctcttctccctcacgagccgcacgttcgctggttcccttacctcgacgcctaccgctgccgaaacggctgcgttttgagcagcgccgaggtcgtccaggccctcgcgccctgcatctccgacgaccggaggcagaggttcgggagcgtggttcggaaccggagctactcggtctgcctcgtcgtggaagggctctgcgacttcggcaacgtctccgccacgttccggtccgcggacgcgcttggcgtccagtccgtccacgtcgtgtcgtgtgacgccaacaaaaggtataaagataatcgccatgtgagcatgggtgcagagaaatggttggacattgaactgtgggactctacaaaggagtgctttaaaatgttgaaatcacgcggttatcgaattgcgacaactcatgtgggaatggatgcggtttctattcatgacttagattggtcctgcccaactgcaatcgtggttgggaatgaaaataggggtattagtgatgaggcattggagctgtcagatttgcattgcagtattcctatggcaggaatggtggactctttcaatgtttcagttgctgcgggaatcctcatgcaccactctgtttgtgatagaatatctcgtatgggccgtcatggtgatctaacagtggaagaatgccagattctacttgcagagttttctctgcgccatagcaagagttcgattagtattgttgaagattatgcaatgcgtaaagcagcgacattgacctaacagcaataacaggaagtcaaacttcttctgactgtgcttggctgcttgcctgtacttggcaaggagacaaaccagagactagattgtctctgattgattgaatgattcctacaaactagcattagcttatgcatgctgtgcaaggctcacagatgacaatggggaccttaccaacacccagcttcttggactatagaatatttccttaatgatgtgcttactagccccactttacttagcaatgggggaatgatgctgtcaaaagtgcaattgcaattttatttatgtggatttttcgggccttacagtatctaatggtttttatttggatgagaaaagaaaatagaaaagggaaattttttacctcctatttttaagc

SEQ ID NO: 57692 - protein, 331 aa, Glycine max
  peptide (1)..(331): Ceres Seq. ID no. 14314401
  misc_feature (137)..(279): Pfam Name: SpoU rRNA Methylase family Pfam Description: SpoU rRNA Methylase family
  misc_feature (123)..(285): Homolog of NCBI NO: 33866213 NR Description: putative tRNA (guanosine-2'-O-)-methyltransferase
  misc_feature (122)..(281): Homolog of NCBI NO: 28896932 NR Description: tRNA methyltransferase [Vibrio parahaemolyticus
  misc_feature (115)..(278): Homolog of NCBI NO: 21673707 NR Description: tRNA methyltransferase SpoU [Chlorobium tepidum
  misc_feature (119)..(306): Homolog of NCBI NO: 32562924 NR Description: tRNA (guanosine-2'-O-)-methyltransferase
  misc_feature (119)..(308): Homolog of NCBI NO: 15606763 NR Description: rRNA methylase SpoU [Aquifex aeolicus]
  misc_feature (119)..(302): Homolog of NCBI NO: 20808975 NR Description: rRNA methylase [Thermoanaerobacter tengcongensis]
  misc_feature (119)..(281): Homolog of NCBI NO: 27364301 NR Description: rRNA methylases [Vibrio vulnificus CMCP6]
  misc_feature (92)..(329): Homolog of NCBI NO: 28207743 NR Description: CR004 protein [Chlamydomonas reinhardtii]
  misc_feature (71)..(327): Homolog of NCBI NO: 34393586 NR Description: putative rRNA methylase [Oryza sativa (japonica
  misc_feature (19)..(326): Homolog of NCBI NO: 15242287 NR Description: rRNA methylase - like protein [Arabidopsis
ECVTTELCNMSACKTLSCFSLSSSSSFFKPTLLHPRQRLTLTRRCSTSALLEEPEPQSPSVQHLLTSPDGVSTLMKMDRKPLLPHEPHVRWFPYLDAYRCRNGCVLSSAEVVQALAPCISDDRRQRFGSVVRNRSYSVCLVVEGLCDFGNVSATFRSADALGVQSVHVVSCDANKRYKDNRHVSMGAEKWLDIELWDSTKECFKMLKSRGYRIATTHVGMDAVSIHDLDWSCPTAIVVGNENRGISDEALELSDLHCSIPMAGMVDSFNVSVAAGILMHHSVCDRISRMGRHGDLTVEECQILLAEFSLRHSKSSISIVEDYAMRKAATLT

SEQ ID NO: 57693 - protein, 322 aa, Glycine max
  peptide (1)..(322): Ceres Seq. ID no. 14314402
  misc_feature (128)..(270): Pfam Name: SpoU rRNA Methylase family Pfam Description: SpoU rRNA Methylase family
  misc_feature (114)..(276): Homolog of NCBI NO: 33866213 NR Description: putative tRNA (guanosine-2'-O-)-methyltransferase
  misc_feature (113)..(272): Homolog of NCBI NO: 28896932 NR Description: tRNA methyltransferase [Vibrio parahaemolyticus
  misc_feature (106)..(269): Homolog of NCBI NO: 21673707 NR Description: tRNA methyltransferase SpoU [Chlorobium tepidum
  misc_feature (110)..(297): Homolog of NCBI NO: 32562924 NR Description: tRNA (guanosine-2'-O-)-methyltransferase
  misc_feature (110)..(299): Homolog of NCBI NO: 15606763 NR Description: rRNA methylase SpoU [Aquifex aeolicus]
  misc_feature (110)..(293): Homolog of NCBI NO: 20808975 NR Description: rRNA methylase [Thermoanaerobacter tengcongensis]
  misc_feature (110)..(272): Homolog of NCBI NO: 27364301 NR Description: rRNA methylases [Vibrio vulnificus CMCP6]
  misc_feature (83)..(320): Homolog of NCBI NO: 28207743 NR Description: CR004 protein [Chlamydomonas reinhardtii]
  misc_feature (62)..(318): Homolog of NCBI NO: 34393586 NR Description: putative rRNA methylase [Oryza sativa (japonica
  misc_feature (10)..(317): Homolog of NCBI NO: 15242287 NR Description: rRNA methylase - like protein [Arabidopsis
MSACKTLSCFSLSSSSSFFKPTLLHPRQRLTLTRRCSTSALLEEPEPQSPSVQHLLTSPDGVSTLMKMDRKPLLPHEPHVRWFPYLDAYRCRNGCVLSSAEVVQALAPCISDDRRQRFGSVVRNRSYSVCLVVEGLCDFGNVSATFRSADALGVQSVHVVSCDANKRYKDNRHVSMGAEKWLDIELWDSTKECFKMLKSRGYRIATTHVGMDAVSIHDLDWSCPTAIVVGNENRGISDEALELSDLHCSIPMAGMVDSFNVSVAAGILMHHSVCDRISRMGRHGDLTVEECQILLAEFSLRHSKSSISIVEDYAMRKAATLT

SEQ ID NO: 57694 - protein, 257 aa, Glycine max
  peptide (1)..(257): Ceres Seq. ID no. 14314403
  misc_feature (63)..(205): Pfam Name: SpoU rRNA Methylase family Pfam Description: SpoU rRNA Methylase family
  misc_feature (49)..(211): Homolog of NCBI NO: 33866213 NR Description: putative tRNA (guanosine-2'-O-)-methyltransferase
  misc_feature (48)..(207): Homolog of NCBI NO: 28896932 NR Description: tRNA methyltransferase [Vibrio parahaemolyticus
  misc_feature (41)..(204): Homolog of NCBI NO: 21673707 NR Description: tRNA methyltransferase SpoU [Chlorobium tepidum
  misc_feature (45)..(232): Homolog of NCBI NO: 32562924 NR Description: tRNA (guanosine-2'-O-)-methyltransferase
  misc_feature (45)..(234): Homolog of NCBI NO: 15606763 NR Description: rRNA methylase SpoU [Aquifex aeolicus]
  misc_feature (45)..(228): Homolog of NCBI NO: 20808975 NR Description: rRNA methylase [Thermoanaerobacter tengcongensis]
  misc_feature (45)..(207): Homolog of NCBI NO: 27364301 NR Description: rRNA methylases [Vibrio vulnificus CMCP6]
  misc_feature (18)..(255): Homolog of NCBI NO: 28207743 NR Description: CR004 protein [Chlamydomonas reinhardtii]
  misc_feature (1)..(253): Homolog of NCBI NO: 34393586 NR Description: putative rRNA methylase [Oryza sativa (japonica
  misc_feature (1)..(252): Homolog of NCBI NO: 15242287 NR Description: rRNA methylase - like protein [Arabidopsis
MKMDRKPLLPHEPHVRWFPYLDAYRCRNGCVLSSAEVVQALAPCISDDRRQRFGSVVRNRSYSVCLVVEGLCDFGNVSATFRSADALGVQSVHVVSCDANKRYKDNRHVSMGAEKWLDIELWDSTKECFKMLKSRGYRIATTHVGMDAVSIHDLDWSCPTAIVVGNENRGISDEALELSDLHCSIPMAGMVDSFNVSVAAGILMHHSVCDRISRMGRHGDLTVEECQILLAEFSLRHSKSSISIVEDYAMRKAATLT

SEQ ID NO: 57695 - DNA, 1092 bp, Glycine max
  misc_feature (1)..(1092): Ceres Seq. ID no. 13581686
attcttctgattttgtttaatcatgaacggtgctcccaagcacgaacgccgctgggcgtccgacaccgtgccggagatggcattcgtcagcgccgggacttcgccgggaactgagtacaactccgtcaccgacgagtacgttgaggtcactctcgatgttcacgacgatcacaccatcgttctccgcgacgttgagccggtgactgtcgttaacatcgacgacggcgtcgcaacaagtggaaacgaaactccgacgtcctccgcgtggtcgccgtcgatcaggaggagctctcctaaccggtggcggcagttctcgcaggagctgaaggccgaggcggttgcgaaggcgaggcagttttcgcaggagctcaaggcggagctgcggtggttctcgtggagccaaggcggatctgaaacggcgttggtggctcgagatctcaggaagcagcgcgctcagcttgaccgcaaccgctccggtacgaagaaagcgctccgtggactgaaatttattagcagtaaatccaatggcgctgacgcctggaacgaggtgcaaagcaatttctatagtcttgccaaggacggttatctttatcgcactgattttgcgcaatgcatagggatgaaggactctaaggagttcgctctggaactatttgacgcgctgagtcgtagacgtagactgaaggttgaaaagatcagcagagacgagcttaacgaattctggtcgcaaattaccgatcaaagctttgattcgcggcttcagatattctttgacatggtggacaagaatgaagatggtaggatcaccgaagaagaagtgaaagagatcattatgctaagcgcttcagcaaataaattatccagattgaaagagcaggccgaggaatacgcagctctgatcatggaagagttagaccctgaaagacttggctacatcgaggtgggagttctctacaaatgataacatatgaatttatcaagaatacatgcatatattttaattctctaacacatatgagtacgtcacaaaagaaaatctttgtaagtgatagacattaatgttaatccaatccatgattaatttggtttccg

SEQ ID NO: 57696 - protein, 312 aa, Glycine max
  peptide (1)..(312): Ceres Seq. ID no. 13581687
  misc_feature (245)..(273): Pfam Name: EF hand Pfam Description: EF hand
  misc_feature (40)..(307): Homolog of NCBI NO: 18389310 NR Description: respiratory burst oxidase protein F [Solanum
  misc_feature (57)..(307): Homolog of NCBI NO: 17384016 NR Description: NADPH oxidase [Nicotiana tabacum]
  misc_feature (82)..(307): Homolog of NCBI NO: 28268678 NR Description: respiratory burst oxidase homolog [Nicotiana
  misc_feature (42)..(307): Homolog of NCBI NO: 16549087 NR Description: respiratory burst oxidase homolog [Solanum
  misc_feature (40)..(307): Homolog of NCBI NO: 18407959 NR Description: respiratory burst oxidase protein F (NADPH
  misc_feature (40)..(307): Homolog of NCBI NO: 25354658 NR Description: protein F22C12.18 [imported] - Arabidopsis
  misc_feature (40)..(307): Homolog of NCBI NO: 3242456 NR Description: Atrboh F [Arabidopsis thaliana]
  misc_feature (199)..(307): Homolog of NCBI NO: 4585142 NR Description: NADPH oxidase; gp91; phox homolog [Lycopersicon
  misc_feature (1)..(133): Homolog of NCBI NO: 4585142 NR Description: NADPH oxidase; gp91; phox homolog [Lycopersicon
  misc_feature (3)..(312): Homolog of NCBI NO: 34910200 NR Description: cytochrome b245 beta chain homolog rbohA
MNGAPKHERRWASDTVPEMAFVSAGTSPGTEYNSVTDEYVEVTLDVHDDHTIVLRDVEPVTVVNIDDGVATSGNETPTSSAWSPSIRRSSPNRWRQFSQELKAEAVAKARQFSQELKAELRWFSWSQGGSETALVARDLRKQRAQLDRNRSGTKKALRGLKFISSKSNGADAWNEVQSNFYSLAKDGYLYRTDFAQCIGMKDSKEFALELFDALSRRRRLKVEKISRDELNEFWSQITDQSFDSRLQIFFDMVDKNEDGRITEEEVKEIIMLSASANKLSRLKEQAEEYAALIMEELDPERLGYIEVGVLYK

SEQ ID NO: 57697 - protein, 294 aa, Glycine max
  peptide (1)..(294): Ceres Seq. ID no. 13581688
  misc_feature (227)..(255): Pfam Name: EF hand Pfam Description: EF hand
  misc_feature (22)..(289): Homolog of NCBI NO: 18389310 NR Description: respiratory burst oxidase protein F [Solanum
  misc_feature (39)..(289): Homolog of NCBI NO: 17384016 NR Description: NADPH oxidase [Nicotiana tabacum]
  misc_feature (64)..(289): Homolog of NCBI NO: 28268678 NR Description: respiratory burst oxidase homolog [Nicotiana
  misc_feature (24)..(289): Homolog of NCBI NO: 16549087 NR Description: respiratory burst oxidase homolog [Solanum
  misc_feature (22)..(289): Homolog of NCBI NO: 18407959 NR Description: respiratory burst oxidase protein F (NADPH
  misc_feature (22)..(289): Homolog of NCBI NO: 25354658 NR Description: protein F22C12.18 [imported] - Arabidopsis
  misc_feature (22)..(289): Homolog of NCBI NO: 3242456 NR Description: Atrboh F [Arabidopsis thaliana]
  misc_feature (181)..(289): Homolog of NCBI NO: 4585142 NR Description: NADPH oxidase; gp91; phox homolog [Lycopersicon
  misc_feature (1)..(115): Homolog of NCBI NO: 4585142 NR Description: NADPH oxidase; gp91; phox homolog [Lycopersicon
  misc_feature (1)..(294): Homolog of NCBI NO: 34910200 NR Description: cytochrome b245 beta chain homolog rbohA
MAFVSAGTSPGTEYNSVTDEYVEVTLDVHDDHTIVLRDVEPVTVVNIDDGVATSGNETPTSSAWSPSIRRSSPNRWRQFSQELKAEAVAKARQFSQELKAELRWFSWSQGGSETALVARDLRKQRAQLDRNRSGTKKALRGLKFISSKSNGADAWNEVQSNFYSLAKDGYLYRTDFAQCIGMKDSKEFALELFDALSRRRRLKVEKISRDELNEFWSQITDQSFDSRLQIFFDMVDKNEDGRITEEEVKEIIMLSASANKLSRLKEQAEEYAALIMEELDPERLGYIEVGVLYK

SEQ ID NO: 57698 - DNA, 1628 bp, Glycine max
  misc_feature (1)..(1628): Ceres Seq. ID no. 14315196
tccattttgtttggaacactgcgtaaggctgcgccaccacctccgcctccgtcgtccacggccagttgcttgcgttcctttcactttttttataattggctaagaataataatggcgtaccggcgctgcctcttgataagagggagcctcgtggatcggaggtgccatctgtctttcagttatgttctccacagcaacgaggggaagcgcgaacgcaccaatgaaaaatcatcttcaggaggggttggtgattttactcaaacaaggtcctttggaagctctcttaatggacagatgcggttcttctcgccttcccgagatagatttctttctccatgcaccggatatggtttctgccaatatatgtcgacggtgaatcggggttcagataagattggcagtgatgtaatgactgatgtggctgatgtcctcgctgacacgaccatggattctgtagcttctcaggctcctgttgttaatgaggttgctattgctgctgctgattcttttttgcctgtacaggccttgcagtacgtgatagatgctgtgcatttctacactggcttaaattggtgggcagccatagttctaacaaccctgttgattcgaaccgctacagttccactcttaataaatcaacttaaggccacttctaaacttacgttaatgaggcctcacttagaagagataaagcaagaaatggagggactgactatggatcctgtagctgttgctaaaggtcagcagcagatgaagaagctatttaaggaatatggtgtgagtccttttacgccattgaaaggactctttattcaaggccctatttttgttagtttttttcttgcgataacaaatatggctgaaaaagtgccgtcattcaagcatggtggagcttcttggtttattgatctctcaactcctgatgccctgtacgtttttccagttttgacagcattgtcattcttaataacagtagagtgtaatatgcaagaagggatggaaggaaatcctgtggctggtaccatgaaaaatgtctctaggggtcttgctgttcttacagttcctttcaccatgggatttccaaaggcaatattctgttactgggttacatcaaatttgttttcacttgtgtatggacttgtgcttaaagttcctggcgtaaagaaaactttgggtattcctgaaatacctgttgctccacccaccacgaccagtgctactcaatctcccttttctatatttcctgctctaaaacaagctacatctgcaacaacaaatgggtcaagctcaataccagatgaagcttcaaaacattcaaataaaaagatatcttctgcttctgttattagtcaaaggcttagaagtttagagaaacaagtgaaaggaagaaagaagaacaagaagtgaggaaaatttacaataatcctaaattataacatctatacatggagcaattgtgctcagcattttgttatattttattatcctgggatgagggagaaattagttcgaactttgtatgtttagtctacactcgattcatcggtttctcaattcttgtgtaaaacttggtccctatcagaaagggcggcctcaataattttatataacttttcatccttcatttt

SEQ ID NO: 57699 - protein, 468 aa, Glycine max
  peptide (1)..(468): Ceres Seq. ID no. 14315197
  misc_feature (191)..(387): Pfam Name: 60Kd inner membrane protein Pfam Description: 60Kd inner membrane protein
  misc_feature (138)..(395): Homolog of NCBI NO: 38372882 NR Description: Inner membrane protein OXA1L, mitochondrial (Oxidase assembly 1-like protein) (OXA1-like protein) (OXA1Hs)
  misc_feature (138)..(395): Homolog of NCBI NO: 37589026 NR Description: Oxidase (cytochrome c) assembly 1-like [Homo
  misc_feature (138)..(395): Homolog of NCBI NO: 28193182 NR Description: unnamed protein product [Homo sapiens]
  misc_feature (138)..(395): Homolog of NCBI NO: 4826880 NR Description: oxidase (cytochrome c) assembly 1-like [Homo
  misc_feature (163)..(409): Homolog of NCBI NO: 19112969 NR Description: oxa1sp2 protein [Schizosaccharomyces pombe]
  misc_feature (163)..(409): Homolog of NCBI NO: 11359300 NR Description: respiratory protein oxa1-2 - fission yeast
  misc_feature (127)..(468): Homolog of NCBI NO: 37536158 NR Description: putative Oxa1 protein [Oryza sativa (japonica
  misc_feature (127)..(468): Homolog of NCBI NO: 22122905 NR Description: putative cytochrome oxidase assembly protein
  misc_feature (47)..(467): Homolog of NCBI NO: 15225991 NR Description: OXA1 protein (OXA1p), putative [Arabidopsis
  misc_feature (38)..(466): Homolog of NCBI NO: 15241690 NR Description: OXA1 protein (OXA1p) [Arabidopsis thaliana]
SILFGTLRKAAPPPPPPSSTASCLRSFHFFYNWLRIIMAYRRCLLIRGSLVDRRCHLSFSYVLHSNEGKRERTNEKSSSGGVGDFTQTRSFGSSLNGQMRFFSPSRDRFLSPCTGYGFCQYMSTVNRGSDKIGSDVMTDVADVLADTTMDSVASQAPVVNEVAIAAADSFLPVQALQYVIDAVHFYTGLNWWAAIVLTTLLIRTATVPLLINQLKATSKLTLMRPHLEEIKQEMEGLTMDPVAVAKGQQQMKKLFKEYGVSPFTPLKGLFIQGPIFVSFFLAITNMAEKVPSFKHGGASWFIDLSTPDALYVFPVLTALSFLITVECNMQEGMEGNPVAGTMKNVSRGLAVLTVPFTMGFPKAIFCYWVTSNLFSLVYGLVLKVPGVKKTLGIPEIPVAPPTTTSATQSPFSIFPALKQATSATTNGSSSIPDEASKHSNKKISSASVISQRLRSLEKQVKGRKKNKK

SEQ ID NO: 57700 - protein, 431 aa, Glycine max
  peptide (1)..(431): Ceres Seq. ID no. 14315198
  misc_feature (154)..(350): Pfam Name: 60Kd inner membrane protein Pfam Description: 60Kd inner membrane protein
  misc_feature (101)..(358): Homolog of NCBI NO: 38372882 NR Description: Inner membrane protein OXA1L, mitochondrial (Oxidase assembly 1-like protein) (OXA1-like protein) (OXA1Hs)
  misc_feature (101)..(358): Homolog of NCBI NO: 37589026 NR Description: Oxidase (cytochrome c) assembly 1-like [Homo
  misc_feature (101)..(358): Homolog of NCBI NO: 28193182 NR Description: unnamed protein product [Homo sapiens]
  misc_feature (101)..(358): Homolog of NCBI NO: 4826880 NR Description: oxidase (cytochrome c) assembly 1-like [Homo
  misc_feature (126)..(372): Homolog of NCBI NO: 19112969 NR Description: oxa1sp2 protein [Schizosaccharomyces pombe]
  misc_feature (126)..(372): Homolog of NCBI NO: 11359300 NR Description: respiratory protein oxa1-2 - fission yeast
  misc_feature (90)..(431): Homolog of NCBI NO: 37536158 NR Description: putative Oxa1 protein [Oryza sativa (japonica
  misc_feature (90)..(431): Homolog of NCBI NO: 22122905 NR Description: putative cytochrome oxidase assembly protein
  misc_feature (10)..(430): Homolog of NCBI NO: 15225991 NR Description: OXA1 protein (OXA1p), putative [Arabidopsis
  misc_feature (1)..(429): Homolog of NCBI NO: 15241690 NR Description: OXA1 protein (OXA1p) [Arabidopsis thaliana]
MAYRRCLLIRGSLVDRRCHLSFSYVLHSNEGKRERTNEKSSSGGVGDFTQTRSFGSSLNGQMRFFSPSRDRFLSPCTGYGFCQYMSTVNRGSDKIGSDVMTDVADVLADTTMDSVASQAPVVNEVAIAAADSFLPVQALQYVIDAVHFYTGLNWWAAIVLTTLLIRTATVPLLINQLKATSKLTLMRPHLEEIKQEMEGLTMDPVAVAKGQQQMKKLFKEYGVSPFTPLKGLFIQGPIFVSFFLAITNMAEKVPSFKHGGASWFIDLSTPDALYVFPVLTALSFLITVECNMQEGMEGNPVAGTMKNVSRGLAVLTVPFTMGFPKAIFCYWVTSNLFSLVYGLVLKVPGVKKTLGIPEIPVAPPTTTSATQSPFSIFPALKQATSATTNGSSSIPDEASKHSNKKISSASVISQRLRSLEKQVKGRKKNKK

SEQ ID NO: 57701 - protein, 370 aa, Glycine max
  peptide (1)..(370): Ceres Seq. ID no. 14315199
  misc_feature (93)..(289): Pfam Name: 60Kd inner membrane protein Pfam Description: 60Kd inner membrane protein
  misc_feature (40)..(297): Homolog of NCBI NO: 38372882 NR Description: Inner membrane protein OXA1L, mitochondrial (Oxidase assembly 1-like protein) (OXA1-like protein) (OXA1Hs)
  misc_feature (40)..(297): Homolog of NCBI NO: 37589026 NR Description: Oxidase (cytochrome c) assembly 1-like [Homo
  misc_feature (40)..(297): Homolog of NCBI NO: 28193182 NR Description: unnamed protein product [Homo sapiens]
  misc_feature (40)..(297): Homolog of NCBI NO: 4826880 NR Description: oxidase (cytochrome c) assembly 1-like [Homo
  misc_feature (65)..(311): Homolog of NCBI NO: 19112969 NR Description: oxa1sp2 protein [Schizosaccharomyces pombe]
  misc_feature (65)..(311): Homolog of NCBI NO: 11359300 NR Description: respiratory protein oxa1-2 - fission yeast
  misc_feature (29)..(370): Homolog of NCBI NO: 37536158 NR Description: putative Oxa1 protein [Oryza sativa (japonica
  misc_feature (29)..(370): Homolog of NCBI NO: 22122905 NR Description: putative cytochrome oxidase assembly protein
  misc_feature (1)..(369): Homolog of NCBI NO: 15225991 NR Description: OXA1 protein (OXA1p), putative [Arabidopsis
  misc_feature (1)..(368): Homolog of NCBI NO: 15241690 NR Description: OXA1 protein (OXA1p) [Arabidopsis thaliana]
MRFFSPSRDRFLSPCTGYGFCQYMSTVNRGSDKIGSDVMTDVADVLADTTMDSVASQAPVVNEVAIAAADSFLPVQALQYVIDAVHFYTGLNWWAAIVLTTLLIRTATVPLLINQLKATSKLTLMRPHLEEIKQEMEGLTMDPVAVAKGQQQMKKLFKEYGVSPFTPLKGLFIQGPIFVSFFLAITNMAEKVPSFKHGGASWFIDLSTPDALYVFPVLTALSFLITVECNMQEGMEGNPVAGTMKNVSRGLAVLTVPFTMGFPKAIFCYWVTSNLFSLVYGLVLKVPGVKKTLGIPEIPVAPPTTTSATQSPFSIFPALKQATSATTNGSSSIPDEASKHSNKKISSASVISQRLRSLEKQVKGRKKNKK

SEQ ID NO: 57702 - DNA, 1129 bp, Glycine max
  misc_feature (1)..(1129): Ceres Seq. ID no. 14315189
atcaaatcctcaatacttgtttatcactatcacttccccttcctatctctgaagccattctcgttcattttgtttttttatcttctctttatctccctcaacaagattcctataaagttcgtagcggctttcacacaactttaagaaaatctcgtgaatccgtgatcgcaaacaaaacaatgtctcccccttctatgttaggcaaccgcaaagacggttctgaaatggactctttgaggggctaaaagcacatagaactgaagatgggcatgtacttttatttcgaccagatgagaatgctcaacgcatgaaacgaggtgcagatagattgtgtatgccatccccatctcctggccaatttgttaatgctgtaaagcagatagttattgccaacaaacgttgggtgcctccaccagggaaagggtcactatatattaggccattgctgataggaacaggagcattgttaggggtggcacctgcccctgagtatacatttcttatttattgttctccagttggcagctaccagaagggtgcactaaatttaaaggttgaggataaactatatagagcaatatctggctgtggtggaactggagggatcaaaagtgtcaccaattatgcccctgtttatactgcaatggctgatgcaaaggccaacggattctctgatgtgctgttcttagactcagcaactggaaaacatatagaggaggcctcagcatgcaatgtatttgttttgaaggacaatgctatctccactcctgcaatagatggaaccatcctacctggtatcacccgaaaatccatcattgacattgccattgatttgggttatcaggtcatggaacgttccgtatcagtggaggagatgctaggtgctgatgaaatgttctgcactggaactgcagttgttgtcaactctgttgcatctgtaacttataaggaaacaagggtggattacaaaacaggcccagcaacattgtcctcaaaactacggaaaacacttgttggaattcaaacagggtgtcttgaggacaaaaaatcatggacagtccgagtagattcaacaatatagcaccgtttccgtcacaaataaaaagagaaaaatattgcaccgtttgtc

SEQ ID NO: 57703 - protein, 257 aa, Glycine max
  peptide (1)..(257): Ceres Seq. ID no. 14315190
  misc_feature (1)..(235): Pfam Name: Aminotransferase class IV Pfam Description: Aminotransferase class IV
  misc_feature (1)..(253): Homolog of NCBI NO: 18408919 NR Description: branched-chain-amino-acid transaminase -related
  misc_feature (1)..(253): Homolog of NCBI NO: 6319167 NR Description: branched-chain amino acid aminotransferase
  misc_feature (1)..(254): Homolog of NCBI NO: 15230923 NR Description: branched-chain amino acid aminotransferase
  misc_feature (1)..(256): Homolog of NCBI NO: 14280354 NR Description: branched-chain amino acid aminotransferase
  misc_feature (1)..(254): Homolog of NCBI NO: 15218409 NR Description: tat-binding protein -related [Arabidopsis
  misc_feature (1)..(254): Homolog of NCBI NO: 7450517 NR Description: branched-chain amino acid aminotransferase
  misc_feature (1)..(254): Homolog of NCBI NO: 27311239 NR Description: Unknown protein [Oryza sativa (japonica
  misc_feature (1)..(254): Homolog of NCBI NO: 21617893 NR Description: branched-chain amino acid aminotransferase,
  misc_feature (1)..(254): Homolog of NCBI NO: 15222882 NR Description: branched-chain amino acid aminotransferase
  misc_feature (1)..(257): Homolog of NCBI NO: 15222881 NR Description: branched-chain amino acid aminotransferase
MKRGADRLCMPSPSPGQFVNAVKQIVIANKRWVPPPGKGSLYIRPLLIGTGALLGVAPAPEYTFLIYCSPVGSYQKGALNLKVEDKLYRAISGCGGTGGIKSVTNYAPVYTAMADAKANGFSDVLFLDSATGKHIEEASACNVFVLKDNAISTPAIDGTILPGITRKSIIDIAIDLGYQVMERSVSVEEMLGADEMFCTGTAVVVNSVASVTYKETRVDYKTGPATLSSKLRKTLVGIQTGCLEDKKSWTVRVDSTI

SEQ ID NO: 57704 - protein, 248 aa, Glycine max
  peptide (1)..(248): Ceres Seq. ID no. 14315191
  misc_feature (1)..(226): Pfam Name: Aminotransferase class IV Pfam Description: Aminotransferase class IV
  misc_feature (1)..(244): Homolog of NCBI NO: 18408919 NR Description: branched-chain-amino-acid transaminase -related
  misc_feature (1)..(244): Homolog of NCBI NO: 6319167 NR Description: branched-chain amino acid aminotransferase
  misc_feature (1)..(245): Homolog of NCBI NO: 15230923 NR Description: branched-chain amino acid aminotransferase
  misc_feature (1)..(247): Homolog of NCBI NO: 14280354 NR Description: branched-chain amino acid aminotransferase
  misc_feature (1)..(245): Homolog of NCBI NO: 15218409 NR Description: tat-binding protein -related [Arabidopsis
  misc_feature (1)..(245): Homolog of NCBI NO: 7450517 NR Description: branched-chain amino acid aminotransferase
  misc_feature (1)..(245): Homolog of NCBI NO: 27311239 NR Description: Unknown protein [Oryza sativa (japonica
  misc_feature (1)..(245): Homolog of NCBI NO: 21617893 NR Description: branched-chain amino acid aminotransferase,
  misc_feature (1)..(245): Homolog of NCBI NO: 15222882 NR Description: branched-chain amino acid aminotransferase
  misc_feature (1)..(248): Homolog of NCBI NO: 15222881 NR Description: branched-chain amino acid aminotransferase
MPSPSPGQFVNAVKQIVIANKRWVPPPGKGSLYIRPLLIGTGALLGVAPAPEYTFLIYCSPVGSYQKGALNLKVEDKLYRAISGCGGTGGIKSVTNYAPVYTAMADAKANGFSDVLFLDSATGKHIEEASACNVFVLKDNAISTPAIDGTILPGITRKSIIDIAIDLGYQVMERSVSVEEMLGADEMFCTGTAVVVNSVASVTYKETRVDYKTGPATLSSKLRKTLVGIQTGCLEDKKSWTVRVDSTI

SEQ ID NO: 57705 - protein, 145 aa, Glycine max
  peptide (1)..(145): Ceres Seq. ID no. 14315192
  misc_feature (1)..(123): Pfam Name: Aminotransferase class IV Pfam Description: Aminotransferase class IV
  misc_feature (1)..(141): Homolog of NCBI NO: 18408919 NR Description: branched-chain-amino-acid transaminase -related
  misc_feature (1)..(141): Homolog of NCBI NO: 6319167 NR Description: branched-chain amino acid aminotransferase
  misc_feature (1)..(142): Homolog of NCBI NO: 15230923 NR Description: branched-chain amino acid aminotransferase
  misc_feature (1)..(144): Homolog of NCBI NO: 14280354 NR Description: branched-chain amino acid aminotransferase
  misc_feature (1)..(142): Homolog of NCBI NO: 15218409 NR Description: tat-binding protein -related [Arabidopsis
  misc_feature (1)..(142): Homolog of NCBI NO: 7450517 NR Description: branched-chain amino acid aminotransferase
  misc_feature (1)..(142): Homolog of NCBI NO: 27311239 NR Description: Unknown protein [Oryza sativa (japonica
  misc_feature (1)..(142): Homolog of NCBI NO: 21617893 NR Description: branched-chain amino acid aminotransferase,
  misc_feature (1)..(142): Homolog of NCBI NO: 15222882 NR Description: branched-chain amino acid aminotransferase
  misc_feature (1)..(145): Homolog of NCBI NO: 15222881 NR Description: branched-chain amino acid aminotransferase
MADAKANGFSDVLFLDSATGKHIEEASACNVFVLKDNAISTPAIDGTILPGITRKSIIDIAIDLGYQVMERSVSVEEMLGADEMFCTGTAVVVNSVASVTYKETRVDYKTGPATLSSKLRKTLVGIQTGCLEDKKSWTVRVDSTI

SEQ ID NO: 57706 - DNA, 1294 bp, Glycine max
  misc_feature (1)..(1294): Ceres Seq. ID no. 13594308
attcaaccaaataaccactccccccttcgtagtagtgggtgcacccatccacgcaccacaaaattaataacccaaaaaatacaaaaacaactttgcaatttcgtaggagatgctcaggagcagcacgctaacacagagtgttacagtcacctgtgttcgtcacagtcacagacaatggttccaatcaattcccgtaaattatagattctttgacgctgctcggaactctctatcatcacccaactccgcgatcttcaaatggaaaagaaaggccaattataaccgtcatagttctggaatggggaccttcaccactcgcgcgttggcgcagccgcttcagaacgccgacgaactcatcgactccgtcgagacatttatcttcgattgtgacggagttatatggaaaggtgataaattaatagacggagtgcctgaaacgcttgacatgcttcggtcaaagggcaaaagattagtttttgtcaccaataactcaacaaagtctaggaagcaatatggaaagaagtttgaaacacttggcctgaatgtcagcgaggaggagattttcgcatcattctttgcagctgctgcatatctgaagtccattgatttcccaaaagataaaaaggtttatgtcatcggagaagatggcatcttgaaggagcttgagcttgctggataccagtaccttggtgggccggaagatggtgggaaaaaaatagaactgaagccaggatttttgatggagcatgatgaagatgttggagcagttgttgttgggtttgatcgctacttcaactactataaaatccagtatgggacactctgtatacgtgaaaaccctggatgtcttttcattgctacaaaccgagatgctgttactcatctcacagatgctcaagaatgggcaggtgggggctcaatggttggcgctctcagtggatctactcaacgtgagccattagttgttggaaaaccctcaacgtttatgatggattacttggcaaacaaatttggcatttcgaagtcacagatatgtatggttggggacagattagacactgatatcttgtttggacaaaatggtggttgcaaaactcttcttgtgctctcaggggtcaccacactggccatgcttcagagccctaacaactccatacagccagacttttataccaataaaatttcagattttctttccctgaaagctgcagctgtatgactataatatttatacattatccccacacgatggtgggaaaagccatgtatttaagaagtaagttgaattttatcc

SEQ ID NO: 57707 - protein, 369 aa, Glycine max
  peptide (1)..(369): Ceres Seq. ID no. 13594309
  misc_feature (86)..(335): Pfam Name: haloacid dehalogenase-like hydrolase Pfam Description: haloacid dehalogenase-like hydrolase
  misc_feature (70)..(369): Homolog of NCBI NO: 15982558 NR Description: phosphoglycolate phosphatase precursor
  misc_feature (78)..(364): Homolog of NCBI NO: 15238800 NR Description: phosphoglycolate phosphatase, putative
  misc_feature (78)..(364): Homolog of NCBI NO: 21593203 NR Description: 4-nitrophenylphosphatase-like protein
  misc_feature (78)..(369): Homolog of NCBI NO: 10177912 NR Description: 4-nitrophenylphosphatase-like protein
  misc_feature (53)..(339): Homolog of NCBI NO: 8953699 NR Description: 4-nitrophenylphosphatase-like [Arabidopsis
  misc_feature (68)..(196): Homolog of NCBI NO: 8885622 NR Description: N-glyceraldehyde-2-phosphotransferase-like
  misc_feature (192)..(369): Homolog of NCBI NO: 8885622 NR Description: N-glyceraldehyde-2-phosphotransferase-like
  misc_feature (68)..(369): Homolog of NCBI NO: 26450878 NR Description: putative p-nitrophenylphosphatase [Arabidopsis
  misc_feature (73)..(369): Homolog of NCBI NO: 38345235 NR Description: OSJNBa0084K20.14 [Oryza sativa (japonica
  misc_feature (53)..(369): Homolog of NCBI NO: 15239406 NR Description: phosphoglycolate phosphatase, putative
MLRSSTLTQSVTVTCVRHSHRQWFQSIPVNYRFFDAARNSLSSPNSAIFKWKRKANYNRHSSGMGTFTTRALAQPLQNADELIDSVETFIFDCDGVIWKGDKLIDGVPETLDMLRSKGKRLVFVTNNSTKSRKQYGKKFETLGLNVSEEEIFASFFAAAAYLKSIDFPKDKKVYVIGEDGILKELELAGYQYLGGPEDGGKKIELKPGFLMEHDEDVGAVVVGFDRYFNYYKIQYGTLCIRENPGCLFIATNRDAVTHLTDAQEWAGGGSMVGALSGSTQREPLVVGKPSTFMMDYLANKFGISKSQICMVGDRLDTDILFGQNGGCKTLLVLSGVTTLAMLQSPNNSIQPDFYTNKISDFLSLKAAAV

SEQ ID NO: 57708 - protein, 306 aa, Glycine max
  peptide (1)..(306): Ceres Seq. ID no. 13594310
  misc_feature (23)..(272): Pfam Name: haloacid dehalogenase-like hydrolase Pfam Description: haloacid dehalogenase-like hydrolase
  misc_feature (7)..(306): Homolog of NCBI NO: 15982558 NR Description: phosphoglycolate phosphatase precursor
  misc_feature (15)..(301): Homolog of NCBI NO: 15238800 NR Description: phosphoglycolate phosphatase, putative
  misc_feature (15)..(301): Homolog of NCBI NO: 21593203 NR Description: 4-nitrophenylphosphatase-like protein
  misc_feature (15)..(306): Homolog of NCBI NO: 10177912 NR Description: 4-nitrophenylphosphatase-like protein
  misc_feature (1)..(276): Homolog of NCBI NO: 8953699 NR Description: 4-nitrophenylphosphatase-like [Arabidopsis
  misc_feature (5)..(133): Homolog of NCBI NO: 8885622 NR Description: N-glyceraldehyde-2-phosphotransferase-like
  misc_feature (129)..(306): Homolog of NCBI NO: 8885622 NR Description: N-glyceraldehyde-2-phosphotransferase-like
  misc_feature (5)..(306): Homolog of NCBI NO: 26450878 NR Description: putative p-nitrophenylphosphatase [Arabidopsis
  misc_feature (10)..(306): Homolog of NCBI NO: 38345235 NR Description: OSJNBa0084K20.14 [Oryza sativa (japonica
  misc_feature (1)..(306): Homolog of NCBI NO: 15239406 NR Description: phosphoglycolate phosphatase, putative
MGTFTTRALAQPLQNADELIDSVETFIFDCDGVIWKGDKLIDGVPETLDMLRSKGKRLVFVTNNSTKSRKQYGKKFETLGLNVSEEEIFASFFAAAAYLKSIDFPKDKKVYVIGEDGILKELELAGYQYLGGPEDGGKKIELKPGFLMEHDEDVGAVVVGFDRYFNYYKIQYGTLCIRENPGCLFIATNRDAVTHLTDAQEWAGGGSMVGALSGSTQREPLVVGKPSTFMMDYLANKFGISKSQICMVGDRLDTDILFGQNGGCKTLLVLSGVTTLAMLQSPNNSIQPDFYTNKISDFLSLKAAAV

SEQ ID NO: 57709 - protein, 257 aa, Glycine max
  peptide (1)..(257): Ceres Seq. ID no. 13594311
  misc_feature (1)..(223): Pfam Name: haloacid dehalogenase-like hydrolase Pfam Description: haloacid dehalogenase-like hydrolase
  misc_feature (1)..(257): Homolog of NCBI NO: 15982558 NR Description: phosphoglycolate phosphatase precursor
  misc_feature (1)..(252): Homolog of NCBI NO: 15238800 NR Description: phosphoglycolate phosphatase, putative
  misc_feature (1)..(252): Homolog of NCBI NO: 21593203 NR Description: 4-nitrophenylphosphatase-like protein
  misc_feature (1)..(257): Homolog of NCBI NO: 10177912 NR Description: 4-nitrophenylphosphatase-like protein
  misc_feature (1)..(227): Homolog of NCBI NO: 8953699 NR Description: 4-nitrophenylphosphatase-like [Arabidopsis
  misc_feature (1)..(84): Homolog of NCBI NO: 8885622 NR Description: N-glyceraldehyde-2-phosphotransferase-like
  misc_feature (80)..(257): Homolog of NCBI NO: 8885622 NR Description: N-glyceraldehyde-2-phosphotransferase-like
  misc_feature (1)..(257): Homolog of NCBI NO: 26450878 NR Description: putative p-nitrophenylphosphatase [Arabidopsis
  misc_feature (1)..(257): Homolog of NCBI NO: 38345235 NR Description: OSJNBa0084K20.14 [Oryza sativa (japonica
  misc_feature (1)..(257): Homolog of NCBI NO: 15239406 NR Description: phosphoglycolate phosphatase, putative
MLRSKGKRLVFVTNNSTKSRKQYGKKFETLGLNVSEEEIFASFFAAAAYLKSIDFPKDKKVYVIGEDGILKELELAGYQYLGGPEDGGKKIELKPGFLMEHDEDVGAVVVGFDRYFNYYKIQYGTLCIRENPGCLFIATNRDAVTHLTDAQEWAGGGSMVGALSGSTQREPLVVGKPSTFMMDYLANKFGISKSQICMVGDRLDTDILFGQNGGCKTLLVLSGVTTLAMLQSPNNSIQPDFYTNKISDFLSLKAAAV

SEQ ID NO: 57710 - DNA, 1120 bp, Glycine max
  misc_feature (1)..(1120): Ceres Seq. ID no. 14305353
aaaaaaaaaaatatatgctctcaataaacacacacgcaccggcagcacccgccgccggtggaacccattaacaaacaccacaagaaacttatcattcccttgttcttctccttcctcctcatcttctcttacccattttccatctaataaaaattcgaatacccaattggaaaaagcaatcaactttgcaaacactcggtggaaaaaacgcattccacctccaatcttcattcgcattgagctctgtttcttttccacatgaaacggcgatgaagtagctgtcgtttttcgattcagaacgccgccgcagaatgctgtgcaggaagagctccaaaaacgacgtcggctcgggatcggtgccggtgcacctcaacgtctacgatttgacacccatcaacggttacgcttattggttcggcctcggagtgtatcattccggcgtgcaagttcacggcgttgagttcgcgttcggggctcacgagtactcgttgacggggatattcgaaggagaaccgaagaggtgcgaaggtttcgcgttcaggaaaacgattctgatcggaaaaaccgatatgagacccggtgaggttaaggcggtgatggaagaacttgctgctaagtacagaggtaatgcttacaatctcatcacaaagaattgcaaccatttctgtaacgatgcttgtcttagactcaccggaaatcctattccaagttgggtcaatcgtcttgctcgaattggatttatgtgcaattgtgttcttccggtgacattgaactcaacaaaagttaggcatcacaagatggaagaaaagcaatgtgaaggagagaaacaagcattagcgactaaggcaaagaaacttagtgcttcaaattcatcatcatcttcccctgagggactgcgcaggggaaggagtagaaaccgacgtgcccttcctccatcttcacctttgattattggatcttcttcatcttgatgcccaaactcttaatttttatttatttttttatctttaatatggccaattacagaagttgctctaaggaagaaaggcaacagattggattttcaatttaaaattgttttttttcattcttttcatccaatgaccatataaagttatgg

SEQ ID NO: 57711 - protein, 219 aa, Glycine max
  peptide (1)..(219): Ceres Seq. ID no. 14305354
  misc_feature (16)..(139): Pfam Name: Eukaryotic protein of unknown function (DUF862) Pfam Description: Eukaryotic protein of unknown function (DUF862)
  misc_feature (2)..(177): Homolog of NCBI NO: 15238059 NR Description: expressed protein [Arabidopsis thaliana]
  misc_feature (5)..(184): Homolog of NCBI NO: 9802596 NR Description: T2E6.19 [Arabidopsis thaliana]
  misc_feature (5)..(184): Homolog of NCBI NO: 21593644 NR Description: unknown [Arabidopsis thaliana]
  misc_feature (5)..(184): Homolog of NCBI NO: 18401869 NR Description: expressed protein [Arabidopsis thaliana]
  misc_feature (1)..(219): Homolog of NCBI NO: 17529024 NR Description: unknown protein [Arabidopsis thaliana]
  misc_feature (1)..(219): Homolog of NCBI NO: 15236618 NR Description: expressed protein [Arabidopsis thaliana]
  misc_feature (1)..(219): Homolog of NCBI NO: 18400749 NR Description: expressed protein [Arabidopsis thaliana]
  misc_feature (1)..(209): Homolog of NCBI NO: 18420889 NR Description: expressed protein [Arabidopsis thaliana]
  misc_feature (1)..(218): Homolog of NCBI NO: 25354458 NR Description: hypothetical protein F23A5.4 [imported] -
  misc_feature (1)..(218): Homolog of NCBI NO: 18412886 NR Description: expressed protein [Arabidopsis thaliana]
MLCRKSSKNDVGSGSVPVHLNVYDLTPINGYAYWFGLGVYHSGVQVHGVEFAFGAHEYSLTGIFEGEPKRCEGFAFRKTILIGKTDMRPGEVKAVMEELAAKYRGNAYNLITKNCNHFCNDACLRLTGNPIPSWVNRLARIGFMCNCVLPVTLNSTKVRHHKMEEKQCEGEKQALATKAKKLSASNSSSSSPEGLRRGRSRNRRALPPSSPLIIGSSSS

SEQ ID NO: 57712 - protein, 133 aa, Glycine max
  peptide (1)..(133): Ceres Seq. ID no. 14305355
  misc_feature (1)..(53): Pfam Name: Eukaryotic protein of unknown function (DUF862) Pfam Description: Eukaryotic protein of unknown function (DUF862)
  misc_feature (1)..(91): Homolog of NCBI NO: 15238059 NR Description: expressed protein [Arabidopsis thaliana]
  misc_feature (1)..(98): Homolog of NCBI NO: 9802596 NR Description: T2E6.19 [Arabidopsis thaliana]
  misc_feature (1)..(98): Homolog of NCBI NO: 21593644 NR Description: unknown [Arabidopsis thaliana]
  misc_feature (1)..(98): Homolog of NCBI NO: 18401869 NR Description: expressed protein [Arabidopsis thaliana]
  misc_feature (1)..(133): Homolog of NCBI NO: 17529024 NR Description: unknown protein [Arabidopsis thaliana]
  misc_feature (1)..(133): Homolog of NCBI NO: 15236618 NR Description: expressed protein [Arabidopsis thaliana]
  misc_feature (1)..(133): Homolog of NCBI NO: 18400749 NR Description: expressed protein [Arabidopsis thaliana]
  misc_feature (1)..(123): Homolog of NCBI NO: 18420889 NR Description: expressed protein [Arabidopsis thaliana]
  misc_feature (1)..(132): Homolog of NCBI NO: 25354458 NR Description: hypothetical protein F23A5.4 [imported] -
  misc_feature (1)..(132): Homolog of NCBI NO: 18412886 NR Description: expressed protein [Arabidopsis thaliana]
MRPGEVKAVMEELAAKYRGNAYNLITKNCNHFCNDACLRLTGNPIPSWVNRLARIGFMCNCVLPVTLNSTKVRHHKMEEKQCEGEKQALATKAKKLSASNSSSSSPEGLRRGRSRNRRALPPSSPLIIGSSSS

SEQ ID NO: 57713 - protein, 124 aa, Glycine max
  peptide (1)..(124): Ceres Seq. ID no. 14305356
  misc_feature (1)..(82): Homolog of NCBI NO: 15238059 NR Description: expressed protein [Arabidopsis thaliana]
  misc_feature (1)..(89): Homolog of NCBI NO: 9802596 NR Description: T2E6.19 [Arabidopsis thaliana]
  misc_feature (1)..(89): Homolog of NCBI NO: 21593644 NR Description: unknown [Arabidopsis thaliana]
  misc_feature (1)..(89): Homolog of NCBI NO: 18401869 NR Description: expressed protein [Arabidopsis thaliana]
  misc_feature (1)..(124): Homolog of NCBI NO: 17529024 NR Description: unknown protein [Arabidopsis thaliana]
  misc_feature (1)..(124): Homolog of NCBI NO: 15236618 NR Description: expressed protein [Arabidopsis thaliana]
  misc_feature (1)..(124): Homolog of NCBI NO: 18400749 NR Description: expressed protein [Arabidopsis thaliana]
  misc_feature (1)..(114): Homolog of NCBI NO: 18420889 NR Description: expressed protein [Arabidopsis thaliana]
  misc_feature (1)..(123): Homolog of NCBI NO: 25354458 NR Description: hypothetical protein F23A5.4 [imported] -
  misc_feature (1)..(123): Homolog of NCBI NO: 18412886 NR Description: expressed protein [Arabidopsis thaliana]
MEELAAKYRGNAYNLITKNCNHFCNDACLRLTGNPIPSWVNRLARIGFMCNCVLPVTLNSTKVRHHKMEEKQCEGEKQALATKAKKLSASNSSSSSPEGLRRGRSRNRRALPPSSPLIIGSSSS

SEQ ID NO: 57714 - DNA, 1406 bp, Glycine max
  misc_feature (1)..(1406): Ceres Seq. ID no. 14315889
ctctctctcaattgcattcccccttcccatttctgagaaggtgggagagaaaccccagagaaattcaatccacccctttctctgggtctgatcccatatctctctccagatttgctcgcccttttacttcaatttctcaaaaccggcacgcattcttttgtcttctaatttctggtggctgaatatcaaaaaccctagagagcactgttttggggctacgtttctgtttcggacggagaacgagaaaaggcgagggttttgcgcccgacccatttcgactggaaggccctagattcaaagggatcgtttgatttcattggataatcccccgacacgaaagggggtagttgcggagaaaccccctctgaaaactggaagccctaattgagagattcaaatcgttcttctaaatcgatggattcagcgttttcgcccttgagtttggttattttcggtatttcaattagcttttacgcatttattgtccaatcgcagacgcaaaatgggaacaatggcgctgaattagcaccaccggcgtattgggtgtcaagtccaccgctgcctccgcctcctccgccacctcctccgccgttgtcactgtctcctccgccgccaccctcaaaatctatgacactcagtttcgttcccccgccgggagcgccgccgccctatcctaacaatatgcccaacgtgagaagacctcctcaccgccgccgccgccaccgcagaccgcctccgccgccgccaccaccaccaccgcacaagatgaatgccggtaaaaaggttggacttttgtttgtgggcattgcggcaatcatgcaagttggcgtggttgggttcttggtaatcaagagaagacaacttttgaagagcgatgacagatacgagagttgttcttgaacgagattttccacggttttcttatcaaattctttttttattttaatttaatgggttgaaattctttgctgaacgaggtttggttcgaggaaggggaatattggttggattttgcagaatctggtgggaggaacatgaaaaaggcaagcatggaaagacatggagaatttgaggaatcattggaacatgaattgtgcaattgatgccatcatttcggcccctttggcgttactgtgtatattggtactgctagttcacgtttccttcacgtttcaagttgtgttgcccctttttcccttagttccattacattggctggcttataatggaaaagaaaaagtagccctcatgtacctttttatttattatttttttttttaatttgatttttctctaacatgttccgtgtacaatgatgttaggaatccttaaaggattaacaatgacacaatcttatattctttggcttttcacctcgaattgatgatgtcaggttcaatgttctc

SEQ ID NO: 57715 - protein, 161 aa, Glycine max
  peptide (1)..(161): Ceres Seq. ID no. 14315890
  misc_feature (39)..(115): Pfam Name: Extensin-like region Pfam Description: Extensin-like region
  misc_feature (38)..(153): Homolog of NCBI NO: 28950342 NR Description: probable Cytokinesis protein sepA [Neurospora
  misc_feature (21)..(115): Homolog of NCBI NO: 7442094 NR Description: extensin CYC15 precursor - Madagascar periwinkle
  misc_feature (39)..(115): Homolog of NCBI NO: 6523547 NR Description: hydroxyproline-rich glycoprotein DZ-HRGP
  misc_feature (39)..(115): Homolog of NCBI NO: 15235668 NR Description: leucine-rich repeat extensin family [Arabidopsis
  misc_feature (37)..(115): Homolog of NCBI NO: 11068076 NR Description: PxORF73 peptide [Plutella xylostella
  misc_feature (39)..(117): Homolog of NCBI NO: 7442094 NR Description: extensin CYC15 precursor - Madagascar periwinkle
  misc_feature (40)..(117): Homolog of NCBI NO: 7442094 NR Description: extensin CYC15 precursor - Madagascar periwinkle
  misc_feature (46)..(157): Homolog of NCBI NO: 15218534 NR Description: proline-rich protein family [Arabidopsis
  misc_feature (47)..(157): Homolog of NCBI NO: 30682911 NR Description: proline-rich protein family [Arabidopsis thaliana]
  misc_feature (1)..(155): Homolog of NCBI NO: 22330241 NR Description: proline-rich protein family [Arabidopsis thaliana]
MDSAFSPLSLVIFGISISFYAFIVQSQTQNGNNGAELAPPAYWVSSPPLPPPPPPPPPPLSLSPPPPPSKSMTLSFVPPPGAPPPYPNNMPNVRRPPHRRRRHRRPPPPPPPPPPHKMNAGKKVGLLFVGIAAIMQVGVVGFLVIKRRQLLKSDDRYESCS

SEQ ID NO: 57716 - protein, 90 aa, Glycine max
  peptide (1)..(90): Ceres Seq. ID no. 14315891
  misc_feature (1)..(51): Pfam Name: Formin Homology 2 Domain Pfam Description: Formin Homology 2 Domain
  misc_feature (1)..(82): Homolog of NCBI NO: 28950342 NR Description: probable Cytokinesis protein sepA [Neurospora
  misc_feature (1)..(44): Homolog of NCBI NO: 7442094 NR Description: extensin CYC15 precursor - Madagascar periwinkle
  misc_feature (1)..(44): Homolog of NCBI NO: 6523547 NR Description: hydroxyproline-rich glycoprotein DZ-HRGP
  misc_feature (1)..(44): Homolog of NCBI NO: 15235668 NR Description: leucine-rich repeat extensin family [Arabidopsis
  misc_feature (1)..(44): Homolog of NCBI NO: 11068076 NR Description: PxORF73 peptide [Plutella xylostella
  misc_feature (1)..(46): Homolog of NCBI NO: 7442094 NR Description: extensin CYC15 precursor - Madagascar periwinkle
  misc_feature (1)..(46): Homolog of NCBI NO: 7442094 NR Description: extensin CYC15 precursor - Madagascar periwinkle
  misc_feature (1)..(86): Homolog of NCBI NO: 15218534 NR Description: proline-rich protein family [Arabidopsis
  misc_feature (1)..(86): Homolog of NCBI NO: 30682911 NR Description: proline-rich protein family [Arabidopsis thaliana]
  misc_feature (1)..(84): Homolog of NCBI NO: 22330241 NR Description: proline-rich protein family [Arabidopsis thaliana]
MTLSFVPPPGAPPPYPNNMPNVRRPPHRRRRHRRPPPPPPPPPPHKMNAGKKVGLLFVGIAAIMQVGVVGFLVIKRRQLLKSDDRYESCS

SEQ ID NO: 57717 - DNA, 1145 bp, Glycine max
  misc_feature (1)..(1145): Ceres Seq. ID no. 14314390
agtggagtggaagtagtagcaagtacgtcgtatatgtggttgatcttttgctggttgtttgttttgttccttccaattgtcagatctgaatcaccggactcactcttcacactcactcacactgaatggcttctgaaggcgaccatcaccaccaccaccaccaccatcaagatcacgatcatcatcatcatgatcatgatcaccatcatcatcacgatggagagggagagaccaactcatgggtaggtaaggatgggaaggtgtaccatagccacgatggtctggcgccgcattctcacgaacccatttactcccccggctacttcaccagaagagctccaccgcttctcaacagaaacttcaacgaaagagccttcaccgtcggaatcggtggacccgtcggtactggcaaaacagctctcatgttggccctttgtgaactcttgcgcgaaaactacagtctcgcagctgtgacaaatgatatattcactaaagaggatggtgagttcttggtgaagcacaaagcacttcctgaggaaaggatacgcgctgtagaaactgggggttgcccacatgctgctattcgggaggacatcagtattaatcttggaccgctggaggagctttctaacctcttcaaagcagatatacttctttgtgaatctgggggagataacctggctgccaatttcagcagggaattggctgactatattatttacataatagacgtgtctggcggtgataaaattcctcggaaaggtggtcctggaatcacgcaagctgatctccttgtgataaacaagactgaccttgctcctgcaattggggctgatttggcagtcatgcagcgggatgctctgcggatgagagatggagggccatttgtctttgcacaggtgaagcataagattggagtagaagaaattgggaatcttgtcttgcaggcatgggaagcagccacagggaataagcgtcattaacatttctttgaaaaacggtttcctttgtgttgtatattttcttagcatgtttagtaataactccagaaacatgatgttcacgacgtggattcgagttcttatgttgtgtctgttcctgcatgttacagtatcaagttcataaacatgttactacttggacat

SEQ ID NO: 57718 - protein, 285 aa, Glycine max
  peptide (1)..(285): Ceres Seq. ID no. 14314391
  misc_feature (73)..(209): Pfam Name: HypB/UreG nucleotide-binding domain Pfam Description: HypB/UreG nucleotide-binding domain
MASEGDHHHHHHHHQDHDHHHHDHDHHHHHDGEGETNSWVGKDGKVYHSHDGLAPHSHEPIYSPGYFTRRAPPLLNRNFNERAFTVGIGGPVGTGKTALMLALCELLRENYSLAAVTNDIFTKEDGEFLVKHKALPEERIRAVETGGCPHAAIREDISINLGPLEELSNLFKADILLCESGGDNLAANFSRELADYIIYIIDVSGGDKIPRKGGPGITQADLLVINKTDLAPAIGADLAVMQRDALRMRDGGPFVFAQVKHKIGVEEIGNLVLQAWEAATGNKRH

SEQ ID NO: 57719 - protein, 186 aa, Glycine max
  peptide (1)..(186): Ceres Seq. ID no. 14314392
  misc_feature (1)..(110): Pfam Name: HypB/UreG nucleotide-binding domain Pfam Description: HypB/UreG nucleotide-binding domain
MLALCELLRENYSLAAVTNDIFTKEDGEFLVKHKALPEERIRAVETGGCPHAAIREDISINLGPLEELSNLFKADILLCESGGDNLAANFSRELADYIIYIIDVSGGDKIPRKGGPGITQADLLVINKTDLAPAIGADLAVMQRDALRMRDGGPFVFAQVKHKIGVEEIGNLVLQAWEAATGNKRH

SEQ ID NO: 57720 - DNA, 1749 bp, Glycine max
  misc_feature (1)..(1749): Ceres Seq. ID no. 14315985
actctggagaatttatgaaccggagtttgtatttttctctgttaattctataatttttttctcaaaattttgtgttaatttcgaagctttctgtgttctctgcaatggtgcagatttgagctcacagcactgcgattttctcggtggccaagctcaaactgctccaatttcatttctgggtttcatcttttcaccattttagacaaaaaaaattgtgtttttaaagtttcctgtaagattataaattttttctgcacccaaatctgtttcctcttaaataaagttagtatttaccccctttaaaaaaattcaatttttttgtgatttttttgggtgattgggtgtggaagagcccgaatcttcaatggatagggtttaagtgaagttttgaggttttggggtatcttagttttttttctttgatttgcataaaaatggagggaagagagaattttggtgttgtggtgggtgatgaggccccagagagcttccatgtggctcctagaattgagaacaacttggacttttcaagggccaccgtgccggcgccggcgccggccacggaggggaagaagaagagagggaggccgaggaagtatgggccggatgggaagccggcgttgggggcggtgacagcgctttcgccgatgccgatttcttcgtcgattccgttgaccggcgagttctctgcttggaagagtggtagagggaggcctgttgaatctatcaagaagtcatcgtttaagtttgaggttgaaagccctggaccagttgagggaatagcatactcagttggtgccaatttcacaccacatgtgctcacagtaaatgctggcgaggatgtcactatgaaaattatgaccttctctcaacaaggatcacgtgctatatgcattctctcagcaactgggacaatttcaaatgttactcttcgtcaaccgtcttcttgtgggggtactttaacgtatgagggactgtttgagattctttccttgtctggttcctttatgccaactgagaatggagttacaagaagtagatctggtgggatgagtgtctctttggctggtccagatggtcgagtaatggggggcggacttgctggtttgttggtagctgctggtccagtgcaggttgtggtggccagttttcttcctggtcaccagttggagcataaaaccaaaaagcaaagggtggagcatgtatcaactattagcccttcacctgttaatcttatcactagtgaggaaataaaagtaagttttggtggagtaaagcctattatgacccctgctgcttttcaagaagagaatattgcttcttttaacaatgttcaagactctaggaactcatctgctgatgacaaagatcctttgcctgaaaaggagtctaacctaagccaatcaaatgctgaggctgcatgctaaacatattccctgtgaattatttgatgttatgcagagtcaacctcatttaggctctcactcatgcttgactgacagctgacaattaacttacaaagacaactctgatggtcagatgagtgtcacacgatggttttgactcaacagttgcactctttggttggtactaggtgttagttggcaaatctgtttgttaggttttccacgtgtcatttctccagatgtatctgtagtattgtttactcattgttgtatcaattagatataggatatatgttgtgccattttctcccttatttatattctatatggatatgtatgttat

SEQ ID NO: 57721 - protein, 330 aa, Glycine max
  peptide (1)..(330): Ceres Seq. ID no. 14315986
  misc_feature (11)..(315): Homolog of NCBI NO: 15236743 NR Description: transcription factor -related [Arabidopsis
  misc_feature (46)..(270): Homolog of NCBI NO: 7485570 NR Description: hypothetical protein F16J13.150 - Arabidopsis
  misc_feature (3)..(285): Homolog of NCBI NO: 15235790 NR Description: DNA binding protein -related [Arabidopsis
  misc_feature (16)..(270): Homolog of NCBI NO: 22328578 NR Description: DNA-binding protein -related [Arabidopsis
  misc_feature (37)..(110): Homolog of NCBI NO: 15241763 NR Description: expressed protein [Arabidopsis thaliana]
  misc_feature (112)..(252): Homolog of NCBI NO: 15241763 NR Description: expressed protein [Arabidopsis thaliana]
  misc_feature (16)..(313): Homolog of NCBI NO: 15235023 NR Description: expressed protein [Arabidopsis thaliana]
  misc_feature (37)..(252): Homolog of NCBI NO: 8809639 NR Description: contains similarity to DNA-binding
  misc_feature (11)..(93): Homolog of NCBI NO: 15242131 NR Description: expressed protein [Arabidopsis thaliana]
  misc_feature (103)..(284): Homolog of NCBI NO: 15242131 NR Description: expressed protein [Arabidopsis thaliana]
MEGRENFGVVVGDEAPESFHVAPRIENNLDFSRATVPAPAPATEGKKKRGRPRKYGPDGKPALGAVTALSPMPISSSIPLTGEFSAWKSGRGRPVESIKKSSFKFEVESPGPVEGIAYSVGANFTPHVLTVNAGEDVTMKIMTFSQQGSRAICILSATGTISNVTLRQPSSCGGTLTYEGLFEILSLSGSFMPTENGVTRSRSGGMSVSLAGPDGRVMGGGLAGLLVAAGPVQVVVASFLPGHQLEHKTKKQRVEHVSTISPSPVNLITSEEIKVSFGGVKPIMTPAAFQEENIASFNNVQDSRNSSADDKDPLPEKESNLSQSNAEAAC

SEQ ID NO: 57722 - protein, 259 aa, Glycine max
  peptide (1)..(259): Ceres Seq. ID no. 14315987
  misc_feature (1)..(244): Homolog of NCBI NO: 15236743 NR Description: transcription factor -related [Arabidopsis
  misc_feature (1)..(199): Homolog of NCBI NO: 7485570 NR Description: hypothetical protein F16J13.150 - Arabidopsis
  misc_feature (1)..(214): Homolog of NCBI NO: 15235790 NR Description: DNA binding protein -related [Arabidopsis
  misc_feature (1)..(199): Homolog of NCBI NO: 22328578 NR Description: DNA-binding protein -related [Arabidopsis
  misc_feature (1)..(39): Homolog of NCBI NO: 15241763 NR Description: expressed protein [Arabidopsis thaliana]
  misc_feature (41)..(181): Homolog of NCBI NO: 15241763 NR Description: expressed protein [Arabidopsis thaliana]
  misc_feature (1)..(242): Homolog of NCBI NO: 15235023 NR Description: expressed protein [Arabidopsis thaliana]
  misc_feature (1)..(181): Homolog of NCBI NO: 8809639 NR Description: contains similarity to DNA-binding
  misc_feature (1)..(22): Homolog of NCBI NO: 15242131 NR Description: expressed protein [Arabidopsis thaliana]
  misc_feature (32)..(213): Homolog of NCBI NO: 15242131 NR Description: expressed protein [Arabidopsis thaliana]
MPISSSIPLTGEFSAWKSGRGRPVESIKKSSFKFEVESPGPVEGIAYSVGANFTPHVLTVNAGEDVTMKIMTFSQQGSRAICILSATGTISNVTLRQPSSCGGTLTYEGLFEILSLSGSFMPTENGVTRSRSGGMSVSLAGPDGRVMGGGLAGLLVAAGPVQVVVASFLPGHQLEHKTKKQRVEHVSTISPSPVNLITSEEIKVSFGGVKPIMTPAAFQEENIASFNNVQDSRNSSADDKDPLPEKESNLSQSNAEAAC

SEQ ID NO: 57723 - protein, 192 aa, Glycine max
  peptide (1)..(192): Ceres Seq. ID no. 14315988
  misc_feature (1)..(124): Homolog of NCBI NO: 2598227 NR Description: AT-hook protein 1 [Arabidopsis thaliana]
  misc_feature (1)..(124): Homolog of NCBI NO: 14326504 NR Description: At2g33620/F4P9.39 [Arabidopsis thaliana]
  misc_feature (1)..(177): Homolog of NCBI NO: 15236743 NR Description: transcription factor -related [Arabidopsis
  misc_feature (1)..(132): Homolog of NCBI NO: 7485570 NR Description: hypothetical protein F16J13.150 - Arabidopsis
  misc_feature (1)..(147): Homolog of NCBI NO: 15235790 NR Description: DNA binding protein -related [Arabidopsis
  misc_feature (1)..(132): Homolog of NCBI NO: 22328578 NR Description: DNA-binding protein -related [Arabidopsis
  misc_feature (1)..(114): Homolog of NCBI NO: 15241763 NR Description: expressed protein [Arabidopsis thaliana]
  misc_feature (1)..(175): Homolog of NCBI NO: 15235023 NR Description: expressed protein [Arabidopsis thaliana]
  misc_feature (1)..(114): Homolog of NCBI NO: 8809639 NR Description: contains similarity to DNA-binding
  misc_feature (1)..(146): Homolog of NCBI NO: 15242131 NR Description: expressed protein [Arabidopsis thaliana]
MKIMTFSQQGSRAICILSATGTISNVTLRQPSSCGGTLTYEGLFEILSLSGSFMPTENGVTRSRSGGMSVSLAGPDGRVMGGGLAGLLVAAGPVQVVVASFLPGHQLEHKTKKQRVEHVSTISPSPVNLITSEEIKVSFGGVKPIMTPAAFQEENIASFNNVQDSRNSSADDKDPLPEKESNLSQSNAEAAC

SEQ ID NO: 57724 - DNA, 1202 bp, Glycine max
  misc_feature (1)..(1202): Ceres Seq. ID no. 13582538
taatcgaaaagtcgaggtctaaactctcaagcaaaatattattttcttgtaaaaaaacaagcatgtgaagaacaaaaaaacaaaaatctaaactagatcctcacatgtctgtttaatatggttgcaagggacagaatcacataggcaagctcgtgtaaccctctcattcctcttatcttgcttcattttcatgtggttaacatccttctcctgctaaaaacaacatatataggttgaaatgtacaccctgtcttatccacattccttggaaaatctcaagtaatgctaacgtggccttatccaaatatttttcaaaccatcttcaactcttcatacataaaatctatgctatgtctcatattagcattcaagaccaagaacacaaaaaccacttaattagtccttctcacatccaaaatcttgtgccagcaaatcaaacatggcatccatgactatgcttcagaccatgattcctaagaatgcaccgaacctccctcctcgtgttggtgcttcttccaacaacactactaagatctcatttggtggctcaggtagggtactgtggaccgggattcagaggaacaggaataataggtcttcttcgattgtagttgctgcagttggagatgtttcatctgatggcactgcgtaccttgttgctggtgccattgctgtggctctagttggaacggccttccccatcttcttctctcgcaaagacacatgccctgaatgtgatggagcagggtttgtgcggaaggctaatgtgacattgagagcaaatgcagcacgaaaggatcaaacccaaatcgtttgtgctcgctgcaatggtttgggcaaacttaaccaaattgacaaatagacaacattatgctccctacattgcccctttctttcttttcttattactatgtaattatttaaggataatatattattgatatcccctcctcgtgtttcttcgtcctatgagatgaacattataatatatcatgataggagagaaaagcacaaatttcacttgttcagaaacctaccattttgattttgcattgcgtatctgatttgtgtttttctctcccgtatcatgataccccgatgttcctaatctgttgtttaattgtgcatatgttgtatgtacttgaagtacacttgacaacaagaaagtccaataaatatgatatatgttcgtcctttcttcc

SEQ ID NO: 57725 - protein, 140 aa, Glycine max
  peptide (1)..(140): Ceres Seq. ID no. 13582539
  misc_feature (15)..(93): Homolog of NCBI NO: 15241706 NR Description: expressed protein [Arabidopsis thaliana]
  misc_feature (38)..(139): Homolog of NCBI NO: 14719330 NR Description: unknown protein [Oryza sativa]
  misc_feature (15)..(140): Homolog of NCBI NO: 11762216 NR Description: AT5g02160 [Arabidopsis thaliana]
MASMTMLQTMIPKNAPNLPPRVGASSNNTTKISFGGSGRVLWTGIQRNRNNRSSSIVVAAVGDVSSDGTAYLVAGAIAVALVGTAFPIFFSRKDTCPECDGAGFVRKANVTLRANAARKDQTQIVCARCNGLGKLNQIDK

SEQ ID NO: 57726 - protein, 137 aa, Glycine max
  peptide (1)..(137): Ceres Seq. ID no. 13582540
  misc_feature (12)..(90): Homolog of NCBI NO: 15241706 NR Description: expressed protein [Arabidopsis thaliana]
  misc_feature (35)..(136): Homolog of NCBI NO: 14719330 NR Description: unknown protein [Oryza sativa]
  misc_feature (12)..(137): Homolog of NCBI NO: 11762216 NR Description: AT5g02160 [Arabidopsis thaliana]
MTMLQTMIPKNAPNLPPRVGASSNNTTKISFGGSGRVLWTGIQRNRNNRSSSIVVAAVGDVSSDGTAYLVAGAIAVALVGTAFPIFFSRKDTCPECDGAGFVRKANVTLRANAARKDQTQIVCARCNGLGKLNQIDK

SEQ ID NO: 57727 - protein, 135 aa, Glycine max
  peptide (1)..(135): Ceres Seq. ID no. 13582541
  misc_feature (10)..(88): Homolog of NCBI NO: 15241706 NR Description: expressed protein [Arabidopsis thaliana]
  misc_feature (33)..(134): Homolog of NCBI NO: 14719330 NR Description: unknown protein [Oryza sativa]
  misc_feature (10)..(135): Homolog of NCBI NO: 11762216 NR Description: AT5g02160 [Arabidopsis thaliana]
MLQTMIPKNAPNLPPRVGASSNNTTKISFGGSGRVLWTGIQRNRNNRSSSIVVAAVGDVSSDGTAYLVAGAIAVALVGTAFPIFFSRKDTCPECDGAGFVRKANVTLRANAARKDQTQIVCARCNGLGKLNQIDK

SEQ ID NO: 57728 - DNA, 632 bp, Glycine max
  misc_feature (1)..(632): Ceres Seq. ID no. 13594276
gctctttgcagtacatgtttagttgtttgctgaagccaaaccaaataattcttcatttgatcactgtgtctttattttgattcaaaggctacaagacttcataactacctactaaatgcttatcttgttcctcatttcctggatcataacccaacctcttcattttgcctcatcaattcctcttcttagagatggcttgtgaaaccaagacatggttggttatggttcttcttttcttggctgctaactacttgcaagattgtgttcatggggtatcccaagttccttgccttttcatctttggggactctttatctgacagtggaaacaacaatgaacttccaacctctgcaaaatctaattacagaccatatgggatcgactttccattaggaccaacaggaagatttaccaatggcagaacagaaattgacataattactcaacttctgggatttgagaaattcatcccaccctttgcaaacactagtggttcagacatacttaaaggtgtgaactatgcatcaggtggagctggaatacgcgttgaaaccagctcgcatttgggtgctactatcagctttggattacagttagcaaatcacagagtcatagtttctcaaattgctagc

SEQ ID NO: 57729 - protein, 147 aa, Glycine max
  peptide (1)..(147): Ceres Seq. ID no. 13594277
  misc_feature (35)..(146): Pfam Name: GDSL-like Lipase/Acylhydrolase Pfam Description: GDSL-like Lipase/Acylhydrolase
  misc_feature (6)..(145): Homolog of NCBI NO: 15220512 NR Description: GDSL-motif lipase/hydrolase protein [Arabidopsis
  misc_feature (30)..(146): Homolog of NCBI NO: 34910808 NR Description: GDSL-motif lipase/hydrolase-like protein
  misc_feature (5)..(145): Homolog of NCBI NO: 21592417 NR Description: lipase/hydrolase, putative [Arabidopsis thaliana]
  misc_feature (5)..(145): Homolog of NCBI NO: 15220514 NR Description: GDSL-motif lipase/hydrolase protein [Arabidopsis
  misc_feature (11)..(146): Homolog of NCBI NO: 7485419 NR Description: hypothetical protein F13C5.140 - Arabidopsis
  misc_feature (10)..(146): Homolog of NCBI NO: 21553940 NR Description: GDSL-motif lipase/hydrolase-like protein
  misc_feature (10)..(146): Homolog of NCBI NO: 15242458 NR Description: GDSL-motif lipase/hydrolase protein [Arabidopsis
  misc_feature (11)..(146): Homolog of NCBI NO: 21618199 NR Description: GDSL-motif lipase/hydrolase-like protein
  misc_feature (11)..(146): Homolog of NCBI NO: 18415211 NR Description: GDSL-motif lipase/hydrolase protein [Arabidopsis
  misc_feature (8)..(144): Homolog of NCBI NO: 15224697 NR Description: GDSL-motif lipase hydrolase protein [Arabidopsis
MACETKTWLVMVLLFLAANYLQDCVHGVSQVPCLFIFGDSLSDSGNNNELPTSAKSNYRPYGIDFPLGPTGRFTNGRTEIDIITQLLGFEKFIPPFANTSGSDILKGVNYASGGAGIRVETSSHLGATISFGLQLANHRVIVSQIAS

SEQ ID NO: 57730 - protein, 137 aa, Glycine max
  peptide (1)..(137): Ceres Seq. ID no. 13594278
  misc_feature (25)..(136): Pfam Name: GDSL-like Lipase/Acylhydrolase Pfam Description: GDSL-like Lipase/Acylhydrolase
  misc_feature (1)..(135): Homolog of NCBI NO: 15220512 NR Description: GDSL-motif lipase/hydrolase protein [Arabidopsis
  misc_feature (20)..(136): Homolog of NCBI NO: 34910808 NR Description: GDSL-motif lipase/hydrolase-like protein
  misc_feature (1)..(135): Homolog of NCBI NO: 21592417 NR Description: lipase/hydrolase, putative [Arabidopsis thaliana]
  misc_feature (1)..(135): Homolog of NCBI NO: 15220514 NR Description: GDSL-motif lipase/hydrolase protein [Arabidopsis
  misc_feature (1)..(136): Homolog of NCBI NO: 7485419 NR Description: hypothetical protein F13C5.140 - Arabidopsis
  misc_feature (1)..(136): Homolog of NCBI NO: 21553940 NR Description: GDSL-motif lipase/hydrolase-like protein
  misc_feature (1)..(136): Homolog of NCBI NO: 15242458 NR Description: GDSL-motif lipase/hydrolase protein [Arabidopsis
  misc_feature (1)..(136): Homolog of NCBI NO: 21618199 NR Description: GDSL-motif lipase/hydrolase-like protein
  misc_feature (1)..(136): Homolog of NCBI NO: 18415211 NR Description: GDSL-motif lipase/hydrolase protein [Arabidopsis
  misc_feature (1)..(134): Homolog of NCBI NO: 15224697 NR Description: GDSL-motif lipase hydrolase protein [Arabidopsis
MVLLFLAANYLQDCVHGVSQVPCLFIFGDSLSDSGNNNELPTSAKSNYRPYGIDFPLGPTGRFTNGRTEIDIITQLLGFEKFIPPFANTSGSDILKGVNYASGGAGIRVETSSHLGATISFGLQLANHRVIVSQIAS

SEQ ID NO: 57731 - DNA, 1275 bp, Glycine max
  misc_feature (1)..(1275): Ceres Seq. ID no. 15177246
agtgaaggcagaagaagaagattcctggattgattgtgaagatggctgagtcggacaacgactcgggaggggcgcagaacgcgggaaacagtggaaacttgagcgagttgtcgcctcgggaacaggaccggtttctccccatagcgaacgtgagcaggatcatgaagaaggccttgccggcgaacgcgaagatctcgaaggacgcgaaggagacggtgcaggaatgcgtgtcggagttcatcagcttcataacgggtgaggcgtcggacaagtgccagagggagaagcgcaagaccatcaacggcgacgatcttctctgggccatgacaaccctgggattcgaagagtacgtggagcctctgaagatttacctccagcgcttccgcgagatggagggagagaagaccgtggccgcccgcgactcttctaaggactcggcctccgcctcctcctatcatcagggacacgtgtacggctcccctgcctaccatcatcaagtgcctgggcccacttatcctgcccctggtagacccagatgacgtgctcctctattcgccactccctagactttttatattatattatttaattaaactctcttctccactcaacctttgcaagatcactgggttggttagtcttgttacttgttactgtttctctctatcatacctatactcactcttcctcctcatctattatttacatccaatgcaaattctcaaatattcctttttcaaaaaaaaaaaaaaaaaaaaaaaaaaaaaaaaaaaatagatagctccttcaattagggtttttgtgatctgcaagctacgatgggtaagggaacggggagtttcggtaagagaaggaacaagacccacaccctctgtgtgaggtgtggccgccgcagtttccacctccagaagagtcgttgcgccgcgtgcgctttccccgctgcgcgcaccaggaaatataactggagcgtgaaggccattaggagaaagaccaccggaactggaaggatgaggtacttgcgtaacgtgccccgtagatttaagagtggcttcagagacggtaccgaagctgcacccaggaagagaggagctgctgcctctacctaagctttgaataatagcaatttttgctgggtcagtgaattatataggatttaatgtttctatgttgatgccgagctctttggaacacgtttctttctgtcgttttaatttcatttaatatgtagtggctttgtatttcgacgtgaggattgcaaggaatttttgttttttc

SEQ ID NO: 57732 - protein, 165 aa, Glycine max
  peptide (1)..(165): Ceres Seq. ID no. 15177247
  misc_feature (30)..(95): Pfam Name: Histone-like transcription factor (CBF/NF-Y) and Pfam Description: Histone-like transcription factor (CBF/NF-Y)
  misc_feature (3)..(142): Homolog of NCBI NO: 15225440 NR Description: CCAAT-box binding trancription factor -related
  misc_feature (4)..(137): Homolog of NCBI NO: 18404885 NR Description: CCAAT-binding transcription factor subunit
  misc_feature (1)..(133): Homolog of NCBI NO: 15231796 NR Description: transcription factor NF-Y, CCAAT-binding - like
  misc_feature (26)..(159): Homolog of NCBI NO: 30409461 NR Description: NF-YB [Oryza sativa (japonica cultivar-group)]
  misc_feature (1)..(156): Homolog of NCBI NO: 17979253 NR Description: At2g37060/T2N18.18 [Arabidopsis thaliana]
  misc_feature (1)..(146): Homolog of NCBI NO: 115840 NR Description: CCAAT-BINDING TRANSCRIPTION FACTOR SUBUNIT A (NF-Y PROTEIN CHAIN B) (NF-YB) (CAAT-BOX DNA BINDING PROTEIN
  misc_feature (1)..(146): Homolog of NCBI NO: 22380 NR Description: CAAT-box DNA binding protein subunit B (NF-YB)
  misc_feature (5)..(126): Homolog of NCBI NO: 2398529 NR Description: Transcription factor [Arabidopsis thaliana]
  misc_feature (1)..(149): Homolog of NCBI NO: 15233475 NR Description: CCAAT-binding transcription factor subunit
  misc_feature (1)..(126): Homolog of NCBI NO: 15238156 NR Description: expressed protein [Arabidopsis thaliana]
MAESDNDSGGAQNAGNSGNLSELSPREQDRFLPIANVSRIMKKALPANAKISKDAKETVQECVSEFISFITGEASDKCQREKRKTINGDDLLWAMTTLGFEEYVEPLKIYLQRFREMEGEKTVAARDSSKDSASASSYHQGHVYGSPAYHHQVPGPTYPAPGRPR

SEQ ID NO: 57733 - protein, 125 aa, Glycine max
  peptide (1)..(125): Ceres Seq. ID no. 15177248
  misc_feature (1)..(55): Pfam Name: Histone-like transcription factor (CBF/NF-Y) and Pfam Description: Histone-like transcription factor (CBF/NF-Y)
  misc_feature (1)..(102): Homolog of NCBI NO: 15225440 NR Description: CCAAT-box binding trancription factor -related
  misc_feature (1)..(97): Homolog of NCBI NO: 18404885 NR Description: CCAAT-binding transcription factor subunit
  misc_feature (1)..(93): Homolog of NCBI NO: 15231796 NR Description: transcription factor NF-Y, CCAAT-binding - like
  misc_feature (1)..(119): Homolog of NCBI NO: 30409461 NR Description: NF-YB [Oryza sativa (japonica cultivar-group)]
  misc_feature (1)..(116): Homolog of NCBI NO: 17979253 NR Description: At2g37060/T2N18.18 [Arabidopsis thaliana]
  misc_feature (1)..(106): Homolog of NCBI NO: 115840 NR Description: CCAAT-BINDING TRANSCRIPTION FACTOR SUBUNIT A (NF-Y PROTEIN CHAIN B) (NF-YB) (CAAT-BOX DNA BINDING PROTEIN
  misc_feature (1)..(106): Homolog of NCBI NO: 22380 NR Description: CAAT-box DNA binding protein subunit B (NF-YB)
  misc_feature (1)..(86): Homolog of NCBI NO: 2398529 NR Description: Transcription factor [Arabidopsis thaliana]
  misc_feature (1)..(109): Homolog of NCBI NO: 15233475 NR Description: CCAAT-binding transcription factor subunit
  misc_feature (1)..(86): Homolog of NCBI NO: 15238156 NR Description: expressed protein [Arabidopsis thaliana]
MKKALPANAKISKDAKETVQECVSEFISFITGEASDKCQREKRKTINGDDLLWAMTTLGFEEYVEPLKIYLQRFREMEGEKTVAARDSSKDSASASSYHQGHVYGSPAYHHQVPGPTYPAPGRPR

SEQ ID NO: 57734 - protein, 95 aa, Glycine max
  peptide (1)..(95): Ceres Seq. ID no. 15177249
  misc_feature (2)..(55): Pfam Name: Ribosomal protein L37e Pfam Description: Ribosomal protein L37e
  misc_feature (1)..(95): Homolog of NCBI NO: 19852052 NR Description: 60S ribosomal protein L37 [Aplysia californica]
  misc_feature (1)..(95): Homolog of NCBI NO: 15218094 NR Description: 60S ribosomal protein L37 (RPL37A) [Arabidopsis
  misc_feature (1)..(94): Homolog of NCBI NO: 18401007 NR Description: 60S ribosomal protein L37 (RPL37C) [Arabidopsis
MGKGTGSFGKRRNKTHTLCVRCGRRSFHLQKSRCAACAFPAARTRKYNWSVKAIRRKTTGTGRMRYLRNVPRRFKSGFRDGTEAAPRKRGAAAST

SEQ ID NO: 57735 - DNA, 884 bp, Glycine max
  misc_feature (1)..(884): Ceres Seq. ID no. 13595752
acctagaacatcctaatcgaaaaattatcattgccgttcattttccttcttatcactactcagacaataaacgcctcagtctctcatttcagggtgcaaaatcttccatgtataaatattactatgtgcttgcattaactgattgatttactccaaaatttaggttctaatgattataaaaggattgtttggaaggtacgaaagatggaaccctgttcatccaactcatggagccttttggggaatgggtgtgggcgttggttgtggtgtcggatggggtcctgggtttggccctgaagtgataggctatgttggagctggttgtggcattggattcaatgtaggcatcacttttgctggtgttggagttggcctacctgctaattttatctttgaaggtccatataatggggttagctggattggaaatttaccttgtatctctgacttgcaaagagaagccaatggaaaattgtttgaatttaggcaaaagcatttatcaataaagggaattaacttctttgacaagaagaacagcttgcctttgctcacttctgccagtaaaagtatacaagcattccgtaaccaaatattcagctctcataaagggaaagattgatgacttccaccactgtcagttttgtgcttacattttttgacacattttgtattttgttgggtcggaggcgaagctcttgttttcacagttaaccagataatctattattgttctgctctatctctccccacatggccacattcaaattcagttgtattttatagtcttgttacatgtgtttcttcagaaaatctcagccaaattttgtaaccaatatattaaaagcatatttatactagtaagaaataagatttcctactgtggg

SEQ ID NO: 57736 - protein, 149 aa, Glycine max
  peptide (1)..(149): Ceres Seq. ID no. 13595753
  misc_feature (1)..(89): Homolog of NCBI NO: 34899622 NR Description: cadmium-induced protein-like
  misc_feature (1)..(82): Homolog of NCBI NO: 15234117 NR Description: cadmium-induced protein [Arabidopsis thaliana]
MIIKGLFGRYERWNPVHPTHGAFWGMGVGVGCGVGWGPGFGPEVIGYVGAGCGIGFNVGITFAGVGVGLPANFIFEGPYNGVSWIGNLPCISDLQREANGKLFEFRQKHLSIKGINFFDKKNSLPLLTSASKSIQAFRNQIFSSHKGKD

SEQ ID NO: 57737 - protein, 124 aa, Glycine max
  peptide (1)..(124): Ceres Seq. ID no. 13595754
  misc_feature (1)..(64): Homolog of NCBI NO: 34899622 NR Description: cadmium-induced protein-like
  misc_feature (1)..(57): Homolog of NCBI NO: 15234117 NR Description: cadmium-induced protein [Arabidopsis thaliana]
MGVGVGCGVGWGPGFGPEVIGYVGAGCGIGFNVGITFAGVGVGLPANFIFEGPYNGVSWIGNLPCISDLQREANGKLFEFRQKHLSIKGINFFDKKNSLPLLTSASKSIQAFRNQIFSSHKGKD

SEQ ID NO: 57738 - DNA, 1401 bp, Glycine max
  misc_feature (1)..(1401): Ceres Seq. ID no. 13638292
atgaccattcaaagaaatgttatctttaccgaactgagctggaaaagactgaacaatattggaaaggctggtatgaaggcctctcagataaatttttgtcatgtcctgtgccaaaactgttgttattagccggaacagatagattggacaggtctctcacaattggtcaaatgcaagggaagtttcaaatggtagttgtaaggcatacagggcatgctattcaggaagatgtacctgatgaatttgcaactctgattgttaacttcatttctcgtaaccgaataggccctcatggaattgagatacctggccttcgcaagccagccttttccaaaccttgaatctggtattagataaaccaagaatgaccaccactgcaagatgaagatgatgaattttttttttttttttttcttaaaaaacttaaaatattattattccttgtttttttttttcctcctcctcctccctactactaccactctccaccaccaccatccccatcaccgccgtctccatattattacaaatcccctccacctccatctccatctccaccacctccttactactatcaaagtcctcctccaccatctcccacttctcatcctccctattactacaaatcccctccaccaccaacgtcatatcctccacctccttaccactacgtgagccctccaccaccttctccatctcctcccccaccataccattacacatcaccacctcctccttccccagctcctgctcccaagtacatttacaaatcacctccacctccggtttatatctatgcttccccacctccacctatctacaagtaagctcaaattgtgaaagcaccattcatgatgaatcatgttctagttttcatcgaggaataaaggcaagctctattttgagccaagtgaaacatctatcttcctgtctaagttctttgaataaaagtctgaatgtgtcatctctatgctacaatgtttatgattcagatcaggttgattctatttgtttgatggccatcttgcacgtcctgatcttattgtgttcaagtgacggacaaatccaaacaggaaagagagatttgaaatgtaaatgccaagtaaatgtgaaaagtacagtccatttttagtgatctctttaatttatttgttcatagattaatatggtcgtgtatgattgcttttctatttattgtggcatttttgtgttgtaccctgttgttgtgtttgcaataattattagtaataaagcagcaaatttcaatttgtgttcatgcatcnnnaaaaaaaaaaaaaaaaaaaaaaaaaaaaaaaaaaaaaaaaaaaaaaaaaaaaaaaaaaaaaaaaaaaaaaaaaaaaaaaagtttatcgatcccgccaacctcaaggggggccccgg

SEQ ID NO: 57739 - protein, 112 aa, Glycine max
  peptide (1)..(112): Ceres Seq. ID no. 15219405
  misc_feature (1)..(87): Pfam Name: alpha/beta hydrolase fold Pfam Description: alpha/beta hydrolase fold
  misc_feature (7)..(93): Homolog of NCBI NO: 19112983 NR Description: putative methyltransferase [Schizosaccharomyces
  misc_feature (7)..(79): Homolog of NCBI NO: 26345806 NR Description: unnamed protein product [Mus musculus]
  misc_feature (7)..(94): Homolog of NCBI NO: 17551890 NR Description: Predicted CDS, alpha beta hydrolase fold
  misc_feature (7)..(93): Homolog of NCBI NO: 28277941 NR Description: Similar to RIKEN cDNA 2700017M01 gene [Danio
  misc_feature (7)..(98): Homolog of NCBI NO: 7022606 NR Description: unnamed protein product [Homo sapiens]
  misc_feature (7)..(98): Homolog of NCBI NO: 7706645 NR Description: protein phosphatase methylesterase-1 [Homo
  misc_feature (7)..(98): Homolog of NCBI NO: 20809834 NR Description: Protein phosphatase methylesterase 1 [Mus
  misc_feature (7)..(98): Homolog of NCBI NO: 6560626 NR Description: PRO0750 [Homo sapiens]
  misc_feature (1)..(106): Homolog of NCBI NO: 32479665 NR Description: P0041A24.6 [Oryza sativa (japonica
  misc_feature (1)..(108): Homolog of NCBI NO: 18413291 NR Description: hydrolase, alpha/beta fold family [Arabidopsis
DHSKKCYLYRTELEKTEQYWKGWYEGLSDKFLSCPVPKLLLLAGTDRLDRSLTIGQMQGKFQMVVVRHTGHAIQEDVPDEFATLIVNFISRNRIGPHGIEIPGLRKPAFSKP

SEQ ID NO: 57740 - protein, 97 aa, Glycine max
  peptide (1)..(97): Ceres Seq. ID no. 15219406
MKMMNFFFFFFLKNLKYYYSLFFFFLLLLPTTTTLHHHHPHHRRLHIITNPLHLHLHLHHLLTTIKVLLHHLPLLILPITTNPLHHQRHILHLLTTT

SEQ ID NO: 57741 - protein, 95 aa, Glycine max
  peptide (1)..(95): Ceres Seq. ID no. 15219407
MMNFFFFFFLKNLKYYYSLFFFFLLLLPTTTTLHHHHPHHRRLHIITNPLHLHLHLHHLLTTIKVLLHHLPLLILPITTNPLHHQRHILHLLTTT

SEQ ID NO: 57742 - protein, 56 aa, Glycine max
  peptide (1)..(56): Ceres Seq. ID no. 15219408
  misc_feature (1)..(37): Homolog of NCBI NO: 19112983 NR Description: putative methyltransferase [Schizosaccharomyces
  misc_feature (1)..(23): Homolog of NCBI NO: 26345806 NR Description: unnamed protein product [Mus musculus]
  misc_feature (1)..(38): Homolog of NCBI NO: 17551890 NR Description: Predicted CDS, alpha beta hydrolase fold
  misc_feature (1)..(37): Homolog of NCBI NO: 28277941 NR Description: Similar to RIKEN cDNA 2700017M01 gene [Danio
  misc_feature (1)..(42): Homolog of NCBI NO: 7022606 NR Description: unnamed protein product [Homo sapiens]
  misc_feature (1)..(42): Homolog of NCBI NO: 20809834 NR Description: Protein phosphatase methylesterase 1 [Mus
  misc_feature (1)..(42): Homolog of NCBI NO: 7706645 NR Description: protein phosphatase methylesterase-1 [Homo
  misc_feature (1)..(42): Homolog of NCBI NO: 6560626 NR Description: PRO0750 [Homo sapiens]
  misc_feature (1)..(50): Homolog of NCBI NO: 32479665 NR Description: P0041A24.6 [Oryza sativa (japonica
  misc_feature (1)..(52): Homolog of NCBI NO: 18413291 NR Description: hydrolase, alpha/beta fold family [Arabidopsis
MQGKFQMVVVRHTGHAIQEDVPDEFATLIVNFISRNRIGPHGIEIPGLRKPAFSKP

SEQ ID NO: 57743 - DNA, 1290 bp, Glycine max
  misc_feature (1)..(1290): Ceres Seq. ID no. 14315193
attctattctctcgtgtctctctctctctctctgaaaccatgcctgtcacaaacacaacaacacctacagtggcagaacacatcaaatggagaaggcccagaaaccaattcaaccaccaccatcatcaccatcaccaccccatttcagaaacagatccaaaccctcaaatcccttccataatccaatccactaggtgcaagtccaccatttcctccctgctcctctccactttctccaacaacacctccaataatgccactgcccacagcaagaaaaaaagcaacttttctgcatcaaccttcagagggttgggctgcactgctggctcgtcgcagcaggtgtcggtgccggcggtgattcgctcctccgccgattggcaagggaagaaaacaagaaaaaagaagcacaagagaagcaacagaagcagcaagaacaagactttccatggtggggttctggaaggttccaatccagggtgtgtggattttcaagatgtttggtgtggccctggaattgggttctcaacagatgctgctgcctctgttgattgtgttgtggccaggaagaatgtctcttctgcaagagggaaaattgatgtggataagatcactcacagggagataatgatgcttcaagggagtctactaatgggtggacaactaaattcacatgatcatttcagagactggagactggatgttgataacatgtcctatgagcaattgctagagcttggtgagagaattggtcatgtgaacactggactcaaggaagatgagatgggacggaacataaggaagactaggattcaattttgggatgatacatcaaagcttcaagtagataaagagtgcagcatttgtcaggaggagtatgaagcgggtgatgagttggggaggctaaattgtgagcacagttatcactttcagtgtataaaacaatgggttgcacaaaaaaatttctgcccagtatgtaagcaacaagttgcggctcgacactgagtgactcaacccttctgtttttttggacagcttccattctcatccataaatttgtgtatagtttttcatatccaatacaagcaagagttttcattctttgctgtcaattatcatttcatctttcaaaattcctgcatcctctgcgaggaatcggcaattatatgttatcgagtaaaggtttatattcgggctgagacctttgcatattatacgcaagagttgccttgcttaagagcagttattattatttttttgttttgggtttttaatgaagttgtgtctgtgacc

SEQ ID NO: 57744 - protein, 333 aa, Glycine max
  peptide (1)..(333): Ceres Seq. ID no. 14315194
  misc_feature (285)..(325): Pfam Name: Zinc finger, C3HC4 type (RING finger) Pfam Description: Zinc finger, C3HC4 type (RING finger)
  misc_feature (201)..(326): Homolog of NCBI NO: 22326712 NR Description: Pspzf zinc finger protein - like [Arabidopsis
  misc_feature (201)..(326): Homolog of NCBI NO: 20466428 NR Description: Pspzf zinc finger protein-like [Arabidopsis
  misc_feature (201)..(326): Homolog of NCBI NO: 10129643 NR Description: Pspzf zinc finger protein-like [Arabidopsis
  misc_feature (210)..(327): Homolog of NCBI NO: 25511721 NR Description: F2H15.19 protein - Arabidopsis thaliana
  misc_feature (289)..(329): Homolog of NCBI NO: 34911396 NR Description: RING zinc finger protein-like
  misc_feature (88)..(302): Homolog of NCBI NO: 34911396 NR Description: RING zinc finger protein-like
  misc_feature (201)..(327): Homolog of NCBI NO: 21554695 NR Description: zinc-finger protein (C-terminal), putative
  misc_feature (201)..(327): Homolog of NCBI NO: 15220912 NR Description: zinc-finger protein (C-terminal) -related
  misc_feature (207)..(326): Homolog of NCBI NO: 15219544 NR Description: RING zinc finger protein -related [Arabidopsis
  misc_feature (41)..(226): Homolog of NCBI NO: 15219544 NR Description: RING zinc finger protein -related [Arabidopsis
ILFSRVSLSLSETMPVTNTTTPTVAEHIKWRRPRNQFNHHHHHHHHPISETDPNPQIPSIIQSTRCKSTISSLLLSTFSNNTSNNATAHSKKKSNFSASTFRGLGCTAGSSQQVSVPAVIRSSADWQGKKTRKKKHKRSNRSSKNKTFHGGVLEGSNPGCVDFQDVWCGPGIGFSTDAAASVDCVVARKNVSSARGKIDVDKITHREIMMLQGSLLMGGQLNSHDHFRDWRLDVDNMSYEQLLELGERIGHVNTGLKEDEMGRNIRKTRIQFWDDTSKLQVDKECSICQEEYEAGDELGRLNCEHSYHFQCIKQWVAQKNFCPVCKQQVAARH

SEQ ID NO: 57745 - protein, 320 aa, Glycine max
  peptide (1)..(320): Ceres Seq. ID no. 14315195
  misc_feature (272)..(312): Pfam Name: Zinc finger, C3HC4 type (RING finger) Pfam Description: Zinc finger, C3HC4 type (RING finger)
  misc_feature (188)..(313): Homolog of NCBI NO: 22326712 NR Description: Pspzf zinc finger protein - like [Arabidopsis
  misc_feature (188)..(313): Homolog of NCBI NO: 20466428 NR Description: Pspzf zinc finger protein-like [Arabidopsis
  misc_feature (188)..(313): Homolog of NCBI NO: 10129643 NR Description: Pspzf zinc finger protein-like [Arabidopsis
  misc_feature (197)..(314): Homolog of NCBI NO: 25511721 NR Description: F2H15.19 protein - Arabidopsis thaliana
  misc_feature (276)..(316): Homolog of NCBI NO: 34911396 NR Description: RING zinc finger protein-like
  misc_feature (75)..(289): Homolog of NCBI NO: 34911396 NR Description: RING zinc finger protein-like
  misc_feature (188)..(314): Homolog of NCBI NO: 21554695 NR Description: zinc-finger protein (C-terminal), putative
  misc_feature (188)..(314): Homolog of NCBI NO: 15220912 NR Description: zinc-finger protein (C-terminal) -related
  misc_feature (194)..(313): Homolog of NCBI NO: 15219544 NR Description: RING zinc finger protein -related [Arabidopsis
  misc_feature (28)..(213): Homolog of NCBI NO: 15219544 NR Description: RING zinc finger protein -related [Arabidopsis
MPVTNTTTPTVAEHIKWRRPRNQFNHHHHHHHHPISETDPNPQIPSIIQSTRCKSTISSLLLSTFSNNTSNNATAHSKKKSNFSASTFRGLGCTAGSSQQVSVPAVIRSSADWQGKKTRKKKHKRSNRSSKNKTFHGGVLEGSNPGCVDFQDVWCGPGIGFSTDAAASVDCVVARKNVSSARGKIDVDKITHREIMMLQGSLLMGGQLNSHDHFRDWRLDVDNMSYEQLLELGERIGHVNTGLKEDEMGRNIRKTRIQFWDDTSKLQVDKECSICQEEYEAGDELGRLNCEHSYHFQCIKQWVAQKNFCPVCKQQVAARH

SEQ ID NO: 57746 - DNA, 1227 bp, Glycine max
  misc_feature (1)..(1227): Ceres Seq. ID no. 14316378
gttctatttttccgctctgctgtacatggcgtcggctgcaggtgaggggaggagccgggtgctggtgataggcggcacgggctacatcggccgcttcatcgtcgccgccagcgcacgcgagggccaccccaccgccgtcctcgtccgcgacgccgcgcccgccgacccagccaaggccgccgtcctccagggattccgggatgccggcgtcaccatcgtcaagggtgatatgtatgatcatgagagcctggtgacagccattaaatcagcagatgttgtgatctcggccgtaggttatcaacagctaccggatcaaactctcattatctcggcaattaaggaagttgggcatgtaaagagattcttcccatcagagtatggtaatgatgtggatcgtaaccatgcagttgaacctgcaaagacagtattcggtgggaaagctcgtataaggcgtgccattgaggctgaggggattccctacacatatgtctcttccaacttctttgctggtcgtttcttgcgaagccttgcgcagattgggatcatggagcctccaactgagaaggttctcattatgggtgatggaaatgtaaaaggaatctttgcggcggaagaagacgtgggaacctacactattaaagctgtagatgatccaaggaccctgaacaaaattctgtatctgagaccacgaagcaacactttgtcccataacgagcttgtctcactctgggagaagaaacttggtaagacacttgagagggtgtacctcccagaggacgaactcctgaataagattcaagagtcgtcagcgccgctgaatgtagcactggcaatcagccactctgtctggttgaagggggaccacactaactttgagatcgacccatcatttggagttgaagcaactgagctttaccccgatgtgcattatattaccgtggatgaatacctaaataggttcctttaaactcctaaatcctatcgtccccaatattcatatactttgaataagtgttggaggttgtgtatttttattagaatggcacgtgaattacgtaatcagagtgtgagacctcaatcatgtgaggaatgcatcttgcattcccttgagcttagaatatataaactgaggttgtataaatttggaaattttagcttgatggaacatgataccgtatgtaacagcccgggggtttatgccaaattagaaattgtttgttatttaac

SEQ ID NO: 57747 - protein, 321 aa, Glycine max
  peptide (1)..(321): Ceres Seq. ID no. 14316379
  misc_feature (17)..(321): Pfam Name: Isoflavone reductase Pfam Description: Isoflavone reductase
  misc_feature (17)..(321): Homolog of NCBI NO: 3243234 NR Description: isoflavone reductase related protein [Pyrus
FYFSALLYMASAAGEGRSRVLVIGGTGYIGRFIVAASAREGHPTAVLVRDAAPADPAKAAVLQGFRDAGVTIVKGDMYDHESLVTAIKSADVVISAVGYQQLPDQTLIISAIKEVGHVKRFFPSEYGNDVDRNHAVEPAKTVFGGKARIRRAIEAEGIPYTYVSSNFFAGRFLRSLAQIGIMEPPTEKVLIMGDGNVKGIFAAEEDVGTYTIKAVDDPRTLNKILYLRPRSNTLSHNELVSLWEKKLGKTLERVYLPEDELLNKIQESSAPLNVALAISHSVWLKGDHTNFEIDPSFGVEATELYPDVHYITVDEYLNRFL

SEQ ID NO: 57748 - protein, 313 aa, Glycine max
  peptide (1)..(313): Ceres Seq. ID no. 14316380
  misc_feature (9)..(313): Pfam Name: Isoflavone reductase Pfam Description: Isoflavone reductase
  misc_feature (9)..(313): Homolog of NCBI NO: 3243234 NR Description: isoflavone reductase related protein [Pyrus
MASAAGEGRSRVLVIGGTGYIGRFIVAASAREGHPTAVLVRDAAPADPAKAAVLQGFRDAGVTIVKGDMYDHESLVTAIKSADVVISAVGYQQLPDQTLIISAIKEVGHVKRFFPSEYGNDVDRNHAVEPAKTVFGGKARIRRAIEAEGIPYTYVSSNFFAGRFLRSLAQIGIMEPPTEKVLIMGDGNVKGIFAAEEDVGTYTIKAVDDPRTLNKILYLRPRSNTLSHNELVSLWEKKLGKTLERVYLPEDELLNKIQESSAPLNVALAISHSVWLKGDHTNFEIDPSFGVEATELYPDVHYITVDEYLNRFL

SEQ ID NO: 57749 - protein, 245 aa, Glycine max
  peptide (1)..(245): Ceres Seq. ID no. 14316381
  misc_feature (1)..(245): Pfam Name: Isoflavone reductase Pfam Description: Isoflavone reductase
  misc_feature (1)..(245): Homolog of NCBI NO: 3243234 NR Description: isoflavone reductase related protein [Pyrus
MYDHESLVTAIKSADVVISAVGYQQLPDQTLIISAIKEVGHVKRFFPSEYGNDVDRNHAVEPAKTVFGGKARIRRAIEAEGIPYTYVSSNFFAGRFLRSLAQIGIMEPPTEKVLIMGDGNVKGIFAAEEDVGTYTIKAVDDPRTLNKILYLRPRSNTLSHNELVSLWEKKLGKTLERVYLPEDELLNKIQESSAPLNVALAISHSVWLKGDHTNFEIDPSFGVEATELYPDVHYITVDEYLNRFL

SEQ ID NO: 57750 - DNA, 809 bp, Glycine max
  misc_feature (1)..(809): Ceres Seq. ID no. 15168553
atcctcatccaaattatcccatcatacctttactttaccccacccaaagcgaaaaaaaaaaggattcaaacatatttgccttatacaattcaaatggcacacacaaaagtggatatgggtttggttttggtggtaatggccatgctatgcgcaggagctgcagctcaatctcaatcgagttgcacaaatgtgttagtgagcctgtcaccgtgccttaactatatcacagggaattcttcaaccccatcttcaggatgctgctcacagcttgccagtgtggtgcgctcacaaccacaatgcctatgtcaggttcttagcggcggtggatcatcactggggatcaacattaaccaaactcaggctctggctttgcctgttgcttgcaaggtgcagaccccacccaccagtcaatgtaacaatgctgctgcttcaccaccaacaggaacagttgcggaatctccaaattcagctccatcaggaaccggaggatccaaaaacctacccacaactgataatggctcatccagcgggaattccatcaagttatcgattcctctgatacttattttggcagcaacatacgtgtcaactttcacaacatactgattctatattcggtcgattttccatttgctattttttgcttgtttgccaattgtccttgtttaatcatttgctattattgagcttccttagtctgaagggttcaatctattcattcgtgacccctactgggatacattgttttgtataatctgagacatgtgttctctcatttatcaataaaatgggttgtaacttggtttgct

SEQ ID NO: 57751 - protein, 201 aa, Glycine max
  peptide (1)..(201): Ceres Seq. ID no. 15168554
  misc_feature (61)..(138): Pfam Name: Protease inhibitor/seed storage/LTP family Pfam Description: Protease inhibitor/seed storage/LTP family
  misc_feature (43)..(195): Homolog of NCBI NO: 18407534 NR Description: protease inhibitor/seed storage/lipid transfer
  misc_feature (43)..(195): Homolog of NCBI NO: 21592774 NR Description: unknown [Arabidopsis thaliana]
  misc_feature (41)..(195): Homolog of NCBI NO: 28269454 NR Description: putative protease inhibitor
  misc_feature (36)..(196): Homolog of NCBI NO: 18414320 NR Description: protease inhibitor/seed storage/lipid transfer
  misc_feature (43)..(194): Homolog of NCBI NO: 25553602 NR Description: OJ1656_E11.34 [Oryza sativa (japonica
  misc_feature (36)..(196): Homolog of NCBI NO: 21592722 NR Description: unknown [Arabidopsis thaliana]
  misc_feature (42)..(192): Homolog of NCBI NO: 25553595 NR Description: OJ1656_E11.26 [Oryza sativa (japonica
  misc_feature (39)..(198): Homolog of NCBI NO: 21554014 NR Description: unknown [Arabidopsis thaliana]
  misc_feature (37)..(198): Homolog of NCBI NO: 24417478 NR Description: unknown [Arabidopsis thaliana]
  misc_feature (36)..(198): Homolog of NCBI NO: 18403453 NR Description: protease inhibitor/seed storage/lipid transfer
ILIQIIPSYLYFTPPKAKKKRIQTYLPYTIQMAHTKVDMGLVLVVMAMLCAGAAAQSQSSCTNVLVSLSPCLNYITGNSSTPSSGCCSQLASVVRSQPQCLCQVLSGGGSSLGININQTQALALPVACKVQTPPTSQCNNAAASPPTGTVAESPNSAPSGTGGSKNLPTTDNGSSSGNSIKLSIPLILILAATYVSTFTTY

SEQ ID NO: 57752 - protein, 170 aa, Glycine max
  peptide (1)..(170): Ceres Seq. ID no. 15168555
  misc_feature (30)..(107): Pfam Name: Protease inhibitor/seed storage/LTP family Pfam Description: Protease inhibitor/seed storage/LTP family
  misc_feature (12)..(164): Homolog of NCBI NO: 18407534 NR Description: protease inhibitor/seed storage/lipid transfer
  misc_feature (12)..(164): Homolog of NCBI NO: 21592774 NR Description: unknown [Arabidopsis thaliana]
  misc_feature (10)..(164): Homolog of NCBI NO: 28269454 NR Description: putative protease inhibitor
  misc_feature (5)..(165): Homolog of NCBI NO: 18414320 NR Description: protease inhibitor/seed storage/lipid transfer
  misc_feature (12)..(163): Homolog of NCBI NO: 25553602 NR Description: OJ1656_E11.34 [Oryza sativa (japonica
  misc_feature (5)..(165): Homolog of NCBI NO: 21592722 NR Description: unknown [Arabidopsis thaliana]
  misc_feature (11)..(161): Homolog of NCBI NO: 25553595 NR Description: OJ1656_E11.26 [Oryza sativa (japonica
  misc_feature (8)..(167): Homolog of NCBI NO: 21554014 NR Description: unknown [Arabidopsis thaliana]
  misc_feature (6)..(167): Homolog of NCBI NO: 24417478 NR Description: unknown [Arabidopsis thaliana]
  misc_feature (5)..(167): Homolog of NCBI NO: 18403453 NR Description: protease inhibitor/seed storage/lipid transfer
MAHTKVDMGLVLVVMAMLCAGAAAQSQSSCTNVLVSLSPCLNYITGNSSTPSSGCCSQLASVVRSQPQCLCQVLSGGGSSLGININQTQALALPVACKVQTPPTSQCNNAAASPPTGTVAESPNSAPSGTGGSKNLPTTDNGSSSGNSIKLSIPLILILAATYVSTFTTY

SEQ ID NO: 57753 - protein, 163 aa, Glycine max
  peptide (1)..(163): Ceres Seq. ID no. 15168556
  misc_feature (23)..(100): Pfam Name: Protease inhibitor/seed storage/LTP family Pfam Description: Protease inhibitor/seed storage/LTP family
  misc_feature (5)..(157): Homolog of NCBI NO: 18407534 NR Description: protease inhibitor/seed storage/lipid transfer
  misc_feature (5)..(157): Homolog of NCBI NO: 21592774 NR Description: unknown [Arabidopsis thaliana]
  misc_feature (3)..(157): Homolog of NCBI NO: 28269454 NR Description: putative protease inhibitor
  misc_feature (1)..(158): Homolog of NCBI NO: 18414320 NR Description: protease inhibitor/seed storage/lipid transfer
  misc_feature (5)..(156): Homolog of NCBI NO: 25553602 NR Description: OJ1656_E11.34 [Oryza sativa (japonica
  misc_feature (1)..(158): Homolog of NCBI NO: 21592722 NR Description: unknown [Arabidopsis thaliana]
  misc_feature (4)..(154): Homolog of NCBI NO: 25553595 NR Description: OJ1656_E11.26 [Oryza sativa (japonica
  misc_feature (1)..(160): Homolog of NCBI NO: 21554014 NR Description: unknown [Arabidopsis thaliana]
  misc_feature (1)..(160): Homolog of NCBI NO: 24417478 NR Description: unknown [Arabidopsis thaliana]
  misc_feature (1)..(160): Homolog of NCBI NO: 18403453 NR Description: protease inhibitor/seed storage/lipid transfer
MGLVLVVMAMLCAGAAAQSQSSCTNVLVSLSPCLNYITGNSSTPSSGCCSQLASVVRSQPQCLCQVLSGGGSSLGININQTQALALPVACKVQTPPTSQCNNAAASPPTGTVAESPNSAPSGTGGSKNLPTTDNGSSSGNSIKLSIPLILILAATYVSTFTTY

SEQ ID NO: 57754 - DNA, 1107 bp, Glycine max
  misc_feature (1)..(1107): Ceres Seq. ID no. 14316459
atctctcataattgaaactaagctacctaccattctttcccattcctgagtttccattgccgcgacatctgaattcctccttgtcactcataatcaccaaatagaagccataaacaaatgaatgccatagcagcagaacaagtgctggagccatggcacaagctagacgacaaagtcgttttggtgacgggtgcttcctcggggctcgggcgagatttctgcatcgacctcgccaaagctggctgctgtgtcgtcgcggcagctcgtcgcctcgatcgcctcacttccctctgccacgaaatcaaccaccgatggccctcgaacgtcggaatccaccgcgcggtggcggtggagcttgatgtcgccgccgatggccccgccatcgacagggctgtgcagaaggcctgggacgcctttggccgcgttgattccttgattaacaacgctggtgtcagaggaagtgttaaatcacccttgaaattgtctgaagaggaatgggatcatgtcttcaagactaacctaactggttgttggttggtgtcaaaatatgtatgcaaacgcatgtgtgatatccagcttaagggatcaattattaatatttcttcagtttctggtttaaatcgggggcaattgcctggagctgctgcatatgcatcttcgaaggcaggggtaaacatgctgactaaggtcatggctatggaattggggatgcacaaaattagagtaaattccatatcccctggaattttcaaatctgaaataactgaaaatttattacaaaaagattggctgaatgatgtggtcaggaaaataatgcctttgagaagattaggtacttcagatccagcattaacatctctagctcgttatcttattcatgattcttctgagtacgtcacgggcaacaattttattgtcgattatggaggcaccttaccaggtgtaccaatttattcttctctgtaaattttggtacattatgcactaacgaaaagtaatactatgaattattccattacatatcttcaaattagacaatatggagttctgaagtctatgtatatggagaattattgtgaagtggctaccaccttgatcttaccatgt

SEQ ID NO: 57755 - protein, 282 aa, Glycine max
  peptide (1)..(282): Ceres Seq. ID no. 14316460
  misc_feature (15)..(282): Homolog of NCBI NO: 18398539 NR Description: short-chain dehydrogenase/reductase family
  misc_feature (10)..(282): Homolog of NCBI NO: 15233243 NR Description: short-chain dehydrogenase/reductase family
  misc_feature (10)..(282): Homolog of NCBI NO: 15221517 NR Description: short-chain dehydrogenase/reductase family
  misc_feature (10)..(282): Homolog of NCBI NO: 15231362 NR Description: short-chain dehydrogenase/reductase family
  misc_feature (10)..(282): Homolog of NCBI NO: 15222406 NR Description: short-chain dehydrogenase/reductase family
  misc_feature (8)..(282): Homolog of NCBI NO: 18410245 NR Description: short-chain dehydrogenase/reductase family
  misc_feature (8)..(282): Homolog of NCBI NO: 11250516 NR Description: oxidoreductase-like protein - Arabidopsis
  misc_feature (10)..(282): Homolog of NCBI NO: 23451057 NR Description: putative short-chain type alcohol dehydrogenase
  misc_feature (12)..(282): Homolog of NCBI NO: 28411870 NR Description: putative 3-ketoacyl-acyl carrier protein
  misc_feature (10)..(282): Homolog of NCBI NO: 13549123 NR Description: putative short-chain type alcohol dehydrogenase
MNAIAAEQVLEPWHKLDDKVVLVTGASSGLGRDFCIDLAKAGCCVVAAARRLDRLTSLCHEINHRWPSNVGIHRAVAVELDVAADGPAIDRAVQKAWDAFGRVDSLINNAGVRGSVKSPLKLSEEEWDHVFKTNLTGCWLVSKYVCKRMCDIQLKGSIINISSVSGLNRGQLPGAAAYASSKAGVNMLTKVMAMELGMHKIRVNSISPGIFKSEITENLLQKDWLNDVVRKIMPLRRLGTSDPALTSLARYLIHDSSEYVTGNNFIVDYGGTLPGVPIYSSL

SEQ ID NO: 57756 - DNA, 1361 bp, Glycine max
  misc_feature (1)..(1361): Ceres Seq. ID no. 14316382
agtttatcaagaactcttgttccaccaaccccaaaattgtgaacctttcaaagagacgaagccttcgaatctctctgaaacttttctcttctctttgattcttctctatcagttaaacattagaatgagccgttcacaggatccacacccttcccgatctttcttcccttttggaaatccttttcggatgatatcacctaaaggctctcgcatgtctccacaacttcttgcagtgttgcaagcttttgaggcaacattggcagagaggctgaaaaatcttatgcctaaaagcaaggatgaaatcctcaccttgtcttggatgactttagctatgaagtcactttgtgaaagtcacaatgacatacggacccttatgactgcccttgagcttcctgtgagtgattgggaggacaaatggattgatatgtacttggacataagttcaaagttgctagacatttgcaatgcattcagctctgagctttcacgtctgaaccagggaaaccttcctcttaagtgtgcactgcacaatttagactctgcctcttcaaagcagtatcttcgggcatgttccctacttgatgattggaggcagcatgttagttctaggaaccctagaattgagaaatgtagttctatgttagataatcttgtgggctcacttgatcttcctaaggttaaaaattctgccaaaggaaaggttttgatgcaagctatgtatggagttaaggtggagactgtatttatttgcagggtgtttactgcagcattctctggctcgtcaaagaagttatcagacttgaatgtggccgacatacattcatgggctccagattttagaaggttgcaggatcttgtaaatgaggaaattagagttagattttctggtggtaaatttactgtattgaatgagttggaagcggttgatgcctctgtgaagatattatatcctactatccaagctggtgtagataccgttgagacagaatggcttgtgaagactgttgaggaattacgtgcgggtgccgagaagctttcgcaaggaattgatcttcttgcaaagggagtagatgggtttttttcaagccgttatgactagtcgcgatactttgctcagctctgtgaggtttgataaaactgtaaatgatcgttccccaggccgtaacagagacatgcaggtagttcactaattatgcagtagcctaactctggtaggttttgggggggtgttcctttgtaggattagtagtattttcggtcttataggtgataatagtatttagccgaaatgtatatgagtggggatgttatgtgtaatgtcaaacaattacaaaatgcagatctttgttaaaaaaaaaaag

SEQ ID NO: 57757 - protein, 365 aa, Glycine max
  peptide (1)..(365): Ceres Seq. ID no. 14316383
  misc_feature (111)..(350): Homolog of NCBI NO: 15233126 NR Description: hypothetical protein [Arabidopsis thaliana]
  misc_feature (59)..(356): Homolog of NCBI NO: 30678866 NR Description: expressed protein [Arabidopsis thaliana]
  misc_feature (59)..(356): Homolog of NCBI NO: 7485228 NR Description: hypothetical protein A_IG002N01.26 - Arabidopsis
  misc_feature (59)..(356): Homolog of NCBI NO: 28392962 NR Description: unknown protein [Arabidopsis thaliana]
  misc_feature (42)..(329): Homolog of NCBI NO: 37536014 NR Description: unknown protein [Oryza sativa (japonica
  misc_feature (42)..(360): Homolog of NCBI NO: 18378853 NR Description: expressed protein [Arabidopsis thaliana]
  misc_feature (42)..(360): Homolog of NCBI NO: 16604342 NR Description: At2g46080/T3F17.27 [Arabidopsis thaliana]
  misc_feature (42)..(360): Homolog of NCBI NO: 18406969 NR Description: expressed protein [Arabidopsis thaliana]
VYQELLFHQPQNCEPFKETKPSNLSETFLFSLILLYQLNIRMSRSQDPHPSRSFFPFGNPFRMISPKGSRMSPQLLAVLQAFEATLAERLKNLMPKSKDEILTLSWMTLAMKSLCESHNDIRTLMTALELPVSDWEDKWIDMYLDISSKLLDICNAFSSELSRLNQGNLPLKCALHNLDSASSKQYLRACSLLDDWRQHVSSRNPRIEKCSSMLDNLVGSLDLPKVKNSAKGKVLMQAMYGVKVETVFICRVFTAAFSGSSKKLSDLNVADIHSWAPDFRRLQDLVNEEIRVRFSGGKFTVLNELEAVDASVKILYPTIQAGVDTVETEWLVKTVEELRAGAEKLSQGIDLLAKGVDGFFSSRYD

SEQ ID NO: 57758 - protein, 324 aa, Glycine max
  peptide (1)..(324): Ceres Seq. ID no. 14316384
  misc_feature (70)..(309): Homolog of NCBI NO: 15233126 NR Description: hypothetical protein [Arabidopsis thaliana]
  misc_feature (18)..(315): Homolog of NCBI NO: 30678866 NR Description: expressed protein [Arabidopsis thaliana]
  misc_feature (18)..(315): Homolog of NCBI NO: 7485228 NR Description: hypothetical protein A_IG002N01.26 - Arabidopsis
  misc_feature (18)..(315): Homolog of NCBI NO: 28392962 NR Description: unknown protein [Arabidopsis thaliana]
  misc_feature (1)..(288): Homolog of NCBI NO: 37536014 NR Description: unknown protein [Oryza sativa (japonica
  misc_feature (1)..(319): Homolog of NCBI NO: 18378853 NR Description: expressed protein [Arabidopsis thaliana]
  misc_feature (1)..(319): Homolog of NCBI NO: 16604342 NR Description: At2g46080/T3F17.27 [Arabidopsis thaliana]
  misc_feature (1)..(319): Homolog of NCBI NO: 18406969 NR Description: expressed protein [Arabidopsis thaliana]
MSRSQDPHPSRSFFPFGNPFRMISPKGSRMSPQLLAVLQAFEATLAERLKNLMPKSKDEILTLSWMTLAMKSLCESHNDIRTLMTALELPVSDWEDKWIDMYLDISSKLLDICNAFSSELSRLNQGNLPLKCALHNLDSASSKQYLRACSLLDDWRQHVSSRNPRIEKCSSMLDNLVGSLDLPKVKNSAKGKVLMQAMYGVKVETVFICRVFTAAFSGSSKKLSDLNVADIHSWAPDFRRLQDLVNEEIRVRFSGGKFTVLNELEAVDASVKILYPTIQAGVDTVETEWLVKTVEELRAGAEKLSQGIDLLAKGVDGFFSSRYD

SEQ ID NO: 57759 - protein, 303 aa, Glycine max
  peptide (1)..(303): Ceres Seq. ID no. 14316385
  misc_feature (49)..(288): Homolog of NCBI NO: 15233126 NR Description: hypothetical protein [Arabidopsis thaliana]
  misc_feature (1)..(294): Homolog of NCBI NO: 30678866 NR Description: expressed protein [Arabidopsis thaliana]
  misc_feature (1)..(294): Homolog of NCBI NO: 7485228 NR Description: hypothetical protein A_IG002N01.26 - Arabidopsis
  misc_feature (1)..(294): Homolog of NCBI NO: 28392962 NR Description: unknown protein [Arabidopsis thaliana]
  misc_feature (1)..(267): Homolog of NCBI NO: 37536014 NR Description: unknown protein [Oryza sativa (japonica
  misc_feature (1)..(298): Homolog of NCBI NO: 18378853 NR Description: expressed protein [Arabidopsis thaliana]
  misc_feature (1)..(298): Homolog of NCBI NO: 16604342 NR Description: At2g46080/T3F17.27 [Arabidopsis thaliana]
  misc_feature (1)..(298): Homolog of NCBI NO: 18406969 NR Description: expressed protein [Arabidopsis thaliana]
MISPKGSRMSPQLLAVLQAFEATLAERLKNLMPKSKDEILTLSWMTLAMKSLCESHNDIRTLMTALELPVSDWEDKWIDMYLDISSKLLDICNAFSSELSRLNQGNLPLKCALHNLDSASSKQYLRACSLLDDWRQHVSSRNPRIEKCSSMLDNLVGSLDLPKVKNSAKGKVLMQAMYGVKVETVFICRVFTAAFSGSSKKLSDLNVADIHSWAPDFRRLQDLVNEEIRVRFSGGKFTVLNELEAVDASVKILYPTIQAGVDTVETEWLVKTVEELRAGAEKLSQGIDLLAKGVDGFFSSRYD

SEQ ID NO: 57760 - DNA, 1297 bp, Glycine max
  misc_feature (1)..(1297): Ceres Seq. ID no. 14315013
gcacggtagtaggaaaaaatgacggaggtggttgcttcggatcccttatccaatcatggcgttgttgttaatcggagtgagcagaggatccgttgttcctcttcctcttctcccgttcgcctctctcctccaccatctcctcgagaaagttctccaagattgcggcaacgacatcgactccgctattagaagcttaaaccagttacgcttaggaggagcaccaccacctccttctcttgattctactctcatcgcatctgacactgctcctcctcaattccaaggtgaagcaaaatgtgatgcagaagttgcaggttctgatgatccagtagctggactaaattatcctacaaacggtgccgaatgggtagagctttttgttaattaaatgatgaatgcttcaagcatggatgatgccaaatctcgagcttcaagaatgctagaggcgttggagaagtccatttgcgcaagagcaagtgctgaaacagagcgaaacatccaccaggaaaataaggtgctgaaggaacaagtggaggcccttgttcaagaaaacgtgattctgaagtgcgctatctgtattcagcacgaacgccagaaagaatatgaagacagaaatcaagagttgaagcatttgaagcaattagtgtcgcagtaccaggaacaggtaagagctttagaggtaaacaattatgcattgacaatgcacctaaagcaggctgaactaggtaacatggctgtttctgtagtttaaataatcatgatcaaagaaaagaaacgaggtaatgaatttatactactccacattttttattaatggtggatagtgaagatttatactattttatgatgcgtggatgtggcaaaaaaatcggtcctacccatagattattagctcttttgatgtagatacccatgtgataaatattttggatgtgttagaaattttatttggcatgcctcatgtaagcccctggatgatctgggattttgtctaactgtctattactgttgttttctgctgccaccatcgtttttgacaagcttctagcaactcaaatgcgtaacgatcgatcatgtttgtgctgagacagaagagttgccacctgatgcgaagagtgaatctgtcatttttgcagccattccatgatgagttgcccttatgtaagatggtgggtttggactctaataaaaattgggtgcttagatagtctgtgagtatggattcttctgtagtaaaatcttgtagtattgtgtaaacttttttttttatatagaaaggtaagttatttattagctc

SEQ ID NO: 57761 - protein, 120 aa, Glycine max
  peptide (1)..(120): Ceres Seq. ID no. 14315014
  misc_feature (3)..(114): Homolog of NCBI NO: 35215036 NR Description: hypothetical protein [Oryza sativa (japonica
  misc_feature (1)..(91): Homolog of NCBI NO: 35215036 NR Description: hypothetical protein [Oryza sativa (japonica
  misc_feature (1)..(111): Homolog of NCBI NO: 15241851 NR Description: hypothetical protein [Arabidopsis thaliana]
  misc_feature (1)..(114): Homolog of NCBI NO: 18412607 NR Description: expressed protein [Arabidopsis thaliana]
  misc_feature (1)..(114): Homolog of NCBI NO: 34015166 NR Description: hypothetical protein OSJNBa0017M13.20
  misc_feature (1)..(111): Homolog of NCBI NO: 18421340 NR Description: expressed protein [Arabidopsis thaliana]
  misc_feature (1)..(111): Homolog of NCBI NO: 13877755 NR Description: unknown protein [Arabidopsis thaliana]
MMNASSMDDAKSRASRMLEALEKSICARASAETERNIHQENKVLKEQVEALVQENVILKCAICIQHERQKEYEDRNQELKHLKQLVSQYQEQVRALEVNNYALTMHLKQAELGNMAVSVV

SEQ ID NO: 57762 - protein, 119 aa, Glycine max
  peptide (1)..(119): Ceres Seq. ID no. 14315015
  misc_feature (2)..(113): Homolog of NCBI NO: 35215036 NR Description: hypothetical protein [Oryza sativa (japonica
  misc_feature (1)..(90): Homolog of NCBI NO: 35215036 NR Description: hypothetical protein [Oryza sativa (japonica
  misc_feature (1)..(110): Homolog of NCBI NO: 15241851 NR Description: hypothetical protein [Arabidopsis thaliana]
  misc_feature (1)..(113): Homolog of NCBI NO: 18412607 NR Description: expressed protein [Arabidopsis thaliana]
  misc_feature (1)..(113): Homolog of NCBI NO: 34015166 NR Description: hypothetical protein OSJNBa0017M13.20
  misc_feature (1)..(110): Homolog of NCBI NO: 18421340 NR Description: expressed protein [Arabidopsis thaliana]
  misc_feature (1)..(110): Homolog of NCBI NO: 13877755 NR Description: unknown protein [Arabidopsis thaliana]
MNASSMDDAKSRASRMLEALEKSICARASAETERNIHQENKVLKEQVEALVQENVILKCAICIQHERQKEYEDRNQELKHLKQLVSQYQEQVRALEVNNYALTMHLKQAELGNMAVSVV

SEQ ID NO: 57763 - protein, 114 aa, Glycine max
  peptide (1)..(114): Ceres Seq. ID no. 14315016
  misc_feature (1)..(108): Homolog of NCBI NO: 35215036 NR Description: hypothetical protein [Oryza sativa (japonica
  misc_feature (1)..(85): Homolog of NCBI NO: 35215036 NR Description: hypothetical protein [Oryza sativa (japonica
  misc_feature (1)..(105): Homolog of NCBI NO: 15241851 NR Description: hypothetical protein [Arabidopsis thaliana]
  misc_feature (1)..(108): Homolog of NCBI NO: 18412607 NR Description: expressed protein [Arabidopsis thaliana]
  misc_feature (1)..(108): Homolog of NCBI NO: 34015166 NR Description: hypothetical protein OSJNBa0017M13.20
  misc_feature (1)..(105): Homolog of NCBI NO: 18421340 NR Description: expressed protein [Arabidopsis thaliana]
  misc_feature (1)..(105): Homolog of NCBI NO: 13877755 NR Description: unknown protein [Arabidopsis thaliana]
MDDAKSRASRMLEALEKSICARASAETERNIHQENKVLKEQVEALVQENVILKCAICIQHERQKEYEDRNQELKHLKQLVSQYQEQVRALEVNNYALTMHLKQAELGNMAVSVV

SEQ ID NO: 57764 - DNA, 1100 bp, Glycine max
  misc_feature (1)..(1100): Ceres Seq. ID no. 13594296
atttttttttttccaccaatccatgtgtccacacatgacatatcccacacaacttgttgtccctttaaggcttaagctccaccacgaaacaccaatcctcaacacacacaaaattctgttcagtttcacccactaaaccaccactactcctaagatctccttcaaaacacaaccaaaatcttaactttcttggaacctttttaattgtttcttctttaaaaatcaatttcctttaaggctttaactttaatattagagttctttctctttcattcatccttggtaatggcttgtgcattgcaagcaaccttagcagccaacacctatgccttttcttccaggagattctccttgaagcaccaaaagaacagtaagagaaggttttctttgttcactgttagagctgattctgatgactctgactgcaatgaggaagagtgtgccccggataaggaagtagggaaggtcagtgtggaatggttagctggggagaagacaaaagtagtgggcacattcccacctcgtcgtaagccgggttggactggctatgttgagaaggacactgctgggcagacaaacatatattcagttgagccagcagtttatgtggcagaaagtgctataagttcaggaactgctggctcttcttctgatggagctgagaacacagcagcaattgttgcaggccttgctctgatatcgattgcagcagcatcgtcgatactgctacaagttggtaagaatgctcctcctcagatccagacggctcaatactctggaccatcacttagttactacatcaacaaattcacgccgccggaaattactcaagtgtctgtgccaagtgaggctgaactatcctcatctgttcaacctgaaagcccacctccggaagtttcccaggttcaggttgaagctcaagcttctgagacctctagtgtgaacattgaatcgtaggtgtatcaagtggttaccacttttgctaccaaaacataccaaagaagtttattttgtgtatacacaactaaaggttaatggatgcaaatgttgaacatcattcttggtatgccactgctaccaactgaaagtgtgtttatctt

SEQ ID NO: 57765 - protein, 223 aa, Glycine max
  peptide (1)..(223): Ceres Seq. ID no. 13594297
  misc_feature (9)..(223): Homolog of NCBI NO: 21553857 NR Description: unknown [Arabidopsis thaliana]
  misc_feature (9)..(223): Homolog of NCBI NO: 18415378 NR Description: proline-rich protein family [Arabidopsis
MACALQATLAANTYAFSSRRFSLKHQKNSKRRFSLFTVRADSDDSDCNEEECAPDKEVGKVSVEWLAGEKTKVVGTFPPRRKPGWTGYVEKDTAGQTNIYSVEPAVYVAESAISSGTAGSSSDGAENTAAIVAGLALISIAAASSILLQVGKNAPPQIQTAQYSGPSLSYYINKFTPPEITQVSVPSEAELSSSVQPESPPPEVSQVQVEAQASETSSVNIES

SEQ ID NO: 57766 - DNA, 995 bp, Glycine max
  misc_feature (1)..(995): Ceres Seq. ID no. 13581670
acacaagtacacagcatagtcaagcttcgaattgttgaatgtggaaggaggagaaggagaaggagggtgttgcgccacgaacacatgaattagaaaagaagcagctgcagcaacttttcttgttcaatacccatcaaatgcaaatacaaagacactctcttttttaattactactgttttatgttcctttcttccttctgaatctgaccaaccagtaggactccttcaaagggattttgagtattgtttgaattgctggagacctgagagtgaaaactaactccacaatccatggataaagatgctagggtggaagagactgttgatttgcgaaccaatgtggagttggtgagatcagtctctgataagcatcatgatcttttaaggccatctgctcggaactattcaagaggacaatcaacagatacaactggccgtggaaagggaaagtatgccttaattagagacccagaggacttccaaatgggagtttatgataagccccttccatgttttggatgtggaatcggatggttctcatttctttttggatttctatgccctcctatgtggttctatgctacaattctctattttggaaatcactatcggaaggatcctagggagcgagcagggctgggagcctctgcaattgctgcattagtgtgttctgtaacgtcgctgataattggagtaattcttgtgttgcggtacctctatttctaattcacgtgcaaaggtgaaaattgagaagcaaaagcatttggaatcaattctggcgggatattagaaacaattggacatatgtatataagaacttcaaatagatgggaaaaggcttgcatatattgctggtgaagtaattcacagcatgaaatctgtcgtctataccataagttgagagaagataatgcgtcatatcccttatttgtttattttctgaactgatgtatactcaaaaagaaaccttttgatgagtgtttatgaatttcccg

SEQ ID NO: 57767 - protein, 144 aa, Glycine max
  peptide (1)..(144): Ceres Seq. ID no. 13581671
  misc_feature (45)..(141): Homolog of NCBI NO: 25405706 NR Description: hypothetical protein F20D21.3 [imported] -
  misc_feature (18)..(144): Homolog of NCBI NO: 18423932 NR Description: expressed protein [Arabidopsis thaliana]
  misc_feature (18)..(144): Homolog of NCBI NO: 8777446 NR Description: gene_id:MHM17.20~pir||T04261~similar to unknown
  misc_feature (18)..(144): Homolog of NCBI NO: 21593960 NR Description: unknown [Arabidopsis thaliana]
  misc_feature (9)..(135): Homolog of NCBI NO: 21553625 NR Description: unknown [Arabidopsis thaliana]
  misc_feature (9)..(135): Homolog of NCBI NO: 15236106 NR Description: expressed protein [Arabidopsis thaliana]
MDKDARVEETVDLRTNVELVRSVSDKHHDLLRPSARNYSRGQSTDTTGRGKGKYALIRDPEDFQMGVYDKPLPCFGCGIGWFSFLFGFLCPPMWFYATILYFGNHYRKDPRERAGLGASAIAALVCSVTSLIIGVILVLRYLYF

SEQ ID NO: 57768 - protein, 80 aa, Glycine max
  peptide (1)..(80): Ceres Seq. ID no. 13581672
  misc_feature (1)..(77): Homolog of NCBI NO: 25405706 NR Description: hypothetical protein F20D21.3 [imported] -
  misc_feature (1)..(80): Homolog of NCBI NO: 18423932 NR Description: expressed protein [Arabidopsis thaliana]
  misc_feature (1)..(80): Homolog of NCBI NO: 8777446 NR Description: gene_id:MHM17.20~pir||T04261~similar to unknown
  misc_feature (1)..(80): Homolog of NCBI NO: 21593960 NR Description: unknown [Arabidopsis thaliana]
  misc_feature (1)..(71): Homolog of NCBI NO: 21553625 NR Description: unknown [Arabidopsis thaliana]
  misc_feature (1)..(71): Homolog of NCBI NO: 15236106 NR Description: expressed protein [Arabidopsis thaliana]
MGVYDKPLPCFGCGIGWFSFLFGFLCPPMWFYATILYFGNHYRKDPRERAGLGASAIAALVCSVTSLIIGVILVLRYLYF

SEQ ID NO: 57769 - DNA, 1306 bp, Glycine max
  misc_feature (1)..(1306): Ceres Seq. ID no. 14315966
attcgaaaacaccaactacgactttgagtggtcaaaaacctctgcgcttctctctcaagtctcaaagacacgctccctgaaaaccctaacatctaccacttctctgagatctccgccgcaaccgccaatttctccgcgccacgcctttcctcttcctcctggcgctgcgtaattcgtcaccgcgaagtcgtcgtttcgcgccgcgacttccgccgtcaaattgatatcccggagctcagccgccgcctcgccctcatctgccggagtcaccacagcagcctcttgaaactcctcggcgcgtcggtctctggcgccgtcatcttcctcgtcaacgagttcgtccccggcgccagcctcgccgactgcctccgcaaccgccggaaccctagcttcaccgatctcaacacgtggatctctcggatgcagatcgcgtccgacgtggcgcacggtctcgattacatccacaatttctctggttccggttcggattccggttccggatcaggatccggattcgttcacaagcacatcaagagttcgagcattgttatcacggaggagaatctgcgcgcgagaatctgccacttcggcgtgtcgggtctctgcggcgaggccgtcgccggcgacggcgatccttctggcggccggactgtgaggatctaggggaggagaggctacatggcgccggagtttcagatcagcggcgtcgcgacgaagaagagcgacgtgtacgctttcggagtggtggttttggagctgctgagcggggaagaggcggtgaagttcgaattcaacgacgacggcggttatcgcaggattagcgtggtggagacggcaaagattgcggcggaggagaacggcggcgtgaggaagtgggtggatacgaggctgagggattcatttcccgtgaatgttgcggagagaatgattcgggtcggattggaatgtgtcggggatgacccgaatgagagacccgatatgggttgggtttctgatgaggtgtcgaagttgtatttggatctcgttggccccacggtgacttcttttggttgggtttgaggggttttcttttctttttatttgcattcgctatgaattttgattgtaaagaaagagaaaaaactgactgtgaaaagagattgatgtataattttatactttgtatagtacatgattgcggatatgaaggaaaaggtgaagtttgaagcactcaaatcagccaattgggcttgagtggaatggaaggattctgtcttgtgtagaatttggattttgaacaaaataaacatatttagttaagcaagcg

SEQ ID NO: 57770 - protein, 126 aa, Glycine max
  peptide (1)..(126): Ceres Seq. ID no. 14315967
  misc_feature (1)..(123): Homolog of NCBI NO: 25287696 NR Description: hypothetical protein [imported] - Arabidopsis
  misc_feature (1)..(104): Homolog of NCBI NO: 15218207 NR Description: protein kinase -related [Arabidopsis thaliana]
  misc_feature (1)..(111): Homolog of NCBI NO: 32470650 NR Description: putative receptor protein kinase [Solanum
  misc_feature (1)..(104): Homolog of NCBI NO: 15220540 NR Description: S-locus protein kinase, putative [Arabidopsis
  misc_feature (1)..(117): Homolog of NCBI NO: 15228781 NR Description: protein kinase family [Arabidopsis thaliana]
  misc_feature (1)..(126): Homolog of NCBI NO: 6403501 NR Description: putative protein kinase [Arabidopsis thaliana]
  misc_feature (1)..(101): Homolog of NCBI NO: 34485514 NR Description: LysM domain-containing receptor-like kinase 1
  misc_feature (1)..(112): Homolog of NCBI NO: 5441881 NR Description: Similar to putative receptor kinase. (AC002332)
  misc_feature (1)..(114): Homolog of NCBI NO: 22331831 NR Description: protein kinase family [Arabidopsis thaliana]
  misc_feature (1)..(114): Homolog of NCBI NO: 11357615 NR Description: hypothetical protein F24I3.200 - Arabidopsis
MAPEFQISGVATKKSDVYAFGVVVLELLSGEEAVKFEFNDDGGYRRISVVETAKIAAEENGGVRKWVDTRLRDSFPVNVAERMIRVGLECVGDDPNERPDMGWVSDEVSKLYLDLVGPTVTSFGWV

SEQ ID NO: 57771 - protein, 80 aa, Glycine max
  peptide (1)..(80): Ceres Seq. ID no. 14315968
  misc_feature (1)..(59): Homolog of NCBI NO: 32470650 NR Description: putative receptor protein kinase [Solanum
  misc_feature (33)..(80): Homolog of NCBI NO: 15220540 NR Description: S-locus protein kinase, putative [Arabidopsis
  misc_feature (1)..(59): Homolog of NCBI NO: 15220540 NR Description: S-locus protein kinase, putative [Arabidopsis
  misc_feature (1)..(80): Homolog of NCBI NO: 15228781 NR Description: protein kinase family [Arabidopsis thaliana]
  misc_feature (1)..(61): Homolog of NCBI NO: 6403501 NR Description: putative protein kinase [Arabidopsis thaliana]
  misc_feature (33)..(80): Homolog of NCBI NO: 6403501 NR Description: putative protein kinase [Arabidopsis thaliana]
  misc_feature (1)..(80): Homolog of NCBI NO: 34485514 NR Description: LysM domain-containing receptor-like kinase 1
  misc_feature (1)..(80): Homolog of NCBI NO: 5441881 NR Description: Similar to putative receptor kinase. (AC002332)
  misc_feature (1)..(80): Homolog of NCBI NO: 22331831 NR Description: protein kinase family [Arabidopsis thaliana]
  misc_feature (1)..(80): Homolog of NCBI NO: 11357615 NR Description: hypothetical protein F24I3.200 - Arabidopsis
MQIASDVAHGLDYIHNFSGSGSDSGSGSGSGFVHKHIKSSSIVITEENLRARICHFGVSGLCGEAVAGDGDPSGGRTVRI

SEQ ID NO: 57772 - DNA, 1550 bp, Glycine max
  misc_feature (1)..(1550): Ceres Seq. ID no. 15177750
aaaccaaagtggttttgtcatttgttttgatgaatctttcggtggtctatctcaccttcttttctttctcactaatcactataaaaaaaaatctacactatctatccttccacaacacaacacaattcaataccatttaccaaactcactcatcaattctcatctttcttctcactaactattaattcatcatgtcgagcacagctggccaagtcatcaaatgcaaagctgcggtttcatgggaggcagggaagccacttgtgattgaagaagtagaggttgcgccaccacaagctggtgaagtgcgtttgaagatcctctacacctctctttgccacactgatgtttacttctgggaagctaagggccaaactccattgtttcctcgtatatttggtcatgaagctggagggattgtggagagcgtaggtgagggtgtgactcatctgaaaccaggggaccatgccctccctgtgtttaccggggagtgtggggactgccctcattgcaagtcagaggagagcaacatgtgtgatcttctcaggatcaacactgataggggtgtcatgatccatgatagccaaacaaggttttctataaagggacaacctatttaccattttgttggtacctctacattcagtgaatacactgttgttcatgctggatgtgttgccaaagtcaaccctgctgccccacttgacaaaatctgtgttctcagttgtggaatttgcacaggtcttggggccactatcaatgttgcaaaaccaaaacctggttcttctgttgccatttttggacttggagctgttggccttgccgctgctgaaggggcaaggatttctggtgcatcaagaatcattggggttgatttagtttctagcagatttgaagaagctaagaagtttggggtcaatgaatttgtgaacccaaaagatcatgacaaacctgtacaagaggtgattgctgcaatgacaaatgggggtgtggatcgtgctgttgaatgtactggcagcatccaagccatgatctcagcattcgaatgcgtccacgatggttggggtgttgctgtacttgttggagtgccaaacaaagatgatgcattcaaaactcatccagtgaatttcttgaatgagaggactctaaagggtaccttctatggaaactacaaaccccgcactgaccttccttctgttgtggagaagtacatgaatggggaattggaactggagaaattcatcactcacacagttccattctctgagattaacaaggcttttgattacatgctgaaaggggagtccatcagatgcatcattcgtatgggggagtaaatctatcaaaccaatgatgacatggtccctgtgagggactgagttctctttctagttgtgaaagtgaaaagaagaaaataaatttcatatatatgatatatccctttagaattattgaattagtgaaaacttgtgtaagtttgaatgttgagaatgataggacctttgctgctgttattgtctaatgcatgataaataaaatgtggtttttttgtc

SEQ ID NO: 57773 - protein, 380 aa, Glycine max
  peptide (1)..(380): Ceres Seq. ID no. 15177751
  misc_feature (1)..(380): Homolog of NCBI NO: 113366 NR Description: Alcohol dehydrogenase 1
  misc_feature (1)..(380): Homolog of NCBI NO: 113361 NR Description: ALCOHOL DEHYDROGENASE 1
  misc_feature (1)..(380): Homolog of NCBI NO: 29373061 NR Description: alcohol dehydrogenase 1; ADH1 [Lotus corniculatus]
  misc_feature (1)..(380): Homolog of NCBI NO: 452767 NR Description: alcohol dehydrogenase-1CN [Phaseolus acutifolius]
  misc_feature (1)..(380): Homolog of NCBI NO: 1085622 NR Description: alcohol dehydrogenase (EC 1.1.1.1) 1 - Phaseolus
MSSTAGQVIKCKAAVSWEAGKPLVIEEVEVAPPQAGEVRLKILYTSLCHTDVYFWEAKGQTPLFPRIFGHEAGGIVESVGEGVTHLKPGDHALPVFTGECGDCPHCKSEESNMCDLLRINTDRGVMIHDSQTRFSIKGQPIYHFVGTSTFSEYTVVHAGCVAKVNPAAPLDKICVLSCGICTGLGATINVAKPKPGSSVAIFGLGAVGLAAAEGARISGASRIIGVDLVSSRFEEAKKFGVNEFVNPKDHDKPVQEVIAAMTNGGVDRAVECTGSIQAMISAFECVHDGWGVAVLVGVPNKDDAFKTHPVNFLNERTLKGTFYGNYKPRTDLPSVVEKYMNGELELEKFITHTVPFSEINKAFDYMLKGESIRCIIRMGE

SEQ ID NO: 57774 - protein, 268 aa, Glycine max
  peptide (1)..(268): Ceres Seq. ID no. 15177752
  misc_feature (1)..(268): Homolog of NCBI NO: 113366 NR Description: Alcohol dehydrogenase 1
  misc_feature (1)..(268): Homolog of NCBI NO: 113361 NR Description: ALCOHOL DEHYDROGENASE 1
  misc_feature (1)..(268): Homolog of NCBI NO: 29373061 NR Description: alcohol dehydrogenase 1; ADH1 [Lotus corniculatus]
  misc_feature (1)..(268): Homolog of NCBI NO: 452767 NR Description: alcohol dehydrogenase-1CN [Phaseolus acutifolius]
  misc_feature (1)..(268): Homolog of NCBI NO: 1085622 NR Description: alcohol dehydrogenase (EC 1.1.1.1) 1 - Phaseolus
MCDLLRINTDRGVMIHDSQTRFSIKGQPIYHFVGTSTFSEYTVVHAGCVAKVNPAAPLDKICVLSCGICTGLGATINVAKPKPGSSVAIFGLGAVGLAAAEGARISGASRIIGVDLVSSRFEEAKKFGVNEFVNPKDHDKPVQEVIAAMTNGGVDRAVECTGSIQAMISAFECVHDGWGVAVLVGVPNKDDAFKTHPVNFLNERTLKGTFYGNYKPRTDLPSVVEKYMNGELELEKFITHTVPFSEINKAFDYMLKGESIRCIIRMGE

SEQ ID NO: 57775 - protein, 255 aa, Glycine max
  peptide (1)..(255): Ceres Seq. ID no. 15177753
  misc_feature (1)..(255): Homolog of NCBI NO: 113366 NR Description: Alcohol dehydrogenase 1
  misc_feature (1)..(255): Homolog of NCBI NO: 113361 NR Description: ALCOHOL DEHYDROGENASE 1
  misc_feature (1)..(255): Homolog of NCBI NO: 29373061 NR Description: alcohol dehydrogenase 1; ADH1 [Lotus corniculatus]
  misc_feature (1)..(255): Homolog of NCBI NO: 452767 NR Description: alcohol dehydrogenase-1CN [Phaseolus acutifolius]
  misc_feature (1)..(255): Homolog of NCBI NO: 1085622 NR Description: alcohol dehydrogenase (EC 1.1.1.1) 1 - Phaseolus
MIHDSQTRFSIKGQPIYHFVGTSTFSEYTVVHAGCVAKVNPAAPLDKICVLSCGICTGLGATINVAKPKPGSSVAIFGLGAVGLAAAEGARISGASRIIGVDLVSSRFEEAKKFGVNEFVNPKDHDKPVQEVIAAMTNGGVDRAVECTGSIQAMISAFECVHDGWGVAVLVGVPNKDDAFKTHPVNFLNERTLKGTFYGNYKPRTDLPSVVEKYMNGELELEKFITHTVPFSEINKAFDYMLKGESIRCIIRMGE

SEQ ID NO: 57776 - DNA, 1393 bp, Glycine max
  misc_feature (1)..(1393): Ceres Seq. ID no. 14315892
ttttttcccttaacgcaaactgtcatcttgtcattcaccgagaaagtcgtactgattcctcttcatctttcgttaaagcgagtacttttcgttcttgatctgttggttacgatgtcgtattcaaggagatctaggtattctccttctccttctccttctccatacaagcgatacggtaggtctgtgtccaggtctctctcaatgtcaagatccagaagccgttcaaggagtttatcaagagatgcagaaaatccaggaaacaatttgtatgtgacaggattgtctcctaggattaccaagagagaactggagaaacattttgctgctgaaggaaaagtgatagatgtccatctggtagttgatccttggacaagggaatcccgtgggtttggctttgtgacaatggagactcttgaggaggctgaacgatgtgtaaagtatctgaatcactctgtacttgaagggcgtgtcatcacggtggagaaggctaaaagacgacgtggtcgaaccccaacgccagggaggtatctaggactgagaactattcgtgctcgacgtcgctctccaagttactctcctcgtcgctctcctagctattctcccttcagaagaagctacagtcgctctccctattcttcagaccgaagtaggagtcgttcttactctcctgactatcagaggaggtcttactctccatatcactccaggcggaggtcttactctccattctatagccggtacaggtcctattctcgatatgatcgacacaggtcatattctcgatctcgctctccgtatagcaggtcacctgtcagcatgcgtgacagatcatactctccatatgaaatacgatatgactcgccggatgcgcactcctacagaaggcaccgttaccgatctgtttcacaaagtgcctcgcctgatgatcgttattatggaaggcaccgttacaggtctgtttctcggagtgcctcacccaggccaaggagaaggtcaaggaggagctactcacggagtgccacacctgtttcaaagagaagcaactcacgaaatgtgtcccccaggtcaaggaggagccattcaagaagctctaagaggagtggcaaatgtgagaaacgctactcaagaagctcgagtgtgaatgcaagttcaagatcagtatcgaggtcaaatactccaaggtctacctctccttcaacttgaaatttgttggtcctatatggcttaacatcttaggcttatagtggataatatattagtgtggtatatgtatgcagttctagatggagttttcgtttggttccgttcaggacttgtctaaaaaccacctgatcttatttcatgtagtatgggattgaaattatgttactcagtatagattatctaatttcgt

SEQ ID NO: 57777 - protein, 400 aa, Glycine max
  peptide (1)..(400): Ceres Seq. ID no. 14315893
  misc_feature (89)..(160): Pfam Name: RNA recognition motif. (a.k.a. RRM, RBD, or RNP domain) Pfam Description: RNA recognition motif. (a.k.a. RRM, RBD, or RNP
  misc_feature (45)..(329): Homolog of NCBI NO: 32405782 NR Description: hypothetical protein [Neurospora crassa]
  misc_feature (45)..(329): Homolog of NCBI NO: 16944647 NR Description: conserved hypothetical protein [Neurospora crassa]
  misc_feature (38)..(162): Homolog of NCBI NO: 30680096 NR Description: transformer serine/arginine-rich
  misc_feature (38)..(218): Homolog of NCBI NO: 7489207 NR Description: transformer-SR ribonucleoprotein - common tobacco
  misc_feature (45)..(280): Homolog of NCBI NO: 40253470 NR Description: putative transformer-SR ribonucleoprotein
  misc_feature (31)..(248): Homolog of NCBI NO: 11275253 NR Description: transformer-2-like protein - liverwort
  misc_feature (76)..(398): Homolog of NCBI NO: 8778550 NR Description: F22G5.31 [Arabidopsis thaliana]
  misc_feature (68)..(392): Homolog of NCBI NO: 34902002 NR Description: putative transformer serine/arginine-rich
  misc_feature (38)..(398): Homolog of NCBI NO: 18390758 NR Description: transformer serine/arginine-rich
  misc_feature (20)..(398): Homolog of NCBI NO: 28973767 NR Description: putative transformer-SR ribonucleoprotein
FFPLTQTVILSFTEKVVLIPLHLSLKRVLFVLDLLVTMSYSRRSRYSPSPSPSPYKRYGRSVSRSLSMSRSRSRSRSLSRDAENPGNNLYVTGLSPRITKRELEKHFAAEGKVIDVHLVVDPWTRESRGFGFVTMETLEEAERCVKYLNHSVLEGRVITVEKAKRRRGRTPTPGRYLGLRTIRARRRSPSYSPRRSPSYSPFRRSYSRSPYSSDRSRSRSYSPDYQRRSYSPYHSRRRSYSPFYSRYRSYSRYDRHRSYSRSRSPYSRSPVSMRDRSYSPYEIRYDSPDAHSYRRHRYRSVSQSASPDDRYYGRHRYRSVSRSASPRPRRRSRRSYSRSATPVSKRSNSRNVSPRSRRSHSRSSKRSGKCEKRYSRSSSVNASSRSVSRSNTPRSTSPST

SEQ ID NO: 57778 - protein, 363 aa, Glycine max
  peptide (1)..(363): Ceres Seq. ID no. 14315894
  misc_feature (52)..(123): Pfam Name: RNA recognition motif. (a.k.a. RRM, RBD, or RNP domain) Pfam Description: RNA recognition motif. (a.k.a. RRM, RBD, or RNP
  misc_feature (8)..(292): Homolog of NCBI NO: 32405782 NR Description: hypothetical protein [Neurospora crassa]
  misc_feature (8)..(292): Homolog of NCBI NO: 16944647 NR Description: conserved hypothetical protein [Neurospora crassa]
  misc_feature (1)..(125): Homolog of NCBI NO: 30680096 NR Description: transformer serine/arginine-rich
  misc_feature (1)..(181): Homolog of NCBI NO: 7489207 NR Description: transformer-SR ribonucleoprotein - common tobacco
  misc_feature (8)..(243): Homolog of NCBI NO: 40253470 NR Description: putative transformer-SR ribonucleoprotein
  misc_feature (1)..(211): Homolog of NCBI NO: 11275253 NR Description: transformer-2-like protein - liverwort
  misc_feature (39)..(361): Homolog of NCBI NO: 8778550 NR Description: F22G5.31 [Arabidopsis thaliana]
  misc_feature (31)..(355): Homolog of NCBI NO: 34902002 NR Description: putative transformer serine/arginine-rich
  misc_feature (1)..(361): Homolog of NCBI NO: 18390758 NR Description: transformer serine/arginine-rich
  misc_feature (1)..(361): Homolog of NCBI NO: 28973767 NR Description: putative transformer-SR ribonucleoprotein
MSYSRRSRYSPSPSPSPYKRYGRSVSRSLSMSRSRSRSRSLSRDAENPGNNLYVTGLSPRITKRELEKHFAAEGKVIDVHLVVDPWTRESRGFGFVTMETLEEAERCVKYLNHSVLEGRVITVEKAKRRRGRTPTPGRYLGLRTIRARRRSPSYSPRRSPSYSPFRRSYSRSPYSSDRSRSRSYSPDYQRRSYSPYHSRRRSYSPFYSRYRSYSRYDRHRSYSRSRSPYSRSPVSMRDRSYSPYEIRYDSPDAHSYRRHRYRSVSQSASPDDRYYGRHRYRSVSRSASPRPRRRSRRSYSRSATPVSKRSNSRNVSPRSRRSHSRSSKRSGKCEKRYSRSSSVNASSRSVSRSNTPRSTSPST

SEQ ID NO: 57779 - protein, 333 aa, Glycine max
  peptide (1)..(333): Ceres Seq. ID no. 14315895
  misc_feature (22)..(93): Pfam Name: RNA recognition motif. (a.k.a. RRM, RBD, or RNP domain) Pfam Description: RNA recognition motif. (a.k.a. RRM, RBD, or RNP
  misc_feature (1)..(262): Homolog of NCBI NO: 32405782 NR Description: hypothetical protein [Neurospora crassa]
  misc_feature (1)..(262): Homolog of NCBI NO: 16944647 NR Description: conserved hypothetical protein [Neurospora crassa]
  misc_feature (1)..(95): Homolog of NCBI NO: 30680096 NR Description: transformer serine/arginine-rich
  misc_feature (1)..(151): Homolog of NCBI NO: 7489207 NR Description: transformer-SR ribonucleoprotein - common tobacco
  misc_feature (1)..(213): Homolog of NCBI NO: 40253470 NR Description: putative transformer-SR ribonucleoprotein
  misc_feature (1)..(181): Homolog of NCBI NO: 11275253 NR Description: transformer-2-like protein - liverwort
  misc_feature (9)..(331): Homolog of NCBI NO: 8778550 NR Description: F22G5.31 [Arabidopsis thaliana]
  misc_feature (1)..(325): Homolog of NCBI NO: 34902002 NR Description: putative transformer serine/arginine-rich
  misc_feature (1)..(331): Homolog of NCBI NO: 18390758 NR Description: transformer serine/arginine-rich
  misc_feature (1)..(331): Homolog of NCBI NO: 28973767 NR Description: putative transformer-SR ribonucleoprotein
MSRSRSRSRSLSRDAENPGNNLYVTGLSPRITKRELEKHFAAEGKVIDVHLVVDPWTRESRGFGFVTMETLEEAERCVKYLNHSVLEGRVITVEKAKRRRGRTPTPGRYLGLRTIRARRRSPSYSPRRSPSYSPFRRSYSRSPYSSDRSRSRSYSPDYQRRSYSPYHSRRRSYSPFYSRYRSYSRYDRHRSYSRSRSPYSRSPVSMRDRSYSPYEIRYDSPDAHSYRRHRYRSVSQSASPDDRYYGRHRYRSVSRSASPRPRRRSRRSYSRSATPVSKRSNSRNVSPRSRRSHSRSSKRSGKCEKRYSRSSSVNASSRSVSRSNTPRSTSPST

SEQ ID NO: 57780 - DNA, 1750 bp, Glycine max
  misc_feature (1)..(1750): Ceres Seq. ID no. 14316196
aaaaaactctttctctttagccctcaaaggtacccctgaaaagtgaaaggtcttgctcccatttctttaacggcttgttttttattttttaataatcccatcgtaattatcgctttttctcgttgtccactaagaatgtcaagacaggagatcaagatctgaagccttgttgaagaggctgcttctttggatctgaacaatgcctctggctctggatctttgccgcgccttcaaacattgaaaaagacttccatttcttctcgaaggtctggtactgccactttccctagtcctggtacactcaattatcgcgttgcaatgcacaagggatggagctccgagcgagttcccttgcatgcaggtgctacccggaagcacgttttgccgttcaacaatgggaaaacattgccgtcaaagtgggaagatgctgagaggtggattctcagccctgtttcggcagatggcactgggagggcctcgcttaatgcaccccaaaggaggccaaagtccaagagcggtcctcttggaccccctggtgttgcgtatcattctatgtactcgccggccgcgccggtgtttgaagtggggaatggggggagttttatggaaggttctccgtttacaggtgatggtttaataatctgcaccggtggccatggtggagctctttccgtgagaacagaaccttgcatggcacgctcagcaagtgtccacggatgctctaagatacagagtcagtcatcatcaatgcccctccaagaggataagtttggggggttcaaagatgtgggcaccaatgtgtcccgtgccacttcaaggagggacatggcgacccagatgagcccacagggtagctcacgctcctctcctaatctgaggccttctttctctgcctccaccccatcaaccttgcctgtcacagaattgcggactgttggttcctctaaagtggatattagggatgtgcaggtagatgaacacgttaccgtgacaagatggtccaagaaacatagggccctattcactggcagaggctcagaaaaagtcgaaagctggaaaaaagaactaagcactcaatcgtcaacttgggacgtttctgaaacgtcaaagcctgcctcaaagacaagaagtgaggaagccaaaatctctgcatgggagaacttgcaaaaggcaaaagcagaagcagcaatacggaaactagagatgaaattggaaaaaaggcgagcatcctctatggataagattatgaacaagcttagattggcccagaaaaaagctcaggaaatgagaagttcagttccacacaaccaaaccgatcgggttgtaagaacttcacacaaggcttcatcatttcttagaaccagccagatgcgttctttgagtggttgtttcacttgccatgtcttttaagcattctttcatgtttgagtgatggtgggtttccgaaggattcaaatgggccacatgttaatgattgaaaggggcacaacagttgacaaaattggtgttgttgcgttttgctatccatggcaccttctttgaaagtctcagatatcataaaatctaagccccgtgttcgggagtttggattcaatgggtagcaatatttgtaagtaggccaaattttagaaataagatcttttgtatttttttctctcctcccaacatgattgtgtgctgttcaaaaacttcaaatgtaatctaccttatagttgaacgagaaaagcaaccacaatatcatttcgttctc

SEQ ID NO: 57781 - protein, 363 aa, Glycine max
  peptide (1)..(363): Ceres Seq. ID no. 14316197
  misc_feature (249)..(347): Pfam Name: Remorin, C-terminal region Pfam Description: Remorin, C-terminal region
  misc_feature (202)..(361): Homolog of NCBI NO: 38344336 NR Description: OSJNBa0058K23.18 [Oryza sativa (japonica
  misc_feature (170)..(358): Homolog of NCBI NO: 15225899 NR Description: remorin [Arabidopsis thaliana]
  misc_feature (139)..(358): Homolog of NCBI NO: 34902218 NR Description: Unknown protein [Oryza sativa (japonica
  misc_feature (175)..(363): Homolog of NCBI NO: 18395321 NR Description: expressed protein [Arabidopsis thaliana]
  misc_feature (159)..(353): Homolog of NCBI NO: 21536537 NR Description: unknown [Arabidopsis thaliana]
  misc_feature (159)..(353): Homolog of NCBI NO: 18408804 NR Description: expressed protein [Arabidopsis thaliana]
  misc_feature (159)..(353): Homolog of NCBI NO: 28393368 NR Description: unknown protein [Arabidopsis thaliana]
  misc_feature (13)..(362): Homolog of NCBI NO: 15028061 NR Description: unknown protein [Arabidopsis thaliana]
  misc_feature (13)..(362): Homolog of NCBI NO: 18419945 NR Description: expressed protein [Arabidopsis thaliana]
  misc_feature (1)..(363): Homolog of NCBI NO: 30693941 NR Description: conserved hypothetical protein [Arabidopsis
MHKGWSSERVPLHAGATRKHVLPFNNGKTLPSKWEDAERWILSPVSADGTGRASLNAPQRRPKSKSGPLGPPGVAYHSMYSPAAPVFEVGNGGSFMEGSPFTGDGLIICTGGHGGALSVRTEPCMARSASVHGCSKIQSQSSSMPLQEDKFGGFKDVGTNVSRATSRRDMATQMSPQGSSRSSPNLRPSFSASTPSTLPVTELRTVGSSKVDIRDVQVDEHVTVTRWSKKHRALFTGRGSEKVESWKKELSTQSSTWDVSETSKPASKTRSEEAKISAWENLQKAKAEAAIRKLEMKLEKRRASSMDKIMNKLRLAQKKAQEMRSSVPHNQTDRVVRTSHKASSFLRTSQMRSLSGCFTCHVF

SEQ ID NO: 57782 - protein, 285 aa, Glycine max
  peptide (1)..(285): Ceres Seq. ID no. 14316198
  misc_feature (171)..(269): Pfam Name: Remorin, C-terminal region Pfam Description: Remorin, C-terminal region
  misc_feature (124)..(283): Homolog of NCBI NO: 38344336 NR Description: OSJNBa0058K23.18 [Oryza sativa (japonica
  misc_feature (92)..(280): Homolog of NCBI NO: 15225899 NR Description: remorin [Arabidopsis thaliana]
  misc_feature (61)..(280): Homolog of NCBI NO: 34902218 NR Description: Unknown protein [Oryza sativa (japonica
  misc_feature (97)..(285): Homolog of NCBI NO: 18395321 NR Description: expressed protein [Arabidopsis thaliana]
  misc_feature (81)..(275): Homolog of NCBI NO: 21536537 NR Description: unknown [Arabidopsis thaliana]
  misc_feature (81)..(275): Homolog of NCBI NO: 18408804 NR Description: expressed protein [Arabidopsis thaliana]
  misc_feature (81)..(275): Homolog of NCBI NO: 28393368 NR Description: unknown protein [Arabidopsis thaliana]
  misc_feature (1)..(284): Homolog of NCBI NO: 15028061 NR Description: unknown protein [Arabidopsis thaliana]
  misc_feature (1)..(284): Homolog of NCBI NO: 18419945 NR Description: expressed protein [Arabidopsis thaliana]
  misc_feature (1)..(285): Homolog of NCBI NO: 30693941 NR Description: conserved hypothetical protein [Arabidopsis
MYSPAAPVFEVGNGGSFMEGSPFTGDGLIICTGGHGGALSVRTEPCMARSASVHGCSKIQSQSSSMPLQEDKFGGFKDVGTNVSRATSRRDMATQMSPQGSSRSSPNLRPSFSASTPSTLPVTELRTVGSSKVDIRDVQVDEHVTVTRWSKKHRALFTGRGSEKVESWKKELSTQSSTWDVSETSKPASKTRSEEAKISAWENLQKAKAEAAIRKLEMKLEKRRASSMDKIMNKLRLAQKKAQEMRSSVPHNQTDRVVRTSHKASSFLRTSQMRSLSGCFTCHVF

SEQ ID NO: 57783 - protein, 268 aa, Glycine max
  peptide (1)..(268): Ceres Seq. ID no. 14316199
  misc_feature (154)..(252): Pfam Name: Remorin, C-terminal region Pfam Description: Remorin, C-terminal region
  misc_feature (107)..(266): Homolog of NCBI NO: 38344336 NR Description: OSJNBa0058K23.18 [Oryza sativa (japonica
  misc_feature (75)..(263): Homolog of NCBI NO: 15225899 NR Description: remorin [Arabidopsis thaliana]
  misc_feature (44)..(263): Homolog of NCBI NO: 34902218 NR Description: Unknown protein [Oryza sativa (japonica
  misc_feature (80)..(268): Homolog of NCBI NO: 18395321 NR Description: expressed protein [Arabidopsis thaliana]
  misc_feature (64)..(258): Homolog of NCBI NO: 21536537 NR Description: unknown [Arabidopsis thaliana]
  misc_feature (64)..(258): Homolog of NCBI NO: 18408804 NR Description: expressed protein [Arabidopsis thaliana]
  misc_feature (64)..(258): Homolog of NCBI NO: 28393368 NR Description: unknown protein [Arabidopsis thaliana]
  misc_feature (1)..(267): Homolog of NCBI NO: 15028061 NR Description: unknown protein [Arabidopsis thaliana]
  misc_feature (1)..(267): Homolog of NCBI NO: 18419945 NR Description: expressed protein [Arabidopsis thaliana]
  misc_feature (1)..(268): Homolog of NCBI NO: 30693941 NR Description: conserved hypothetical protein [Arabidopsis
MEGSPFTGDGLIICTGGHGGALSVRTEPCMARSASVHGCSKIQSQSSSMPLQEDKFGGFKDVGTNVSRATSRRDMATQMSPQGSSRSSPNLRPSFSASTPSTLPVTELRTVGSSKVDIRDVQVDEHVTVTRWSKKHRALFTGRGSEKVESWKKELSTQSSTWDVSETSKPASKTRSEEAKISAWENLQKAKAEAAIRKLEMKLEKRRASSMDKIMNKLRLAQKKAQEMRSSVPHNQTDRVVRTSHKASSFLRTSQMRSLSGCFTCHVF

SEQ ID NO: 57784 - DNA, 1186 bp, Glycine max
  misc_feature (1)..(1186): Ceres Seq. ID no. 15225673
gttgccttagtctgtgttgagacttgagagttgtgtgcataacacaatcaattaagaagctgtgattctgattcagaatcagaatgttgcgaagatggagcaaagcagttactccaatctccaaatttggatcgcagcagagtcatttgaatttcgtgaaggacgtcacgcgccaaagctacgccggggttgcacccgcgccaacaacgatagaggataaacctcaaccccccgtggttaaacttgacaaaatgttttggtctaagccctgttcgctggccctgccccgggactcacccctcaaagctgaagaacctgattatcagggcatcaagcgtttcatgctcaagctcatgctgttttatagtaagcagagcaagtcaattcgaggcgctaatgttgtgtaccgaagaattgtttctcaaattgataaacctcccatttatgaagtgtttaacttggagaaaacattcaaaacaacattctctttacttgtacttcatatgtggttatgtttgcgtcgcttgaagcaagagggaaatgagggtgttgaatttggccagtacctttatgagatttacaatcatgatgtggagctaagagtctctaaagctggagttaatctactactgactaagtggatgaaagagctcgagaagattttttatgggaacattgttgcttatgatactgccatacttccagaagctaaaccgggtgatttttctaatgttatatggaggaatatattctctgaagatggttcttcaacaccagatgctgctgcatctcaatcagtacaggcgatggccagatatgctcgccgtgaagtaagttgcatgaccttaacagataaagaagcactatattcagggaattttatgttcacctctttgaagcatgagaacagaagcggaaaggggcctcaatgatgaagtggtgatttctaaatttgtgatttagcaaattgaaaatacacgctgttcttattttatttattttttacaaaaaattgttgaataattatgacataaagctcatgtccttctccgtaaggcttttattatacttgattagcttggtgcccagaaactagaactctcatattcttgccctgtaaaatgagaaaagaaaaagggcagaagtgactgaaaaatgttgttctttctcaaaaaaaaaaaaaaaa

SEQ ID NO: 57785 - protein, 282 aa, Glycine max
  peptide (1)..(282): Ceres Seq. ID no. 15225674
  misc_feature (122)..(256): Pfam Name: Ubiquinol-cytochrome C chaperone Pfam Description: Ubiquinol-cytochrome C chaperone
  misc_feature (105)..(272): Homolog of NCBI NO: 13476949 NR Description: unknown protein [Mesorhizobium loti]
  misc_feature (65)..(275): Homolog of NCBI NO: 26346196 NR Description: unnamed protein product [Mus musculus]
  misc_feature (107)..(268): Homolog of NCBI NO: 27380134 NR Description: bll5023 [Bradyrhizobium japonicum]
  misc_feature (92)..(275): Homolog of NCBI NO: 9256564 NR Description: basic FGF repressed, zinc binding protein
  misc_feature (102)..(268): Homolog of NCBI NO: 22964668 NR Description: hypothetical protein [Rhodopseudomonas palustris]
  misc_feature (92)..(271): Homolog of NCBI NO: 39794451 NR Description: Unknown (protein for MGC:76279) [Silurana
  misc_feature (92)..(271): Homolog of NCBI NO: 28558076 NR Description: Basic FGF-repressed Zic binding protein homolog
  misc_feature (52)..(256): Homolog of NCBI NO: 8843859 NR Description: contains similarity to unknown
  misc_feature (37)..(281): Homolog of NCBI NO: 33146996 NR Description: unknown protein [Oryza sativa (japonica
  misc_feature (1)..(274): Homolog of NCBI NO: 30696021 NR Description: expressed protein [Arabidopsis thaliana]
MLRRWSKAVTPISKFGSQQSHLNFVKDVTRQSYAGVAPAPTTIEDKPQPPVVKLDKMFWSKPCSLALPRDSPLKAEEPDYQGIKRFMLKLMLFYSKQSKSIRGANVVYRRIVSQIDKPPIYEVFNLEKTFKTTFSLLVLHMWLCLRRLKQEGNEGVEFGQYLYEIYNHDVELRVSKAGVNLLLTKWMKELEKIFYGNIVAYDTAILPEAKPGDFSNVIWRNIFSEDGSSTPDAAASQSVQAMARYARREVSCMTLTDKEALYSGNFMFTSLKHENRSGKGPQ

SEQ ID NO: 57786 - protein, 226 aa, Glycine max
  peptide (1)..(226): Ceres Seq. ID no. 15225675
  misc_feature (66)..(200): Pfam Name: Ubiquinol-cytochrome C chaperone Pfam Description: Ubiquinol-cytochrome C chaperone
  misc_feature (49)..(216): Homolog of NCBI NO: 13476949 NR Description: unknown protein [Mesorhizobium loti]
  misc_feature (9)..(219): Homolog of NCBI NO: 26346196 NR Description: unnamed protein product [Mus musculus]
  misc_feature (51)..(212): Homolog of NCBI NO: 27380134 NR Description: bll5023 [Bradyrhizobium japonicum]
  misc_feature (36)..(219): Homolog of NCBI NO: 9256564 NR Description: basic FGF repressed, zinc binding protein
  misc_feature (46)..(212): Homolog of NCBI NO: 22964668 NR Description: hypothetical protein [Rhodopseudomonas palustris]
  misc_feature (36)..(215): Homolog of NCBI NO: 39794451 NR Description: Unknown (protein for MGC:76279) [Silurana
  misc_feature (36)..(215): Homolog of NCBI NO: 28558076 NR Description: Basic FGF-repressed Zic binding protein homolog
  misc_feature (1)..(200): Homolog of NCBI NO: 8843859 NR Description: contains similarity to unknown
  misc_feature (1)..(225): Homolog of NCBI NO: 33146996 NR Description: unknown protein [Oryza sativa (japonica
  misc_feature (1)..(218): Homolog of NCBI NO: 30696021 NR Description: expressed protein [Arabidopsis thaliana]
MFWSKPCSLALPRDSPLKAEEPDYQGIKRFMLKLMLFYSKQSKSIRGANVVYRRIVSQIDKPPIYEVFNLEKTFKTTFSLLVLHMWLCLRRLKQEGNEGVEFGQYLYEIYNHDVELRVSKAGVNLLLTKWMKELEKIFYGNIVAYDTAILPEAKPGDFSNVIWRNIFSEDGSSTPDAAASQSVQAMARYARREVSCMTLTDKEALYSGNFMFTSLKHENRSGKGPQ

SEQ ID NO: 57787 - protein, 196 aa, Glycine max
  peptide (1)..(196): Ceres Seq. ID no. 15225676
  misc_feature (36)..(170): Pfam Name: Ubiquinol-cytochrome C chaperone Pfam Description: Ubiquinol-cytochrome C chaperone
  misc_feature (19)..(186): Homolog of NCBI NO: 13476949 NR Description: unknown protein [Mesorhizobium loti]
  misc_feature (1)..(189): Homolog of NCBI NO: 26346196 NR Description: unnamed protein product [Mus musculus]
  misc_feature (21)..(182): Homolog of NCBI NO: 27380134 NR Description: bll5023 [Bradyrhizobium japonicum]
  misc_feature (6)..(189): Homolog of NCBI NO: 9256564 NR Description: basic FGF repressed, zinc binding protein
  misc_feature (16)..(182): Homolog of NCBI NO: 22964668 NR Description: hypothetical protein [Rhodopseudomonas palustris]
  misc_feature (6)..(185): Homolog of NCBI NO: 39794451 NR Description: Unknown (protein for MGC:76279) [Silurana
  misc_feature (6)..(185): Homolog of NCBI NO: 28558076 NR Description: Basic FGF-repressed Zic binding protein homolog
  misc_feature (1)..(170): Homolog of NCBI NO: 8843859 NR Description: contains similarity to unknown
  misc_feature (1)..(195): Homolog of NCBI NO: 33146996 NR Description: unknown protein [Oryza sativa (japonica
  misc_feature (1)..(188): Homolog of NCBI NO: 30696021 NR Description: expressed protein [Arabidopsis thaliana]
MLKLMLFYSKQSKSIRGANVVYRRIVSQIDKPPIYEVFNLEKTFKTTFSLLVLHMWLCLRRLKQEGNEGVEFGQYLYEIYNHDVELRVSKAGVNLLLTKWMKELEKIFYGNIVAYDTAILPEAKPGDFSNVIWRNIFSEDGSSTPDAAASQSVQAMARYARREVSCMTLTDKEALYSGNFMFTSLKHENRSGKGPQ

SEQ ID NO: 57788 - DNA, 1820 bp, Glycine max
  misc_feature (1)..(1820): Ceres Seq. ID no. 14315993
agtattttggttcgtttcttgttaaaaacgcccccatccccttcgtttcccatttccgaggttgttgccggccacccaaacccaattcacatcattatcttttttctttctttcttgtgtttgtgtgtttcctcaaaattcacaattacaatcctcacaatcctcctcccttcatttctcaaattcccaatatttcaccaattcaaaacccttcatcattgatcttttcactcttttcttctttgctcgcaacattcattcacaatttgggtgctccttctgtttcttctcctcaccattggattggataatctgcaatttcttcaattgacaaaagcaacgggagttgggttccaacggaattatggttttcctcattgcgatgtttagggaagccagctatgtcatttgtcttttgctttgagaaacctaatttgtgatttttaaatggaaaagaaaagattggatgactatgaacctggtcctgttccttcaccaagagcattagatagatttgggtttgtaaaacaggatgttaatacttctgaaggcttagtcaagaatagatcagcctacgagtatgagagatatagggaggagagaagggttagaaaatggaggaagatgattggggttggtggcagtgactggaagcattatctaaggagaaaacctcatgttgtgaaaaggcgtataaggaaaggaattcccgattgtttaaggggccttgtttggcaattgatatctggaagtcgagacctattgctgatgaaccctggagtttatgagcaactagtcatatatgagacatctgcctctgaactggatataattcgagatatttctcgaaccttcccttcacatgtattctttcaacagagacatggacctgggcagcggtccctctacaatgttctaaaagcttactctgtctttgacagagatgtaggctatgttcagggcatgggatttttagcggggcttttgcttctttatatgagtgaggaggatgcattttggttgttggtggcattgctaaaaggagccgttcatgctccaatggagggcttgtatctggcaggattgcctctggtacagcaatacctctttcaatttgaatgctcggtgagggagcatctaccaaagttgggagaacatttttcctatgaaatgataaatcctagcatgtatgctagccagtggttcataactgtattttcatattcctttccatttcatttggctcttcgaatttgggatgtcttcctctacgagggtgttaaaattgtctttaaagttggcttggccctattaaagtactgccatgatgacttgattaaactacctttcgaaaaactcatacatgccttgaaaaactttcccgagggtgcaatgaatccggatacattgttaccactggcttattctatcaagatatccaagcgtttagaagaattgaaacaagagtatgagaagaagaatggaaagataagacgatctggagaactttctgaaaaaccaatacttcctagtgtccagggcaattgaagcaggacatatgcaagacaacatttgctggacatgtaaaactattggtaaagctgagcggaggacctcccagtgaaggtctatctttcctgctgggaactaatccattgtgaaaaccataccctcaaattctatgttgagaccatatgttgcatactatgtacagttgtattagttgctcactcttgtcaaaattcagtgttttataaagatgaagttgtctttataaattgtggttattgttattatgcttaattactattttagttccc

SEQ ID NO: 57789 - protein, 366 aa, Glycine max
  peptide (1)..(366): Ceres Seq. ID no. 14315994
  misc_feature (83)..(299): Pfam Name: TBC domain Pfam Description: TBC domain
  misc_feature (31)..(347): Homolog of NCBI NO: 27692588 NR Description: hypothetical protein MGC29047 [Mus musculus]
  misc_feature (31)..(347): Homolog of NCBI NO: 21687020 NR Description: similar to ecotropic viral integration site 5
  misc_feature (31)..(347): Homolog of NCBI NO: 27777640 NR Description: RIKEN cDNA B130050I23 gene [Mus musculus]
  misc_feature (31)..(341): Homolog of NCBI NO: 19923325 NR Description: ecotropic viral integration site 5; Neuroblastoma
  misc_feature (31)..(341): Homolog of NCBI NO: 3095098 NR Description: truncated EVI5 [Homo sapiens]
  misc_feature (1)..(313): Homolog of NCBI NO: 30678579 NR Description: plant adhesion molecule -related [Arabidopsis
  misc_feature (1)..(297): Homolog of NCBI NO: 6957709 NR Description: putative plant adhesion molecule [Arabidopsis
  misc_feature (60)..(347): Homolog of NCBI NO: 22531279 NR Description: plant adhesion molecule PAM1 [Arabidopsis
  misc_feature (1)..(347): Homolog of NCBI NO: 15237222 NR Description: plant adhesion molecule 1 (PAM1) [Arabidopsis
  misc_feature (1)..(347): Homolog of NCBI NO: 18396196 NR Description: plant adhesion molecule -related [Arabidopsis
MEKKRLDDYEPGPVPSPRALDRFGFVKQDVNTSEGLVKNRSAYEYERYREERRVRKWRKMIGVGGSDWKHYLRRKPHVVKRRIRKGIPDCLRGLVWQLISGSRDLLLMNPGVYEQLVIYETSASELDIIRDISRTFPSHVFFQQRHGPGQRSLYNVLKAYSVFDRDVGYVQGMGFLAGLLLLYMSEEDAFWLLVALLKGAVHAPMEGLYLAGLPLVQQYLFQFECSVREHLPKLGEHFSYEMINPSMYASQWFITVFSYSFPFHLALRIWDVFLYEGVKIVFKVGLALLKYCHDDLIKLPFEKLIHALKNFPEGAMNPDTLLPLAYSIKISKRLEELKQEYEKKNGKIRRSGELSEKPILPSVQGN

SEQ ID NO: 57790 - protein, 307 aa, Glycine max
  peptide (1)..(307): Ceres Seq. ID no. 14315995
  misc_feature (24)..(240): Pfam Name: TBC domain Pfam Description: TBC domain
  misc_feature (1)..(288): Homolog of NCBI NO: 27692588 NR Description: hypothetical protein MGC29047 [Mus musculus]
  misc_feature (1)..(288): Homolog of NCBI NO: 21687020 NR Description: similar to ecotropic viral integration site 5
  misc_feature (1)..(288): Homolog of NCBI NO: 27777640 NR Description: RIKEN cDNA B130050I23 gene [Mus musculus]
  misc_feature (1)..(282): Homolog of NCBI NO: 19923325 NR Description: ecotropic viral integration site 5; Neuroblastoma
  misc_feature (1)..(282): Homolog of NCBI NO: 3095098 NR Description: truncated EVI5 [Homo sapiens]
  misc_feature (1)..(254): Homolog of NCBI NO: 30678579 NR Description: plant adhesion molecule -related [Arabidopsis
  misc_feature (1)..(238): Homolog of NCBI NO: 6957709 NR Description: putative plant adhesion molecule [Arabidopsis
  misc_feature (1)..(288): Homolog of NCBI NO: 22531279 NR Description: plant adhesion molecule PAM1 [Arabidopsis
  misc_feature (1)..(288): Homolog of NCBI NO: 15237222 NR Description: plant adhesion molecule 1 (PAM1) [Arabidopsis
  misc_feature (1)..(288): Homolog of NCBI NO: 18396196 NR Description: plant adhesion molecule -related [Arabidopsis
MIGVGGSDWKHYLRRKPHVVKRRIRKGIPDCLRGLVWQLISGSRDLLLMNPGVYEQLVIYETSASELDIIRDISRTFPSHVFFQQRHGPGQRSLYNVLKAYSVFDRDVGYVQGMGFLAGLLLLYMSEEDAFWLLVALLKGAVHAPMEGLYLAGLPLVQQYLFQFECSVREHLPKLGEHFSYEMINPSMYASQWFITVFSYSFPFHLALRIWDVFLYEGVKIVFKVGLALLKYCHDDLIKLPFEKLIHALKNFPEGAMNPDTLLPLAYSIKISKRLEELKQEYEKKNGKIRRSGELSEKPILPSVQGN

SEQ ID NO: 57791 - protein, 259 aa, Glycine max
  peptide (1)..(259): Ceres Seq. ID no. 14315996
  misc_feature (1)..(192): Pfam Name: TBC domain Pfam Description: TBC domain
  misc_feature (1)..(240): Homolog of NCBI NO: 27692588 NR Description: hypothetical protein MGC29047 [Mus musculus]
  misc_feature (1)..(240): Homolog of NCBI NO: 21687020 NR Description: similar to ecotropic viral integration site 5
  misc_feature (1)..(240): Homolog of NCBI NO: 27777640 NR Description: RIKEN cDNA B130050I23 gene [Mus musculus]
  misc_feature (1)..(234): Homolog of NCBI NO: 19923325 NR Description: ecotropic viral integration site 5; Neuroblastoma
  misc_feature (1)..(234): Homolog of NCBI NO: 3095098 NR Description: truncated EVI5 [Homo sapiens]
  misc_feature (1)..(206): Homolog of NCBI NO: 30678579 NR Description: plant adhesion molecule -related [Arabidopsis
  misc_feature (1)..(190): Homolog of NCBI NO: 6957709 NR Description: putative plant adhesion molecule [Arabidopsis
  misc_feature (1)..(240): Homolog of NCBI NO: 22531279 NR Description: plant adhesion molecule PAM1 [Arabidopsis
  misc_feature (1)..(240): Homolog of NCBI NO: 15237222 NR Description: plant adhesion molecule 1 (PAM1) [Arabidopsis
  misc_feature (1)..(240): Homolog of NCBI NO: 18396196 NR Description: plant adhesion molecule -related [Arabidopsis
MNPGVYEQLVIYETSASELDIIRDISRTFPSHVFFQQRHGPGQRSLYNVLKAYSVFDRDVGYVQGMGFLAGLLLLYMSEEDAFWLLVALLKGAVHAPMEGLYLAGLPLVQQYLFQFECSVREHLPKLGEHFSYEMINPSMYASQWFITVFSYSFPFHLALRIWDVFLYEGVKIVFKVGLALLKYCHDDLIKLPFEKLIHALKNFPEGAMNPDTLLPLAYSIKISKRLEELKQEYEKKNGKIRRSGELSEKPILPSVQGN

SEQ ID NO: 57792 - DNA, 1810 bp, Glycine max
  misc_feature (1)..(1810): Ceres Seq. ID no. 15176053
acaacggaaacacacaaacatttcccggtctcaaactcacagaagcagagccatacagtacaggtcgctgatattttctcctccttcctgaatcctgagtgaccaccggtccggtccaccatggctctcgtctggatggtggccgcggccgtggcggcggtgctggcatcgtgggcgttcaacgcgctggtgtacctcgtgtggcggccgcgggccatcacccggcagctccgcgcgcagggcgtcggcgggccgggctacaggttcttcgccgggaacctcgccgagatcaagcggctccgcgccgacagcgccggcgccgcgctggacatcggcaaccacgacttcgtccccatggtccaaccgcacttccgcaaatggatccccatccacgggcgcacgttcctgtactggttcggagccaggccgacactgtgcgtggccgacgtgaacgtggtgaagcaggtgctctccgaccgcagcgggctgtaccccaagagcatcgggaacccgcacatcgcccggctgctcggcaaggggctcgtgctcaccgacggcgacgactggaagcgccaccgcaaggtcgtccaccccgccttcaacatggacaagctcaagatgatgacggtgaccatgtccgactgtgccgggtcaatgatgtccgagtggaaggcaaagatggagaagggcggcagcgtagaggtcgacctgagccaccagtttgaggagctcaccgcggatgtcatctctcacacggcattcggaagcagctacgaacaggggaaaaaggtcttcctggcgcagagggagctccaattccttgccttttccaccgtattcaacgtgcaaatcccagcattcaggtaccttccaactgaaaagaacctcaaaatatggaagcttgacaaagaggtgaggaccatgctgatgaacatcatcaaaggccgtcttgccaccaaagacaccatgggctacggcagcgacctcctcgggcttatgttggaggcgtgcgcgccagaggatgggcaaaatccgcttttgagtatggatgagatcatagatgagtgcaagaccttcttctttgccgggcatgacaccagctcgcacctgctcacatggaccatgttcttgctgagcacgcaccctgagtggcaggagaagctcagggaggaggtgctaagagagtgtggcaacggtgttcccaccggtgacatgctcaacaaactacagctggtcaacatgttcctactagaaactctcaggttatacgcccctgtatcggccattcagaggaaggcgggttcggatctcgaggttggtggcataaaagtgcctgaaggcacggtcttgacgattcccatcgcgacggtacatcgtgacaaggaggtatggggagaagatgccaatgaattcaagcctacgaggttcgagaatggagtgacaagagccggaaagcaccccaatgctttgttgtctttctctagtgggccgaggtcatgcatagggcagaactttgcaatgatcgaggccaaggctgtgatcgctgtgattcttcagagattttcattctccctatcaccgaagtatgtccatgcccccatggatgtgatcacgctgcggcctaagtttgggcttcccatgatcctcaagagcctagagatgtagaaaaatgtatatggtctcaagtataacacatggttttgtattatttgactggagtttagtttatattgcgcactagaaaatcttgtaaaattaccaatgtataatgtatcctatttgtaaatataaataatgaagtgttctattt

SEQ ID NO: 57793 - protein, 514 aa, Glycine max
  peptide (1)..(514): Ceres Seq. ID no. 15176054
  misc_feature (107)..(507): Homolog of NCBI NO: 15888887 NR Description: AGR_C_2890p [Agrobacterium tumefaciens]
  misc_feature (91)..(483): Homolog of NCBI NO: 117162 NR Description: Cytochrome P450 3A12 (CYPIIIA12) (P450-PBD-1)
  misc_feature (100)..(512): Homolog of NCBI NO: 9294385 NR Description: cytochrome P450-like protein [Arabidopsis
  misc_feature (1)..(512): Homolog of NCBI NO: 15234248 NR Description: cytochrome P450 family [Arabidopsis thaliana]
  misc_feature (4)..(513): Homolog of NCBI NO: 14719280 NR Description: cytochrome P450 [Zea mays]
  misc_feature (1)..(514): Homolog of NCBI NO: 34913350 NR Description: putative cytochrome P450 [Oryza sativa (japonica
  misc_feature (4)..(514): Homolog of NCBI NO: 34913346 NR Description: putative cytochrome P450 [Oryza sativa (japonica
  misc_feature (3)..(514): Homolog of NCBI NO: 34913354 NR Description: putative cytochrome P450 [Oryza sativa (japonica
  misc_feature (3)..(514): Homolog of NCBI NO: 22324446 NR Description: putative cytochrome P450 [Oryza sativa (japonica
  misc_feature (1)..(514): Homolog of NCBI NO: 38112707 NR Description: cytochrome P450 [Triticum aestivum]
MALVWMVAAAVAAVLASWAFNALVYLVWRPRAITRQLRAQGVGGPGYRFFAGNLAEIKRLRADSAGAALDIGNHDFVPMVQPHFRKWIPIHGRTFLYWFGARPTLCVADVNVVKQVLSDRSGLYPKSIGNPHIARLLGKGLVLTDGDDWKRHRKVVHPAFNMDKLKMMTVTMSDCAGSMMSEWKAKMEKGGSVEVDLSHQFEELTADVISHTAFGSSYEQGKKVFLAQRELQFLAFSTVFNVQIPAFRYLPTEKNLKIWKLDKEVRTMLMNIIKGRLATKDTMGYGSDLLGLMLEACAPEDGQNPLLSMDEIIDECKTFFFAGHDTSSHLLTWTMFLLSTHPEWQEKLREEVLRECGNGVPTGDMLNKLQLVNMFLLETLRLYAPVSAIQRKAGSDLEVGGIKVPEGTVLTIPIATVHRDKEVWGEDANEFKPTRFENGVTRAGKHPNALLSFSSGPRSCIGQNFAMIEAKAVIAVILQRFSFSLSPKYVHAPMDVITLRPKFGLPMILKSLEM

SEQ ID NO: 57794 - protein, 509 aa, Glycine max
  peptide (1)..(509): Ceres Seq. ID no. 15176055
  misc_feature (102)..(502): Homolog of NCBI NO: 15888887 NR Description: AGR_C_2890p [Agrobacterium tumefaciens]
  misc_feature (86)..(478): Homolog of NCBI NO: 117162 NR Description: Cytochrome P450 3A12 (CYPIIIA12) (P450-PBD-1)
  misc_feature (95)..(507): Homolog of NCBI NO: 9294385 NR Description: cytochrome P450-like protein [Arabidopsis
  misc_feature (1)..(507): Homolog of NCBI NO: 15234248 NR Description: cytochrome P450 family [Arabidopsis thaliana]
  misc_feature (1)..(508): Homolog of NCBI NO: 14719280 NR Description: cytochrome P450 [Zea mays]
  misc_feature (1)..(509): Homolog of NCBI NO: 34913350 NR Description: putative cytochrome P450 [Oryza sativa (japonica
  misc_feature (1)..(509): Homolog of NCBI NO: 34913346 NR Description: putative cytochrome P450 [Oryza sativa (japonica
  misc_feature (1)..(509): Homolog of NCBI NO: 34913354 NR Description: putative cytochrome P450 [Oryza sativa (japonica
  misc_feature (1)..(509): Homolog of NCBI NO: 22324446 NR Description: putative cytochrome P450 [Oryza sativa (japonica
  misc_feature (1)..(509): Homolog of NCBI NO: 38112707 NR Description: cytochrome P450 [Triticum aestivum]
MVAAAVAAVLASWAFNALVYLVWRPRAITRQLRAQGVGGPGYRFFAGNLAEIKRLRADSAGAALDIGNHDFVPMVQPHFRKWIPIHGRTFLYWFGARPTLCVADVNVVKQVLSDRSGLYPKSIGNPHIARLLGKGLVLTDGDDWKRHRKVVHPAFNMDKLKMMTVTMSDCAGSMMSEWKAKMEKGGSVEVDLSHQFEELTADVISHTAFGSSYEQGKKVFLAQRELQFLAFSTVFNVQIPAFRYLPTEKNLKIWKLDKEVRTMLMNIIKGRLATKDTMGYGSDLLGLMLEACAPEDGQNPLLSMDEIIDECKTFFFAGHDTSSHLLTWTMFLLSTHPEWQEKLREEVLRECGNGVPTGDMLNKLQLVNMFLLETLRLYAPVSAIQRKAGSDLEVGGIKVPEGTVLTIPIATVHRDKEVWGEDANEFKPTRFENGVTRAGKHPNALLSFSSGPRSCIGQNFAMIEAKAVIAVILQRFSFSLSPKYVHAPMDVITLRPKFGLPMILKSLEM

SEQ ID NO: 57795 - protein, 436 aa, Glycine max
  peptide (1)..(436): Ceres Seq. ID no. 15176056
  misc_feature (29)..(429): Homolog of NCBI NO: 15888887 NR Description: AGR_C_2890p [Agrobacterium tumefaciens]
  misc_feature (13)..(405): Homolog of NCBI NO: 117162 NR Description: Cytochrome P450 3A12 (CYPIIIA12) (P450-PBD-1)
  misc_feature (22)..(434): Homolog of NCBI NO: 9294385 NR Description: cytochrome P450-like protein [Arabidopsis
  misc_feature (1)..(434): Homolog of NCBI NO: 15234248 NR Description: cytochrome P450 family [Arabidopsis thaliana]
  misc_feature (1)..(435): Homolog of NCBI NO: 14719280 NR Description: cytochrome P450 [Zea mays]
  misc_feature (1)..(436): Homolog of NCBI NO: 34913350 NR Description: putative cytochrome P450 [Oryza sativa (japonica
  misc_feature (1)..(436): Homolog of NCBI NO: 34913346 NR Description: putative cytochrome P450 [Oryza sativa (japonica
  misc_feature (1)..(436): Homolog of NCBI NO: 34913354 NR Description: putative cytochrome P450 [Oryza sativa (japonica
  misc_feature (1)..(436): Homolog of NCBI NO: 22324446 NR Description: putative cytochrome P450 [Oryza sativa (japonica
  misc_feature (1)..(436): Homolog of NCBI NO: 38112707 NR Description: cytochrome P450 [Triticum aestivum]
MVQPHFRKWIPIHGRTFLYWFGARPTLCVADVNVVKQVLSDRSGLYPKSIGNPHIARLLGKGLVLTDGDDWKRHRKVVHPAFNMDKLKMMTVTMSDCAGSMMSEWKAKMEKGGSVEVDLSHQFEELTADVISHTAFGSSYEQGKKVFLAQRELQFLAFSTVFNVQIPAFRYLPTEKNLKIWKLDKEVRTMLMNIIKGRLATKDTMGYGSDLLGLMLEACAPEDGQNPLLSMDEIIDECKTFFFAGHDTSSHLLTWTMFLLSTHPEWQEKLREEVLRECGNGVPTGDMLNKLQLVNMFLLETLRLYAPVSAIQRKAGSDLEVGGIKVPEGTVLTIPIATVHRDKEVWGEDANEFKPTRFENGVTRAGKHPNALLSFSSGPRSCIGQNFAMIEAKAVIAVILQRFSFSLSPKYVHAPMDVITLRPKFGLPMILKSLEM

SEQ ID NO: 57796 - DNA, 1643 bp, Glycine max
  misc_feature (1)..(1643): Ceres Seq. ID no. 13594317
acattgtaacagccaaaggcaggtggaatccaattctcaaaccccaatcgttagactaagcaagaggtcgttcagtgtaagtactccttgttcttgtttctgtttcatcatttttgatcttatgctagtcgaatcaattgtgatgcttagaattagtcaatgaagctccctgtgcgttacttgattgttattttgaccttcgtctgcacctcggtttgctacatcgaacgagttgggttttccatcgcgtacacagttgctgctgacggtgccggagtgaatcaatcgagcaaaggtacaatactgtccaccttctattacggatacgcctgttctcaagttcccggaggatgggcagctcagaaaatcggggggaggagggtcctgcttctttcctttctgttgtggtcattaacttgtgcactacttcctctagatcccaatcgcgttatgcttttagtcattgctcgtttgctcgttggtatagcacaaggcttcattttcccctccatccacacagttctagctcaatgggttccccctcacgagagatctagatccgtctctctcaccacttctgggatgtacctaggtgcagctctaggtatgcttcttcttcctactctagtcaagttcagaggtcctcaatctgtgtttcttgcggaggccgcattgggcgcttcatggtctttactttggttcaaatacgccactgatcccaaatccactgcctctggtgtcggggaatcagtcttgcccgtcaataaaaaaattgacactcacaacaaaaaaccgctttcagccaaaatcccctgggtcaaaattttaaccagcttccctgtgtgggcgattgttgtcaacaatttcacctttcactatgctttatatgtgctcatgaactggctcccaacctactttgaattgggccttcagcttagcctgcaagatatgggttcctctaaaatgatgccctatctcaacatgttcctcttctccaacattggcggtgttgtcgcggactacttgatcaccaggagaatattatctgtcaccaaaaccaggaaattcttgaacactgtcggattcttggttgcttctcttgccttggtgatcattcccagtttcagaacttctggtggtgctgtcttctgttcttccgtggctcttggtttcttggcacttggcagagctggctttgccgtgaaccacatggacattgctcctagatacgctggaatagtgatgggtgtttctaatactgccggtacgttagctggcattgttggcgttgacctgactgggaagcttcttgaagctgctaaggctgctaattctgatctttcaagtccagaaagctggagggcagtgttttccattcctgggtttctatgcatttttagttcttttgtatttctactattttcaactggggagagaatttttgattgaggtaaccttgtcattttcatgactcatcagctgttgttattctgaggatttactttttattacatctccatgttatatcattcttggataggagagctcatattgtcataattggatatgaatttttgttgttattattattatttccccatcttgtaaaaaaaaaaaaaaaaaagcttatcgataccgtcgac

SEQ ID NO: 57797 - protein, 429 aa, Glycine max
  peptide (1)..(429): Ceres Seq. ID no. 13594318
  misc_feature (19)..(428): Pfam Name: Sugar (and other) transporter Pfam Description: Sugar (and other) transporter
  misc_feature (44)..(425): Homolog of NCBI NO: 27370146 NR Description: hypothetical protein 4732491M05 [Mus musculus]
  misc_feature (46)..(426): Homolog of NCBI NO: 33334644 NR Description: glutamate transporter [Xenopus laevis]
  misc_feature (46)..(426): Homolog of NCBI NO: 9945322 NR Description: solute carrier family 17, member 7
  misc_feature (46)..(426): Homolog of NCBI NO: 9966811 NR Description: differentiation-associated Na-dependent inorganic
  misc_feature (46)..(426): Homolog of NCBI NO: 16758166 NR Description: differentation-associated Na-dependent inorganic
  misc_feature (2)..(429): Homolog of NCBI NO: 34903342 NR Description: unnamed protein product [Oryza sativa (japonica
  misc_feature (2)..(429): Homolog of NCBI NO: 17064976 NR Description: putative Na+-dependent inorganic phosphate
  misc_feature (2)..(429): Homolog of NCBI NO: 15227589 NR Description: inorganic phosphate transporter, putative
  misc_feature (2)..(429): Homolog of NCBI NO: 30678625 NR Description: expressed protein [Arabidopsis thaliana]
  misc_feature (3)..(429): Homolog of NCBI NO: 15241475 NR Description: transporter - related [Arabidopsis thaliana]
MKLPVRYLIVILTFVCTSVCYIERVGFSIAYTVAADGAGVNQSSKGTILSTFYYGYACSQVPGGWAAQKIGGRRVLLLSFLLWSLTCALLPLDPNRVMLLVIARLLVGIAQGFIFPSIHTVLAQWVPPHERSRSVSLTTSGMYLGAALGMLLLPTLVKFRGPQSVFLAEAALGASWSLLWFKYATDPKSTASGVGESVLPVNKKIDTHNKKPLSAKIPWVKILTSFPVWAIVVNNFTFHYALYVLMNWLPTYFELGLQLSLQDMGSSKMMPYLNMFLFSNIGGVVADYLITRRILSVTKTRKFLNTVGFLVASLALVIIPSFRTSGGAVFCSSVALGFLALGRAGFAVNHMDIAPRYAGIVMGVSNTAGTLAGIVGVDLTGKLLEAAKAANSDLSSPESWRAVFSIPGFLCIFSSFVFLLFSTGERIFD

SEQ ID NO: 57798 - protein, 332 aa, Glycine max
  peptide (1)..(332): Ceres Seq. ID no. 13594319
  misc_feature (1)..(331): Pfam Name: Sugar (and other) transporter Pfam Description: Sugar (and other) transporter
  misc_feature (1)..(328): Homolog of NCBI NO: 27370146 NR Description: hypothetical protein 4732491M05 [Mus musculus]
  misc_feature (1)..(329): Homolog of NCBI NO: 33334644 NR Description: glutamate transporter [Xenopus laevis]
  misc_feature (1)..(329): Homolog of NCBI NO: 9945322 NR Description: solute carrier family 17, member 7
  misc_feature (1)..(329): Homolog of NCBI NO: 9966811 NR Description: differentiation-associated Na-dependent inorganic
  misc_feature (1)..(329): Homolog of NCBI NO: 16758166 NR Description: differentation-associated Na-dependent inorganic
  misc_feature (1)..(332): Homolog of NCBI NO: 34903342 NR Description: unnamed protein product [Oryza sativa (japonica
  misc_feature (1)..(332): Homolog of NCBI NO: 17064976 NR Description: putative Na+-dependent inorganic phosphate
  misc_feature (1)..(332): Homolog of NCBI NO: 15227589 NR Description: inorganic phosphate transporter, putative
  misc_feature (1)..(332): Homolog of NCBI NO: 30678625 NR Description: expressed protein [Arabidopsis thaliana]
  misc_feature (1)..(332): Homolog of NCBI NO: 15241475 NR Description: transporter - related [Arabidopsis thaliana]
MLLVIARLLVGIAQGFIFPSIHTVLAQWVPPHERSRSVSLTTSGMYLGAALGMLLLPTLVKFRGPQSVFLAEAALGASWSLLWFKYATDPKSTASGVGESVLPVNKKIDTHNKKPLSAKIPWVKILTSFPVWAIVVNNFTFHYALYVLMNWLPTYFELGLQLSLQDMGSSKMMPYLNMFLFSNIGGVVADYLITRRILSVTKTRKFLNTVGFLVASLALVIIPSFRTSGGAVFCSSVALGFLALGRAGFAVNHMDIAPRYAGIVMGVSNTAGTLAGIVGVDLTGKLLEAAKAANSDLSSPESWRAVFSIPGFLCIFSSFVFLLFSTGERIFD

SEQ ID NO: 57799 - protein, 288 aa, Glycine max
  peptide (1)..(288): Ceres Seq. ID no. 13594320
  misc_feature (1)..(287): Pfam Name: Sugar (and other) transporter Pfam Description: Sugar (and other) transporter
  misc_feature (1)..(284): Homolog of NCBI NO: 27370146 NR Description: hypothetical protein 4732491M05 [Mus musculus]
  misc_feature (1)..(285): Homolog of NCBI NO: 33334644 NR Description: glutamate transporter [Xenopus laevis]
  misc_feature (1)..(285): Homolog of NCBI NO: 9945322 NR Description: solute carrier family 17, member 7
  misc_feature (1)..(285): Homolog of NCBI NO: 9966811 NR Description: differentiation-associated Na-dependent inorganic
  misc_feature (1)..(285): Homolog of NCBI NO: 16758166 NR Description: differentation-associated Na-dependent inorganic
  misc_feature (1)..(288): Homolog of NCBI NO: 34903342 NR Description: unnamed protein product [Oryza sativa (japonica
  misc_feature (1)..(288): Homolog of NCBI NO: 17064976 NR Description: putative Na+-dependent inorganic phosphate
  misc_feature (1)..(288): Homolog of NCBI NO: 15227589 NR Description: inorganic phosphate transporter, putative
  misc_feature (1)..(288): Homolog of NCBI NO: 30678625 NR Description: expressed protein [Arabidopsis thaliana]
  misc_feature (1)..(288): Homolog of NCBI NO: 15241475 NR Description: transporter - related [Arabidopsis thaliana]
MYLGAALGMLLLPTLVKFRGPQSVFLAEAALGASWSLLWFKYATDPKSTASGVGESVLPVNKKIDTHNKKPLSAKIPWVKILTSFPVWAIVVNNFTFHYALYVLMNWLPTYFELGLQLSLQDMGSSKMMPYLNMFLFSNIGGVVADYLITRRILSVTKTRKFLNTVGFLVASLALVIIPSFRTSGGAVFCSSVALGFLALGRAGFAVNHMDIAPRYAGIVMGVSNTAGTLAGIVGVDLTGKLLEAAKAANSDLSSPESWRAVFSIPGFLCIFSSFVFLLFSTGERIFD

SEQ ID NO: 57800 - DNA, 1232 bp, Glycine max
  misc_feature (1)..(1232): Ceres Seq. ID no. 12608262
gaattaatagagatacagataacgtgaaactgaaaggaaaatggcactctcagtctcctcaccctcatgcgtacgcgttccttcatgtttttggaaaccaaatggcaagagttgcaaagagcgtactaaggtttcatgtgcagctcacaatgataataagaatccgttggttggaatcggtattggggttgtaacgtcttgtgtgatgggtttaactgcattggatgcggacgccacgagaatcgaatactacgcaacagtggcagagcctttgtgtgagtacaactatgttaagtctggcctcggctactgcgatattgctgagggcttcggtgacgaagctccactgggtgagcttatcaatgttcactatactgcgagattcgctgatgggatagtattcgatagcagctataaacgtgctagacctctcaccatgcgcattggtgtgggcaaggtaatcaagggactggatcaggggattttagggggtgaaggagtacctccaatgcggataggtgggaaacgcaaactgcagattcctccgcacttagcatatggccctgaacctgcagggtgcttctcaggtgactgcaatatacccgccaatgccactcttctgtatgatattaattttgttgaggtttattcggggaacagatcaaagtgaagtcagtcaaaactggtcagatacatatatacatatgaaccacagatggatgggtttagagcaatgaaatggacattttgctagagaatatggatcaacttgtttggcagaatcttcttcctgattacaactacctcaagttactgttcctggttagtggagttgtacatgattgacctggatatcccttttgagagtaatgagcaatccttcctggtgatatatattaagataattcatgtgtatctctgcacatgacatgcgaacagtttgtgcatctttagtgtaaatgtaattttcaatactgctctgaatgataaaaaattgttaattcttcatttgataaatgcctgtctctaatacgtgatatgctttacccttttcaccttcctgtctgaaataggcatggctctacatgcttagagcagtaaaatgcaaagggagaatcataatttcaaaagattaacaggattagcagttaaacgtgttcaaatatgatttctatgctgaattgattaatcacccgtttgcaggtaattcatctaaagttagaaatatgttc

SEQ ID NO: 57801 - protein, 209 aa, Glycine max
  peptide (1)..(209): Ceres Seq. ID no. 12608263
  misc_feature (96)..(200): Pfam Name: FKBP-type peptidyl-prolyl cis-trans isomerase Pfam Description: FKBP-type peptidyl-prolyl cis-trans isomerase
  misc_feature (86)..(202): Homolog of NCBI NO: 33861849 NR Description: FKBP-type peptidyl-prolyl cis-trans isomerase
  misc_feature (86)..(202): Homolog of NCBI NO: 22298646 NR Description: FKBP-type peptidyl-prolyl cis-trans isomerase
  misc_feature (85)..(202): Homolog of NCBI NO: 16329650 NR Description: FKBP-type peptidyl-prolyl cis-trans isomerase
  misc_feature (86)..(205): Homolog of NCBI NO: 22970827 NR Description: hypothetical protein [Chloroflexus aurantiacus]
  misc_feature (96)..(171): Homolog of NCBI NO: 6686802 NR Description: FKBP like protein [Arabidopsis thaliana]
  misc_feature (133)..(209): Homolog of NCBI NO: 15529204 NR Description: AT4g39710/T19P19_100 [Arabidopsis thaliana]
  misc_feature (68)..(200): Homolog of NCBI NO: 21535744 NR Description: FK506 binding protein 1 [Arabidopsis thaliana]
  misc_feature (68)..(200): Homolog of NCBI NO: 15242472 NR Description: FKBP-type peptidyl-prolyl cis-trans isomerase
  misc_feature (14)..(188): Homolog of NCBI NO: 7487207 NR Description: hypothetical protein T19P19.100 - Arabidopsis
  misc_feature (14)..(209): Homolog of NCBI NO: 18420509 NR Description: FKBP-type peptidyl-prolyl cis-trans isomerase,
MALSVSSPSCVRVPSCFWKPNGKSCKERTKVSCAAHNDNKNPLVGIGIGVVTSCVMGLTALDADATRIEYYATVAEPLCEYNYVKSGLGYCDIAEGFGDEAPLGELINVHYTARFADGIVFDSSYKRARPLTMRIGVGKVIKGLDQGILGGEGVPPMRIGGKRKLQIPPHLAYGPEPAGCFSGDCNIPANATLLYDINFVEVYSGNRSK

SEQ ID NO: 57802 - protein, 154 aa, Glycine max
  peptide (1)..(154): Ceres Seq. ID no. 12608264
  misc_feature (41)..(145): Pfam Name: FKBP-type peptidyl-prolyl cis-trans isomerase Pfam Description: FKBP-type peptidyl-prolyl cis-trans isomerase
  misc_feature (31)..(147): Homolog of NCBI NO: 33861849 NR Description: FKBP-type peptidyl-prolyl cis-trans isomerase
  misc_feature (31)..(147): Homolog of NCBI NO: 22298646 NR Description: FKBP-type peptidyl-prolyl cis-trans isomerase
  misc_feature (30)..(147): Homolog of NCBI NO: 16329650 NR Description: FKBP-type peptidyl-prolyl cis-trans isomerase
  misc_feature (31)..(150): Homolog of NCBI NO: 22970827 NR Description: hypothetical protein [Chloroflexus aurantiacus]
  misc_feature (41)..(116): Homolog of NCBI NO: 6686802 NR Description: FKBP like protein [Arabidopsis thaliana]
  misc_feature (78)..(154): Homolog of NCBI NO: 15529204 NR Description: AT4g39710/T19P19_100 [Arabidopsis thaliana]
  misc_feature (13)..(145): Homolog of NCBI NO: 21535744 NR Description: FK506 binding protein 1 [Arabidopsis thaliana]
  misc_feature (13)..(145): Homolog of NCBI NO: 15242472 NR Description: FKBP-type peptidyl-prolyl cis-trans isomerase
  misc_feature (1)..(133): Homolog of NCBI NO: 7487207 NR Description: hypothetical protein T19P19.100 - Arabidopsis
  misc_feature (1)..(154): Homolog of NCBI NO: 18420509 NR Description: FKBP-type peptidyl-prolyl cis-trans isomerase,
MGLTALDADATRIEYYATVAEPLCEYNYVKSGLGYCDIAEGFGDEAPLGELINVHYTARFADGIVFDSSYKRARPLTMRIGVGKVIKGLDQGILGGEGVPPMRIGGKRKLQIPPHLAYGPEPAGCFSGDCNIPANATLLYDINFVEVYSGNRSK

SEQ ID NO: 57803 - DNA, 1199 bp, Glycine max
  misc_feature (1)..(1199): Ceres Seq. ID no. 13594298
acaaccaataccatcaacacttcatttcttactctcactgaaaaaaaatagcttgttcacaccatcctattttttcaactcatatatacaaatatatataacatggcttctaccttctctcgaagcctagcacttgtaagcttttacattgtcgtttgtgctgccggtaacttgaaccaagactttcagcttacgtggggagatggtcgtgctaaaatactcaacaacgaaaatcttctcactctctcccttgacaaggcctctggctctggcttccaatccaaaaacgaatacttatatggcaagattgacatgcagctcaagctcgttcctggaaactctgctggcactgtcaccgcctattatctgtcttcaaaaggatcaacatgggatgagattgacttcgagttcttggggaatctgagtggcgatccatacattctacacaccaatgtgttcagccaaggcaagggcaacagagagcaacaattctatctctggtttgacccaactgcagatttccacacttattcaattctttggaatccccaacgcattgttttttctgtggatggcacccccatcagggaattcaagaatttggaatcaataggagttccttttccaaagagccaaccgatgaggatatactcaagcctatggaacgctgatgattgggccacaaggggtggactcatcaagactgactggtccaaagctcctttcactgcatcctacagaaacttcaacgccaatgcttgtgtttggaactctggaaaatcctcatgcaaatcaaattcttcaccttcctctgcatctcccactaatgcatggttatcacaagagcttgattccactgctcagcagaggttgcgttgggtgcagaagaactacttgatttacaattactgcaccgacaacaagagatttcctcaaggccttccactcgaatgcaaacactcctagagcctataggactcacatctcgcactacccataacaagtgttgcaatataatcttatgaaccattcttttaatttttgtattcctttttttttttttgttcgatgcttgagtgctatagtgctgttattatacaaatatacaatgtaaaaatatcccatgtaaaataatgcttctgtttttttttttaaaaaaaaaataatgcttctcttgtttgtatgactgaattttgtgt

SEQ ID NO: 57804 - protein, 287 aa, Glycine max
  peptide (1)..(287): Ceres Seq. ID no. 13594299
  misc_feature (25)..(205): Pfam Name: Glycosyl hydrolases family 16 Pfam Description: Glycosyl hydrolases family 16
MASTFSRSLALVSFYIVVCAAGNLNQDFQLTWGDGRAKILNNENLLTLSLDKASGSGFQSKNEYLYGKIDMQLKLVPGNSAGTVTAYYLSSKGSTWDEIDFEFLGNLSGDPYILHTNVFSQGKGNREQQFYLWFDPTADFHTYSILWNPQRIVFSVDGTPIREFKNLESIGVPFPKSQPMRIYSSLWNADDWATRGGLIKTDWSKAPFTASYRNFNANACVWNSGKSSCKSNSSPSSASPTNAWLSQELDSTAQQRLRWVQKNYLIYNYCTDNKRFPQGLPLECKHS

SEQ ID NO: 57805 - protein, 217 aa, Glycine max
  peptide (1)..(217): Ceres Seq. ID no. 13594300
  misc_feature (1)..(135): Pfam Name: Glycosyl hydrolases family 16 Pfam Description: Glycosyl hydrolases family 16
MQLKLVPGNSAGTVTAYYLSSKGSTWDEIDFEFLGNLSGDPYILHTNVFSQGKGNREQQFYLWFDPTADFHTYSILWNPQRIVFSVDGTPIREFKNLESIGVPFPKSQPMRIYSSLWNADDWATRGGLIKTDWSKAPFTASYRNFNANACVWNSGKSSCKSNSSPSSASPTNAWLSQELDSTAQQRLRWVQKNYLIYNYCTDNKRFPQGLPLECKHS

SEQ ID NO: 57806 - DNA, 1320 bp, Glycine max
  misc_feature (1)..(1320): Ceres Seq. ID no. 14316277
attccaatagcgaggcgagacatcgattccaaaggtgcgtttctgctgtgctagggtttctgcatcttccacctccgtcgcgatgaaaccaggcttcatctgattccgatttcccttcgctccttctcctccttaacattcatcttcttcgattcctctacaaattatgattattattatgatgaactccatcttcgcctcgcataaccttcgcgtcttcggtcccggcttgaatcccttcgcaccttattgcatcgccaatcactcccttttcctttccctttcctctcgctaaattacaattccctttctttttcctctccaacttctccttctccgtttctccgaacatgtaaattcggaggacaccgtctttgattcggtctatttttttgggggttactttacttcggttacgcgtcgtcgttttgcttttctttgtcgtcgtttttgcgttgcgttgattgctgagaaagaaagaaagaaagaaagatgctggaggaacagcctgttgttttgttcaggaagagcccttccaggaggcgcttgagatctgcttttgctaccgatgataggggttggacctcgcttcatgttttcgctcgaaaaggcgatctcaaattggttaaaaaacttctcaatgaaggaatggatgtcaatgtgtctgcatggggccccaaatcaaaaggggtgacccctctccaccttgctgccgaaggtggtcacattggagtgatggatgtactacttgagtgtggtgctgacattgatgccagaactaagggtgcttgtggctggacgccgctccacattgcagccaaggaaaggaggagggatgctgtgaaattcttgatagagaatggagccttcatgccacctgatatcagtgatagcagatttaacccaccgcttcattactgccccggactggaatgggcctatgaggagatgaagcgacttcgtcaggaagacttgtctgctggagagacatgttacagctctgaaagttaatttgcttttcagggatttggttggtgtttgatagtgtgtttggatgccattcagaggagatcaaagttaatataactagcttttgcgtcacctttacaaatttgacatgaaaatatgctgatacgtacattcagaaagcgtatccagacatgcactgtatctgtattgtatgaataaatgtacaattgaaataaaactactatgtagtgtatggggatgttttactattttagcatcttggatgcccttgtttatggaaacaattatgtacgattattaatgtgatatgctgtgattgttgatgtttcc

SEQ ID NO: 57807 - protein, 172 aa, Glycine max
  peptide (1)..(172): Ceres Seq. ID no. 14316278
  misc_feature (100)..(125): Pfam Name: Ankyrin repeat Pfam Description: Ankyrin repeat
  misc_feature (37)..(125): Homolog of NCBI NO: 28274844 NR Description: ankyrin repeat protein E2_5 [synthetic construct]
  misc_feature (24)..(125): Homolog of NCBI NO: 28274850 NR Description: ankyrin repeat protein E3_19 [synthetic construct]
  misc_feature (24)..(141): Homolog of NCBI NO: 28274852 NR Description: ankyrin repeat protein E4_2 [synthetic construct]
  misc_feature (24)..(125): Homolog of NCBI NO: 28373666 NR Description: Chain A, Sank E3_5: An Artificial Ankyrin Repeat
  misc_feature (29)..(126): Homolog of NCBI NO: 28373835 NR Description: Chain A, 3ank: A Designed Ankyrin Repeat Protein
  misc_feature (29)..(141): Homolog of NCBI NO: 28373837 NR Description: Chain A, 4ank: A Designed Ankyrin Repeat Protein
  misc_feature (24)..(126): Homolog of NCBI NO: 28373837 NR Description: Chain A, 4ank: A Designed Ankyrin Repeat Protein
  misc_feature (1)..(172): Homolog of NCBI NO: 15240185 NR Description: expressed protein [Arabidopsis thaliana]
  misc_feature (1)..(170): Homolog of NCBI NO: 18415625 NR Description: expressed protein [Arabidopsis thaliana]
  misc_feature (1)..(170): Homolog of NCBI NO: 11357401 NR Description: hypothetical protein F13G24.40 - Arabidopsis
MLEEQPVVLFRKSPSRRRLRSAFATDDRGWTSLHVFARKGDLKLVKKLLNEGMDVNVSAWGPKSKGVTPLHLAAEGGHIGVMDVLLECGADIDARTKGACGWTPLHIAAKERRRDAVKFLIENGAFMPPDISDSRFNPPLHYCPGLEWAYEEMKRLRQEDLSAGETCYSSES

SEQ ID NO: 57808 - protein, 120 aa, Glycine max
  peptide (1)..(120): Ceres Seq. ID no. 14316279
  misc_feature (48)..(73): Pfam Name: Ankyrin repeat Pfam Description: Ankyrin repeat
  misc_feature (1)..(73): Homolog of NCBI NO: 28274844 NR Description: ankyrin repeat protein E2_5 [synthetic construct]
  misc_feature (1)..(73): Homolog of NCBI NO: 28274850 NR Description: ankyrin repeat protein E3_19 [synthetic construct]
  misc_feature (1)..(89): Homolog of NCBI NO: 28274852 NR Description: ankyrin repeat protein E4_2 [synthetic construct]
  misc_feature (1)..(73): Homolog of NCBI NO: 28373666 NR Description: Chain A, Sank E3_5: An Artificial Ankyrin Repeat
  misc_feature (1)..(74): Homolog of NCBI NO: 28373835 NR Description: Chain A, 3ank: A Designed Ankyrin Repeat Protein
  misc_feature (1)..(89): Homolog of NCBI NO: 28373837 NR Description: Chain A, 4ank: A Designed Ankyrin Repeat Protein
  misc_feature (1)..(74): Homolog of NCBI NO: 28373837 NR Description: Chain A, 4ank: A Designed Ankyrin Repeat Protein
  misc_feature (1)..(120): Homolog of NCBI NO: 15240185 NR Description: expressed protein [Arabidopsis thaliana]
  misc_feature (1)..(118): Homolog of NCBI NO: 18415625 NR Description: expressed protein [Arabidopsis thaliana]
  misc_feature (1)..(118): Homolog of NCBI NO: 11357401 NR Description: hypothetical protein F13G24.40 - Arabidopsis
MDVNVSAWGPKSKGVTPLHLAAEGGHIGVMDVLLECGADIDARTKGACGWTPLHIAAKERRRDAVKFLIENGAFMPPDISDSRFNPPLHYCPGLEWAYEEMKRLRQEDLSAGETCYSSES

SEQ ID NO: 57809 - protein, 91 aa, Glycine max
  peptide (1)..(91): Ceres Seq. ID no. 14316280
  misc_feature (19)..(44): Pfam Name: Ankyrin repeat Pfam Description: Ankyrin repeat
  misc_feature (1)..(44): Homolog of NCBI NO: 28274844 NR Description: ankyrin repeat protein E2_5 [synthetic construct]
  misc_feature (1)..(44): Homolog of NCBI NO: 28274850 NR Description: ankyrin repeat protein E3_19 [synthetic construct]
  misc_feature (1)..(60): Homolog of NCBI NO: 28274852 NR Description: ankyrin repeat protein E4_2 [synthetic construct]
  misc_feature (1)..(44): Homolog of NCBI NO: 28373666 NR Description: Chain A, Sank E3_5: An Artificial Ankyrin Repeat
  misc_feature (1)..(45): Homolog of NCBI NO: 28373835 NR Description: Chain A, 3ank: A Designed Ankyrin Repeat Protein
  misc_feature (1)..(60): Homolog of NCBI NO: 28373837 NR Description: Chain A, 4ank: A Designed Ankyrin Repeat Protein
  misc_feature (1)..(45): Homolog of NCBI NO: 28373837 NR Description: Chain A, 4ank: A Designed Ankyrin Repeat Protein
  misc_feature (1)..(91): Homolog of NCBI NO: 15240185 NR Description: expressed protein [Arabidopsis thaliana]
  misc_feature (1)..(89): Homolog of NCBI NO: 18415625 NR Description: expressed protein [Arabidopsis thaliana]
  misc_feature (1)..(89): Homolog of NCBI NO: 11357401 NR Description: hypothetical protein F13G24.40 - Arabidopsis
MDVLLECGADIDARTKGACGWTPLHIAAKERRRDAVKFLIENGAFMPPDISDSRFNPPLHYCPGLEWAYEEMKRLRQEDLSAGETCYSSES

SEQ ID NO: 57810 - DNA, 1674 bp, Glycine max
  misc_feature (1)..(1674): Ceres Seq. ID no. 15170350
atctttagtttctttgttgttgttctccaatctgcactgaaacgtggctgaatgcctctctcagtcccagccagagcgagaatccaccatctccatggaccctcctttttcccttccatttccaaaccaaaacaaaaacccatttggccaacccttttgcctctgaatcgcgcattcgggtgcagaagcctcgaaatcgccgtccctagcccctcctcctcgctcccttccaacgttggaccgaatagttggaaacacgtggacgttgccactctgagcaacctctgcgtcgacatcgtcctcaatgtcccgcagttgccccctccctcccctcttcaacgcaaggctttcatggaccgcttggcccaatctccccctgacaagaaatattgggaagctggtgggaactgcaatatggctatagcagctgcaaggttaggactcaactgcatatcaattggtcatgtgggtaatgaaatctatgggaagtttctgtcagatgtgcttcgtgatgagggcattggtttggttgggatgattactaatgacgatatcgtcaacagctctagtggtagtgcctcttgtgaaactcttttatgttgggttcttgttgatcctttacaaagacatggtttttgcagtcgggctgatttttgcgaggagcctatattgcattggatgagtaaattgtccagtgaagttaaaatggctattaaaaattcaaaggtcttgttctgtaatggatatggatttgatgagctctctcctggtgcactactctcagcaatggaatatgctgttgaagttggcacatcaatcttctttgatcctggaccacgtggaaagagtctctccactgggaccccagatgaacaaagagctcttaaccagttactgagaatgagtgatgttcttcttctaacttctgaggaggctgaggaattaaccggcataaacgatccaatattagcagggcaggagtttctcaaaagagggattcgcacaaaatgggtgattgtaaaaatgggttctaagggttcaattcttataacagcatcgagtgtagcttgtgcacctgcattcaaggtgaatgttattgacactgttggatgtggagacagttttgttgctgctattgtctatggttttatacataatatgccactggttaatacattggcaattgcaaatgcagtgggtgctgcaacagccatgggctgtggtgctggtaggaatgtagcaacactggagaatgtagtacatatattaagatcatcaaacctcagcgaagatgatgaattttggattgaaatacttgaaaagaatgtggttactcaggaaataacatacctgtcaaatgttatgaacggaaacaaaaaccgtctcaaccttgtctcatttgacaaggttgcctctgagctcttgcctaagcttgaacttccacaaacagtggggaatgcgccaacttgataggttgtggaaaaatagattgaagtgcattcatgcgaaagaacacttctgattcttgggttcttggctttatcctgtaaaagtaaaaatttaagcattaagactgcagagttttatctctcttgggttacataaattgccgtagctaaattgctttgagcaagtacatgaaaggtagctagcttctcatcaagcactttaacc

SEQ ID NO: 57811 - protein, 472 aa, Glycine max
  peptide (1)..(472): Ceres Seq. ID no. 15170351
  misc_feature (70)..(397): Pfam Name: pfkB family carbohydrate kinase Pfam Description: pfkB family carbohydrate kinase
  misc_feature (245)..(406): Homolog of NCBI NO: 23499772 NR Description: ribokinase, putative [Brucella suis 1330]
  misc_feature (245)..(406): Homolog of NCBI NO: 17988433 NR Description: RIBOKINASE [Brucella melitensis]
  misc_feature (64)..(157): Homolog of NCBI NO: 29833692 NR Description: putative carbohydrate kinase [Streptomyces
  misc_feature (220)..(402): Homolog of NCBI NO: 29833692 NR Description: putative carbohydrate kinase [Streptomyces
  misc_feature (65)..(410): Homolog of NCBI NO: 16081025 NR Description: alternate gene name: yxdC~myo-inositol catabolism
  misc_feature (104)..(409): Homolog of NCBI NO: 34907582 NR Description: putative fructokinase I [Oryza sativa (japonica
  misc_feature (117)..(402): Homolog of NCBI NO: 23100153 NR Description: 2-keto-3-deoxygluconate kinase [Oceanobacillus
  misc_feature (68)..(294): Homolog of NCBI NO: 25373383 NR Description: hypothetical protein [imported] - Arabidopsis
  misc_feature (1)..(462): Homolog of NCBI NO: 34902576 NR Description: Putative sugar kinase [Oryza sativa (japonica
  misc_feature (68)..(463): Homolog of NCBI NO: 15222179 NR Description: expressed protein [Arabidopsis thaliana]
MPLSVPARARIHHLHGPSFFPSISKPKQKPIWPTLLPLNRAFGCRSLEIAVPSPSSSLPSNVGPNSWKHVDVATLSNLCVDIVLNVPQLPPPSPLQRKAFMDRLAQSPPDKKYWEAGGNCNMAIAAARLGLNCISIGHVGNEIYGKFLSDVLRDEGIGLVGMITNDDIVNSSSGSASCETLLCWVLVDPLQRHGFCSRADFCEEPILHWMSKLSSEVKMAIKNSKVLFCNGYGFDELSPGALLSAMEYAVEVGTSIFFDPGPRGKSLSTGTPDEQRALNQLLRMSDVLLLTSEEAEELTGINDPILAGQEFLKRGIRTKWVIVKMGSKGSILITASSVACAPAFKVNVIDTVGCGDSFVAAIVYGFIHNMPLVNTLAIANAVGAATAMGCGAGRNVATLENVVHILRSSNLSEDDEFWIEILEKNVVTQEITYLSNVMNGNKNRLNLVSFDKVASELLPKLELPQTVGNAPT

SEQ ID NO: 57812 - protein, 372 aa, Glycine max
  peptide (1)..(372): Ceres Seq. ID no. 15170352
  misc_feature (1)..(297): Pfam Name: pfkB family carbohydrate kinase Pfam Description: pfkB family carbohydrate kinase
  misc_feature (145)..(306): Homolog of NCBI NO: 23499772 NR Description: ribokinase, putative [Brucella suis 1330]
  misc_feature (145)..(306): Homolog of NCBI NO: 17988433 NR Description: RIBOKINASE [Brucella melitensis]
  misc_feature (1)..(57): Homolog of NCBI NO: 29833692 NR Description: putative carbohydrate kinase [Streptomyces
  misc_feature (120)..(302): Homolog of NCBI NO: 29833692 NR Description: putative carbohydrate kinase [Streptomyces
  misc_feature (1)..(310): Homolog of NCBI NO: 16081025 NR Description: alternate gene name: yxdC~myo-inositol catabolism
  misc_feature (4)..(309): Homolog of NCBI NO: 34907582 NR Description: putative fructokinase I [Oryza sativa (japonica
  misc_feature (17)..(302): Homolog of NCBI NO: 23100153 NR Description: 2-keto-3-deoxygluconate kinase [Oceanobacillus
  misc_feature (1)..(194): Homolog of NCBI NO: 25373383 NR Description: hypothetical protein [imported] - Arabidopsis
  misc_feature (1)..(362): Homolog of NCBI NO: 34902576 NR Description: Putative sugar kinase [Oryza sativa (japonica
  misc_feature (1)..(363): Homolog of NCBI NO: 15222179 NR Description: expressed protein [Arabidopsis thaliana]
MDRLAQSPPDKKYWEAGGNCNMAIAAARLGLNCISIGHVGNEIYGKFLSDVLRDEGIGLVGMITNDDIVNSSSGSASCETLLCWVLVDPLQRHGFCSRADFCEEPILHWMSKLSSEVKMAIKNSKVLFCNGYGFDELSPGALLSAMEYAVEVGTSIFFDPGPRGKSLSTGTPDEQRALNQLLRMSDVLLLTSEEAEELTGINDPILAGQEFLKRGIRTKWVIVKMGSKGSILITASSVACAPAFKVNVIDTVGCGDSFVAAIVYGFIHNMPLVNTLAIANAVGAATAMGCGAGRNVATLENVVHILRSSNLSEDDEFWIEILEKNVVTQEITYLSNVMNGNKNRLNLVSFDKVASELLPKLELPQTVGNAPT

SEQ ID NO: 57813 - protein, 351 aa, Glycine max
  peptide (1)..(351): Ceres Seq. ID no. 15170353
  misc_feature (1)..(276): Pfam Name: pfkB family carbohydrate kinase Pfam Description: pfkB family carbohydrate kinase
  misc_feature (124)..(285): Homolog of NCBI NO: 23499772 NR Description: ribokinase, putative [Brucella suis 1330]
  misc_feature (124)..(285): Homolog of NCBI NO: 17988433 NR Description: RIBOKINASE [Brucella melitensis]
  misc_feature (1)..(36): Homolog of NCBI NO: 29833692 NR Description: putative carbohydrate kinase [Streptomyces
  misc_feature (99)..(281): Homolog of NCBI NO: 29833692 NR Description: putative carbohydrate kinase [Streptomyces
  misc_feature (1)..(289): Homolog of NCBI NO: 16081025 NR Description: alternate gene name: yxdC~myo-inositol catabolism
  misc_feature (1)..(288): Homolog of NCBI NO: 34907582 NR Description: putative fructokinase I [Oryza sativa (japonica
  misc_feature (1)..(281): Homolog of NCBI NO: 23100153 NR Description: 2-keto-3-deoxygluconate kinase [Oceanobacillus
  misc_feature (1)..(173): Homolog of NCBI NO: 25373383 NR Description: hypothetical protein [imported] - Arabidopsis
  misc_feature (1)..(341): Homolog of NCBI NO: 34902576 NR Description: Putative sugar kinase [Oryza sativa (japonica
  misc_feature (1)..(342): Homolog of NCBI NO: 15222179 NR Description: expressed protein [Arabidopsis thaliana]
MAIAAARLGLNCISIGHVGNEIYGKFLSDVLRDEGIGLVGMITNDDIVNSSSGSASCETLLCWVLVDPLQRHGFCSRADFCEEPILHWMSKLSSEVKMAIKNSKVLFCNGYGFDELSPGALLSAMEYAVEVGTSIFFDPGPRGKSLSTGTPDEQRALNQLLRMSDVLLLTSEEAEELTGINDPILAGQEFLKRGIRTKWVIVKMGSKGSILITASSVACAPAFKVNVIDTVGCGDSFVAAIVYGFIHNMPLVNTLAIANAVGAATAMGCGAGRNVATLENVVHILRSSNLSEDDEFWIEILEKNVVTQEITYLSNVMNGNKNRLNLVSFDKVASELLPKLELPQTVGNAPT

SEQ ID NO: 57814 - DNA, 874 bp, Glycine max
  misc_feature (1)..(874): Ceres Seq. ID no. 14316176
actcacaaccacaacacaacgcggcagagcgaagagaaggggcaaaagagaaagaagcgcttatcgaactcggacggaagcactgagttgactcggagggagtggaaagtgttgttgcgtaatgtctggtggtatcgctcgtggacgcctcaccgaggagcgcaagtcgtggcggaagaaccatccccatggttttgttgcgaagccggagacgctgcccgatggaaccgtgaatttgatggtgtggcattgcactattcccgggaagactgggactgattgggagggtggctacttcccacttacgctgcactttagtgaagactaccctagcaagcctccaaagtgtaaattcccacaaggtttcttccaccctaatgtttatccttctgggactgtttgcttgtctatacttaacgaggatagtgggtggaggccagccataacagttaagcaaattctcgtgggcatccaagacttacttgaccagccaaatcctgctgaccctgcccagacagaaggctatcatctattcatccaggatgcagcagagtacaagagaagggtccgccagcaggcaaagcaatatccacctcttctctagggttgcatcagctaaatttatgaactatttttactatggcagatgtttcttcttttgtcccgtgttaaaactgtgttgtcattgtgattaatggctgccataacattaaacatgaatgttttagctatttatgattactcccagatctggaagaagtgttaatatataaaaaaaatgtgaaagtcaaccaatgaatacttgttggtgacatgtttctgatgtttgctgctacatttttatatgaatggatcattactataagtctataac

SEQ ID NO: 57815 - protein, 160 aa, Glycine max
  peptide (1)..(160): Ceres Seq. ID no. 14316177
  misc_feature (4)..(158): Homolog of NCBI NO: 4507785 NR Description: ubiquitin-conjugating enzyme E2I
  misc_feature (4)..(158): Homolog of NCBI NO: 2194010 NR Description: Chain A, Human Ubiquitin-Conjugating Enzyme Ubc9
  misc_feature (4)..(160): Homolog of NCBI NO: 30584109 NR Description: Homo sapiens ubiquitin-conjugating enzyme E2I
  misc_feature (4)..(158): Homolog of NCBI NO: 7621708 NR Description: putative E2 enzyme Ubc9 [Dictyostelium discoideum]
  misc_feature (3)..(160): Homolog of NCBI NO: 38345867 NR Description: OSJNBa0064M23.9 [Oryza sativa (japonica
  misc_feature (35)..(160): Homolog of NCBI NO: 11272348 NR Description: ubiquitin-conjugating enzyme
  misc_feature (1)..(160): Homolog of NCBI NO: 15230881 NR Description: ubiquitin-conjugating enzyme, putative
  misc_feature (1)..(160): Homolog of NCBI NO: 37536440 NR Description: putative ubiquitin-conjugating enzyme
  misc_feature (1)..(160): Homolog of NCBI NO: 25446690 NR Description: Putative ubiquitin-conjugating enzyme
  misc_feature (1)..(160): Homolog of NCBI NO: 20975734 NR Description: putative ubiquitin-conjugating enzyme [Populus
MSGGIARGRLTEERKSWRKNHPHGFVAKPETLPDGTVNLMVWHCTIPGKTGTDWEGGYFPLTLHFSEDYPSKPPKCKFPQGFFHPNVYPSGTVCLSILNEDSGWRPAITVKQILVGIQDLLDQPNPADPAQTEGYHLFIQDAAEYKRRVRQQAKQYPPLL

SEQ ID NO: 57816 - protein, 121 aa, Glycine max
  peptide (1)..(121): Ceres Seq. ID no. 14316178
  misc_feature (1)..(119): Homolog of NCBI NO: 4507785 NR Description: ubiquitin-conjugating enzyme E2I
  misc_feature (1)..(119): Homolog of NCBI NO: 2194010 NR Description: Chain A, Human Ubiquitin-Conjugating Enzyme Ubc9
  misc_feature (1)..(121): Homolog of NCBI NO: 30584109 NR Description: Homo sapiens ubiquitin-conjugating enzyme E2I
  misc_feature (1)..(119): Homolog of NCBI NO: 7621708 NR Description: putative E2 enzyme Ubc9 [Dictyostelium discoideum]
  misc_feature (1)..(121): Homolog of NCBI NO: 38345867 NR Description: OSJNBa0064M23.9 [Oryza sativa (japonica
  misc_feature (1)..(121): Homolog of NCBI NO: 11272348 NR Description: ubiquitin-conjugating enzyme
  misc_feature (1)..(121): Homolog of NCBI NO: 15230881 NR Description: ubiquitin-conjugating enzyme, putative
  misc_feature (1)..(121): Homolog of NCBI NO: 37536440 NR Description: putative ubiquitin-conjugating enzyme
  misc_feature (1)..(121): Homolog of NCBI NO: 25446690 NR Description: Putative ubiquitin-conjugating enzyme
  misc_feature (1)..(121): Homolog of NCBI NO: 20975734 NR Description: putative ubiquitin-conjugating enzyme [Populus
MVWHCTIPGKTGTDWEGGYFPLTLHFSEDYPSKPPKCKFPQGFFHPNVYPSGTVCLSILNEDSGWRPAITVKQILVGIQDLLDQPNPADPAQTEGYHLFIQDAAEYKRRVRQQAKQYPPLL

SEQ ID NO: 57817 - protein, 92 aa, Glycine max
  peptide (1)..(92): Ceres Seq. ID no. 14316179
THNHNTTRQSEEKGQKRKKRLSNSDGSTELTRREWKVLLRNVWWYRSWTPHRGAQVVAEEPSPWFCCEAGDAARWNREFDGVALHYSREDWD

SEQ ID NO: 57818 - DNA, 1968 bp, Glycine max
  misc_feature (1)..(1968): Ceres Seq. ID no. 15168429
aaaatcacaatcacaagttaagcctcttccacgcgcttcttgagcgactgaatcttaagccagaaacagcaccatctatcacgctctgccactgcatgtggttttaaatactttaacctcactcacatttctctctctctctctctctcactaatctctcgttgataaacacaatcaacaatcttgttcaaacaccccacgagcttctccagcattttcaatcctcttctcttttatcctcatcgctctgcaccaaaacctccccactcctcaattatttatttatctctcccactttttctcacacacattttctcaaacacatggtgtcctcactccttcacttcactctagcttaaataacccaacaaagttcacttcaaacctcaaccatggccctcgaaacgctcctcgtgaaggtcaaaaccgccatatcaaacagcatcgactcggtcccgccgaagctcctgaagaagaagccttctttcaaagcgaagcaaaacgtcggcgttttggcgttcgagatcggcggcgtgatgtcgaagctcctccacctctggcactcgctctccgacgcaaccatcgtgcgcgtccgaaacgacgccgtgaacctcgagggcgttcggaagatcatctccaacgacgagtcgttcctcctcggactcgcctgcgccgagttctccgagtcgctccgagtcgccgctaactcggtgacgcggctcagcgcgcgctgcgaggattccgccctgcgctccttccacctggccttcctcgagttcgcggactcgggccgcgacccgaacgggtgggccctctccggcccaaaagaaaccgattcgaagctcaagaaaatggagcgttacgtgacgttcacggcaacactctaccgcgaaatggaggagctcacggttcttgaaaactccttaagaaaagccctgaatcacgctgacggcaacagcgttgggagcaaagatcagcagaagctctacgagcttcagcagaagatcttttggcagaagcaagaggtgaaggatctaaaagaaagatctttatggagcagaagcttcgacaatgttgttgtactcctcgtaaggttcagcttcaccgttttagcaaggattaaggttgtcttcggaatcggtcaccacatgccttgtctgtctcgtactttgtcggcttccgccactgtttatccgtctgatcaaaaccctaatgggttcgtttatgagtcattggaagaagaagactcgaagcttgaagaagaggccgtgaatgggttttttgaggcaaactcgaagcttttgagaccacccgagagcacgctgggtgctgcgggtttggctttgcattacgcgaatctgatcatagtgatggagaagatgataaagtcaccgcacttggtgggtgtggatgcgagggatgatttgtatgggatgttgccgaggagcataaggtggggtttgaggggaaggttgagaggggtggggttttgtgcgagtgatcctctgctcgctggtgagtggagagatgcgttagggagaatattggggtggttgtcacctttggcacataacatgatcaagtggcaaagtgagagaagctttgagcaacacaatttggtgcccaagaccaatgtgttgttgttgcagactttgtttttcgctaacaaggacaagactgaggctgccatcactgaacttcttgtggggttgaactatatttggaggtttgagagggaaatgactgctaaggctttgtttgaatgcgccaattctaatgggctattgttaaagttgaacaaatccagtcaatgagagaggttcatatatatatatatgatgagtttcttttagtttcttactatttcttcacaggggctcgaattgtgtctctcttgaagtttaattttatgggggttgatcattttagacgatgtattgaaattgaatcgagtgatcgatcgatgat

SEQ ID NO: 57819 - protein, 473 aa, Glycine max
  peptide (1)..(473): Ceres Seq. ID no. 15168430
  misc_feature (310)..(397): Pfam Name: Protein of unknown function (DUF668) Pfam Description: Protein of unknown function (DUF668)
  misc_feature (309)..(461): Homolog of NCBI NO: 15228977 NR Description: hypothetical protein [Arabidopsis thaliana]
  misc_feature (29)..(248): Homolog of NCBI NO: 15228977 NR Description: hypothetical protein [Arabidopsis thaliana]
  misc_feature (309)..(461): Homolog of NCBI NO: 7939524 NR Description: contains similarity to unknown
  misc_feature (1)..(248): Homolog of NCBI NO: 7939524 NR Description: contains similarity to unknown
  misc_feature (1)..(85): Homolog of NCBI NO: 27754455 NR Description: unknown protein [Arabidopsis thaliana]
  misc_feature (171)..(462): Homolog of NCBI NO: 27754455 NR Description: unknown protein [Arabidopsis thaliana]
  misc_feature (284)..(464): Homolog of NCBI NO: 15238198 NR Description: expressed protein [Arabidopsis thaliana]
  misc_feature (27)..(253): Homolog of NCBI NO: 15238198 NR Description: expressed protein [Arabidopsis thaliana]
  misc_feature (1)..(451): Homolog of NCBI NO: 30102981 NR Description: hypothetical protein [Oryza sativa (japonica
  misc_feature (1)..(462): Homolog of NCBI NO: 15242144 NR Description: expressed protein [Arabidopsis thaliana]
MALETLLVKVKTAISNSIDSVPPKLLKKKPSFKAKQNVGVLAFEIGGVMSKLLHLWHSLSDATIVRVRNDAVNLEGVRKIISNDESFLLGLACAEFSESLRVAANSVTRLSARCEDSALRSFHLAFLEFADSGRDPNGWALSGPKETDSKLKKMERYVTFTATLYREMEELTVLENSLRKALNHADGNSVGSKDQQKLYELQQKIFWQKQEVKDLKERSLWSRSFDNVVVLLVRFSFTVLARIKVVFGIGHHMPCLSRTLSASATVYPSDQNPNGFVYESLEEEDSKLEEEAVNGFFEANSKLLRPPESTLGAAGLALHYANLIIVMEKMIKSPHLVGVDARDDLYGMLPRSIRWGLRGRLRGVGFCASDPLLAGEWRDALGRILGWLSPLAHNMIKWQSERSFEQHNLVPKTNVLLLQTLFFANKDKTEAAITELLVGLNYIWRFEREMTAKALFECANSNGLLLKLNKSSQ

SEQ ID NO: 57820 - protein, 425 aa, Glycine max
  peptide (1)..(425): Ceres Seq. ID no. 15168431
  misc_feature (262)..(349): Pfam Name: Protein of unknown function (DUF668) Pfam Description: Protein of unknown function (DUF668)
  misc_feature (261)..(413): Homolog of NCBI NO: 15228977 NR Description: hypothetical protein [Arabidopsis thaliana]
  misc_feature (1)..(200): Homolog of NCBI NO: 15228977 NR Description: hypothetical protein [Arabidopsis thaliana]
  misc_feature (261)..(413): Homolog of NCBI NO: 7939524 NR Description: contains similarity to unknown
  misc_feature (1)..(200): Homolog of NCBI NO: 7939524 NR Description: contains similarity to unknown
  misc_feature (1)..(37): Homolog of NCBI NO: 27754455 NR Description: unknown protein [Arabidopsis thaliana]
  misc_feature (123)..(414): Homolog of NCBI NO: 27754455 NR Description: unknown protein [Arabidopsis thaliana]
  misc_feature (236)..(416): Homolog of NCBI NO: 15238198 NR Description: expressed protein [Arabidopsis thaliana]
  misc_feature (1)..(205): Homolog of NCBI NO: 15238198 NR Description: expressed protein [Arabidopsis thaliana]
  misc_feature (1)..(403): Homolog of NCBI NO: 30102981 NR Description: hypothetical protein [Oryza sativa (japonica
  misc_feature (1)..(414): Homolog of NCBI NO: 15242144 NR Description: expressed protein [Arabidopsis thaliana]
MSKLLHLWHSLSDATIVRVRNDAVNLEGVRKIISNDESFLLGLACAEFSESLRVAANSVTRLSARCEDSALRSFHLAFLEFADSGRDPNGWALSGPKETDSKLKKMERYVTFTATLYREMEELTVLENSLRKALNHADGNSVGSKDQQKLYELQQKIFWQKQEVKDLKERSLWSRSFDNVVVLLVRFSFTVLARIKVVFGIGHHMPCLSRTLSASATVYPSDQNPNGFVYESLEEEDSKLEEEAVNGFFEANSKLLRPPESTLGAAGLALHYANLIIVMEKMIKSPHLVGVDARDDLYGMLPRSIRWGLRGRLRGVGFCASDPLLAGEWRDALGRILGWLSPLAHNMIKWQSERSFEQHNLVPKTNVLLLQTLFFANKDKTEAAITELLVGLNYIWRFEREMTAKALFECANSNGLLLKLNKSSQ

SEQ ID NO: 57821 - protein, 320 aa, Glycine max
  peptide (1)..(320): Ceres Seq. ID no. 15168432
  misc_feature (157)..(244): Pfam Name: Protein of unknown function (DUF668) Pfam Description: Protein of unknown function (DUF668)
  misc_feature (1)..(95): Homolog of NCBI NO: 12003396 NR Description: Avr9/Cf-9 rapidly elicited protein 137 [Nicotiana
  misc_feature (156)..(308): Homolog of NCBI NO: 15228977 NR Description: hypothetical protein [Arabidopsis thaliana]
  misc_feature (1)..(95): Homolog of NCBI NO: 15228977 NR Description: hypothetical protein [Arabidopsis thaliana]
  misc_feature (156)..(308): Homolog of NCBI NO: 7939524 NR Description: contains similarity to unknown
  misc_feature (1)..(95): Homolog of NCBI NO: 7939524 NR Description: contains similarity to unknown
  misc_feature (18)..(309): Homolog of NCBI NO: 27754455 NR Description: unknown protein [Arabidopsis thaliana]
  misc_feature (131)..(311): Homolog of NCBI NO: 15238198 NR Description: expressed protein [Arabidopsis thaliana]
  misc_feature (1)..(100): Homolog of NCBI NO: 15238198 NR Description: expressed protein [Arabidopsis thaliana]
  misc_feature (1)..(298): Homolog of NCBI NO: 30102981 NR Description: hypothetical protein [Oryza sativa (japonica
  misc_feature (1)..(309): Homolog of NCBI NO: 15242144 NR Description: expressed protein [Arabidopsis thaliana]
MERYVTFTATLYREMEELTVLENSLRKALNHADGNSVGSKDQQKLYELQQKIFWQKQEVKDLKERSLWSRSFDNVVVLLVRFSFTVLARIKVVFGIGHHMPCLSRTLSASATVYPSDQNPNGFVYESLEEEDSKLEEEAVNGFFEANSKLLRPPESTLGAAGLALHYANLIIVMEKMIKSPHLVGVDARDDLYGMLPRSIRWGLRGRLRGVGFCASDPLLAGEWRDALGRILGWLSPLAHNMIKWQSERSFEQHNLVPKTNVLLLQTLFFANKDKTEAAITELLVGLNYIWRFEREMTAKALFECANSNGLLLKLNKSSQ

SEQ ID NO: 57822 - DNA, 881 bp, Glycine max
  misc_feature (1)..(881): Ceres Seq. ID no. 15168573
atttccattagagagaaaatagagatcaagcgcagacatgggaacttaacaaaggaagaaacgcgaattgatgatggaggtcaccaaagacgaagctgcaaccccaggagcaggaggtgctcaacctcgcaatccaaatccaaatccaaatccaactccaaatccaaaccctaaccctaaccctcctcacaccaccagaggatctaaaggaaaatcgtgtaagggatgcacctactactcatcgcttcataaagccaagtccaaaaaccccacatgcgttggtttctccagaacactccagcaagtacccccctttgttgtcggagaatctgagttggaagcttccaaagagggccgcagccttaccaatttcaagtatgcatgtgttggatactctgtctacttagacaacaaagattcttcagctgactcgcaggataaaacagcaaaattgcccttttgcgttggtcttgaggtggtcttagaggagaaagcttcaaattcacatgcaggccatgttcctgctactcataaaactgaagatgaacatgctgctcctcaacctagaagatatatacctccaaatcatacgacagagttcttgaacaggtttcaaagaaatgcaggcctggtggcatctggtgttgccaaaaacttgaacagagtgggtaactatgtgaaagatctcctaaatgacattctaaactaattctacaatgcaccttgcatgggtggtacattcatgctcccttatgttgatttttcatttcaatcctcaccccctaatgtgcaaggcgcattatagaactactccgacattctatttaggcgaacgacggtgacaactgtagttcgtgtacgaaataaattcaattttacac

SEQ ID NO: 57823 - protein, 212 aa, Glycine max
  peptide (1)..(212): Ceres Seq. ID no. 15168574
  misc_feature (38)..(212): Homolog of NCBI NO: 15230397 NR Description: expressed protein [Arabidopsis thaliana]
MMEVTKDEAATPGAGGAQPRNPNPNPNPTPNPNPNPNPPHTTRGSKGKSCKGCTYYSSLHKAKSKNPTCVGFSRTLQQVPPFVVGESELEASKEGRSLTNFKYACVGYSVYLDNKDSSADSQDKTAKLPFCVGLEVVLEEKASNSHAGHVPATHKTEDEHAAPQPRRYIPPNHTTEFLNRFQRNAGLVASGVAKNLNRVGNYVKDLLNDILN

SEQ ID NO: 57824 - protein, 211 aa, Glycine max
  peptide (1)..(211): Ceres Seq. ID no. 15168575
  misc_feature (37)..(211): Homolog of NCBI NO: 15230397 NR Description: expressed protein [Arabidopsis thaliana]
MEVTKDEAATPGAGGAQPRNPNPNPNPTPNPNPNPNPPHTTRGSKGKSCKGCTYYSSLHKAKSKNPTCVGFSRTLQQVPPFVVGESELEASKEGRSLTNFKYACVGYSVYLDNKDSSADSQDKTAKLPFCVGLEVVLEEKASNSHAGHVPATHKTEDEHAAPQPRRYIPPNHTTEFLNRFQRNAGLVASGVAKNLNRVGNYVKDLLNDILN

SEQ ID NO: 57825 - DNA, 945 bp, Glycine max
  misc_feature (1)..(945): Ceres Seq. ID no. 15176643
ataaaatattaattatttagttaaaaggccaatcctttattcacaatggctgaggaacaaactactcaagttgccgaactcggtgaagaacaaaagaacttccaagctcaattcaagcttttcggtaagttcgactactccgaaatcaaggttgaagatgtctgcttcaaggattacatcgccgtcagcaacatcaagtcccaagtcttcatcccccacactgctggtagatggcaaatcaagaaattcagaaaggcccaatgccccatcgtcgaaagactcattggctctatcatgttccacggaagaaacactggtaagaagaacctcgccatcagaatcgtcaagcacgctttcgaaatcatccacatcatgactggcaagaaccccatccaagtcttcatcgaagccgtccaaaacggtggtgccagagaaggctctaccagaatcggtactggtggtgtcgtcagaagacaagccgtcgacgtttccccccttaagagagctaacctctccatctacttcatgaccgtcggtgccagaaaggccgctttcaagagcatgaagtccatcgctgaatgcttggctgatgaaatcatgaactgcgccaagaactcccccaactccactgccatcagaaagagagatgataccgaaagcgtgcttgacgattctgatggcgaggttcttcttaccagtgtttcttccgtggaacatgatagagccaatgagtctttcgacgatggggcattgggcctttctgaatttcttgatttgcctcttctgtgtaggggatggagttttttggattcttatatacttgcagatgtactcgggctttattgattctgatagcagacattttccctccatttttcatccatggttctcgagtgtttgaaccccccttccttttctgctttgaattaaagattcgtgttttat

SEQ ID NO: 57826 - protein, 266 aa, Glycine max
  peptide (1)..(266): Ceres Seq. ID no. 15176644
  misc_feature (58)..(206): Pfam Name: Ribosomal protein S7p/S5e Pfam Description: Ribosomal protein S7p/S5e
  misc_feature (3)..(206): Homolog of NCBI NO: 585948 NR Description: 40S RIBOSOMAL PROTEIN S5
  misc_feature (20)..(206): Homolog of NCBI NO: 34893994 NR Description: putative 40S ribosomal protein S5
  misc_feature (21)..(206): Homolog of NCBI NO: 23482155 NR Description: ribosomal protein S7 [Plasmodium yoelii yoelii]
  misc_feature (10)..(206): Homolog of NCBI NO: 21617886 NR Description: 40S ribosomal protein S5 [Arabidopsis thaliana]
  misc_feature (14)..(206): Homolog of NCBI NO: 15229897 NR Description: 40S ribosomal protein S5 (RPS5B) [Arabidopsis
  misc_feature (10)..(206): Homolog of NCBI NO: 15228111 NR Description: 40S ribosomal protein S5 (RPS5A) [Arabidopsis
  misc_feature (21)..(206): Homolog of NCBI NO: 23612587 NR Description: 40S ribosomal protein S5, putative [Plasmodium
  misc_feature (20)..(206): Homolog of NCBI NO: 6831665 NR Description: 40S RIBOSOMAL PROTEIN S5
  misc_feature (24)..(206): Homolog of NCBI NO: 32399008 NR Description: ribosomal protein S5, probable [Cryptosporidium
  misc_feature (22)..(206): Homolog of NCBI NO: 32400987 NR Description: 40S ribosome protein S5 [Griffithsia japonica]
MAEEQTTQVAELGEEQKNFQAQFKLFGKFDYSEIKVEDVCFKDYIAVSNIKSQVFIPHTAGRWQIKKFRKAQCPIVERLIGSIMFHGRNTGKKNLAIRIVKHAFEIIHIMTGKNPIQVFIEAVQNGGAREGSTRIGTGGVVRRQAVDVSPLKRANLSIYFMTVGARKAAFKSMKSIAECLADEIMNCAKNSPNSTAIRKRDDTESVLDDSDGEVLLTSVSSVEHDRANESFDDGALGLSEFLDLPLLCRGWSFLDSYILADVLGLY

SEQ ID NO: 57827 - protein, 183 aa, Glycine max
  peptide (1)..(183): Ceres Seq. ID no. 15176645
  misc_feature (1)..(123): Pfam Name: Ribosomal protein S7p/S5e Pfam Description: Ribosomal protein S7p/S5e
  misc_feature (1)..(123): Homolog of NCBI NO: 585948 NR Description: 40S RIBOSOMAL PROTEIN S5
  misc_feature (1)..(123): Homolog of NCBI NO: 34893994 NR Description: putative 40S ribosomal protein S5
  misc_feature (1)..(123): Homolog of NCBI NO: 23482155 NR Description: ribosomal protein S7 [Plasmodium yoelii yoelii]
  misc_feature (1)..(123): Homolog of NCBI NO: 21617886 NR Description: 40S ribosomal protein S5 [Arabidopsis thaliana]
  misc_feature (1)..(123): Homolog of NCBI NO: 15229897 NR Description: 40S ribosomal protein S5 (RPS5B) [Arabidopsis
  misc_feature (1)..(123): Homolog of NCBI NO: 15228111 NR Description: 40S ribosomal protein S5 (RPS5A) [Arabidopsis
  misc_feature (1)..(123): Homolog of NCBI NO: 23612587 NR Description: 40S ribosomal protein S5, putative [Plasmodium
  misc_feature (1)..(123): Homolog of NCBI NO: 6831665 NR Description: 40S RIBOSOMAL PROTEIN S5
  misc_feature (1)..(123): Homolog of NCBI NO: 32399008 NR Description: ribosomal protein S5, probable [Cryptosporidium
  misc_feature (1)..(123): Homolog of NCBI NO: 32400987 NR Description: 40S ribosome protein S5 [Griffithsia japonica]
MFHGRNTGKKNLAIRIVKHAFEIIHIMTGKNPIQVFIEAVQNGGAREGSTRIGTGGVVRRQAVDVSPLKRANLSIYFMTVGARKAAFKSMKSIAECLADEIMNCAKNSPNSTAIRKRDDTESVLDDSDGEVLLTSVSSVEHDRANESFDDGALGLSEFLDLPLLCRGWSFLDSYILADVLGLY

SEQ ID NO: 57828 - protein, 157 aa, Glycine max
  peptide (1)..(157): Ceres Seq. ID no. 15176646
  misc_feature (1)..(97): Pfam Name: Ribosomal protein S7p/S5e Pfam Description: Ribosomal protein S7p/S5e
  misc_feature (1)..(97): Homolog of NCBI NO: 585948 NR Description: 40S RIBOSOMAL PROTEIN S5
  misc_feature (1)..(97): Homolog of NCBI NO: 34893994 NR Description: putative 40S ribosomal protein S5
  misc_feature (1)..(97): Homolog of NCBI NO: 23482155 NR Description: ribosomal protein S7 [Plasmodium yoelii yoelii]
  misc_feature (1)..(97): Homolog of NCBI NO: 21617886 NR Description: 40S ribosomal protein S5 [Arabidopsis thaliana]
  misc_feature (1)..(97): Homolog of NCBI NO: 15229897 NR Description: 40S ribosomal protein S5 (RPS5B) [Arabidopsis
  misc_feature (1)..(97): Homolog of NCBI NO: 15228111 NR Description: 40S ribosomal protein S5 (RPS5A) [Arabidopsis
  misc_feature (1)..(97): Homolog of NCBI NO: 23612587 NR Description: 40S ribosomal protein S5, putative [Plasmodium
  misc_feature (1)..(97): Homolog of NCBI NO: 6831665 NR Description: 40S RIBOSOMAL PROTEIN S5
  misc_feature (1)..(97): Homolog of NCBI NO: 32399008 NR Description: ribosomal protein S5, probable [Cryptosporidium
  misc_feature (1)..(97): Homolog of NCBI NO: 32400987 NR Description: 40S ribosome protein S5 [Griffithsia japonica]
MTGKNPIQVFIEAVQNGGAREGSTRIGTGGVVRRQAVDVSPLKRANLSIYFMTVGARKAAFKSMKSIAECLADEIMNCAKNSPNSTAIRKRDDTESVLDDSDGEVLLTSVSSVEHDRANESFDDGALGLSEFLDLPLLCRGWSFLDSYILADVLGLY

SEQ ID NO: 57829 - DNA, 1295 bp, Glycine max
  misc_feature (1)..(1295): Ceres Seq. ID no. 15168545
gttggttaacggatctagaatttgttgaagcaggaaccgctccatctcgccccgcgccaaaccatttgatttcaaagcggagatttagggactgcaaattctctgcttctctacacatggagccggtgtcgcgtgctaatttcttttcattccaaagattttggctaccgtttcagggacagggagggatgaggcagcaagttgatccctcggctcacacaatcaagtcccatggagcatcacttgcaagaaaacacgctcgtgattggcttatattgctgcttctcatagtgatagagattgtcctttttgtcattcatccatttaaacgctttgtgggaagggacatgatggaggaccttagatatcctatgaaagaaaacacggtgcctgtatgggctgttcctttatatgcggttctgttgccaatggccgttttccttctcttctatatgcgcaggagagatgtttatgatttgcaccacagtgttctaggtttgttatttgctgttctgataactggggtcttcaccgatgcaataaaaaatgcagttggccggcctcgcccagacttctattggcgttgcttccccgatggggtagagaattatgatagttggggaggtgtggtatgtcatggcaatgctagcgatataaaagaaggacacaagagtttcccaagcggccatacatcatggtcctttgcaggtctaggttttctgtctctgtacctatcggggaagattaaagcttttgatcgcaaagggcacgtggcaaaattatgcattgtgtttcttcctctacttgttgcttgcctagttgcaatctctcgagtggatgactattggcaccattggcaagatgtgtttgccggaggcattctagggcttgttgtggcaaccttttgttatatgcagttcttccctgcgccctataatgatgaaggatggggtccatatgcatatttccgggcaatggaggaatcacgagcgaatgcaaatattaatcgggaattaccagttgggcaggccatggaggatcgggtaacgaatcaagaaccaaggagaaatggtgataccacctttaccccttactcttaccgtagcccaaccttggaagccatggaaatgggacagaagtaatagtcttctatagcactaatcttctccctagctacctagttccttacttttgtgtatacttatgagcttctctacacggcaaccactagatttagctaattgtgcagcttctgtttcttcttgcattattattattattggcactgccactgt

SEQ ID NO: 57830 - protein, 379 aa, Glycine max
  peptide (1)..(379): Ceres Seq. ID no. 15168546
  misc_feature (136)..(311): Pfam Name: PAP2 superfamily Pfam Description: PAP2 superfamily
  misc_feature (72)..(335): Homolog of NCBI NO: 38637528 NR Description: unknown protein [Oryza sativa (japonica
  misc_feature (73)..(373): Homolog of NCBI NO: 34910912 NR Description: putative phosphatidic acid phosphatase beta
  misc_feature (66)..(329): Homolog of NCBI NO: 15218051 NR Description: phosphatidic acid phosphatase (PAP2) family
  misc_feature (65)..(360): Homolog of NCBI NO: 25353094 NR Description: probable phosphatidic acid phosphatase
  misc_feature (72)..(357): Homolog of NCBI NO: 18396250 NR Description: phosphatidic acid phosphatase (PAP2) family
  misc_feature (72)..(357): Homolog of NCBI NO: 6957723 NR Description: putative phosphatidate phosphohydrolase
  misc_feature (46)..(360): Homolog of NCBI NO: 21554001 NR Description: putative phosphatidic acid phosphatase
  misc_feature (46)..(360): Homolog of NCBI NO: 18379166 NR Description: phosphatidic acid phosphatase (PAP2) family
  misc_feature (46)..(360): Homolog of NCBI NO: 15724220 NR Description: At2g01180/F10A8.6 [Arabidopsis thaliana]
  misc_feature (25)..(378): Homolog of NCBI NO: 9621903 NR Description: phosphatidic acid phosphatase alpha [Vigna
WLTDLEFVEAGTAPSRPAPNHLISKRRFRDCKFSASLHMEPVSRANFFSFQRFWLPFQGQGGMRQQVDPSAHTIKSHGASLARKHARDWLILLLLIVIEIVLFVIHPFKRFVGRDMMEDLRYPMKENTVPVWAVPLYAVLLPMAVFLLFYMRRRDVYDLHHSVLGLLFAVLITGVFTDAIKNAVGRPRPDFYWRCFPDGVENYDSWGGVVCHGNASDIKEGHKSFPSGHTSWSFAGLGFLSLYLSGKIKAFDRKGHVAKLCIVFLPLLVACLVAISRVDDYWHHWQDVFAGGILGLVVATFCYMQFFPAPYNDEGWGPYAYFRAMEESRANANINRELPVGQAMEDRVTNQEPRRNGDTTFTPYSYRSPTLEAMEMGQK

SEQ ID NO: 57831 - protein, 341 aa, Glycine max
  peptide (1)..(341): Ceres Seq. ID no. 15168547
  misc_feature (98)..(273): Pfam Name: PAP2 superfamily Pfam Description: PAP2 superfamily
  misc_feature (34)..(297): Homolog of NCBI NO: 38637528 NR Description: unknown protein [Oryza sativa (japonica
  misc_feature (35)..(335): Homolog of NCBI NO: 34910912 NR Description: putative phosphatidic acid phosphatase beta
  misc_feature (28)..(291): Homolog of NCBI NO: 15218051 NR Description: phosphatidic acid phosphatase (PAP2) family
  misc_feature (27)..(322): Homolog of NCBI NO: 25353094 NR Description: probable phosphatidic acid phosphatase
  misc_feature (34)..(319): Homolog of NCBI NO: 18396250 NR Description: phosphatidic acid phosphatase (PAP2) family
  misc_feature (34)..(319): Homolog of NCBI NO: 6957723 NR Description: putative phosphatidate phosphohydrolase
  misc_feature (8)..(322): Homolog of NCBI NO: 21554001 NR Description: putative phosphatidic acid phosphatase
  misc_feature (8)..(322): Homolog of NCBI NO: 18379166 NR Description: phosphatidic acid phosphatase (PAP2) family
  misc_feature (8)..(322): Homolog of NCBI NO: 15724220 NR Description: At2g01180/F10A8.6 [Arabidopsis thaliana]
  misc_feature (1)..(340): Homolog of NCBI NO: 9621903 NR Description: phosphatidic acid phosphatase alpha [Vigna
MEPVSRANFFSFQRFWLPFQGQGGMRQQVDPSAHTIKSHGASLARKHARDWLILLLLIVIEIVLFVIHPFKRFVGRDMMEDLRYPMKENTVPVWAVPLYAVLLPMAVFLLFYMRRRDVYDLHHSVLGLLFAVLITGVFTDAIKNAVGRPRPDFYWRCFPDGVENYDSWGGVVCHGNASDIKEGHKSFPSGHTSWSFAGLGFLSLYLSGKIKAFDRKGHVAKLCIVFLPLLVACLVAISRVDDYWHHWQDVFAGGILGLVVATFCYMQFFPAPYNDEGWGPYAYFRAMEESRANANINRELPVGQAMEDRVTNQEPRRNGDTTFTPYSYRSPTLEAMEMGQK

SEQ ID NO: 57832 - protein, 317 aa, Glycine max
  peptide (1)..(317): Ceres Seq. ID no. 15168548
  misc_feature (74)..(249): Pfam Name: PAP2 superfamily Pfam Description: PAP2 superfamily
  misc_feature (10)..(273): Homolog of NCBI NO: 38637528 NR Description: unknown protein [Oryza sativa (japonica
  misc_feature (11)..(311): Homolog of NCBI NO: 34910912 NR Description: putative phosphatidic acid phosphatase beta
  misc_feature (4)..(267): Homolog of NCBI NO: 15218051 NR Description: phosphatidic acid phosphatase (PAP2) family
  misc_feature (3)..(298): Homolog of NCBI NO: 25353094 NR Description: probable phosphatidic acid phosphatase
  misc_feature (10)..(295): Homolog of NCBI NO: 18396250 NR Description: phosphatidic acid phosphatase (PAP2) family
  misc_feature (10)..(295): Homolog of NCBI NO: 6957723 NR Description: putative phosphatidate phosphohydrolase
  misc_feature (1)..(298): Homolog of NCBI NO: 21554001 NR Description: putative phosphatidic acid phosphatase
  misc_feature (1)..(298): Homolog of NCBI NO: 18379166 NR Description: phosphatidic acid phosphatase (PAP2) family
  misc_feature (1)..(298): Homolog of NCBI NO: 15724220 NR Description: At2g01180/F10A8.6 [Arabidopsis thaliana]
  misc_feature (1)..(316): Homolog of NCBI NO: 9621903 NR Description: phosphatidic acid phosphatase alpha [Vigna
MRQQVDPSAHTIKSHGASLARKHARDWLILLLLIVIEIVLFVIHPFKRFVGRDMMEDLRYPMKENTVPVWAVPLYAVLLPMAVFLLFYMRRRDVYDLHHSVLGLLFAVLITGVFTDAIKNAVGRPRPDFYWRCFPDGVENYDSWGGVVCHGNASDIKEGHKSFPSGHTSWSFAGLGFLSLYLSGKIKAFDRKGHVAKLCIVFLPLLVACLVAISRVDDYWHHWQDVFAGGILGLVVATFCYMQFFPAPYNDEGWGPYAYFRAMEESRANANINRELPVGQAMEDRVTNQEPRRNGDTTFTPYSYRSPTLEAMEMGQK

SEQ ID NO: 57833 - DNA, 1249 bp, Glycine max
  misc_feature (1)..(1249): Ceres Seq. ID no. 15171766
aaaaccataaccgttgttgaacctccgaaaaacaagactccctccaagaagaaaaatgctgaaagccgtggcgccactcttcagccgtagccacaagcagcagtctcggtccttcaaggagtactacgcagagtggttcaacaccctcaagaacaaccacctccccctcctccgccactccatctccggcgactccctcaccattctctccacccacgtcgagatgctccaccagcacttccagtcctactaccacgccctcgacgccgccgccacctccgacgcctcccagctcctctcccaggagtggcgcaactccctcgagaaacccctcctctggctcggcgacctccacccctccctcttcaccaacctcgcccgctccttcctccaagacgaacattcccccgaccacaccgacgacgaagatgattccgatccccaccaccaccaccaccaccaccaccactttcccctccccgaacgcccctggcaggtggcgatggcctggcgcaacccttcggaggctctaactgcccgcatggaccagatcgagtgcggcctccgcgtgattgtaccggccctttcggaccgcctgaaacacgcggaggacgcattcgtgggccgcgtaatggggaactggttccgctgccgtgaccatcatcacaagggcagcggagcctcgtccaaggttgctgtgggggccgatgtgaaggcccacatggaggagctcgtgagcgtgttcctctacgcaaaccgcctcaggaggaacgtgcttgtggacatacttagtgccaccaccgtttaccaggccgcgctgtttcttgaagggttggcccagtttcttattgggttcagggaccatgggttggtgaacgccgttgaacactgcaaggccttgcctctcgcaaacaataaacagtgtcgtcctcgctgccattgatgatgataatgcaacagtgtatgtatctatttcgttcctctcattgtgattgtgtggaacttttcgtggaaaaatactgtggaatggatggttactgtgttttaggtttagcattgatattctttacaattttgttgtttgtatttgataagatttttaggtttggaagatgacactggagacttaatttctgtgtcaatggattaattacgttttgtatttgtggagggaataagtgttagtgaacactgaacagtttcttcaattgagggaaatttctgttaacaatgttgatggatttgcagt

SEQ ID NO: 57834 - protein, 295 aa, Glycine max
  peptide (1)..(295): Ceres Seq. ID no. 15171767
  misc_feature (12)..(277): Homolog of NCBI NO: 15235715 NR Description: hypothetical protein [Arabidopsis thaliana]
MLKAVAPLFSRSHKQQSRSFKEYYAEWFNTLKNNHLPLLRHSISGDSLTILSTHVEMLHQHFQSYYHALDAAATSDASQLLSQEWRNSLEKPLLWLGDLHPSLFTNLARSFLQDEHSPDHTDDEDDSDPHHHHHHHHHFPLPERPWQVAMAWRNPSEALTARMDQIECGLRVIVPALSDRLKHAEDAFVGRVMGNWFRCRDHHHKGSGASSKVAVGADVKAHMEELVSVFLYANRLRRNVLVDILSATTVYQAALFLEGLAQFLIGFRDHGLVNAVEHCKALPLANNKQCRPRCH

SEQ ID NO: 57835 - protein, 239 aa, Glycine max
  peptide (1)..(239): Ceres Seq. ID no. 15171768
  misc_feature (1)..(221): Homolog of NCBI NO: 15235715 NR Description: hypothetical protein [Arabidopsis thaliana]
MLHQHFQSYYHALDAAATSDASQLLSQEWRNSLEKPLLWLGDLHPSLFTNLARSFLQDEHSPDHTDDEDDSDPHHHHHHHHHFPLPERPWQVAMAWRNPSEALTARMDQIECGLRVIVPALSDRLKHAEDAFVGRVMGNWFRCRDHHHKGSGASSKVAVGADVKAHMEELVSVFLYANRLRRNVLVDILSATTVYQAALFLEGLAQFLIGFRDHGLVNAVEHCKALPLANNKQCRPRCH

SEQ ID NO: 57836 - DNA, 1300 bp, Glycine max
  misc_feature (1)..(1300): Ceres Seq. ID no. 15168591
gatatattaaaattagtcgattaaaattgaaatttccacaaacgtaacactcgaagaactatcctccttcttcttcgtttctatggtcactacttgtcggcactcatgtccaaaccaaaacacttgtaatttaaatccaacgttgctctctgttaacctataattccccgaagaaatctccgcaaacatgaaaacagagcatcatagaagaccttcaccttcgttaacacctatactcgtcaaaagagcaaaacccgccgcgtattttattctccttttgctaacgtacaccttaggttacttatcccaccacccttcttccacttcattaccactctcaccatcatcgtcgccatcgccatcgtcgttagaacctattattcggttctcaattaacaccaccgaggtgaacccgttccgagtcacaactcgctgcgccgatccaattccgccggagtccgttcgccggacgctcgttgaccgcctcttcaacggcacctcgccgtttgaaaactttccgccgccgcatgcggcggcaaagctccggcgaacgactaaagtcaagggatggggctccaccggcaaggttttcgagaatctcatccgccgggtgcggccgcgaaccgtcgtggaagttggcacgttcctcggcgcgtcggcgatacacatggccgagttgactcggcgactcggcctcgaaactcagatcctctgcgtcgacgactttcgaggctgggccgggttcagggaccggttcagtaaaataccgatgcaaaacggtgacgtttggctcttttaccagttccttcagaatgtggttacttttaaccagaccgggtcggtaatgcccgttccattttcgagcgggtcgaccctgatgttgttttgcgagtggggggtgtttgcggatttgattgagatcgatgctggccacgattttttatcggcctgggccgatattaatcgtggatttcggatcctccaacccggtggggttatattcgggcacgattatttcaccgcagcggataatagaggtgttcggagagccgttgatttgtttgccaaagtcaacaatcttaaggtaaatgttgatggtcaacattgggttatttattcttcctaatgtttagaatttcatgtatcgtgtatagtggaaaacatctgtttattgaataagttgataggattctttgggtgtataaattatacaatttgaaggaaggaaagacttgcggactttttgttatccattgtcctttcagtggtcaataattcaatttgaagcttccgtttcagt

SEQ ID NO: 57837 - protein, 312 aa, Glycine max
  peptide (1)..(312): Ceres Seq. ID no. 15168592
  misc_feature (24)..(311): Homolog of NCBI NO: 15223338 NR Description: hypothetical protein [Arabidopsis thaliana]
MKTEHHRRPSPSLTPILVKRAKPAAYFILLLLTYTLGYLSHHPSSTSLPLSPSSSPSPSSLEPIIRFSINTTEVNPFRVTTRCADPIPPESVRRTLVDRLFNGTSPFENFPPPHAAAKLRRTTKVKGWGSTGKVFENLIRRVRPRTVVEVGTFLGASAIHMAELTRRLGLETQILCVDDFRGWAGFRDRFSKIPMQNGDVWLFYQFLQNVVTFNQTGSVMPVPFSSGSTLMLFCEWGVFADLIEIDAGHDFLSAWADINRGFRILQPGGVIFGHDYFTAADNRGVRRAVDLFAKVNNLKVNVDGQHWVIYSS

SEQ ID NO: 57838 - DNA, 963 bp, Glycine max
  misc_feature (1)..(963): Ceres Seq. ID no. 13594304
agaacacctaatcgaaaaatttttacggcactgagtgaggtggttcactgtctctgcctctttctcttctttgttcctagaaacaaaccatcatcttcttagatctataccaacgtcgaaggaaataatctcttgccaaaagcaaaaccctaaacacttcctccgagtatttaccagaaccatagtttttaaaagctgagagcgtcaaaggcacagctgtcgcgtgggaagatcccaatgtgtgctagaaattaaaaagatcattgacaccattgccgaagaaggggtctgtgacctcactcgcgtccctcttcccagtagaggaggtgcagaaggtggccaagcgcattgaagacaccattgccgacaagcagagcgaaattaaccgcgtacgaggttttgtcgtcgacaaaacagcctcatcaacctcgtccacaagctccttgaacagctctcctacgacatcatggttccgtttgggaaagcaacattcttcccaggtcgtttgattcacaccaatgagttcctggttcttttgggagaaggatattatgctgagagaacttcgaagcaaaccgttgagattttacagcgaagagggaagtccttggattcgcgggttgattctcttgaggccaatatcaaggaccctgaagcagaggcttcatttctcaatgccacggcttcatttttggttgctaggttcttttgggagaagggtattatgttgaatttttaatgctgaaatgctgaatttgttctatgttaattcttccattaaaaatattgggaattttgattttttatctcaaacgtgtagagagactggagagcctgtgaccgtcaatttttatgtgtacaatggaagcaatttttcatgttaattctgcagttcaattcaacttcaaaaaaaaaaaaaaaaaagcttatcgataccgtcgacctcgagggggggcccggtac

SEQ ID NO: 57839 - protein, 90 aa, Glycine max
  peptide (1)..(90): Ceres Seq. ID no. 13594305
  misc_feature (1)..(74): Pfam Name: Prefoldin subunit Pfam Description: Prefoldin subunit
  misc_feature (1)..(55): Homolog of NCBI NO: 29841259 NR Description: hypothetical protein, putative prefoldin
  misc_feature (1)..(68): Homolog of NCBI NO: 34855762 NR Description: similar to NNX3 [Rattus norvegicus]
  misc_feature (1)..(68): Homolog of NCBI NO: 19924159 NR Description: RPB5-mediating protein isoform a
  misc_feature (1)..(68): Homolog of NCBI NO: 34191784 NR Description: Unknown (protein for IMAGE:4821488) [Homo sapiens]
  misc_feature (1)..(68): Homolog of NCBI NO: 20139325 NR Description: RNA polymerase II subunit 5-mediating protein
  misc_feature (1)..(68): Homolog of NCBI NO: 19924161 NR Description: RPB5-mediating protein isoform b
  misc_feature (1)..(74): Homolog of NCBI NO: 30678662 NR Description: expressed protein [Arabidopsis thaliana]
  misc_feature (1)..(74): Homolog of NCBI NO: 25406740 NR Description: hypothetical protein [imported] - Arabidopsis
  misc_feature (1)..(74): Homolog of NCBI NO: 34907082 NR Description: OSJNBa0052O12.6 [Oryza sativa (japonica
MVPFGKATFFPGRLIHTNEFLVLLGEGYYAERTSKQTVEILQRRGKSLDSRVDSLEANIKDPEAEASFLNATASFLVARFFWEKGIMLNF

SEQ ID NO: 57840 - protein, 70 aa, Glycine max
  peptide (1)..(70): Ceres Seq. ID no. 13594306
MSSWFFWEKDIMLRELRSKPLRFYSEEGSPWIRGLILLRPISRTLKQRLHFSMPRLHFWLLGSFGRRVLC

SEQ ID NO: 57841 - protein, 59 aa, Glycine max
  peptide (1)..(59): Ceres Seq. ID no. 13594307
MLRELRSKPLRFYSEEGSPWIRGLILLRPISRTLKQRLHFSMPRLHFWLLGSFGRRVLC

SEQ ID NO: 57842 - DNA, 1095 bp, Glycine max
  misc_feature (1)..(1095): Ceres Seq. ID no. 14313959
acaaactcacttcacctgtttcgtgcaaaaacaattcctgttgtctctccacagtccctccctcacattctctctctagctttttagagagagagagagagaagaagaagaagacatggagatcaagaagaggtttggggtgttgatgtgtgcagaggattcggagtacgtgaaaaaagtgtacggagggtattctggggttttcgtgagaatgctggcggaggagggagagacatgggacgtgtacaaggtggcgcgtggggagtttcctgacgaagatgatttgggtctctatgatgggtttgtgatcactggcagctgcagtgacgcacatggcaacgacacatgggtcagtgatcttctcaacttgcttcgcaaactcgattccatcaacaccaagatcctcggcatttgctttggccaccagatacttgggcgtgcattgggagggaaggtgactcgttctactactggatgggatcttggtgtcagaaccataacattgtcaccatctttgcgatttgctttgtcttctcttgatcttccatcaagactttccattatcgaatgccacagggatgagatccgagagctaccagccaaggcagaggttattgcttggtcggataagactggaattgaaatgttcaggtatggagatcacattatgggaatccaaggtcaccctgagtactccaaagacattcttttgcaccttattgaccgtctcattcaacgcaattacatcatagatgcttttggtaaacaagcaagggagagggctgcgttgtgggagccagatagggaggcttggaagaaactctgtgtcacttttttgaagggtagattgtgacataaaaatggcattgaaaagaggaatttcagttctgtaaagaagcgataatatttaaaagtagtcgtatgggaggggtctatgcatagaagttataggttggtagcactaatgtggtgtgttaattagttggctttgttaggttgccagccattaatgttgataggtgctttctatgtaagctcaactatatcaatggtcaaataattagagcaataaaaagtttcagtgttctcccgttt

SEQ ID NO: 57843 - protein, 245 aa, Glycine max
  peptide (1)..(245): Ceres Seq. ID no. 14313960
  misc_feature (34)..(213): Pfam Name: Glutamine amidotransferase class-I Pfam Description: Glutamine amidotransferase class-I
  misc_feature (1)..(211): Homolog of NCBI NO: 15224078 NR Description: defense-related protein, putative [Arabidopsis
  misc_feature (4)..(245): Homolog of NCBI NO: 14009290 NR Description: defense-related protein [Brassica carinata]
  misc_feature (4)..(245): Homolog of NCBI NO: 21593315 NR Description: defense-related protein [Arabidopsis thaliana]
  misc_feature (4)..(245): Homolog of NCBI NO: 15234763 NR Description: glutamine amidotransferase class-I
  misc_feature (5)..(245): Homolog of NCBI NO: 15234765 NR Description: glutamine amidotransferase class-I
  misc_feature (1)..(243): Homolog of NCBI NO: 21555885 NR Description: unknown [Arabidopsis thaliana]
  misc_feature (1)..(243): Homolog of NCBI NO: 17381294 NR Description: AT4g30550/F17I23_110 [Arabidopsis thaliana]
  misc_feature (1)..(243): Homolog of NCBI NO: 15234767 NR Description: glutamine amidotransferase class-I
  misc_feature (4)..(244): Homolog of NCBI NO: 15224079 NR Description: defense-related protein, putative [Arabidopsis
  misc_feature (7)..(245): Homolog of NCBI NO: 13174241 NR Description: putative glutamine synthetase [Oryza sativa]
MEIKKRFGVLMCAEDSEYVKKVYGGYSGVFVRMLAEEGETWDVYKVARGEFPDEDDLGLYDGFVITGSCSDAHGNDTWVSDLLNLLRKLDSINTKILGICFGHQILGRALGGKVTRSTTGWDLGVRTITLSPSLRFALSSLDLPSRLSIIECHRDEIRELPAKAEVIAWSDKTGIEMFRYGDHIMGIQGHPEYSKDILLHLIDRLIQRNYIIDAFGKQARERAALWEPDREAWKKLCVTFLKGRL

SEQ ID NO: 57844 - protein, 235 aa, Glycine max
  peptide (1)..(235): Ceres Seq. ID no. 14313961
  misc_feature (24)..(203): Pfam Name: Glutamine amidotransferase class-I Pfam Description: Glutamine amidotransferase class-I
  misc_feature (1)..(201): Homolog of NCBI NO: 15224078 NR Description: defense-related protein, putative [Arabidopsis
  misc_feature (1)..(235): Homolog of NCBI NO: 14009290 NR Description: defense-related protein [Brassica carinata]
  misc_feature (1)..(235): Homolog of NCBI NO: 21593315 NR Description: defense-related protein [Arabidopsis thaliana]
  misc_feature (1)..(235): Homolog of NCBI NO: 15234763 NR Description: glutamine amidotransferase class-I
  misc_feature (1)..(235): Homolog of NCBI NO: 15234765 NR Description: glutamine amidotransferase class-I
  misc_feature (1)..(233): Homolog of NCBI NO: 21555885 NR Description: unknown [Arabidopsis thaliana]
  misc_feature (1)..(233): Homolog of NCBI NO: 17381294 NR Description: AT4g30550/F17I23_110 [Arabidopsis thaliana]
  misc_feature (1)..(233): Homolog of NCBI NO: 15234767 NR Description: glutamine amidotransferase class-I
  misc_feature (1)..(234): Homolog of NCBI NO: 15224079 NR Description: defense-related protein, putative [Arabidopsis
  misc_feature (1)..(235): Homolog of NCBI NO: 13174241 NR Description: putative glutamine synthetase [Oryza sativa]
MCAEDSEYVKKVYGGYSGVFVRMLAEEGETWDVYKVARGEFPDEDDLGLYDGFVITGSCSDAHGNDTWVSDLLNLLRKLDSINTKILGICFGHQILGRALGGKVTRSTTGWDLGVRTITLSPSLRFALSSLDLPSRLSIIECHRDEIRELPAKAEVIAWSDKTGIEMFRYGDHIMGIQGHPEYSKDILLHLIDRLIQRNYIIDAFGKQARERAALWEPDREAWKKLCVTFLKGRL

SEQ ID NO: 57845 - protein, 213 aa, Glycine max
  peptide (1)..(213): Ceres Seq. ID no. 14313962
  misc_feature (2)..(181): Pfam Name: Glutamine amidotransferase class-I Pfam Description: Glutamine amidotransferase class-I
  misc_feature (1)..(179): Homolog of NCBI NO: 15224078 NR Description: defense-related protein, putative [Arabidopsis
  misc_feature (1)..(213): Homolog of NCBI NO: 14009290 NR Description: defense-related protein [Brassica carinata]
  misc_feature (1)..(213): Homolog of NCBI NO: 21593315 NR Description: defense-related protein [Arabidopsis thaliana]
  misc_feature (1)..(213): Homolog of NCBI NO: 15234763 NR Description: glutamine amidotransferase class-I
  misc_feature (1)..(213): Homolog of NCBI NO: 15234765 NR Description: glutamine amidotransferase class-I
  misc_feature (1)..(211): Homolog of NCBI NO: 21555885 NR Description: unknown [Arabidopsis thaliana]
  misc_feature (1)..(211): Homolog of NCBI NO: 17381294 NR Description: AT4g30550/F17I23_110 [Arabidopsis thaliana]
  misc_feature (1)..(211): Homolog of NCBI NO: 15234767 NR Description: glutamine amidotransferase class-I
  misc_feature (1)..(212): Homolog of NCBI NO: 15224079 NR Description: defense-related protein, putative [Arabidopsis
  misc_feature (1)..(213): Homolog of NCBI NO: 13174241 NR Description: putative glutamine synthetase [Oryza sativa]
MLAEEGETWDVYKVARGEFPDEDDLGLYDGFVITGSCSDAHGNDTWVSDLLNLLRKLDSINTKILGICFGHQILGRALGGKVTRSTTGWDLGVRTITLSPSLRFALSSLDLPSRLSIIECHRDEIRELPAKAEVIAWSDKTGIEMFRYGDHIMGIQGHPEYSKDILLHLIDRLIQRNYIIDAFGKQARERAALWEPDREAWKKLCVTFLKGRL

SEQ ID NO: 57846 - DNA, 2105 bp, Glycine max
  misc_feature (1)..(2105): Ceres Seq. ID no. 15171762
attcaaaaactcgcaaaagaaacccaaaatctcttcggctctctctcttttccatatccatatatatccccaaaccctaccgttaggttccccaattcaacaccccgtggaccggtgcgctgcttctttgttcgtacggtttccgtcgattgcctccgaaacgatgtcgtatcgcccaagcgggaactccaggaccgaggtccgccgcaaccggtacaaggtggcggtggacgcggacgaaggtcggagacgacgagaggacacgatggtggagatccgcaagaaccgcagagaagagagtttgcagaagaagaggcgcgaaggattccaacctcagcagatacctgcgtccgttcactctagtttggtagagaagaagttggaacacctaccatctatggttactggtgtttggactgatgataataacctgcagctcgaggcgacgacgcagttccggaagctgctttcgattgaacgtagtccgccgattgaggaggttatacagactggtgtggtttctcgctttgttgagtttctcatgagggaagactttccacagttgcagtttgaggcagcctgggctttgacaaatatagcttctgggacgtctgaaaacaccaaggttgtcattgatcacggggctgtcccaattttcgtgaagctacttgcttctcctagtgatgatgtccgtgaacaggcagtgtgggcattaggcaatgtcgcgggggattcacctagatgtcgtgatcttgttctcagtcatggggctttgcttcctttgttggcacaattaaatgaacatgccaagctttctatgcttagaaatgctacctggacactttcaaacttctgcaggggcaagccacagcctccttttgatcaggttaaacctgcacttcctgctcttgcccgtcttatccattcaaacgatgaagaagtattgactgatgcatgttgggcactgtcatatctttctgatggcacaaatgataaaattcaagctgtaattgaagctggtgtttgtccccgacttgttgagctgctgctgcacccatccccttcagtgctaattcctgctcttcgaactgttggaaatattgtcactggagatgatatgcagactcaggttatcatcaatcaccaggctcttccttgccttcttaatctgttgaccaataattataaaaaaagcatcaagaaggaagcttgttggaccatatccaatatcacagctggtaataagcagcagattcaggctgtgattgaggctaatctaattgctcctttggtcaatctgcttcaaaatgctgagtttgatatcaagaaagaagctgcttgggctatctcaaatgctacatccggtggttctcatgaacaaatcaagttcctagtaagccaagggtgtattaagcccttgtgtgatcttctcatctgtcctgatcctagaattgttacagtttgtctggaaggccttgaaaacatcttgaaggtgggagaagctgataaaaacataggaaatactggtgatgtgaatctatatgcccaaatgattgatgaagctgagggattggagaaaattgagaacctccagagtcatgacaacacagagatttacgaaaaggcggtcaagattcttgagacatactggttggaggaggaagatgagactatgcctccaggggatgcttctcagtcagggttcaactttggtagcagtgacgctcctgctgtgccgtccggtggattcaactttaattagaagatattcatgctctactggggagttttggttggtctatctgtgaagtcctcctttatgacacgacagcagttgggggacaagtcaacgtcttgtcattgtcctaatgtccttgggttgtacgaggtccagcaagtaaatacatggttgctggactgccttgggtttttgcaatgcctgatatttcatatctcatggtgtaaaatgctttgtggctatatttttttgccaccgtagagaatactagagtcttctttctgccaagtgatcatttcatagaattaatgaatgctcagtctcgtgattttttttttcctttgttatatatgtcctagattggagc

SEQ ID NO: 57847 - protein, 586 aa, Glycine max
  peptide (1)..(586): Ceres Seq. ID no. 15171763
  misc_feature (58)..(151): Pfam Name: Importin beta binding domain Pfam Description: Importin beta binding domain
  misc_feature (53)..(576): Homolog of NCBI NO: 26338017 NR Description: unnamed protein product [Mus musculus]
  misc_feature (55)..(585): Homolog of NCBI NO: 6682927 NR Description: importin alpha 1b [Oryza sativa (japonica
  misc_feature (55)..(585): Homolog of NCBI NO: 34897636 NR Description: putative impotin alpha 1b [Oryza sativa]
  misc_feature (55)..(586): Homolog of NCBI NO: 13699777 NR Description: AtKAP alpha [Arabidopsis thaliana]
  misc_feature (55)..(586): Homolog of NCBI NO: 15809794 NR Description: AT3g06720/F3E22_14 [Arabidopsis thaliana]
  misc_feature (55)..(586): Homolog of NCBI NO: 25314876 NR Description: probable nuclear transport factor importin
  misc_feature (55)..(586): Homolog of NCBI NO: 15230778 NR Description: importin alpha subunit [Arabidopsis thaliana]
  misc_feature (55)..(585): Homolog of NCBI NO: 25314870 NR Description: probable nuclear transport factor importin alpha
  misc_feature (55)..(585): Homolog of NCBI NO: 13605661 NR Description: AT3g06720/F3E22_14 [Arabidopsis thaliana]
  misc_feature (55)..(585): Homolog of NCBI NO: 13752562 NR Description: importin alpha 2 [Capsicum annuum]
FKNSQKKPKISSALSLFHIHIYPQTLPLGSPIQHPVDRCAASLFVRFPSIASETMSYRPSGNSRTEVRRNRYKVAVDADEGRRRREDTMVEIRKNRREESLQKKRREGFQPQQIPASVHSSLVEKKLEHLPSMVTGVWTDDNNLQLEATTQFRKLLSIERSPPIEEVIQTGVVSRFVEFLMREDFPQLQFEAAWALTNIASGTSENTKVVIDHGAVPIFVKLLASPSDDVREQAVWALGNVAGDSPRCRDLVLSHGALLPLLAQLNEHAKLSMLRNATWTLSNFCRGKPQPPFDQVKPALPALARLIHSNDEEVLTDACWALSYLSDGTNDKIQAVIEAGVCPRLVELLLHPSPSVLIPALRTVGNIVTGDDMQTQVIINHQALPCLLNLLTNNYKKSIKKEACWTISNITAGNKQQIQAVIEANLIAPLVNLLQNAEFDIKKEAAWAISNATSGGSHEQIKFLVSQGCIKPLCDLLICPDPRIVTVCLEGLENILKVGEADKNIGNTGDVNLYAQMIDEAEGLEKIENLQSHDNTEIYEKAVKILETYWLEEEDETMPPGDASQSGFNFGSSDAPAVPSGGFNFN

SEQ ID NO: 57848 - protein, 532 aa, Glycine max
  peptide (1)..(532): Ceres Seq. ID no. 15171764
  misc_feature (4)..(97): Pfam Name: Importin beta binding domain Pfam Description: Importin beta binding domain
  misc_feature (1)..(522): Homolog of NCBI NO: 26338017 NR Description: unnamed protein product [Mus musculus]
  misc_feature (1)..(531): Homolog of NCBI NO: 6682927 NR Description: importin alpha 1b [Oryza sativa (japonica
  misc_feature (1)..(531): Homolog of NCBI NO: 34897636 NR Description: putative impotin alpha 1b [Oryza sativa]
  misc_feature (1)..(532): Homolog of NCBI NO: 13699777 NR Description: AtKAP alpha [Arabidopsis thaliana]
  misc_feature (1)..(532): Homolog of NCBI NO: 15809794 NR Description: AT3g06720/F3E22_14 [Arabidopsis thaliana]
  misc_feature (1)..(532): Homolog of NCBI NO: 25314876 NR Description: probable nuclear transport factor importin
  misc_feature (1)..(532): Homolog of NCBI NO: 15230778 NR Description: importin alpha subunit [Arabidopsis thaliana]
  misc_feature (1)..(531): Homolog of NCBI NO: 25314870 NR Description: probable nuclear transport factor importin alpha
  misc_feature (1)..(531): Homolog of NCBI NO: 13605661 NR Description: AT3g06720/F3E22_14 [Arabidopsis thaliana]
  misc_feature (1)..(531): Homolog of NCBI NO: 13752562 NR Description: importin alpha 2 [Capsicum annuum]
MSYRPSGNSRTEVRRNRYKVAVDADEGRRRREDTMVEIRKNRREESLQKKRREGFQPQQIPASVHSSLVEKKLEHLPSMVTGVWTDDNNLQLEATTQFRKLLSIERSPPIEEVIQTGVVSRFVEFLMREDFPQLQFEAAWALTNIASGTSENTKVVIDHGAVPIFVKLLASPSDDVREQAVWALGNVAGDSPRCRDLVLSHGALLPLLAQLNEHAKLSMLRNATWTLSNFCRGKPQPPFDQVKPALPALARLIHSNDEEVLTDACWALSYLSDGTNDKIQAVIEAGVCPRLVELLLHPSPSVLIPALRTVGNIVTGDDMQTQVIINHQALPCLLNLLTNNYKKSIKKEACWTISNITAGNKQQIQAVIEANLIAPLVNLLQNAEFDIKKEAAWAISNATSGGSHEQIKFLVSQGCIKPLCDLLICPDPRIVTVCLEGLENILKVGEADKNIGNTGDVNLYAQMIDEAEGLEKIENLQSHDNTEIYEKAVKILETYWLEEEDETMPPGDASQSGFNFGSSDAPAVPSGGFNFN

SEQ ID NO: 57849 - protein, 498 aa, Glycine max
  peptide (1)..(498): Ceres Seq. ID no. 15171765
  misc_feature (1)..(63): Pfam Name: Importin beta binding domain Pfam Description: Importin beta binding domain
  misc_feature (1)..(488): Homolog of NCBI NO: 26338017 NR Description: unnamed protein product [Mus musculus]
  misc_feature (1)..(497): Homolog of NCBI NO: 6682927 NR Description: importin alpha 1b [Oryza sativa (japonica
  misc_feature (1)..(497): Homolog of NCBI NO: 34897636 NR Description: putative impotin alpha 1b [Oryza sativa]
  misc_feature (1)..(498): Homolog of NCBI NO: 13699777 NR Description: AtKAP alpha [Arabidopsis thaliana]
  misc_feature (1)..(498): Homolog of NCBI NO: 15809794 NR Description: AT3g06720/F3E22_14 [Arabidopsis thaliana]
  misc_feature (1)..(498): Homolog of NCBI NO: 25314876 NR Description: probable nuclear transport factor importin
  misc_feature (1)..(498): Homolog of NCBI NO: 15230778 NR Description: importin alpha subunit [Arabidopsis thaliana]
  misc_feature (1)..(497): Homolog of NCBI NO: 25314870 NR Description: probable nuclear transport factor importin alpha
  misc_feature (1)..(497): Homolog of NCBI NO: 13605661 NR Description: AT3g06720/F3E22_14 [Arabidopsis thaliana]
  misc_feature (1)..(497): Homolog of NCBI NO: 13752562 NR Description: importin alpha 2 [Capsicum annuum]
MVEIRKNRREESLQKKRREGFQPQQIPASVHSSLVEKKLEHLPSMVTGVWTDDNNLQLEATTQFRKLLSIERSPPIEEVIQTGVVSRFVEFLMREDFPQLQFEAAWALTNIASGTSENTKVVIDHGAVPIFVKLLASPSDDVREQAVWALGNVAGDSPRCRDLVLSHGALLPLLAQLNEHAKLSMLRNATWTLSNFCRGKPQPPFDQVKPALPALARLIHSNDEEVLTDACWALSYLSDGTNDKIQAVIEAGVCPRLVELLLHPSPSVLIPALRTVGNIVTGDDMQTQVIINHQALPCLLNLLTNNYKKSIKKEACWTISNITAGNKQQIQAVIEANLIAPLVNLLQNAEFDIKKEAAWAISNATSGGSHEQIKFLVSQGCIKPLCDLLICPDPRIVTVCLEGLENILKVGEADKNIGNTGDVNLYAQMIDEAEGLEKIENLQSHDNTEIYEKAVKILETYWLEEEDETMPPGDASQSGFNFGSSDAPAVPSGGFNFN

SEQ ID NO: 57850 - DNA, 1553 bp, Glycine max
  misc_feature (1)..(1553): Ceres Seq. ID no. 13639663
gaatcagaatcacctggcttggcctagcgcttattctctcgcattccgtggagatctagtgcttctgctgcaagacctcgctgaaaattagggtttcgattcggaggtagacgaagatgttcggaagggctccgaagaaaagcgacagcaccaggtactacgaaatcctcggcgtttccaagaacgcttcgccggatgacttaaagaaggcttacaagaaagccgccattaagaaccatcctgacaaaggcggggatcccgagaagtttaaagagcttgctcaagcctatgaggttctgagtgaccctgagaagcgcgagatttatgatacatatggagaagatgctcttaaggaaggaatgggtggtggtggcggtggccatgatccatttgatatcttcagttcattctttggtggaagtccgtttgggtcaggtggtagcagtagaggacggaggcagaggcggggagaagatgtggttcatcccctgaaggtctctctggaggatctttacctcggaacttcaaagaaactctctctttcacgaaacgtgttgtgctcaaaatgcaatgggaagggctcaaagtctggggcttcaatgacctgtgctggttgccagggtactggcatgaaggtgtctattaggcaccttggtccttctatgattcagcaaatgcagcatccttgcaatgagtgtaagggtactggagagacaatcaatgacagagacaggtgccaacagtgcaagggagagaaggttgttcaggagaagaaagtacttgaagttgttgtggagaagggaatgcagaatggacagaagattacattccctggtgaagctgatgaagcgcctgatacagtcacaggggatattgtctttgtcctacaacagaaggaacacccaaagttcaaacgaaaggcagatgacctttttgtagaacacacattgtctcttactgaggctctatgtggcttccagtttgtgctgactcacctggatagcaggcagcttctgatcaaatcaaaccctggggaggttgttaagcctgagtcattcaaggcaataaatgatgagggaatgccaaactaccagaggcacttcctgaagggaaagctttacattcatttctcagtggaatttcctgataccctgagtcttgatcaggtgaaggctttggaggctgttctgccatcaaagccaacatcacagttgtcagacatggagctggatgagtgtgaggagaccacactccatgatgtgaacatggaggaagagacaaggaggaggcaacaagctcagcaggaggcatatgatgaggatgaggatatgcatggtggtgctcagagagtgcagtgcgctcagcagtaatgagccacaggagcgctagagtagacatgtgatgatctcgatcatcttattttttagccgtttgtgcgggtctaaacatatttagtgtttgatatctcagacgattttagcaaccaaacactgtagcattattgtccaagaaattatttcacaagacatcctaatacaattttttttccttct

SEQ ID NO: 57851 - protein, 417 aa, Glycine max
  peptide (1)..(417): Ceres Seq. ID no. 13639664
  misc_feature (234)..(358): Pfam Name: DnaJ C terminal region Pfam Description: DnaJ C terminal region
MFGRAPKKSDSTRYYEILGVSKNASPDDLKKAYKKAAIKNHPDKGGDPEKFKELAQAYEVLSDPEKREIYDTYGEDALKEGMGGGGGGHDPFDIFSSFFGGSPFGSGGSSRGRRQRRGEDVVHPLKVSLEDLYLGTSKKLSLSRNVLCSKCNGKGSKSGASMTCAGCQGTGMKVSIRHLGPSMIQQMQHPCNECKGTGETINDRDRCQQCKGEKVVQEKKVLEVVVEKGMQNGQKITFPGEADEAPDTVTGDIVFVLQQKEHPKFKRKADDLFVEHTLSLTEALCGFQFVLTHLDSRQLLIKSNPGEVVKPESFKAINDEGMPNYQRHFLKGKLYIHFSVEFPDTLSLDQVKALEAVLPSKPTSQLSDMELDECEETTLHDVNMEEETRRRQQAQQEAYDEDEDMHGGAQRVQCAQQ

SEQ ID NO: 57852 - protein, 336 aa, Glycine max
  peptide (1)..(336): Ceres Seq. ID no. 13639665
  misc_feature (153)..(277): Pfam Name: DnaJ C terminal region Pfam Description: DnaJ C terminal region
MGGGGGGHDPFDIFSSFFGGSPFGSGGSSRGRRQRRGEDVVHPLKVSLEDLYLGTSKKLSLSRNVLCSKCNGKGSKSGASMTCAGCQGTGMKVSIRHLGPSMIQQMQHPCNECKGTGETINDRDRCQQCKGEKVVQEKKVLEVVVEKGMQNGQKITFPGEADEAPDTVTGDIVFVLQQKEHPKFKRKADDLFVEHTLSLTEALCGFQFVLTHLDSRQLLIKSNPGEVVKPESFKAINDEGMPNYQRHFLKGKLYIHFSVEFPDTLSLDQVKALEAVLPSKPTSQLSDMELDECEETTLHDVNMEEETRRRQQAQQEAYDEDEDMHGGAQRVQCAQQ

SEQ ID NO: 57853 - protein, 256 aa, Glycine max
  peptide (1)..(256): Ceres Seq. ID no. 13639666
  misc_feature (73)..(197): Pfam Name: DnaJ C terminal region Pfam Description: DnaJ C terminal region
MTCAGCQGTGMKVSIRHLGPSMIQQMQHPCNECKGTGETINDRDRCQQCKGEKVVQEKKVLEVVVEKGMQNGQKITFPGEADEAPDTVTGDIVFVLQQKEHPKFKRKADDLFVEHTLSLTEALCGFQFVLTHLDSRQLLIKSNPGEVVKPESFKAINDEGMPNYQRHFLKGKLYIHFSVEFPDTLSLDQVKALEAVLPSKPTSQLSDMELDECEETTLHDVNMEEETRRRQQAQQEAYDEDEDMHGGAQRVQCAQQ

SEQ ID NO: 57854 - DNA, 1277 bp, Glycine max
  misc_feature (1)..(1277): Ceres Seq. ID no. 14316261
agcctcatcactcactctaatctaacgatgaatctgaataccaagctttctcactcataagttcccactccctctcttatcatttatcaaacaaatttttcatctttccccacttgttggattaatggctgcctcagctttgtcactaacatccccattccatttcagaaaaccccacaacagggtttcacctctcaatgctcatcctctcattctcatccaaaagggtaaacaatctcttaaatcaaacttctcattctcaaccctgaatgcttccccccacttcagaccccctattgccattgctccttccacactgaccctaacaagagcttcttcctctgatgaatgctttgaccctgctggtgaagcccaaaggttgctgctttctgaggaaaaaccagttaattttgctttctgggtcatattttgggcctctttgtccctggcttggtttgctgtttcaagggatgctaatgctgctgttgaatcctccatcaaagcctctggctttggcttcaacattgccaattcgttgaggaaattgggttggcctgattgggttgtggtgttcacccttgccactcttcctgtgcttgagcttcgtggggctatacctgttggttactggatgcaacttaaccctgtaactttaacagtgttatctattctggggaacatggtccctgtgccattcatcgtgctctaccttaaaaaaattgcgtctttcgttgctgcgaggagcccttctgcgtctcgattccttgacatgctgttcgagaatgccaaagagaaggctggtccagtggaggagtttcagtggcttggtctgatgctctttgtggctgttccttttcctggaacaggagcatggaccggagcctttatagcatccattcttgatatgccattttgggctgctgtgtctgctaatttctttggtgttgtatttgctgggttgctagtaaatttgttagtgaaccttggtctgaagtatgccatcattactggtgtcatccttttctttgtttccacattcatgtggagtgtccttagaaatcttaaaaaaggtttgagctcgtcaaattgacgtgaaatgtctgattttcctttaccaacatgatgacaattgttagttttgttgttcattctcttggttttcattttcttatattttcataattgagcatcctagttcagtgatatgtaaaaatgaaaaggcttatgtcttgtatataccctttttctgatgttttaaaaatcatgggctgactgac

SEQ ID NO: 57855 - protein, 321 aa, Glycine max
  peptide (1)..(321): Ceres Seq. ID no. 14316262
  misc_feature (146)..(273): Homolog of NCBI NO: 14591427 NR Description: hypothetical protein PH1658 [Pyrococcus
  misc_feature (149)..(289): Homolog of NCBI NO: 18978147 NR Description: putative small multidrug export protein
  misc_feature (155)..(283): Homolog of NCBI NO: 15613797 NR Description: small multidrug export related protein [Bacillus
  misc_feature (144)..(296): Homolog of NCBI NO: 23052254 NR Description: hypothetical protein [Methanosarcina barkeri]
  misc_feature (145)..(288): Homolog of NCBI NO: 22537969 NR Description: conserved hypothetical protein [Streptococcus
  misc_feature (149)..(285): Homolog of NCBI NO: 28212098 NR Description: putative small multi-drug export protein
  misc_feature (144)..(296): Homolog of NCBI NO: 21227925 NR Description: putative small multi-drug export protein
  misc_feature (155)..(289): Homolog of NCBI NO: 11499286 NR Description: small multidrug export protein (qacE)
  misc_feature (117)..(319): Homolog of NCBI NO: 34897152 NR Description: unknown protein [Oryza sativa (japonica
  misc_feature (93)..(320): Homolog of NCBI NO: 15227004 NR Description: transport protein -related [Arabidopsis thaliana]
MAASALSLTSPFHFRKPHNRVSPLNAHPLILIQKGKQSLKSNFSFSTLNASPHFRPPIAIAPSTLTLTRASSSDECFDPAGEAQRLLLSEEKPVNFAFWVIFWASLSLAWFAVSRDANAAVESSIKASGFGFNIANSLRKLGWPDWVVVFTLATLPVLELRGAIPVGYWMQLNPVTLTVLSILGNMVPVPFIVLYLKKIASFVAARSPSASRFLDMLFENAKEKAGPVEEFQWLGLMLFVAVPFPGTGAWTGAFIASILDMPFWAAVSANFFGVVFAGLLVNLLVNLGLKYAIITGVILFFVSTFMWSVLRNLKKGLSSSN

SEQ ID NO: 57856 - DNA, 1179 bp, Glycine max
  misc_feature (1)..(1179): Ceres Seq. ID no. 14316328
attttcatttccccactctgtttactccgtgtccgcagaagatggaaagtggattacctttgcttaattatctcttgcagcagactctcagaaccatttgcacttctcccaattcttccactccttctaagtgggtatatgctgtcttctggaggatattacctcgcaactttcctccaccaaggtgggaatttggaggaactgctcttgatctctccaaaggaaataaaaggaactggatccttgtctgggaagatgggttctgcgattttaacgaatgcgagcaaaggaagagtggtagtggttacttgaacggtagatttggagctgacgtattcttcaaaatgtcgcatgaggtttacaattatggagagggactcgtgggaaaagttgccgcagataatagtcacaaatgggtttacaatgagagtcacaatgagtgtgaatctagctatattgcttcatggaatgcttcagtcgaacctcaaccaaaggcgtgggagtttcagttcaattcaggcattcagagtatagtcataatcgccgtcagagaaggcgtagtgcaattgggttcttttaacaagatatcagaggacctgaatctggtgatcagcatacagaggcaattcagctaccttcagagcatacctggtgtgtttggtattcaaagaccatacctacctcttcaacatccatacattgtgaagccaagtttcatagaaaacaatgcaatgactctatatgatatggggtggaacaccaaccctcagaatggagcaccaggcccatctctttgttcaggttctccttctctaccactaccaaccatgccctgtagttttggagctttgctatcaaagttaccatctggaatcccaccctataattccactcaagtccttgatgcagggacacaaagcaccattgagagagtgaagatagaggattgtgaatttcatcctacccttgatgacgatcacaaaggaagaaaggtcggttccctgaacaagtagcatggatttggaattggaagattaattaattaagagacaggaaccactttgaccataatgactcctaaatcatagtcagtatgttaagaaatggttagttatttattttctttcacttggccacaatgtgtattgtggtatgtttattggtggccgacaacctatc

SEQ ID NO: 57857 - protein, 336 aa, Glycine max
  peptide (1)..(336): Ceres Seq. ID no. 14316329
  misc_feature (80)..(209): Homolog of NCBI NO: 25406897 NR Description: hypothetical protein [imported] - Arabidopsis
  misc_feature (127)..(209): Homolog of NCBI NO: 30696393 NR Description: expressed protein [Arabidopsis thaliana]
  misc_feature (114)..(213): Homolog of NCBI NO: 29649495 NR Description: hypothetical protein [Arabidopsis thaliana]
  misc_feature (114)..(213): Homolog of NCBI NO: 30684893 NR Description: expressed protein [Arabidopsis thaliana]
  misc_feature (114)..(213): Homolog of NCBI NO: 22651858 NR Description: hypothetical protein [Arabidopsis thaliana]
  misc_feature (115)..(279): Homolog of NCBI NO: 15232532 NR Description: expressed protein [Arabidopsis thaliana]
  misc_feature (112)..(279): Homolog of NCBI NO: 38454108 NR Description: At3g15240 [Arabidopsis thaliana]
  misc_feature (25)..(209): Homolog of NCBI NO: 30696395 NR Description: expressed protein [Arabidopsis thaliana]
  misc_feature (14)..(293): Homolog of NCBI NO: 18406603 NR Description: expressed protein [Arabidopsis thaliana]
FHFPTLFTPCPQKMESGLPLLNYLLQQTLRTICTSPNSSTPSKWVYAVFWRILPRNFPPPRWEFGGTALDLSKGNKRNWILVWEDGFCDFNECEQRKSGSGYLNGRFGADVFFKMSHEVYNYGEGLVGKVAADNSHKWVYNESHNECESSYIASWNASVEPQPKAWEFQFNSGIQSIVIIAVREGVVQLGSFNKISEDLNLVISIQRQFSYLQSIPGVFGIQRPYLPLQHPYIVKPSFIENNAMTLYDMGWNTNPQNGAPGPSLCSGSPSLPLPTMPCSFGALLSKLPSGIPPYNSTQVLDAGTQSTIERVKIEDCEFHPTLDDDHKGRKVGSLNK

SEQ ID NO: 57858 - protein, 323 aa, Glycine max
  peptide (1)..(323): Ceres Seq. ID no. 14316330
  misc_feature (67)..(196): Homolog of NCBI NO: 25406897 NR Description: hypothetical protein [imported] - Arabidopsis
  misc_feature (114)..(196): Homolog of NCBI NO: 30696393 NR Description: expressed protein [Arabidopsis thaliana]
  misc_feature (101)..(200): Homolog of NCBI NO: 30684893 NR Description: expressed protein [Arabidopsis thaliana]
  misc_feature (101)..(200): Homolog of NCBI NO: 29649495 NR Description: hypothetical protein [Arabidopsis thaliana]
  misc_feature (101)..(200): Homolog of NCBI NO: 22651858 NR Description: hypothetical protein [Arabidopsis thaliana]
  misc_feature (102)..(266): Homolog of NCBI NO: 15232532 NR Description: expressed protein [Arabidopsis thaliana]
  misc_feature (99)..(266): Homolog of NCBI NO: 38454108 NR Description: At3g15240 [Arabidopsis thaliana]
  misc_feature (12)..(196): Homolog of NCBI NO: 30696395 NR Description: expressed protein [Arabidopsis thaliana]
  misc_feature (1)..(280): Homolog of NCBI NO: 18406603 NR Description: expressed protein [Arabidopsis thaliana]
MESGLPLLNYLLQQTLRTICTSPNSSTPSKWVYAVFWRILPRNFPPPRWEFGGTALDLSKGNKRNWILVWEDGFCDFNECEQRKSGSGYLNGRFGADVFFKMSHEVYNYGEGLVGKVAADNSHKWVYNESHNECESSYIASWNASVEPQPKAWEFQFNSGIQSIVIIAVREGVVQLGSFNKISEDLNLVISIQRQFSYLQSIPGVFGIQRPYLPLQHPYIVKPSFIENNAMTLYDMGWNTNPQNGAPGPSLCSGSPSLPLPTMPCSFGALLSKLPSGIPPYNSTQVLDAGTQSTIERVKIEDCEFHPTLDDDHKGRKVGSLNK

SEQ ID NO: 57859 - protein, 222 aa, Glycine max
  peptide (1)..(222): Ceres Seq. ID no. 14316331
  misc_feature (1)..(95): Homolog of NCBI NO: 25406897 NR Description: hypothetical protein [imported] - Arabidopsis
  misc_feature (13)..(95): Homolog of NCBI NO: 30696393 NR Description: expressed protein [Arabidopsis thaliana]
  misc_feature (1)..(99): Homolog of NCBI NO: 30684893 NR Description: expressed protein [Arabidopsis thaliana]
  misc_feature (1)..(99): Homolog of NCBI NO: 29649495 NR Description: hypothetical protein [Arabidopsis thaliana]
  misc_feature (1)..(99): Homolog of NCBI NO: 22651858 NR Description: hypothetical protein [Arabidopsis thaliana]
  misc_feature (1)..(165): Homolog of NCBI NO: 15232532 NR Description: expressed protein [Arabidopsis thaliana]
  misc_feature (1)..(165): Homolog of NCBI NO: 38454108 NR Description: At3g15240 [Arabidopsis thaliana]
  misc_feature (1)..(95): Homolog of NCBI NO: 30696395 NR Description: expressed protein [Arabidopsis thaliana]
  misc_feature (1)..(179): Homolog of NCBI NO: 18406603 NR Description: expressed protein [Arabidopsis thaliana]
MSHEVYNYGEGLVGKVAADNSHKWVYNESHNECESSYIASWNASVEPQPKAWEFQFNSGIQSIVIIAVREGVVQLGSFNKISEDLNLVISIQRQFSYLQSIPGVFGIQRPYLPLQHPYIVKPSFIENNAMTLYDMGWNTNPQNGAPGPSLCSGSPSLPLPTMPCSFGALLSKLPSGIPPYNSTQVLDAGTQSTIERVKIEDCEFHPTLDDDHKGRKVGSLNK

SEQ ID NO: 57860 - DNA, 1411 bp, Glycine max
  misc_feature (1)..(1411): Ceres Seq. ID no. 15170324
acacagtaacggaacacaacaatggctctgtcttcgccacttcagaacctctctgcactcatctccgccaaaggcaatgccaccgccgtcgccacaccccggccgccgagagggcggccctgggcggttcacgcggcggcgtccgacaccaccgcctctgcgtcggtgcaaatgggtgagtacgaagaagggaagctggagcgaccaaagtgggttggggagacccctctttcacgtctcgttcaagctctcatctccttcaagcctttctactctgttctcaagcttggtgctagaagggctttgataagtacagctgagaagaacaacataccttggaggcaaatggcgaaagagattttagagtcagaagtttatagggagctggacaacattcaaaaccagtctttagtgtaccctgattattatttgaatccattccatgcatatgatgagggcaatcttacatggctggcggcagcagaagcagaggctgctacattgtcaatagctaaacgagcaattccagatgcttcttcaacgcaggaagcaaatcagatactgcgtggcaattggcttcgtgcaattgaacaacaccatatgcagtattcagaatcatctgtgatcaatgacattctagatattggatgctctgtaggtataagcacaagatatcttgcagacaagttccccacagccaaagtcaccgggctagatctgtcaccctattttcttgctgtggctcagcataaggaaaagaatgcaccgcctagaaaatttcctataagatggatacatgcaaatggagaagacacgggcctgccttctaaatcattcaaccttgtttctattgcttttgtggttcatgaatgtcctgcaagagctatagtgaatttagtgagggaagcattccgtctccttcggcctggaggcacactagctttggtagattctacgacaaagtcaaaggtccttcaggaattgtctcctgtcctgtttacattgcttaagagcacagaaccctttctggatgagtattacttgactgatatggatgaaacactgagggaagctggttttgggaacataacatcaatccttacggaccccagacacgtgacaattactgcaacagtgccttaatgaaacatcacatcttgagattattttatttttattttacttggtacatgaacatcttcttgggtttggcttcaagctagtcagtccgtggttgatgtatgtccaatagaatagcgtgtcaaaaattgattaaattatgtatccacgtgccacgatcttttattattagttattggttttgtagattatcccaagatctggtgcaacaataattagacatggcaatggggtgggatagagatgaatattatttttctaatcttcgatc

SEQ ID NO: 57861 - protein, 373 aa, Glycine max
  peptide (1)..(373): Ceres Seq. ID no. 15170325
  misc_feature (205)..(356): Homolog of NCBI NO: 37523940 NR Description: hypothetical protein glr4371 [Gloeobacter
  misc_feature (205)..(353): Homolog of NCBI NO: 17231019 NR Description: similar to ubiquinone/menaquinone biosynthesis
  misc_feature (68)..(372): Homolog of NCBI NO: 16332323 NR Description: unknown protein [Synechocystis sp. PCC 6803]
  misc_feature (70)..(370): Homolog of NCBI NO: 37523046 NR Description: hypothetical protein gll3477 [Gloeobacter
  misc_feature (71)..(372): Homolog of NCBI NO: 17229577 NR Description: hypothetical protein [Nostoc sp. PCC 7120]
  misc_feature (65)..(372): Homolog of NCBI NO: 23129131 NR Description: hypothetical protein [Nostoc punctiforme]
  misc_feature (71)..(372): Homolog of NCBI NO: 23039316 NR Description: hypothetical protein [Trichodesmium erythraeum
  misc_feature (58)..(373): Homolog of NCBI NO: 17230530 NR Description: hypothetical protein [Nostoc sp. PCC 7120]
  misc_feature (314)..(373): Homolog of NCBI NO: 37531718 NR Description: unknown protein [Oryza sativa (japonica
  misc_feature (12)..(280): Homolog of NCBI NO: 37531718 NR Description: unknown protein [Oryza sativa (japonica
MALSSPLQNLSALISAKGNATAVATPRPPRGRPWAVHAAASDTTASASVQMGEYEEGKLERPKWVGETPLSRLVQALISFKPFYSVLKLGARRALISTAEKNNIPWRQMAKEILESEVYRELDNIQNQSLVYPDYYLNPFHAYDEGNLTWLAAAEAEAATLSIAKRAIPDASSTQEANQILRGNWLRAIEQHHMQYSESSVINDILDIGCSVGISTRYLADKFPTAKVTGLDLSPYFLAVAQHKEKNAPPRKFPIRWIHANGEDTGLPSKSFNLVSIAFVVHECPARAIVNLVREAFRLLRPGGTLALVDSTTKSKVLQELSPVLFTLLKSTEPFLDEYYLTDMDETLREAGFGNITSILTDPRHVTITATVP

SEQ ID NO: 57862 - protein, 323 aa, Glycine max
  peptide (1)..(323): Ceres Seq. ID no. 15170326
  misc_feature (155)..(306): Homolog of NCBI NO: 37523940 NR Description: hypothetical protein glr4371 [Gloeobacter
  misc_feature (155)..(303): Homolog of NCBI NO: 17231019 NR Description: similar to ubiquinone/menaquinone biosynthesis
  misc_feature (18)..(322): Homolog of NCBI NO: 16332323 NR Description: unknown protein [Synechocystis sp. PCC 6803]
  misc_feature (20)..(320): Homolog of NCBI NO: 37523046 NR Description: hypothetical protein gll3477 [Gloeobacter
  misc_feature (21)..(322): Homolog of NCBI NO: 17229577 NR Description: hypothetical protein [Nostoc sp. PCC 7120]
  misc_feature (15)..(322): Homolog of NCBI NO: 23129131 NR Description: hypothetical protein [Nostoc punctiforme]
  misc_feature (21)..(322): Homolog of NCBI NO: 23039316 NR Description: hypothetical protein [Trichodesmium erythraeum
  misc_feature (8)..(323): Homolog of NCBI NO: 17230530 NR Description: hypothetical protein [Nostoc sp. PCC 7120]
  misc_feature (264)..(323): Homolog of NCBI NO: 37531718 NR Description: unknown protein [Oryza sativa (japonica
  misc_feature (1)..(230): Homolog of NCBI NO: 37531718 NR Description: unknown protein [Oryza sativa (japonica
MGEYEEGKLERPKWVGETPLSRLVQALISFKPFYSVLKLGARRALISTAEKNNIPWRQMAKEILESEVYRELDNIQNQSLVYPDYYLNPFHAYDEGNLTWLAAAEAEAATLSIAKRAIPDASSTQEANQILRGNWLRAIEQHHMQYSESSVINDILDIGCSVGISTRYLADKFPTAKVTGLDLSPYFLAVAQHKEKNAPPRKFPIRWIHANGEDTGLPSKSFNLVSIAFVVHECPARAIVNLVREAFRLLRPGGTLALVDSTTKSKVLQELSPVLFTLLKSTEPFLDEYYLTDMDETLREAGFGNITSILTDPRHVTITATVP

SEQ ID NO: 57863 - protein, 265 aa, Glycine max
  peptide (1)..(265): Ceres Seq. ID no. 15170327
  misc_feature (97)..(248): Homolog of NCBI NO: 37523940 NR Description: hypothetical protein glr4371 [Gloeobacter
  misc_feature (97)..(245): Homolog of NCBI NO: 17231019 NR Description: similar to ubiquinone/menaquinone biosynthesis
  misc_feature (1)..(264): Homolog of NCBI NO: 16332323 NR Description: unknown protein [Synechocystis sp. PCC 6803]
  misc_feature (1)..(262): Homolog of NCBI NO: 37523046 NR Description: hypothetical protein gll3477 [Gloeobacter
  misc_feature (1)..(264): Homolog of NCBI NO: 17229577 NR Description: hypothetical protein [Nostoc sp. PCC 7120]
  misc_feature (1)..(264): Homolog of NCBI NO: 23129131 NR Description: hypothetical protein [Nostoc punctiforme]
  misc_feature (1)..(264): Homolog of NCBI NO: 23039316 NR Description: hypothetical protein [Trichodesmium erythraeum
  misc_feature (1)..(265): Homolog of NCBI NO: 17230530 NR Description: hypothetical protein [Nostoc sp. PCC 7120]
  misc_feature (206)..(265): Homolog of NCBI NO: 37531718 NR Description: unknown protein [Oryza sativa (japonica
  misc_feature (1)..(172): Homolog of NCBI NO: 37531718 NR Description: unknown protein [Oryza sativa (japonica
MAKEILESEVYRELDNIQNQSLVYPDYYLNPFHAYDEGNLTWLAAAEAEAATLSIAKRAIPDASSTQEANQILRGNWLRAIEQHHMQYSESSVINDILDIGCSVGISTRYLADKFPTAKVTGLDLSPYFLAVAQHKEKNAPPRKFPIRWIHANGEDTGLPSKSFNLVSIAFVVHECPARAIVNLVREAFRLLRPGGTLALVDSTTKSKVLQELSPVLFTLLKSTEPFLDEYYLTDMDETLREAGFGNITSILTDPRHVTITATVP

SEQ ID NO: 57864 - DNA, 829 bp, Glycine max
  misc_feature (1)..(829): Ceres Seq. ID no. 13595763
actttgtctacttaattaataaaggtttcaactttgaggataaacctcaccggttgtcacagggtttatcgtttaacggttgaaacgaagcgaaacttccaacttcatcttcaaccctgcgcttcttttgaactggtaaaaacttcgatcattttttgctctttagtcggtgttcatttcaactcagaagtcagaacatcggagctcatcaagcatggcaagctctttgacaacattagccattacctattctcctgtcaacaatggttccaggggtttcagaaagtctgttaatgcttctaaaggaaggggttgcataaaagcaatgaggatagagaaatccttggaggaattgtacaatgtgaaggtggaaagaaaagttcctcctgagagactagccgagcttggagtttcaaaatggtcagtgtggaagactgggaaaagcaggttaccttgggactggcaggtagaccaactggtgtacgtagaagaaggggaagtgagagttgtgcctgaaggaagcaagcgtttcatgcaatttgtggccggagacttggtccggtacccaaagtggtttgaagctgacctatggttcaatggtccatatcaagaacgttatagtttcagagcatatggtgatgatcattgatgagaagatgatgcttggtaaccacataaaagtcacatgcacatcttatttggatgttttatgtaatggatgtttttcaaaagttatagttttccagttctaaatgtattaccaatatttttgaatgtttgtgatactttgccatcatttaaaagaaatagtcctaaatgcttctgttgt

SEQ ID NO: 57865 - protein, 144 aa, Glycine max
  peptide (1)..(144): Ceres Seq. ID no. 13595764
  misc_feature (59)..(134): Pfam Name: Protein of unknown function (DUF861) Pfam Description: Protein of unknown function (DUF861)
  misc_feature (50)..(136): Homolog of NCBI NO: 39654289 NR Description: Chain A, Crystal Structure Of Hypothetical
  misc_feature (50)..(136): Homolog of NCBI NO: 15643869 NR Description: hypothetical protein [Thermotoga maritima]
  misc_feature (50)..(137): Homolog of NCBI NO: 23127631 NR Description: hypothetical protein [Nostoc punctiforme]
  misc_feature (50)..(137): Homolog of NCBI NO: 17229206 NR Description: hypothetical protein [Nostoc sp. PCC 7120]
  misc_feature (19)..(119): Homolog of NCBI NO: 15235021 NR Description: expressed protein [Arabidopsis thaliana]
  misc_feature (19)..(119): Homolog of NCBI NO: 21553516 NR Description: unknown [Arabidopsis thaliana]
  misc_feature (1)..(119): Homolog of NCBI NO: 38344542 NR Description: OSJNBa0027P08.10 [Oryza sativa (japonica
  misc_feature (5)..(143): Homolog of NCBI NO: 15225202 NR Description: expressed protein [Arabidopsis thaliana]
  misc_feature (5)..(143): Homolog of NCBI NO: 18403036 NR Description: expressed protein [Arabidopsis thaliana]
  misc_feature (5)..(143): Homolog of NCBI NO: 21592432 NR Description: unknown [Arabidopsis thaliana]
MASSLTTLAITYSPVNNGSRGFRKSVNASKGRGCIKAMRIEKSLEELYNVKVERKVPPERLAELGVSKWSVWKTGKSRLPWDWQVDQLVYVEEGEVRVVPEGSKRFMQFVAGDLVRYPKWFEADLWFNGPYQERYSFRAYGDDH

SEQ ID NO: 57866 - protein, 107 aa, Glycine max
  peptide (1)..(107): Ceres Seq. ID no. 13595765
  misc_feature (22)..(97): Pfam Name: Protein of unknown function (DUF861) Pfam Description: Protein of unknown function (DUF861)
  misc_feature (13)..(99): Homolog of NCBI NO: 39654289 NR Description: Chain A, Crystal Structure Of Hypothetical
  misc_feature (13)..(99): Homolog of NCBI NO: 15643869 NR Description: hypothetical protein [Thermotoga maritima]
  misc_feature (13)..(100): Homolog of NCBI NO: 23127631 NR Description: hypothetical protein [Nostoc punctiforme]
  misc_feature (13)..(100): Homolog of NCBI NO: 17229206 NR Description: hypothetical protein [Nostoc sp. PCC 7120]
  misc_feature (1)..(82): Homolog of NCBI NO: 15235021 NR Description: expressed protein [Arabidopsis thaliana]
  misc_feature (1)..(82): Homolog of NCBI NO: 21553516 NR Description: unknown [Arabidopsis thaliana]
  misc_feature (1)..(82): Homolog of NCBI NO: 38344542 NR Description: OSJNBa0027P08.10 [Oryza sativa (japonica
  misc_feature (1)..(106): Homolog of NCBI NO: 15225202 NR Description: expressed protein [Arabidopsis thaliana]
  misc_feature (1)..(106): Homolog of NCBI NO: 18403036 NR Description: expressed protein [Arabidopsis thaliana]
  misc_feature (1)..(106): Homolog of NCBI NO: 21592432 NR Description: unknown [Arabidopsis thaliana]
MRIEKSLEELYNVKVERKVPPERLAELGVSKWSVWKTGKSRLPWDWQVDQLVYVEEGEVRVVPEGSKRFMQFVAGDLVRYPKWFEADLWFNGPYQERYSFRAYGDDH

SEQ ID NO: 57867 - DNA, 1385 bp, Glycine max
  misc_feature (1)..(1385): Ceres Seq. ID no. 15177766
gattacctattatgatggaaagagaaaaaggtttacctttgatgatctctaacacaaatctcagcagcagcagcagcagtgtgatgagggtcaacaaaaacctcccagatgagatcatgttgttcaagatcctccctttgctcccatcaaagacccttattcgattcaggtgcgtgtgcaagttatgggactgtttcatacgcgacccttcattccttcatcttcgaaaactcactaataaccccacccaccactttctcttcctctcacccaaccaaaactcttcacatcccttcctttatggtgctcctcaccccaacaatagcattgtcacaacaccccttcgtccttcgatcctctttgccctcccaaacaaccttcaaatctccgaaacaaatgtccaatgtgtcaatggtttgctctgtttctacccgagaagccatgttagcttttattctcatgccgatgctttcactctcatagcaaaccccaccaccagagagattattactctccccagtgataactattactctgtaaaagcaaattcagagtttttcgcttcaactcattttggatatgaccctgttcgagaccagttcaaggttcttcgctttcttaagtatcaagcaactctccaagtcaaggtttttactcttggtcgcgacacttcatggaggcttgttactgctgaaacaccctttgctatgttgcatcttgaaaaccttttgtcttctcatggtaatagtagtagcctttgtgtcaatggtgctatttattggagacatttagatggtcttcttatgttcgatgtggcagccgaacagttcagggagatactcgttccttcaggagatggaagcgtccttggattctcgctatacccggatctcagggaaattgatgggtgtttgtgtttggttggattcagtaaccatggtttgaagttgtggattctgagggactaccaggctcagctgtgggaacatgaaaccggtgacctcagagccggcccaaaggcctcactcgctgttggaccaatcctgggtgacctccctcctctttatccgctttgcagagttcccacgggtgagatcctacttctgccacattatgttcctacaggtgttgaaagagtcaattttagagcgatttactatgacatggacacaaagagctctaggagtgctgttatcatggaaatgccattgacatggacaacaacattcagagaagttggcattgtcttttgtcaagaaagctttaggttactaaagtagcagcatcataactagagaaatacctttctatttgcttgcatggggccttaaattgtgttggaatggttatgacctattgatatggatttcttttttgccctactg

SEQ ID NO: 57868 - protein, 425 aa, Glycine max
  peptide (1)..(425): Ceres Seq. ID no. 15177767
  misc_feature (37)..(328): Homolog of NCBI NO: 29420819 NR Description: F-box [Prunus mume]
  misc_feature (34)..(371): Homolog of NCBI NO: 15220968 NR Description: F-box protein family [Arabidopsis thaliana]
  misc_feature (34)..(412): Homolog of NCBI NO: 15235230 NR Description: F-box protein family [Arabidopsis thaliana]
  misc_feature (39)..(331): Homolog of NCBI NO: 15241905 NR Description: F-box protein family [Arabidopsis thaliana]
  misc_feature (33)..(394): Homolog of NCBI NO: 4926821 NR Description: T17H7.6 [Arabidopsis thaliana]
  misc_feature (13)..(276): Homolog of NCBI NO: 8671872 NR Description: Contains similarity to a hypothetical protein
  misc_feature (33)..(394): Homolog of NCBI NO: 15221502 NR Description: F-box protein family [Arabidopsis thaliana]
  misc_feature (30)..(397): Homolog of NCBI NO: 15234860 NR Description: F-box protein family [Arabidopsis thaliana]
  misc_feature (19)..(371): Homolog of NCBI NO: 15225089 NR Description: F-box protein family [Arabidopsis thaliana]
  misc_feature (13)..(327): Homolog of NCBI NO: 15220834 NR Description: F-box protein family [Arabidopsis thaliana]
LPIMMEREKGLPLMISNTNLSSSSSSVMRVNKNLPDEIMLFKILPLLPSKTLIRFRCVCKLWDCFIRDPSFLHLRKLTNNPTHHFLFLSPNQNSSHPFLYGAPHPNNSIVTTPLRPSILFALPNNLQISETNVQCVNGLLCFYPRSHVSFYSHADAFTLIANPTTREIITLPSDNYYSVKANSEFFASTHFGYDPVRDQFKVLRFLKYQATLQVKVFTLGRDTSWRLVTAETPFAMLHLENLLSSHGNSSSLCVNGAIYWRHLDGLLMFDVAAEQFREILVPSGDGSVLGFSLYPDLREIDGCLCLVGFSNHGLKLWILRDYQAQLWEHETGDLRAGPKASLAVGPILGDLPPLYPLCRVPTGEILLLPHYVPTGVERVNFRAIYYDMDTKSSRSAVIMEMPLTWTTTFREVGIVFCQESFRLLK

SEQ ID NO: 57869 - protein, 422 aa, Glycine max
  peptide (1)..(422): Ceres Seq. ID no. 15177768
  misc_feature (34)..(325): Homolog of NCBI NO: 29420819 NR Description: F-box [Prunus mume]
  misc_feature (31)..(368): Homolog of NCBI NO: 15220968 NR Description: F-box protein family [Arabidopsis thaliana]
  misc_feature (31)..(409): Homolog of NCBI NO: 15235230 NR Description: F-box protein family [Arabidopsis thaliana]
  misc_feature (36)..(328): Homolog of NCBI NO: 15241905 NR Description: F-box protein family [Arabidopsis thaliana]
  misc_feature (30)..(391): Homolog of NCBI NO: 4926821 NR Description: T17H7.6 [Arabidopsis thaliana]
  misc_feature (10)..(273): Homolog of NCBI NO: 8671872 NR Description: Contains similarity to a hypothetical protein
  misc_feature (30)..(391): Homolog of NCBI NO: 15221502 NR Description: F-box protein family [Arabidopsis thaliana]
  misc_feature (27)..(394): Homolog of NCBI NO: 15234860 NR Description: F-box protein family [Arabidopsis thaliana]
  misc_feature (16)..(368): Homolog of NCBI NO: 15225089 NR Description: F-box protein family [Arabidopsis thaliana]
  misc_feature (10)..(324): Homolog of NCBI NO: 15220834 NR Description: F-box protein family [Arabidopsis thaliana]
MMEREKGLPLMISNTNLSSSSSSVMRVNKNLPDEIMLFKILPLLPSKTLIRFRCVCKLWDCFIRDPSFLHLRKLTNNPTHHFLFLSPNQNSSHPFLYGAPHPNNSIVTTPLRPSILFALPNNLQISETNVQCVNGLLCFYPRSHVSFYSHADAFTLIANPTTREIITLPSDNYYSVKANSEFFASTHFGYDPVRDQFKVLRFLKYQATLQVKVFTLGRDTSWRLVTAETPFAMLHLENLLSSHGNSSSLCVNGAIYWRHLDGLLMFDVAAEQFREILVPSGDGSVLGFSLYPDLREIDGCLCLVGFSNHGLKLWILRDYQAQLWEHETGDLRAGPKASLAVGPILGDLPPLYPLCRVPTGEILLLPHYVPTGVERVNFRAIYYDMDTKSSRSAVIMEMPLTWTTTFREVGIVFCQESFRLLK

SEQ ID NO: 57870 - protein, 421 aa, Glycine max
  peptide (1)..(421): Ceres Seq. ID no. 15177769
  misc_feature (33)..(324): Homolog of NCBI NO: 29420819 NR Description: F-box [Prunus mume]
  misc_feature (30)..(367): Homolog of NCBI NO: 15220968 NR Description: F-box protein family [Arabidopsis thaliana]
  misc_feature (30)..(408): Homolog of NCBI NO: 15235230 NR Description: F-box protein family [Arabidopsis thaliana]
  misc_feature (35)..(327): Homolog of NCBI NO: 15241905 NR Description: F-box protein family [Arabidopsis thaliana]
  misc_feature (29)..(390): Homolog of NCBI NO: 4926821 NR Description: T17H7.6 [Arabidopsis thaliana]
  misc_feature (9)..(272): Homolog of NCBI NO: 8671872 NR Description: Contains similarity to a hypothetical protein
  misc_feature (29)..(390): Homolog of NCBI NO: 15221502 NR Description: F-box protein family [Arabidopsis thaliana]
  misc_feature (26)..(393): Homolog of NCBI NO: 15234860 NR Description: F-box protein family [Arabidopsis thaliana]
  misc_feature (15)..(367): Homolog of NCBI NO: 15225089 NR Description: F-box protein family [Arabidopsis thaliana]
  misc_feature (9)..(323): Homolog of NCBI NO: 15220834 NR Description: F-box protein family [Arabidopsis thaliana]
MEREKGLPLMISNTNLSSSSSSVMRVNKNLPDEIMLFKILPLLPSKTLIRFRCVCKLWDCFIRDPSFLHLRKLTNNPTHHFLFLSPNQNSSHPFLYGAPHPNNSIVTTPLRPSILFALPNNLQISETNVQCVNGLLCFYPRSHVSFYSHADAFTLIANPTTREIITLPSDNYYSVKANSEFFASTHFGYDPVRDQFKVLRFLKYQATLQVKVFTLGRDTSWRLVTAETPFAMLHLENLLSSHGNSSSLCVNGAIYWRHLDGLLMFDVAAEQFREILVPSGDGSVLGFSLYPDLREIDGCLCLVGFSNHGLKLWILRDYQAQLWEHETGDLRAGPKASLAVGPILGDLPPLYPLCRVPTGEILLLPHYVPTGVERVNFRAIYYDMDTKSSRSAVIMEMPLTWTTTFREVGIVFCQESFRLLK

SEQ ID NO: 57871 - DNA, 1142 bp, Glycine max
  misc_feature (1)..(1142): Ceres Seq. ID no. 12608276
gtttccaagtgtaatggattcgagttccattaacagcaacagtaaggagataaccatggagattccaagcttggttcgactttacaaggatggcaccattgaacgcctccaaaactcaccaattgtgccacccacgcttcaagatccaacttcttccaaagacgtcgtcatctctggtgaccccctcatctctgctcgtcttttccttccaaaccggattcgatcccagcaagagggtcataaagtccccatcttggtctactttcatggtggaggtttcttctttgaatctgccttcaaccaactccaccataactatttcaacaagtttgtctccgtagcagatgttttagtcgtttccgtcgagtataggttggctccagagacccttcttcctgcagcttatgatgactgctgggatgctcttaaatgggtcgccaccaacaccgaaccatggcttgtncaacacggtgatttcaacagagtcttcattggaggtgacagcgctggtgctaatatagttcataacattgccatgcgtgctggggctgaagctttacctggtggtgtcaaactcttgggtgcttttctttctcattcctacttctacggttcaaagccaattggatcggaacctgttgcagggcaccaacagagcgtgccctatttggtatgggattttgtttatccatctgcgcctggagggattgacaaccctatgatcaatccaatggttactggggcgcctagcttggctggacttgggtgttctaagattctggtttgcgttgctgaaaaggatctgataaaggatagaggggttgcgtactatgaggctgtgaagaagagtggctggcaaggtgaagcggaactgttcgaagtggagggcgaggatcatgctttccacatccacaatccacaaacccagaatgccatgaaaatgatcaaacgcctctcggattttctcctccactaaaacacataccctgaggattctgagttttaatgtctcatggatgtaatctaatgtaatgcttcaactctgcttattattattaagcaaataaaatttggaaatcagaagccagtgtagctggcctagttcgtgtgatctaaagtctaataatattctctattatgct

SEQ ID NO: 57872 - protein, 324 aa, Glycine max
  peptide (1)..(324): Ceres Seq. ID no. 12608277
  misc_feature (75)..(127): Pfam Name: Carboxylesterase Pfam Description: Carboxylesterase
  misc_feature (17)..(322): Homolog of NCBI NO: 15227669 NR Description: putative esterase; protein id: At2g03550.1
  misc_feature (8)..(322): Homolog of NCBI NO: 38344841 NR Description: OSJNBa0064H22.22 [Oryza sativa (japonica
  misc_feature (16)..(323): Homolog of NCBI NO: 15222795 NR Description: unknown protein; protein id: At1g49660.1
  misc_feature (10)..(322): Homolog of NCBI NO: 21536771 NR Description: unknown [Arabidopsis thaliana]
  misc_feature (13)..(322): Homolog of NCBI NO: 18402731 NR Description: expressed protein
  misc_feature (10)..(322): Homolog of NCBI NO: 18401743 NR Description: expressed protein
  misc_feature (16)..(322): Homolog of NCBI NO: 18086341 NR Description: AT3g48690/T8P19_200 [Arabidopsis thaliana]
  misc_feature (13)..(322): Homolog of NCBI NO: 21537287 NR Description: putative esterase [Arabidopsis thaliana]
  misc_feature (16)..(323): Homolog of NCBI NO: 15222791 NR Description: hypothetical protein; protein id: At1g49640.1
  misc_feature (16)..(322): Homolog of NCBI NO: 15228425 NR Description: putative protein
  misc_feature (154)..(154): Xaa is any aa, unknown or other
FPSVMDSSSINSNSKEITMEIPSLVRLYKDGTIERLQNSPIVPPTLQDPTSSKDVVISGDPLISARLFLPNRIRSQQEGHKVPILVYFHGGGFFFESAFNQLHHNYFNKFVSVADVLVVSVEYRLAPETLLPAAYDDCWDALKWVATNTEPWLXQHGDFNRVFIGGDSAGANIVHNIAMRAGAEALPGGVKLLGAFLSHSYFYGSKPIGSEPVAGHQQSVPYLVWDFVYPSAPGGIDNPMINPMVTGAPSLAGLGCSKILVCVAEKDLIKDRGVAYYEAVKKSGWQGEAELFEVEGEDHAFHIHNPQTQNAMKMIKRLSDFLLH

SEQ ID NO: 57873 - protein, 320 aa, Glycine max
  peptide (1)..(320): Ceres Seq. ID no. 12608278
  misc_feature (71)..(123): Pfam Name: Carboxylesterase Pfam Description: Carboxylesterase
  misc_feature (13)..(318): Homolog of NCBI NO: 15227669 NR Description: putative esterase; protein id: At2g03550.1
  misc_feature (4)..(318): Homolog of NCBI NO: 38344841 NR Description: OSJNBa0064H22.22 [Oryza sativa (japonica
  misc_feature (12)..(319): Homolog of NCBI NO: 15222795 NR Description: unknown protein; protein id: At1g49660.1
  misc_feature (6)..(318): Homolog of NCBI NO: 21536771 NR Description: unknown [Arabidopsis thaliana]
  misc_feature (9)..(318): Homolog of NCBI NO: 18402731 NR Description: expressed protein
  misc_feature (6)..(318): Homolog of NCBI NO: 18401743 NR Description: expressed protein
  misc_feature (12)..(318): Homolog of NCBI NO: 18086341 NR Description: AT3g48690/T8P19_200 [Arabidopsis thaliana]
  misc_feature (9)..(318): Homolog of NCBI NO: 21537287 NR Description: putative esterase [Arabidopsis thaliana]
  misc_feature (12)..(319): Homolog of NCBI NO: 15222791 NR Description: hypothetical protein; protein id: At1g49640.1
  misc_feature (12)..(318): Homolog of NCBI NO: 15228425 NR Description: putative protein
  misc_feature (150)..(150): Xaa is any aa, unknown or other
MDSSSINSNSKEITMEIPSLVRLYKDGTIERLQNSPIVPPTLQDPTSSKDVVISGDPLISARLFLPNRIRSQQEGHKVPILVYFHGGGFFFESAFNQLHHNYFNKFVSVADVLVVSVEYRLAPETLLPAAYDDCWDALKWVATNTEPWLXQHGDFNRVFIGGDSAGANIVHNIAMRAGAEALPGGVKLLGAFLSHSYFYGSKPIGSEPVAGHQQSVPYLVWDFVYPSAPGGIDNPMINPMVTGAPSLAGLGCSKILVCVAEKDLIKDRGVAYYEAVKKSGWQGEAELFEVEGEDHAFHIHNPQTQNAMKMIKRLSDFLLH

SEQ ID NO: 57874 - protein, 306 aa, Glycine max
  peptide (1)..(306): Ceres Seq. ID no. 12608279
  misc_feature (57)..(109): Pfam Name: Carboxylesterase Pfam Description: Carboxylesterase
  misc_feature (1)..(304): Homolog of NCBI NO: 15227669 NR Description: putative esterase; protein id: At2g03550.1
  misc_feature (1)..(304): Homolog of NCBI NO: 38344841 NR Description: OSJNBa0064H22.22 [Oryza sativa (japonica
  misc_feature (1)..(305): Homolog of NCBI NO: 15222795 NR Description: unknown protein; protein id: At1g49660.1
  misc_feature (1)..(304): Homolog of NCBI NO: 21536771 NR Description: unknown [Arabidopsis thaliana]
  misc_feature (1)..(304): Homolog of NCBI NO: 18402731 NR Description: expressed protein
  misc_feature (1)..(304): Homolog of NCBI NO: 18401743 NR Description: expressed protein
  misc_feature (1)..(304): Homolog of NCBI NO: 18086341 NR Description: AT3g48690/T8P19_200 [Arabidopsis thaliana]
  misc_feature (1)..(304): Homolog of NCBI NO: 21537287 NR Description: putative esterase [Arabidopsis thaliana]
  misc_feature (1)..(305): Homolog of NCBI NO: 15222791 NR Description: hypothetical protein; protein id: At1g49640.1
  misc_feature (1)..(304): Homolog of NCBI NO: 15228425 NR Description: putative protein
  misc_feature (136)..(136): Xaa is any aa, unknown or other
MEIPSLVRLYKDGTIERLQNSPIVPPTLQDPTSSKDVVISGDPLISARLFLPNRIRSQQEGHKVPILVYFHGGGFFFESAFNQLHHNYFNKFVSVADVLVVSVEYRLAPETLLPAAYDDCWDALKWVATNTEPWLXQHGDFNRVFIGGDSAGANIVHNIAMRAGAEALPGGVKLLGAFLSHSYFYGSKPIGSEPVAGHQQSVPYLVWDFVYPSAPGGIDNPMINPMVTGAPSLAGLGCSKILVCVAEKDLIKDRGVAYYEAVKKSGWQGEAELFEVEGEDHAFHIHNPQTQNAMKMIKRLSDFLLH

SEQ ID NO: 57875 - DNA, 1199 bp, Glycine max
  misc_feature (1)..(1199): Ceres Seq. ID no. 15175723
actcttttattcttattttgttttttaaactttcttaacgcaacaaacacatagccacatcttctctttctcttcccatggcattctgactcatacccaaatcattgattgtttgtctatcgaatcggtgagaaaatggcagtggagctgatggggttcccccaaatgggcgaacagaaggcaattgaagaagcagccgccgaaggcctcaagggcatggaacacctcctccgtctcctctcccatcaaccttcccacctccgcactcaccacaccgacgccaccgtttccaacttcaaaaaactcatctcccttctcaaccgccgcaccggccatgcccgtttccgccgcgcacccctcccttccacttccaactctctcgccccatcccctccaccggctaacccggtcaccttcgccccttcgcagtcacagagtctaaccctcgatttctcaaaacctaacatgttcaacaccaccaacgccaaatccatggacctcgagttctctaaagaaaccttcagcgtctcctccaactcctccttcatgtcctccgctatcaccggcgacggtagcgtctccaatggcaaactaggatcctccctcttcctcactcctccgccagtctccgccggaaaacctcctctctcgtttgctccgatcaagaagaggtgccacgaccaccgcgagcactccgacgacatctccgggaaactctccggctccagcaagtgccactgcatcaagagaaggaagaatcgtgtgaagaaaacggttagagttccggcgattagttcgaaggtcgccgatattccgccggatgagtactcgtggaggaagtacggacagaagccgatcaagggatcaccgtacccgagggggtattacaagtgcagtaccgtgagagggtgcccggcgaggaaacacgtggagcgtgcttcggacgatccgacgatgttgattgtaacgtacgagggggagcaccgacactcgattcagaccgcgatgcaggagaacatttccgggggagtgggtttggtattcgagtcaacgtgagtgtggaattaaagaaaggggaactgttggggggctttttttttgtagtaggaaaaaaaaaagaggtgaataggaaaattgaattaaggtggtggttgcaatgtaaatctgaccttattgaaagaaaatattattgtgctgct

SEQ ID NO: 57876 - protein, 306 aa, Glycine max
  peptide (1)..(306): Ceres Seq. ID no. 15175724
  misc_feature (227)..(287): Pfam Name: WRKY DNA -binding domain Pfam Description: WRKY DNA -binding domain
  misc_feature (47)..(296): Homolog of NCBI NO: 7488950 NR Description: DNA-binding protein WRKY3 - parsley
  misc_feature (47)..(294): Homolog of NCBI NO: 38568048 NR Description: OSJNBa0065J03.18 [Oryza sativa (japonica
  misc_feature (1)..(286): Homolog of NCBI NO: 4894963 NR Description: DNA-binding protein WRKY3 [Avena sativa]
  misc_feature (38)..(306): Homolog of NCBI NO: 4760596 NR Description: DNA-binding protein NtWRKY3 [Nicotiana tabacum]
  misc_feature (47)..(305): Homolog of NCBI NO: 21537078 NR Description: putaive DNA-binding protein [Arabidopsis thaliana]
  misc_feature (47)..(305): Homolog of NCBI NO: 16604573 NR Description: putative putaive DNA-binding protein [Arabidopsis
  misc_feature (47)..(305): Homolog of NCBI NO: 22329054 NR Description: WRKY family transcription factor [Arabidopsis
  misc_feature (47)..(305): Homolog of NCBI NO: 30689072 NR Description: WRKY family transcription factor [Arabidopsis
  misc_feature (1)..(296): Homolog of NCBI NO: 25348152 NR Description: probable WRKY-type DNA binding protein
  misc_feature (1)..(305): Homolog of NCBI NO: 18400580 NR Description: WRKY family transcription factor [Arabidopsis
MAVELMGFPQMGEQKAIEEAAAEGLKGMEHLLRLLSHQPSHLRTHHTDATVSNFKKLISLLNRRTGHARFRRAPLPSTSNSLAPSPPPANPVTFAPSQSQSLTLDFSKPNMFNTTNAKSMDLEFSKETFSVSSNSSFMSSAITGDGSVSNGKLGSSLFLTPPPVSAGKPPLSFAPIKKRCHDHREHSDDISGKLSGSSKCHCIKRRKNRVKKTVRVPAISSKVADIPPDEYSWRKYGQKPIKGSPYPRGYYKCSTVRGCPARKHVERASDDPTMLIVTYEGEHRHSIQTAMQENISGGVGLVFEST

SEQ ID NO: 57877 - protein, 301 aa, Glycine max
  peptide (1)..(301): Ceres Seq. ID no. 15175725
  misc_feature (222)..(282): Pfam Name: WRKY DNA -binding domain Pfam Description: WRKY DNA -binding domain
  misc_feature (42)..(291): Homolog of NCBI NO: 7488950 NR Description: DNA-binding protein WRKY3 - parsley
  misc_feature (42)..(289): Homolog of NCBI NO: 38568048 NR Description: OSJNBa0065J03.18 [Oryza sativa (japonica
  misc_feature (1)..(281): Homolog of NCBI NO: 4894963 NR Description: DNA-binding protein WRKY3 [Avena sativa]
  misc_feature (33)..(301): Homolog of NCBI NO: 4760596 NR Description: DNA-binding protein NtWRKY3 [Nicotiana tabacum]
  misc_feature (42)..(300): Homolog of NCBI NO: 21537078 NR Description: putaive DNA-binding protein [Arabidopsis thaliana]
  misc_feature (42)..(300): Homolog of NCBI NO: 16604573 NR Description: putative putaive DNA-binding protein [Arabidopsis
  misc_feature (42)..(300): Homolog of NCBI NO: 22329054 NR Description: WRKY family transcription factor [Arabidopsis
  misc_feature (42)..(300): Homolog of NCBI NO: 30689072 NR Description: WRKY family transcription factor [Arabidopsis
  misc_feature (1)..(291): Homolog of NCBI NO: 25348152 NR Description: probable WRKY-type DNA binding protein
  misc_feature (1)..(300): Homolog of NCBI NO: 18400580 NR Description: WRKY family transcription factor [Arabidopsis
MGFPQMGEQKAIEEAAAEGLKGMEHLLRLLSHQPSHLRTHHTDATVSNFKKLISLLNRRTGHARFRRAPLPSTSNSLAPSPPPANPVTFAPSQSQSLTLDFSKPNMFNTTNAKSMDLEFSKETFSVSSNSSFMSSAITGDGSVSNGKLGSSLFLTPPPVSAGKPPLSFAPIKKRCHDHREHSDDISGKLSGSSKCHCIKRRKNRVKKTVRVPAISSKVADIPPDEYSWRKYGQKPIKGSPYPRGYYKCSTVRGCPARKHVERASDDPTMLIVTYEGEHRHSIQTAMQENISGGVGLVFEST

SEQ ID NO: 57878 - protein, 296 aa, Glycine max
  peptide (1)..(296): Ceres Seq. ID no. 15175726
  misc_feature (217)..(277): Pfam Name: WRKY DNA -binding domain Pfam Description: WRKY DNA -binding domain
  misc_feature (37)..(286): Homolog of NCBI NO: 7488950 NR Description: DNA-binding protein WRKY3 - parsley
  misc_feature (37)..(284): Homolog of NCBI NO: 38568048 NR Description: OSJNBa0065J03.18 [Oryza sativa (japonica
  misc_feature (1)..(276): Homolog of NCBI NO: 4894963 NR Description: DNA-binding protein WRKY3 [Avena sativa]
  misc_feature (28)..(296): Homolog of NCBI NO: 4760596 NR Description: DNA-binding protein NtWRKY3 [Nicotiana tabacum]
  misc_feature (37)..(295): Homolog of NCBI NO: 21537078 NR Description: putaive DNA-binding protein [Arabidopsis thaliana]
  misc_feature (37)..(295): Homolog of NCBI NO: 16604573 NR Description: putative putaive DNA-binding protein [Arabidopsis
  misc_feature (37)..(295): Homolog of NCBI NO: 22329054 NR Description: WRKY family transcription factor [Arabidopsis
  misc_feature (37)..(295): Homolog of NCBI NO: 30689072 NR Description: WRKY family transcription factor [Arabidopsis
  misc_feature (1)..(286): Homolog of NCBI NO: 25348152 NR Description: probable WRKY-type DNA binding protein
  misc_feature (1)..(295): Homolog of NCBI NO: 18400580 NR Description: WRKY family transcription factor [Arabidopsis
MGEQKAIEEAAAEGLKGMEHLLRLLSHQPSHLRTHHTDATVSNFKKLISLLNRRTGHARFRRAPLPSTSNSLAPSPPPANPVTFAPSQSQSLTLDFSKPNMFNTTNAKSMDLEFSKETFSVSSNSSFMSSAITGDGSVSNGKLGSSLFLTPPPVSAGKPPLSFAPIKKRCHDHREHSDDISGKLSGSSKCHCIKRRKNRVKKTVRVPAISSKVADIPPDEYSWRKYGQKPIKGSPYPRGYYKCSTVRGCPARKHVERASDDPTMLIVTYEGEHRHSIQTAMQENISGGVGLVFEST

SEQ ID NO: 57879 - DNA, 1405 bp, Glycine max
  misc_feature (1)..(1405): Ceres Seq. ID no. 14304140
aaaacaatacttctactattagctttgtgagtgcaaccattcgcatcttcattcccagatttaaccaaacctctgaatgttcaaagcttccttgcctataatagcaaaaatccacacaaagcactcaccaaactcttaagaatctatggacctcttatgactttgaaatcaggcagcataagcaccatagttatttcctctcctcaagtagcaaaacgagtgctgcatgaaaatattctccccacaaatggaggaaccttagaagagtttgtgccacaaaaatattctccccacaagtgctcgactccactcaaatccttcgccaacaaaagcttcgggatttattggattttgtgaaagaaagttgcaagaaaggtgaggttgtggacattggtgcggttgtctttgcaacaatacttaattccatttcaaccacttagaaaagcctcaagagttcaagaacattattcggggtatgatggaagaagctggaaggcctaatgttgcagatttctttcccattcttcgtccacttgaccctcaacgtgtccttgcaaggaggagcatttatattaagaagttgtttgagattatcgatggaattattgaagagtgtgttcaagagcttcaaaaactgactccatggatgtattggattcacttcttaacaacaatgaagaaactggttctctgttgagtcgcgatgagacgatacacttgttcatgctcactaaacctatctcagaaaaacaaagatctcagactcattcaccattggatcgtcgtgaaatttaaacaccaagttcacaacccagttccgagcattctcaccgttgggaatttcaaaatcatgtctgagcttataggaaaatcattcgcattgtagccttttaatttcccgcagaaacccaaaactgtctcgataaaactatgatcccggtttcgttaaccgttggattttcatgaaatttggatatgttgttcgaaattcaattgcgcacacttgaaccgttgggatttgcgagataatattcgtgagggagaaaaatgaatcacatgaagacagtacaagtggaggtttcaatttcttcttcatctctctgacgtttgggaattctatcggagcaatcggaggaataactgaaggaatctcaggggaccgctagagatgctgctatcgctggctaaagacacgtgagtcctctcagaggtaagagatgagttattcacaattgagaattagcgaaaaaatgtgtacagatccttagagatatcaactgaaataagttttggggtatttttccaattttcattttattcttataattattacagtgaattatatatgtttgacagaccaatttttgtgaaattgatatgctattgtgttgagcgtgaaccctat

SEQ ID NO: 57880 - protein, 73 aa, Glycine max
  peptide (1)..(73): Ceres Seq. ID no. 14304141
  misc_feature (1)..(54): Pfam Name: Cytochrome P450 Pfam Description: Cytochrome P450
  misc_feature (1)..(50): Homolog of NCBI NO: 30690062 NR Description: cytochrome P450 family [Arabidopsis thaliana]
  misc_feature (1)..(50): Homolog of NCBI NO: 25282599 NR Description: cytochrome P450 monooxygenase [imported] -
  misc_feature (1)..(50): Homolog of NCBI NO: 15225510 NR Description: cytochrome p450 family [Arabidopsis thaliana]
  misc_feature (1)..(46): Homolog of NCBI NO: 33320161 NR Description: cytochrome P450 [Pastinaca sativa]
  misc_feature (1)..(50): Homolog of NCBI NO: 30690065 NR Description: cytochrome P450 family [Arabidopsis thaliana]
  misc_feature (1)..(38): Homolog of NCBI NO: 37531380 NR Description: putative Cytochrome P450 [Oryza sativa (japonica
  misc_feature (1)..(50): Homolog of NCBI NO: 17065916 NR Description: geraniol 10-hydroxylase [Catharanthus roseus]
  misc_feature (1)..(46): Homolog of NCBI NO: 6009458 NR Description: cytochrome P450 [Cicer arietinum]
  misc_feature (1)..(54): Homolog of NCBI NO: 7406712 NR Description: putative ripening-related P-450 enzyme [Vitis
  misc_feature (1)..(46): Homolog of NCBI NO: 4651206 NR Description: cytochrome P450 hydroxylase [Cicer arietinum]
MMEEAGRPNVADFFPILRPLDPQRVLARRSIYIKKLFEIIDGIIEECVQELQKLTPWMYWIHFLTTMKKLVLC

SEQ ID NO: 57881 - protein, 72 aa, Glycine max
  peptide (1)..(72): Ceres Seq. ID no. 14304142
  misc_feature (1)..(53): Pfam Name: Cytochrome P450 Pfam Description: Cytochrome P450
  misc_feature (1)..(49): Homolog of NCBI NO: 30690062 NR Description: cytochrome P450 family [Arabidopsis thaliana]
  misc_feature (1)..(49): Homolog of NCBI NO: 25282599 NR Description: cytochrome P450 monooxygenase [imported] -
  misc_feature (1)..(49): Homolog of NCBI NO: 15225510 NR Description: cytochrome p450 family [Arabidopsis thaliana]
  misc_feature (1)..(45): Homolog of NCBI NO: 33320161 NR Description: cytochrome P450 [Pastinaca sativa]
  misc_feature (1)..(49): Homolog of NCBI NO: 30690065 NR Description: cytochrome P450 family [Arabidopsis thaliana]
  misc_feature (1)..(37): Homolog of NCBI NO: 37531380 NR Description: putative Cytochrome P450 [Oryza sativa (japonica
  misc_feature (1)..(49): Homolog of NCBI NO: 17065916 NR Description: geraniol 10-hydroxylase [Catharanthus roseus]
  misc_feature (1)..(45): Homolog of NCBI NO: 6009458 NR Description: cytochrome P450 [Cicer arietinum]
  misc_feature (1)..(53): Homolog of NCBI NO: 7406712 NR Description: putative ripening-related P-450 enzyme [Vitis
  misc_feature (1)..(45): Homolog of NCBI NO: 4651206 NR Description: cytochrome P450 hydroxylase [Cicer arietinum]
MEEAGRPNVADFFPILRPLDPQRVLARRSIYIKKLFEIIDGIIEECVQELQKLTPWMYWIHFLTTMKKLVLC

SEQ ID NO: 57882 - protein, 66 aa, Glycine max
  peptide (1)..(66): Ceres Seq. ID no. 14304143
  misc_feature (1)..(30): Homolog of NCBI NO: 37531420 NR Description: putative cytochrome P450 [Oryza sativa (japonica
  misc_feature (1)..(34): Homolog of NCBI NO: 13122290 NR Description: cytochrome P450 (CYP76C2) [Arabidopsis thaliana]
  misc_feature (1)..(31): Homolog of NCBI NO: 30690062 NR Description: cytochrome P450 family [Arabidopsis thaliana]
  misc_feature (1)..(31): Homolog of NCBI NO: 25282599 NR Description: cytochrome P450 monooxygenase [imported] -
  misc_feature (1)..(28): Homolog of NCBI NO: 15225510 NR Description: cytochrome p450 family [Arabidopsis thaliana]
  misc_feature (1)..(25): Homolog of NCBI NO: 33320161 NR Description: cytochrome P450 [Pastinaca sativa]
  misc_feature (1)..(31): Homolog of NCBI NO: 30690065 NR Description: cytochrome P450 family [Arabidopsis thaliana]
  misc_feature (1)..(26): Homolog of NCBI NO: 37531380 NR Description: putative Cytochrome P450 [Oryza sativa (japonica
  misc_feature (1)..(28): Homolog of NCBI NO: 17065916 NR Description: geraniol 10-hydroxylase [Catharanthus roseus]
  misc_feature (1)..(28): Homolog of NCBI NO: 7406712 NR Description: putative ripening-related P-450 enzyme [Vitis
MTLKSGSISTIVISSPQVAKRVLHENILPTNGGTLEEFVPQKYSPHKCSTPLKSFANKSFGIYWIL

SEQ ID NO: 57883 - DNA, 2139 bp, Glycine max
  misc_feature (1)..(2139): Ceres Seq. ID no. 15170362
attcaagtcctaaaataccaaaaacccattcacttttccacaagccttagttcttctcatttattctctttttcaaaatactttcactctctctaaccttccagttctcactaaacctcgtgaagctcgtgatggacaccaagataggttcactagacgcgcccaagcccaacagcaacgacgtcgtatcatgcaacctcaccagcagcgccgccatccagccctgcttgccggcgacggtgatcaacggcgccggctgtagtgactccaccttgggcggccacctggcccgccggctggtggaaatcggcgtcaccgacgtgttctccgttcccggggacttcaacctgacgctgctggaccacctcatcgcggagccggcgctgcacctggtcgggtgctgcaacgagctcaacgccgggtacgccgccgacggctacgcgcgcgccaggggagtcggcgcgtgcgtggtgacgttcaccgtcggcggcctcagcgtgctcaacgccatcgccggagcgtacagcgagaacttgccgctaatttgcatcgtcggtgggcccaactccaacgactacggcaccagtcggatcctccatcacaccatcgggttacccgatttcagccaggagctaaggtgctttcagaccattacttgcttccaggctgtggtgaataacttggaagatgctcatgagttgattgatacagcaatctcaactgcgctgaaagaaagcaaacctgtgtatataagcattagctgtaacttgcctgggattcctcaccccactttcagtcgtgaccctgttcgtttttcattgtctccaagattgagtaataagatggggttggaggccgcagtggaggcagcggcggaattccttaacaaggcagtgaaaccagtgctggtaggtggtcctaaactgagggtggcaacagcatctgatgcctttgtcgaactggctgatgcgtgtggttatgcgcttgctgtgatgccgtcggctaaagggcaggttccagagcaccatccccattttatcggaacttattggggtgctgtgagcactgccttctgtgctgagattgtggagtctgcggatgcatacttgtttgctggtccaatttttaatgactacagctctgtggggtattcacttcttctcaagaaggagaaggcgatcattgtgcagcctgatcgggttgtgatcgcgaatggacctgcttttgggtgtgtgctgatgaaggatttcctcaaggcactcgcaaagcgcctcaagcacaacaatactgcatatgaaaattaccacaggatatttgtccctgatgggcatcctttgaaggctgcacccagagagcctttgagggttaatgttctgttccaacatatacaaaatatgctgtctggtgaaactgctgtaattgctgagacaggggactcctggtttaattgccaaaagctgaaattgccaaaggcatgtgggtatgagttccaaatgcaatatggttcaattggatggtctgttggtgctactctgggttatgctcaagccgttcctgagaagcgagtgattgcctgcattggtgatggaagttttcaggtgactgcccaagatgtatcgacaatgttacggtgcgggcaaaaaaccatcatctttctgatcaacaatggtggatacaccatcgaggttgaaattcatgatgggccgtacaatgtgattaagaactggaattacactgggttgattgatgcaatccacaatggtgaagggaaatgctggactgccaaggtgttctgtgaagaggagctagttgaagcaattgccacagccacaggacccaagaaagactccttatgcttcattgaggtgattgttcataaggatgacaccagtaaagaattgcttgaatggggctcaagggtttctgctgccaatagccgtcctcccaatcctcagtaatcttcagaatttatcctatgactaaattgctgcagttgccctttagctctatgaaagtgagaatcatttgagatgatgcccttgtagggaatttacctttgttaatggcttgaaacatttatgctaaactgactccccacttgtttgtgtaaattctttcacttttgttcacctttgtttg

SEQ ID NO: 57884 - protein, 608 aa, Glycine max
  peptide (1)..(608): Ceres Seq. ID no. 15170363
  misc_feature (243)..(392): Pfam Name: Thiamine pyrophosphate enzyme, central domain Pfam Description: Thiamine pyrophosphate enzyme, central domain
  misc_feature (26)..(451): Homolog of NCBI NO: 1706330 NR Description: Pyruvate decarboxylase isozyme 2 (PDC)
  misc_feature (1)..(608): Homolog of NCBI NO: 15240950 NR Description: pyruvate decarboxylase-related protein
  misc_feature (44)..(608): Homolog of NCBI NO: 10732644 NR Description: pyruvate decarboxylase 1 [Vitis vinifera]
  misc_feature (1)..(608): Homolog of NCBI NO: 1616787 NR Description: pyruvate decarboxylase [Arabidopsis thaliana]
  misc_feature (1)..(608): Homolog of NCBI NO: 15234062 NR Description: pyruvate decarboxylase-1 (Pdc1) [Arabidopsis
  misc_feature (1)..(608): Homolog of NCBI NO: 15240423 NR Description: pyruvate decarboxylase (gb|AAB16855.1)
  misc_feature (12)..(608): Homolog of NCBI NO: 24745919 NR Description: pyruvate decarboxylase [Solanum tuberosum]
  misc_feature (1)..(608): Homolog of NCBI NO: 17225598 NR Description: pyruvate decarboxylase [Fragaria x ananassa]
  misc_feature (1)..(608): Homolog of NCBI NO: 10121330 NR Description: pyruvate decarboxylase [Fragaria x ananassa]
  misc_feature (1)..(608): Homolog of NCBI NO: 29373077 NR Description: pyruvate decarboxylase 1 [Lotus corniculatus]
MDTKIGSLDAPKPNSNDVVSCNLTSSAAIQPCLPATVINGAGCSDSTLGGHLARRLVEIGVTDVFSVPGDFNLTLLDHLIAEPALHLVGCCNELNAGYAADGYARARGVGACVVTFTVGGLSVLNAIAGAYSENLPLICIVGGPNSNDYGTSRILHHTIGLPDFSQELRCFQTITCFQAVVNNLEDAHELIDTAISTALKESKPVYISISCNLPGIPHPTFSRDPVRFSLSPRLSNKMGLEAAVEAAAEFLNKAVKPVLVGGPKLRVATASDAFVELADACGYALAVMPSAKGQVPEHHPHFIGTYWGAVSTAFCAEIVESADAYLFAGPIFNDYSSVGYSLLLKKEKAIIVQPDRVVIANGPAFGCVLMKDFLKALAKRLKHNNTAYENYHRIFVPDGHPLKAAPREPLRVNVLFQHIQNMLSGETAVIAETGDSWFNCQKLKLPKACGYEFQMQYGSIGWSVGATLGYAQAVPEKRVIACIGDGSFQVTAQDVSTMLRCGQKTIIFLINNGGYTIEVEIHDGPYNVIKNWNYTGLIDAIHNGEGKCWTAKVFCEEELVEAIATATGPKKDSLCFIEVIVHKDDTSKELLEWGSRVSAANSRPPNPQ

SEQ ID NO: 57885 - protein, 371 aa, Glycine max
  peptide (1)..(371): Ceres Seq. ID no. 15170364
  misc_feature (6)..(155): Pfam Name: Thiamine pyrophosphate enzyme, central domain Pfam Description: Thiamine pyrophosphate enzyme, central domain
  misc_feature (1)..(214): Homolog of NCBI NO: 1706330 NR Description: Pyruvate decarboxylase isozyme 2 (PDC)
  misc_feature (1)..(371): Homolog of NCBI NO: 15240950 NR Description: pyruvate decarboxylase-related protein
  misc_feature (1)..(371): Homolog of NCBI NO: 10732644 NR Description: pyruvate decarboxylase 1 [Vitis vinifera]
  misc_feature (1)..(371): Homolog of NCBI NO: 1616787 NR Description: pyruvate decarboxylase [Arabidopsis thaliana]
  misc_feature (1)..(371): Homolog of NCBI NO: 15234062 NR Description: pyruvate decarboxylase-1 (Pdc1) [Arabidopsis
  misc_feature (1)..(371): Homolog of NCBI NO: 15240423 NR Description: pyruvate decarboxylase (gb|AAB16855.1)
  misc_feature (1)..(371): Homolog of NCBI NO: 24745919 NR Description: pyruvate decarboxylase [Solanum tuberosum]
  misc_feature (1)..(371): Homolog of NCBI NO: 17225598 NR Description: pyruvate decarboxylase [Fragaria x ananassa]
  misc_feature (1)..(371): Homolog of NCBI NO: 10121330 NR Description: pyruvate decarboxylase [Fragaria x ananassa]
  misc_feature (1)..(371): Homolog of NCBI NO: 29373077 NR Description: pyruvate decarboxylase 1 [Lotus corniculatus]
MGLEAAVEAAAEFLNKAVKPVLVGGPKLRVATASDAFVELADACGYALAVMPSAKGQVPEHHPHFIGTYWGAVSTAFCAEIVESADAYLFAGPIFNDYSSVGYSLLLKKEKAIIVQPDRVVIANGPAFGCVLMKDFLKALAKRLKHNNTAYENYHRIFVPDGHPLKAAPREPLRVNVLFQHIQNMLSGETAVIAETGDSWFNCQKLKLPKACGYEFQMQYGSIGWSVGATLGYAQAVPEKRVIACIGDGSFQVTAQDVSTMLRCGQKTIIFLINNGGYTIEVEIHDGPYNVIKNWNYTGLIDAIHNGEGKCWTAKVFCEEELVEAIATATGPKKDSLCFIEVIVHKDDTSKELLEWGSRVSAANSRPPNPQ

SEQ ID NO: 57886 - protein, 321 aa, Glycine max
  peptide (1)..(321): Ceres Seq. ID no. 15170365
  misc_feature (1)..(105): Pfam Name: Thiamine pyrophosphate enzyme, central domain Pfam Description: Thiamine pyrophosphate enzyme, central domain
  misc_feature (1)..(164): Homolog of NCBI NO: 1706330 NR Description: Pyruvate decarboxylase isozyme 2 (PDC)
  misc_feature (1)..(321): Homolog of NCBI NO: 15240950 NR Description: pyruvate decarboxylase-related protein
  misc_feature (1)..(321): Homolog of NCBI NO: 10732644 NR Description: pyruvate decarboxylase 1 [Vitis vinifera]
  misc_feature (1)..(321): Homolog of NCBI NO: 1616787 NR Description: pyruvate decarboxylase [Arabidopsis thaliana]
  misc_feature (1)..(321): Homolog of NCBI NO: 15234062 NR Description: pyruvate decarboxylase-1 (Pdc1) [Arabidopsis
  misc_feature (1)..(321): Homolog of NCBI NO: 15240423 NR Description: pyruvate decarboxylase (gb|AAB16855.1)
  misc_feature (1)..(321): Homolog of NCBI NO: 24745919 NR Description: pyruvate decarboxylase [Solanum tuberosum]
  misc_feature (1)..(321): Homolog of NCBI NO: 17225598 NR Description: pyruvate decarboxylase [Fragaria x ananassa]
  misc_feature (1)..(321): Homolog of NCBI NO: 10121330 NR Description: pyruvate decarboxylase [Fragaria x ananassa]
  misc_feature (1)..(321): Homolog of NCBI NO: 29373077 NR Description: pyruvate decarboxylase 1 [Lotus corniculatus]
MPSAKGQVPEHHPHFIGTYWGAVSTAFCAEIVESADAYLFAGPIFNDYSSVGYSLLLKKEKAIIVQPDRVVIANGPAFGCVLMKDFLKALAKRLKHNNTAYENYHRIFVPDGHPLKAAPREPLRVNVLFQHIQNMLSGETAVIAETGDSWFNCQKLKLPKACGYEFQMQYGSIGWSVGATLGYAQAVPEKRVIACIGDGSFQVTAQDVSTMLRCGQKTIIFLINNGGYTIEVEIHDGPYNVIKNWNYTGLIDAIHNGEGKCWTAKVFCEEELVEAIATATGPKKDSLCFIEVIVHKDDTSKELLEWGSRVSAANSRPPNPQ

SEQ ID NO: 57887 - DNA, 759 bp, Glycine max
  misc_feature (1)..(759): Ceres Seq. ID no. 15168440
aaaaagagaagattggattggggattaggaaaaaatggcgtgcaggggtatgcttcgttccaccattctcatagaacccagcctactccgttctttaaatttcaattctaacaaacatcacatagcttcactcaaccaatggtcttgccggtttcattctccaaaacccccttattcttcctctcagaacgaaacgccgttgtctcaggaccctgtcttgaaggccatttcagagatttccaaaggcgaagggagggttggccaaacaacaaacgtaattattggaagcactgctgccgatgattctaacaatgaatggttggctttggaccagaaggtgaactcgtacccaaccgatcgaggatttaccgccattggaactggaggtgaggattttgtgcaagccatggttgttgctgtcgaatctgtaatccaacaaccaattcctcagggatatgtgaagcaaaagttatcgtcggggggcaaatatgtatctgtaaatattgggcccattcaagttgtttctagtgaacaggtccaagctgtatataatgccatgaggacagacaaccgggtgaaatattttttataatctgtcacattgttttgtagagaacaccacgattgcaaggtatgtaccaacatggtttttttactacctaagcattaattaacccatgatatcattctaatcagagtaatcatggtgcaatttggatttcttttgtaatccctgaagatgtaacatcatgatttgtt

SEQ ID NO: 57888 - protein, 185 aa, Glycine max
  peptide (1)..(185): Ceres Seq. ID no. 15168441
  misc_feature (94)..(185): Pfam Name: Protein of unknown function (DUF493) Pfam Description: Protein of unknown function (DUF493)
  misc_feature (58)..(143): Homolog of NCBI NO: 38347226 NR Description: OSJNBa0044M19.8 [Oryza sativa (japonica
  misc_feature (49)..(185): Homolog of NCBI NO: 18396311 NR Description: expressed protein [Arabidopsis thaliana]
MACRGMLRSTILIEPSLLRSLNFNSNKHHIASLNQWSCRFHSPKPPYSSSQNETPLSQDPVLKAISEISKGEGRVGQTTNVIIGSTAADDSNNEWLALDQKVNSYPTDRGFTAIGTGGEDFVQAMVVAVESVIQQPIPQGYVKQKLSSGGKYVSVNIGPIQVVSSEQVQAVYNAMRTDNRVKYFL

SEQ ID NO: 57889 - protein, 180 aa, Glycine max
  peptide (1)..(180): Ceres Seq. ID no. 15168442
  misc_feature (89)..(180): Pfam Name: Protein of unknown function (DUF493) Pfam Description: Protein of unknown function (DUF493)
  misc_feature (53)..(138): Homolog of NCBI NO: 38347226 NR Description: OSJNBa0044M19.8 [Oryza sativa (japonica
  misc_feature (44)..(180): Homolog of NCBI NO: 18396311 NR Description: expressed protein [Arabidopsis thaliana]
MLRSTILIEPSLLRSLNFNSNKHHIASLNQWSCRFHSPKPPYSSSQNETPLSQDPVLKAISEISKGEGRVGQTTNVIIGSTAADDSNNEWLALDQKVNSYPTDRGFTAIGTGGEDFVQAMVVAVESVIQQPIPQGYVKQKLSSGGKYVSVNIGPIQVVSSEQVQAVYNAMRTDNRVKYFL

SEQ ID NO: 57890 - DNA, 428 bp, Glycine max
  misc_feature (1)..(428): Ceres Seq. ID no. 15225482
aaggaatgaagcagtaagcttttgtgaagggtggaaatggagtctcaaaaatctcaaaatcatgctaaaaaggcaaacaagtacattattatggaagttaccaagcgcaacatagcaccatgtagcaaaaactgcctaccgccagcatcaaatccttacaacagaggatgctccaggatatgcaaatgcagaaaatgaagtcttcagttcgttcaatgggaagaataaggaaatcatatacctatttttcatcttttatatttatgcagtcgtctatgatgaattgatgagtgttttcctggccatgtgtgttgttttggcttctgctttgtaaacacaagataataatacaggcacaataataaactgtataatgacatgaagatcaatatctttctttgaagctaagaaaaattgttatagcatgc

SEQ ID NO: 57891 - protein, 53 aa, Glycine max
  peptide (1)..(53): Ceres Seq. ID no. 15225483
  misc_feature (1)..(52): Pfam Name: Rapid ALkalinization Factor (RALF) Pfam Description: Rapid ALkalinization Factor (RALF)
MESQKSQNHAKKANKYIIMEVTKRNIAPCSKNCLPPASNPYNRGCSRICKCRK

SEQ ID NO: 57892 - protein, 39 aa, Glycine max
  peptide (1)..(39): Ceres Seq. ID no. 15225484
MLQDMQMQKMKSSVRSMGRIRKSYTYFSSFIFMQSSMMN

SEQ ID NO: 57893 - protein, 37 aa, Glycine max
  peptide (1)..(37): Ceres Seq. ID no. 15225485
RNEAVSFCEGWKWSLKNLKIMLKRQTSTLLWKLPSAT

SEQ ID NO: 57894 - DNA, 566 bp, Glycine max
  misc_feature (1)..(566): Ceres Seq. ID no. 13594336
aatttgtctcttttattcgacctcaactcagtctccttcactccatatccatatcttcctctctcacactctctaagtgatggctttcaattccaaaagggcaccgatctcaagttcaaaagccatagctgatgcagcctcatggtgctgtgcatgttttcttgtgtccctcttattgctatgcatattcagagacatctctgcccttcatgatgatcaagggaacttgatgatgagaagcagccatgtcttgtccaagccatcatgtgatgaaatatatgtggttggagaaggtgagacacttcatacaatcagtgacaagtgtggtgatccctttattgtggaaaagaaccctcatatccatgaccctgatgatgtcttcccaggacttgttctcaagattacacgctcacaaacaacatagcttgaataattgaaagttaattcctatacatgtatgtatctttcttcaatatagaacaaggaaaaaaaacttccttatgggcatcctctaaagtttttagttttggtttgcttgttgtatgtactacactttgcctagcaag

SEQ ID NO: 57895 - protein, 114 aa, Glycine max
  peptide (1)..(114): Ceres Seq. ID no. 13594337
  misc_feature (67)..(108): Pfam Name: LysM domain Pfam Description: LysM domain
  misc_feature (7)..(108): Homolog of NCBI NO: 22328924 NR Description: hypothetical protein [Arabidopsis thaliana]
  misc_feature (11)..(111): Homolog of NCBI NO: 15231684 NR Description: expressed protein [Arabidopsis thaliana]
  misc_feature (14)..(109): Homolog of NCBI NO: 37536226 NR Description: unknown protein [Oryza sativa (japonica
  misc_feature (17)..(108): Homolog of NCBI NO: 15241722 NR Description: expressed protein [Arabidopsis thaliana]
  misc_feature (6)..(108): Homolog of NCBI NO: 38605944 NR Description: OSJNBa0019K04.5 [Oryza sativa (japonica
  misc_feature (15)..(112): Homolog of NCBI NO: 27452901 NR Description: Putative dihydrodipicolinate reductase-like
MAFNSKRAPISSSKAIADAASWCCACFLVSLLLLCIFRDISALHDDQGNLMMRSSHVLSKPSCDEIYVVGEGETLHTISDKCGDPFIVEKNPHIHDPDDVFPGLVLKITRSQTT

SEQ ID NO: 57896 - protein, 64 aa, Glycine max
  peptide (1)..(64): Ceres Seq. ID no. 13594338
  misc_feature (17)..(58): Pfam Name: LysM domain Pfam Description: LysM domain
  misc_feature (1)..(58): Homolog of NCBI NO: 22328924 NR Description: hypothetical protein [Arabidopsis thaliana]
  misc_feature (1)..(61): Homolog of NCBI NO: 15231684 NR Description: expressed protein [Arabidopsis thaliana]
  misc_feature (1)..(59): Homolog of NCBI NO: 37536226 NR Description: unknown protein [Oryza sativa (japonica
  misc_feature (1)..(58): Homolog of NCBI NO: 15241722 NR Description: expressed protein [Arabidopsis thaliana]
  misc_feature (1)..(58): Homolog of NCBI NO: 38605944 NR Description: OSJNBa0019K04.5 [Oryza sativa (japonica
  misc_feature (1)..(62): Homolog of NCBI NO: 27452901 NR Description: Putative dihydrodipicolinate reductase-like
MMRSSHVLSKPSCDEIYVVGEGETLHTISDKCGDPFIVEKNPHIHDPDDVFPGLVLKITRSQTT

SEQ ID NO: 57897 - protein, 63 aa, Glycine max
  peptide (1)..(63): Ceres Seq. ID no. 13594339
  misc_feature (16)..(57): Pfam Name: LysM domain Pfam Description: LysM domain
  misc_feature (1)..(57): Homolog of NCBI NO: 22328924 NR Description: hypothetical protein [Arabidopsis thaliana]
  misc_feature (1)..(60): Homolog of NCBI NO: 15231684 NR Description: expressed protein [Arabidopsis thaliana]
  misc_feature (1)..(58): Homolog of NCBI NO: 37536226 NR Description: unknown protein [Oryza sativa (japonica
  misc_feature (1)..(57): Homolog of NCBI NO: 15241722 NR Description: expressed protein [Arabidopsis thaliana]
  misc_feature (1)..(57): Homolog of NCBI NO: 38605944 NR Description: OSJNBa0019K04.5 [Oryza sativa (japonica
  misc_feature (1)..(61): Homolog of NCBI NO: 27452901 NR Description: Putative dihydrodipicolinate reductase-like
MRSSHVLSKPSCDEIYVVGEGETLHTISDKCGDPFIVEKNPHIHDPDDVFPGLVLKITRSQTT

SEQ ID NO: 57898 - DNA, 981 bp, Glycine max
  misc_feature (1)..(981): Ceres Seq. ID no. 15173454
agacgccattctgcaccgagattcattcttcaccaaaacttcgcaaagaaacactacacatccatggcaactgctggcgtgcaagaagttcgtgttccccctctaacttccacctctgagccaccttctctctttgacggaaccaccaggttgtacatcagttatatttgtccctatgcgcagcgtgtttggatcactcggaactataagggactacaagacaagatcaaactggttcctattgacctacaaaacaggcctgcttggtataaggagaaagtctaccctgaaaacaaggtgccatcattggagcacaatggaaaggtcttgggtgaaagtctcgatttggtcaaatacatagatgacaactttgaagggccgtctctagttcccagtgatcctgccaagaaagagtttggtgaggagttgatttcccatgttgatacattcaccaaagagctgtattctgcattgaaaggagatccaatacatcaagccggtcctgcctttgattacttagagaatgctcttggtaaatttggtgatgggccattctttcttggtcaattcagctgggtggatattgcttatgttccatttgttgaaagattccagctcgtctttgctgatgtgttcaagcatgatataactgaaggaagacctaaacttgcaacatggattgaggaagtgaacaagattagtgcttatacacagacaagagctgatccaaaggaaatcgttgatcttttcaagaaacgttttttggctcaacagtgaaaatttggttgcagtgggtatcctctaagttgtagattgttgtcaataaagtgttgtgtgtttatcggatgcttctttagtcacatgttgttttgtcactttgtctgctagagctgcaaataatttgatttcagggtcggtgatgtttatgtaccagcttgtctgatgtcagactaataaaatgatgcttgtgtatcggctttt

SEQ ID NO: 57899 - protein, 258 aa, Glycine max
  peptide (1)..(258): Ceres Seq. ID no. 15173455
  misc_feature (49)..(122): Pfam Name: Glutathione S-transferase, N-terminal domain Pfam Description: Glutathione S-transferase, N-terminal domain
RRHSAPRFILHQNFAKKHYTSMATAGVQEVRVPPLTSTSEPPSLFDGTTRLYISYICPYAQRVWITRNYKGLQDKIKLVPIDLQNRPAWYKEKVYPENKVPSLEHNGKVLGESLDLVKYIDDNFEGPSLVPSDPAKKEFGEELISHVDTFTKELYSALKGDPIHQAGPAFDYLENALGKFGDGPFFLGQFSWVDIAYVPFVERFQLVFADVFKHDITEGRPKLATWIEEVNKISAYTQTRADPKEIVDLFKKRFLAQQ

SEQ ID NO: 57900 - protein, 237 aa, Glycine max
  peptide (1)..(237): Ceres Seq. ID no. 15173456
  misc_feature (28)..(101): Pfam Name: Glutathione S-transferase, N-terminal domain Pfam Description: Glutathione S-transferase, N-terminal domain
MATAGVQEVRVPPLTSTSEPPSLFDGTTRLYISYICPYAQRVWITRNYKGLQDKIKLVPIDLQNRPAWYKEKVYPENKVPSLEHNGKVLGESLDLVKYIDDNFEGPSLVPSDPAKKEFGEELISHVDTFTKELYSALKGDPIHQAGPAFDYLENALGKFGDGPFFLGQFSWVDIAYVPFVERFQLVFADVFKHDITEGRPKLATWIEEVNKISAYTQTRADPKEIVDLFKKRFLAQQ

SEQ ID NO: 57901 - DNA, 859 bp, Glycine max
  misc_feature (1)..(859): Ceres Seq. ID no. 15170341
acagcatcaaaacaaacaaacaacacagtttttcttgtctctatattcttccggccaccgcagatggcggcggagcacgacagctgctgctcgcgctgtgtcaccttcctaataaccataggcctcacagcgctcttcctatggctgagtctccgcgttgacgaaccaaaatgctacctcgactacatttacgttcctgccctcaacaaaaccctaaattccaattccactcacaacaaaaacaccacaatactcttcgctctcaagctcaccaacgggaacaaggacaaaggcatccaatacgacgacgttctcctctccttcagagtcttcgagagcgtcaacctcacgcgcccactcggcaacgccaccgtgcaaaggttctaccagggccaccagaagaaggccaccaagcacggaaacttcagcggcggcggcggaaacctcaccgcggcggtggctgggagaatgtggtaccgtgtggactatgctactgcggtgaagtacaagattctcttctggtacacgaaacggcaccgtttatggggaggggcaaatgtggaaattggcgattcgggaatgaaggtgtatcgtaaagccgttaggcttggagggaagaaccccgtggtgatcgagtccggcgcatctaagctcagtggacgctatcgtgcgcttcttctttcccttcttctccctttttgtggcttgtgggtttagttgacttgactttttcacttcacccacttttgtgtgtattgttattattttatttttgtaatttgtattgtgacttttctttttgtctagttccaattcaaagattagagatgattatattcgattacacgagtttgaatcc

SEQ ID NO: 57902 - protein, 238 aa, Glycine max
  peptide (1)..(238): Ceres Seq. ID no. 15170342
  misc_feature (28)..(108): Homolog of NCBI NO: 24417466 NR Description: unknown [Arabidopsis thaliana]
  misc_feature (34)..(193): Homolog of NCBI NO: 22331216 NR Description: ndr1-related protein [Arabidopsis thaliana]
  misc_feature (29)..(207): Homolog of NCBI NO: 22331213 NR Description: non-race specific disease resistance protein
  misc_feature (28)..(203): Homolog of NCBI NO: 15232308 NR Description: non-race specific disease resistance protein
  misc_feature (26)..(199): Homolog of NCBI NO: 38489222 NR Description: NDR1-like protein [Nicotiana benthamiana]
TASKQTNNTVFLVSIFFRPPQMAAEHDSCCSRCVTFLITIGLTALFLWLSLRVDEPKCYLDYIYVPALNKTLNSNSTHNKNTTILFALKLTNGNKDKGIQYDDVLLSFRVFESVNLTRPLGNATVQRFYQGHQKKATKHGNFSGGGGNLTAAVAGRMWYRVDYATAVKYKILFWYTKRHRLWGGANVEIGDSGMKVYRKAVRLGGKNPVVIESGASKLSGRYRALLLSLLLPFCGLWV

SEQ ID NO: 57903 - protein, 217 aa, Glycine max
  peptide (1)..(217): Ceres Seq. ID no. 15170343
  misc_feature (7)..(87): Homolog of NCBI NO: 24417466 NR Description: unknown [Arabidopsis thaliana]
  misc_feature (13)..(172): Homolog of NCBI NO: 22331216 NR Description: ndr1-related protein [Arabidopsis thaliana]
  misc_feature (8)..(186): Homolog of NCBI NO: 22331213 NR Description: non-race specific disease resistance protein
  misc_feature (7)..(182): Homolog of NCBI NO: 15232308 NR Description: non-race specific disease resistance protein
  misc_feature (5)..(178): Homolog of NCBI NO: 38489222 NR Description: NDR1-like protein [Nicotiana benthamiana]
MAAEHDSCCSRCVTFLITIGLTALFLWLSLRVDEPKCYLDYIYVPALNKTLNSNSTHNKNTTILFALKLTNGNKDKGIQYDDVLLSFRVFESVNLTRPLGNATVQRFYQGHQKKATKHGNFSGGGGNLTAAVAGRMWYRVDYATAVKYKILFWYTKRHRLWGGANVEIGDSGMKVYRKAVRLGGKNPVVIESGASKLSGRYRALLLSLLLPFCGLWV

SEQ ID NO: 57904 - protein, 141 aa, Glycine max
  peptide (1)..(141): Ceres Seq. ID no. 15170344
MLPRLHLRSCPQQNPKFQFHSQQKHHNTLRSQAHQREQGQRHPIRRRSPLLQSLRERQPHAPTRQRHRAKVLPGPPEEGHQARKLQRRRRKPHRGGGWENVVPCGLCYCGEVQDSLLVHETAPFMGRGKCGNWRFGNEGVS

SEQ ID NO: 57905 - DNA, 585 bp, Glycine max
  misc_feature (1)..(585): Ceres Seq. ID no. 15175285
aaaaagggcaatggcctcttggaagaagaccatcacaactccattcaaaaaggcttgcactttctttaaccagcaaccaacatctgcaagggatcaaaagaagtctcaaacagagcaagagaggcaagtaatggatctgcacggggaagtgatggcatgtgggtatgaagatgttcaagtgatgtggtctattctggataagtcgaaatccacaaactgcaatataacctcttcaacctgacccaataaaaaaacaagaaagtggcacttcagcaattagcggatgtttttgtatgctaatgtttaaggtcataattgcatcatactaacatatctatttggtatgaatgtaattctcattctcatagtagaaaatgaaaaatgatgtgtagtgtgtaggtgtttgatatggtaggatttaacgaggtgaagagaagagaagacggtgacggtgtgttgtaattgtaagtcaaaatgtgtagggaatccccatgattgatgagagaaaatcatggcgagattatgatatgaagaaatattagatttgattctctcaatagtcaatgttaaaatctcgagacttgc

SEQ ID NO: 57906 - protein, 79 aa, Glycine max
  peptide (1)..(79): Ceres Seq. ID no. 15175286
  misc_feature (6)..(72): Homolog of NCBI NO: 34894274 NR Description: unnamed protein product [Oryza sativa (japonica
  misc_feature (4)..(77): Homolog of NCBI NO: 15229072 NR Description: hypothetical protein [Arabidopsis thaliana]
  misc_feature (4)..(77): Homolog of NCBI NO: 15221150 NR Description: expressed protein [Arabidopsis thaliana]
KRAMASWKKTITTPFKKACTFFNQQPTSARDQKKSQTEQERQVMDLHGEVMACGYEDVQVMWSILDKSKSTNCNITSST

SEQ ID NO: 57907 - protein, 76 aa, Glycine max
  peptide (1)..(76): Ceres Seq. ID no. 15175287
  misc_feature (3)..(69): Homolog of NCBI NO: 34894274 NR Description: unnamed protein product [Oryza sativa (japonica
  misc_feature (1)..(74): Homolog of NCBI NO: 15229072 NR Description: hypothetical protein [Arabidopsis thaliana]
  misc_feature (1)..(74): Homolog of NCBI NO: 15221150 NR Description: expressed protein [Arabidopsis thaliana]
MASWKKTITTPFKKACTFFNQQPTSARDQKKSQTEQERQVMDLHGEVMACGYEDVQVMWSILDKSKSTNCNITSST

SEQ ID NO: 57908 - protein, 42 aa, Glycine max
  peptide (1)..(42): Ceres Seq. ID no. 15175288
KGQWPLGRRPSQLHSKRLALSLTSNQHLQGIKRSLKQSKRGK

SEQ ID NO: 57909 - DNA, 1326 bp, Glycine max
  misc_feature (1)..(1326): Ceres Seq. ID no. 15168509
aacaccaccaaaaccagcaccacccccctctctatctcttttctcccttgttgccgttgaacttccttaacctaaaaatgtccaattctatctccgacccgacccgaataattcactctcaggatccgaataccaccgcggaccctcaggttccgcttcggaacctttcccaggttcggaacagaatggattctctacaacacttcctatctcaatccatcaataccaacactcccctcaccgtcgatcaaatcgccatggtctccagccagatcctctcctccatccaccaagtcatcgtcaacggcgccgccctcgtctcttactctcagaattccatcgccgccggagcaccggatccaccgccgtatccgaagaagccgaagccggaaccttcagttgccgataaagcgaagcaaacactcgattccaaactcgagcctctcgaaggcgacgacagcgaaatcgtggagctcgacgccgtcgaaatcctcgcggagcacatgcacttttgcgagatctgcgggaaaggcttccggcgcgacgcgaacctccgcatgcacatgcgcgcgcacggagaacagttcaagacggcggaggcgctggcgaagccttcggagaaagcctcgtggctgcgtgcgacgcggttctcgtgtccgttcgtaggctgcaaccggaacaagctccaccggcggttccggccgctgaaatcggtgatttgcgtgaagaaccacttcaagcgaagccactgcccgaagatgtacacgtgcgagcggtgtcgcaagaagcacttctcggtgctctcggatttgaggagccacttgaagcattgcggaggagaggccaggtggaagtgcacgtgcgggaccacgttctcaaggaaagacaagttgtttggccacattgcgctgtttgagggccacgcgcctgcgctcgcgtgtgacgaagagggtaaagggaaacaaatggtggaggacgacgaagatccaatgttgatgagtgaaagtggatttgaattggatgattgttttttggatcaagagtttcccgaaggcttctttgatgattttgggtccattgatgactactgttaaggtaagtgttttagggtttcctagtaatagactttgattatgtatgtgtatttagggaatattcatattcaattgctagatttgtatttatgtccctatgttattgaaggattaaaattaaacagtgtttataacacaggatggaaataaacgattaattttatttttgtgtctgaaataatattgaaaaaaaattcaaataaattaacacataaagatatttatttggtgt

SEQ ID NO: 57910 - protein, 363 aa, Glycine max
  peptide (1)..(363): Ceres Seq. ID no. 15168510
  misc_feature (169)..(191): Pfam Name: Zinc finger, C2H2 type Pfam Description: Zinc finger, C2H2 type
  misc_feature (104)..(308): Homolog of NCBI NO: 34907180 NR Description: putative zinc finger protein
  misc_feature (162)..(341): Homolog of NCBI NO: 15222242 NR Description: zinc finger protein -related [Arabidopsis
  misc_feature (149)..(315): Homolog of NCBI NO: 38346456 NR Description: OSJNBa0019G23.4 [Oryza sativa (japonica
  misc_feature (149)..(315): Homolog of NCBI NO: 10241636 NR Description: putative zinc finger protein
  misc_feature (146)..(310): Homolog of NCBI NO: 10177236 NR Description: contains similarity to C2H2-type zinc finger
  misc_feature (72)..(310): Homolog of NCBI NO: 30688719 NR Description: expressed protein [Arabidopsis thaliana]
  misc_feature (90)..(311): Homolog of NCBI NO: 28376689 NR Description: putative zinc finger protein
  misc_feature (101)..(315): Homolog of NCBI NO: 21593564 NR Description: zinc finger protein, putative [Arabidopsis
  misc_feature (101)..(315): Homolog of NCBI NO: 15218606 NR Description: zinc finger protein -related [Arabidopsis
  misc_feature (128)..(362): Homolog of NCBI NO: 34908682 NR Description: putative zinc finger protein
HHQNQHHPPLYLFSPLLPLNFLNLKMSNSISDPTRIIHSQDPNTTADPQVPLRNLSQVRNRMDSLQHFLSQSINTNTPLTVDQIAMVSSQILSSIHQVIVNGAALVSYSQNSIAAGAPDPPPYPKKPKPEPSVADKAKQTLDSKLEPLEGDDSEIVELDAVEILAEHMHFCEICGKGFRRDANLRMHMRAHGEQFKTAEALAKPSEKASWLRATRFSCPFVGCNRNKLHRRFRPLKSVICVKNHFKRSHCPKMYTCERCRKKHFSVLSDLRSHLKHCGGEARWKCTCGTTFSRKDKLFGHIALFEGHAPALACDEEGKGKQMVEDDEDPMLMSESGFELDDCFLDQEFPEGFFDDFGSIDDYC

SEQ ID NO: 57911 - protein, 338 aa, Glycine max
  peptide (1)..(338): Ceres Seq. ID no. 15168511
  misc_feature (144)..(166): Pfam Name: Zinc finger, C2H2 type Pfam Description: Zinc finger, C2H2 type
  misc_feature (79)..(283): Homolog of NCBI NO: 34907180 NR Description: putative zinc finger protein
  misc_feature (137)..(316): Homolog of NCBI NO: 15222242 NR Description: zinc finger protein -related [Arabidopsis
  misc_feature (124)..(290): Homolog of NCBI NO: 38346456 NR Description: OSJNBa0019G23.4 [Oryza sativa (japonica
  misc_feature (124)..(290): Homolog of NCBI NO: 10241636 NR Description: putative zinc finger protein
  misc_feature (121)..(285): Homolog of NCBI NO: 10177236 NR Description: contains similarity to C2H2-type zinc finger
  misc_feature (47)..(285): Homolog of NCBI NO: 30688719 NR Description: expressed protein [Arabidopsis thaliana]
  misc_feature (65)..(286): Homolog of NCBI NO: 28376689 NR Description: putative zinc finger protein
  misc_feature (76)..(290): Homolog of NCBI NO: 21593564 NR Description: zinc finger protein, putative [Arabidopsis
  misc_feature (76)..(290): Homolog of NCBI NO: 15218606 NR Description: zinc finger protein -related [Arabidopsis
  misc_feature (103)..(337): Homolog of NCBI NO: 34908682 NR Description: putative zinc finger protein
MSNSISDPTRIIHSQDPNTTADPQVPLRNLSQVRNRMDSLQHFLSQSINTNTPLTVDQIAMVSSQILSSIHQVIVNGAALVSYSQNSIAAGAPDPPPYPKKPKPEPSVADKAKQTLDSKLEPLEGDDSEIVELDAVEILAEHMHFCEICGKGFRRDANLRMHMRAHGEQFKTAEALAKPSEKASWLRATRFSCPFVGCNRNKLHRRFRPLKSVICVKNHFKRSHCPKMYTCERCRKKHFSVLSDLRSHLKHCGGEARWKCTCGTTFSRKDKLFGHIALFEGHAPALACDEEGKGKQMVEDDEDPMLMSESGFELDDCFLDQEFPEGFFDDFGSIDDYC

SEQ ID NO: 57912 - protein, 302 aa, Glycine max
  peptide (1)..(302): Ceres Seq. ID no. 15168512
  misc_feature (108)..(130): Pfam Name: Zinc finger, C2H2 type Pfam Description: Zinc finger, C2H2 type
  misc_feature (43)..(247): Homolog of NCBI NO: 34907180 NR Description: putative zinc finger protein
  misc_feature (101)..(280): Homolog of NCBI NO: 15222242 NR Description: zinc finger protein -related [Arabidopsis
  misc_feature (88)..(254): Homolog of NCBI NO: 38346456 NR Description: OSJNBa0019G23.4 [Oryza sativa (japonica
  misc_feature (88)..(254): Homolog of NCBI NO: 10241636 NR Description: putative zinc finger protein
  misc_feature (85)..(249): Homolog of NCBI NO: 10177236 NR Description: contains similarity to C2H2-type zinc finger
  misc_feature (11)..(249): Homolog of NCBI NO: 30688719 NR Description: expressed protein [Arabidopsis thaliana]
  misc_feature (29)..(250): Homolog of NCBI NO: 28376689 NR Description: putative zinc finger protein
  misc_feature (40)..(254): Homolog of NCBI NO: 21593564 NR Description: zinc finger protein, putative [Arabidopsis
  misc_feature (40)..(254): Homolog of NCBI NO: 15218606 NR Description: zinc finger protein -related [Arabidopsis
  misc_feature (67)..(301): Homolog of NCBI NO: 34908682 NR Description: putative zinc finger protein
MDSLQHFLSQSINTNTPLTVDQIAMVSSQILSSIHQVIVNGAALVSYSQNSIAAGAPDPPPYPKKPKPEPSVADKAKQTLDSKLEPLEGDDSEIVELDAVEILAEHMHFCEICGKGFRRDANLRMHMRAHGEQFKTAEALAKPSEKASWLRATRFSCPFVGCNRNKLHRRFRPLKSVICVKNHFKRSHCPKMYTCERCRKKHFSVLSDLRSHLKHCGGEARWKCTCGTTFSRKDKLFGHIALFEGHAPALACDEEGKGKQMVEDDEDPMLMSESGFELDDCFLDQEFPEGFFDDFGSIDDYC

SEQ ID NO: 57913 - DNA, 920 bp, Glycine max
  misc_feature (1)..(920): Ceres Seq. ID no. 13581682
aaatcacaactatcgtactagtattttacatttaagtgaaatatgcatatatcaataaaaaaaaaaccataaattaaaaaaagatgcatagttgattcatttataatcttaaaaataagaatgacattttccaaaaaaaaaaaaattgattacggatgggaagagggtgaggccaaggtgaaaaaaaagggtagtgtacaggtccatgtatctatataacgcagcttgttcttgttcactttccccaattttctcttgacgcagaaagaaagaaatctctttgatgggtttcccagtggggtactcggagctcctgttcccgaagcttctccttcacatcctctccctcttgggcctcctcaggaagctgatttgcagcctcctccgcttcatgggcctccacgacttcctcgagcccgacattgccgcctggcccgaaacccgaatgcccgaagaattcgagtccgtgtcggccacgctcatccgggaaatcctgccggtggtgaagttccgggagctggtggaccccccggagacgtgcgcggtgtgtctgagcgagttcgaggaaaacgatgagatcagacagctggcgaattgtcgccacatattccaccgaggatgtttggaccgttggatggggtacgatcagagaacatgccctctctgcagaatgccctttatacccgacgaaatgcaaggtgcttttattgagagactctgggctgcctctggtatcgctgaatatccgcatgttgctcctttctagtatcattcatatttccttattttacttttttggggaagggatatcaaaagccataaccagaagaggttcttttgatttcgtggttttttttttgtgtatgtgtatatatacagagacctctatcaattgtatatcgatttctcttagatgatgg

SEQ ID NO: 57914 - protein, 160 aa, Glycine max
  peptide (1)..(160): Ceres Seq. ID no. 13581683
  misc_feature (86)..(128): Pfam Name: Zinc finger, C3HC4 type (RING finger) Pfam Description: Zinc finger, C3HC4 type (RING finger)
  misc_feature (39)..(135): Homolog of NCBI NO: 18411282 NR Description: zinc finger (C3HC4-type RING finger) protein
  misc_feature (1)..(134): Homolog of NCBI NO: 34897812 NR Description: P0514G12.26 [Oryza sativa (japonica
  misc_feature (1)..(141): Homolog of NCBI NO: 15233350 NR Description: RING-H2 finger protein RHA1b [Arabidopsis
  misc_feature (1)..(136): Homolog of NCBI NO: 15233352 NR Description: RING-H2 finger protein, putative [Arabidopsis
  misc_feature (1)..(136): Homolog of NCBI NO: 11358776 NR Description: RING-H2 finger protein RHA1a [imported] -
  misc_feature (1)..(141): Homolog of NCBI NO: 11358777 NR Description: RING-H2 finger protein RHA1b [imported] -
  misc_feature (59)..(149): Homolog of NCBI NO: 21554155 NR Description: RING zinc finger protein-like [Arabidopsis
  misc_feature (59)..(149): Homolog of NCBI NO: 15238072 NR Description: RING-H2 zinc finger protein, putative
  misc_feature (1)..(149): Homolog of NCBI NO: 15222553 NR Description: RING-H2 finger protein, putative [Arabidopsis
  misc_feature (1)..(154): Homolog of NCBI NO: 15233117 NR Description: BRH1 RING finger protein [Arabidopsis thaliana]
MGFPVGYSELLFPKLLLHILSLLGLLRKLICSLLRFMGLHDFLEPDIAAWPETRMPEEFESVSATLIREILPVVKFRELVDPPETCAVCLSEFEENDEIRQLANCRHIFHRGCLDRWMGYDQRTCPLCRMPFIPDEMQGAFIERLWAASGIAEYPHVAPF

SEQ ID NO: 57915 - protein, 124 aa, Glycine max
  peptide (1)..(124): Ceres Seq. ID no. 13581684
  misc_feature (50)..(92): Pfam Name: Zinc finger, C3HC4 type (RING finger) Pfam Description: Zinc finger, C3HC4 type (RING finger)
  misc_feature (3)..(99): Homolog of NCBI NO: 18411282 NR Description: zinc finger (C3HC4-type RING finger) protein
  misc_feature (1)..(98): Homolog of NCBI NO: 34897812 NR Description: P0514G12.26 [Oryza sativa (japonica
  misc_feature (1)..(105): Homolog of NCBI NO: 15233350 NR Description: RING-H2 finger protein RHA1b [Arabidopsis
  misc_feature (1)..(100): Homolog of NCBI NO: 15233352 NR Description: RING-H2 finger protein, putative [Arabidopsis
  misc_feature (1)..(100): Homolog of NCBI NO: 11358776 NR Description: RING-H2 finger protein RHA1a [imported] -
  misc_feature (1)..(105): Homolog of NCBI NO: 11358777 NR Description: RING-H2 finger protein RHA1b [imported] -
  misc_feature (23)..(113): Homolog of NCBI NO: 21554155 NR Description: RING zinc finger protein-like [Arabidopsis
  misc_feature (23)..(113): Homolog of NCBI NO: 15238072 NR Description: RING-H2 zinc finger protein, putative
  misc_feature (1)..(113): Homolog of NCBI NO: 15222553 NR Description: RING-H2 finger protein, putative [Arabidopsis
  misc_feature (1)..(118): Homolog of NCBI NO: 15233117 NR Description: BRH1 RING finger protein [Arabidopsis thaliana]
MGLHDFLEPDIAAWPETRMPEEFESVSATLIREILPVVKFRELVDPPETCAVCLSEFEENDEIRQLANCRHIFHRGCLDRWMGYDQRTCPLCRMPFIPDEMQGAFIERLWAASGIAEYPHVAPF

SEQ ID NO: 57916 - protein, 114 aa, Glycine max
  peptide (1)..(114): Ceres Seq. ID no. 13581685
MRSDSWRIVATYSTEDVWTVGWGTIREHALSAECPLYPTKCKVLLLRDSGLPLVSLNIRMLLLSSIIHISLFYFFGEGISKAITRRGSFDFVVFFLCMCIYTETSINCISISLR

SEQ ID NO: 57917 - DNA, 914 bp, Glycine max
  misc_feature (1)..(914): Ceres Seq. ID no. 13594341
acccagttgcttccttttattcctgtaatccatgaaataaaattgctagcttaatagtgatccgtatagaagactagggaacttgtttgctatggcaactctgagcaattcaactaatatcttttggcaagattgtcaaataggaaggcctgaaaggcagaagctacttaaccaaaagggatgtgttgtatggattactggactcagcggatcaggaaaaagcacattggcatgctccctaagcagagaactgcactcaaggggaaagttatcttatgtccttgatggagataaccttcggcatggactaaacaaggatcttggttttaaagctgaagatcgcactgaaaatattcgcagaactggagaagtggcaaaactcttcgctgatgctggtttaatatgtgttgctagtctgatatctccttacagaagagatcgagacacttgccgtgccatgttacctgatgcaaattttattgaggttttcatgaacatgcctctagaattgtgcgaggcacgagatccaaaaggcctctataagcttgctcgtgcagggaaaatcaaaggttttaccggcattgatgatccttatgaaccgcccataaattgtgagattgaaataaagcaggaaaatgggaattgtccaacacctactatgatggctggacaagtagttacttacttggagaataaaggatttcttgaatcttagagtttttaagtttaattattctctaataatggtgtttcttctaaatgaagttaaaaaggaatcctaggaagtgcaggtaggagagtggtgagaggataaatggacttgtaaagttcatcaagtataaataataattaataattgttgcaattcattctataggttgatcaagaatttcagtatattttatcggcgtttg

SEQ ID NO: 57918 - protein, 207 aa, Glycine max
  peptide (1)..(207): Ceres Seq. ID no. 15221336
  misc_feature (29)..(183): Pfam Name: Adenylylsulphate kinase Pfam Description: Adenylylsulphate kinase
  misc_feature (9)..(206): Homolog of NCBI NO: 21537248 NR Description: adenylylsulfate kinase-like protein [Arabidopsis
  misc_feature (9)..(206): Homolog of NCBI NO: 18425199 NR Description: adenylylsulfate kinase-related protein
  misc_feature (9)..(206): Homolog of NCBI NO: 9757873 NR Description: adenylylsulfate kinase-like protein [Arabidopsis
  misc_feature (9)..(206): Homolog of NCBI NO: 15236087 NR Description: adenosine-5-phosphosulfate-kinase [Arabidopsis
  misc_feature (1)..(207): Homolog of NCBI NO: 7387809 NR Description: Adenylylsulfate kinase, chloroplast precursor kinase) (Adenosine-5'phosphosulfate kinase) (ATP
  misc_feature (1)..(207): Homolog of NCBI NO: 21553403 NR Description: putative adenosine phosphosulfate kinase
  misc_feature (1)..(207): Homolog of NCBI NO: 15225999 NR Description: adenosine phosphosulfate kinase -related
  misc_feature (1)..(205): Homolog of NCBI NO: 6563285 NR Description: adenosine-5'-phosphosulfate kinase [Zea mays]
  misc_feature (7)..(205): Homolog of NCBI NO: 34393551 NR Description: putative adenosine-5'-phosphosulfate kinase
  misc_feature (1)..(207): Homolog of NCBI NO: 15228666 NR Description: adenylylsulfate kinase -related [Arabidopsis
MATLSNSTNIFWQDCQIGRPERQKLLNQKGCVVWITGLSGSGKSTLACSLSRELHSRGKLSYVLDGDNLRHGLNKDLGFKAEDRTENIRRTGEVAKLFADAGLICVASLISPYRRDRDTCRAMLPDANFIEVFMNMPLELCEARDPKGLYKLARAGKIKGFTGIDDPYEPPINCEIEIKQENGNCPTPTMMAGQVVTYLENKGFLES

SEQ ID NO: 57919 - DNA, 820 bp, Glycine max
  misc_feature (1)..(820): Ceres Seq. ID no. 15178436
atgataatttcaaacattgttgttgttgttgcatcaaaccttttgcaaaatgtccatagcagaggaggagagtccaagtgtgatgccaaaagtgatcactttcctctgctctcttcttgagagggtggctgagtcaaatgatcacaaccaacacctccaacagcaccagaagatctcagtgttccatggcctgacaaggccaaacatctcaattcagtgctatcttgagagaatcttcaagtacgcgaattgcagcccttcatgcttcgtcgtcgcctacgtctacctcgatcgattcactcagagacaaccctctttgcccatcaactccttcaacgtgcaccgtttactgatcactagtgtcatggtagctgccaagttcatggatgacatgttctacaacaatgctcactatgccaaagttggaggaatcaccaaagtagagatgaattttcttgagttggatttcctctttggtttgggtttccatttaaatgtgaccccaggcaccttccaagcctattgtgtccatctccaaagagaaatgttgttgatccaacctctaaatttttcagattccaccctaaatttaggacaatcactaaaggctcacttgtgcttcaatgaggatgaatgttctcatcaaaagcagaaacaacaacaacagctagctgtttgattccttgcattttctcagtgcatgtgtagtatggttgactagttgtaaatgtagtgattctattacagactggcaagtaaactacttttccttgtgcaatccgcttgctccttttttattctaattctttctactttttcc

SEQ ID NO: 57920 - protein, 209 aa, Glycine max
  peptide (1)..(209): Ceres Seq. ID no. 15178437
  misc_feature (18)..(149): Pfam Name: Cyclin, N-terminal domain Pfam Description: Cyclin, N-terminal domain
  misc_feature (1)..(165): Homolog of NCBI NO: 6729043 NR Description: hypothetical protein [Arabidopsis thaliana]
  misc_feature (2)..(201): Homolog of NCBI NO: 15225402 NR Description: cyclin family [Arabidopsis thaliana]
  misc_feature (5)..(168): Homolog of NCBI NO: 15233185 NR Description: cyclin family [Arabidopsis thaliana]
  misc_feature (6)..(167): Homolog of NCBI NO: 14140116 NR Description: PREG-like protein [Oryza sativa]
  misc_feature (3)..(208): Homolog of NCBI NO: 32488963 NR Description: OSJNBb0038F03.8 [Oryza sativa (japonica
  misc_feature (1)..(167): Homolog of NCBI NO: 25493992 NR Description: PREG-like protein [imported] - Picea mariana
  misc_feature (7)..(206): Homolog of NCBI NO: 37536902 NR Description: hypothetical protein [Oryza sativa (japonica
  misc_feature (1)..(168): Homolog of NCBI NO: 15240794 NR Description: cyclin family [Arabidopsis thaliana]
  misc_feature (5)..(203): Homolog of NCBI NO: 15240306 NR Description: cyclin family [Arabidopsis thaliana]
  misc_feature (3)..(209): Homolog of NCBI NO: 15224950 NR Description: cyclin family [Arabidopsis thaliana]
MSIAEEESPSVMPKVITFLCSLLERVAESNDHNQHLQQHQKISVFHGLTRPNISIQCYLERIFKYANCSPSCFVVAYVYLDRFTQRQPSLPINSFNVHRLLITSVMVAAKFMDDMFYNNAHYAKVGGITKVEMNFLELDFLFGLGFHLNVTPGTFQAYCVHLQREMLLIQPLNFSDSTLNLGQSLKAHLCFNEDECSHQKQKQQQQLAV

SEQ ID NO: 57921 - protein, 198 aa, Glycine max
  peptide (1)..(198): Ceres Seq. ID no. 15178438
  misc_feature (7)..(138): Pfam Name: Cyclin, N-terminal domain Pfam Description: Cyclin, N-terminal domain
  misc_feature (1)..(154): Homolog of NCBI NO: 6729043 NR Description: hypothetical protein [Arabidopsis thaliana]
  misc_feature (1)..(190): Homolog of NCBI NO: 15225402 NR Description: cyclin family [Arabidopsis thaliana]
  misc_feature (1)..(157): Homolog of NCBI NO: 15233185 NR Description: cyclin family [Arabidopsis thaliana]
  misc_feature (1)..(156): Homolog of NCBI NO: 14140116 NR Description: PREG-like protein [Oryza sativa]
  misc_feature (1)..(197): Homolog of NCBI NO: 32488963 NR Description: OSJNBb0038F03.8 [Oryza sativa (japonica
  misc_feature (1)..(156): Homolog of NCBI NO: 25493992 NR Description: PREG-like protein [imported] - Picea mariana
  misc_feature (1)..(195): Homolog of NCBI NO: 37536902 NR Description: hypothetical protein [Oryza sativa (japonica
  misc_feature (1)..(157): Homolog of NCBI NO: 15240794 NR Description: cyclin family [Arabidopsis thaliana]
  misc_feature (1)..(192): Homolog of NCBI NO: 15240306 NR Description: cyclin family [Arabidopsis thaliana]
  misc_feature (1)..(198): Homolog of NCBI NO: 15224950 NR Description: cyclin family [Arabidopsis thaliana]
MPKVITFLCSLLERVAESNDHNQHLQQHQKISVFHGLTRPNISIQCYLERIFKYANCSPSCFVVAYVYLDRFTQRQPSLPINSFNVHRLLITSVMVAAKFMDDMFYNNAHYAKVGGITKVEMNFLELDFLFGLGFHLNVTPGTFQAYCVHLQREMLLIQPLNFSDSTLNLGQSLKAHLCFNEDECSHQKQKQQQQLAV

SEQ ID NO: 57922 - protein, 104 aa, Glycine max
  peptide (1)..(104): Ceres Seq. ID no. 15178439
  misc_feature (1)..(60): Homolog of NCBI NO: 6729043 NR Description: hypothetical protein [Arabidopsis thaliana]
  misc_feature (1)..(96): Homolog of NCBI NO: 15225402 NR Description: cyclin family [Arabidopsis thaliana]
  misc_feature (1)..(63): Homolog of NCBI NO: 15233185 NR Description: cyclin family [Arabidopsis thaliana]
  misc_feature (1)..(62): Homolog of NCBI NO: 14140116 NR Description: PREG-like protein [Oryza sativa]
  misc_feature (1)..(103): Homolog of NCBI NO: 32488963 NR Description: OSJNBb0038F03.8 [Oryza sativa (japonica
  misc_feature (1)..(62): Homolog of NCBI NO: 25493992 NR Description: PREG-like protein [imported] - Picea mariana
  misc_feature (1)..(101): Homolog of NCBI NO: 37536902 NR Description: hypothetical protein [Oryza sativa (japonica
  misc_feature (1)..(63): Homolog of NCBI NO: 15240794 NR Description: cyclin family [Arabidopsis thaliana]
  misc_feature (1)..(98): Homolog of NCBI NO: 15240306 NR Description: cyclin family [Arabidopsis thaliana]
  misc_feature (1)..(104): Homolog of NCBI NO: 15224950 NR Description: cyclin family [Arabidopsis thaliana]
MVAAKFMDDMFYNNAHYAKVGGITKVEMNFLELDFLFGLGFHLNVTPGTFQAYCVHLQREMLLIQPLNFSDSTLNLGQSLKAHLCFNEDECSHQKQKQQQQLAV

SEQ ID NO: 57923 - DNA, 882 bp, Glycine max
  misc_feature (1)..(882): Ceres Seq. ID no. 15173213
ttccctctgatgaatgctctactctactctgactctcacacatcgttttatccgaaagcaagcattatcagaagcagaaagaaagaataagaggttgcagcaacaatggcagccatggctgcgcttcagagctcaatggtcggtctctccctctcctccaactctttcttaggccaacgcctttctcccatcaccctcccctctcttcttccgggtaagtcaacagagaagcaatgtcctattgtaatgaggcttaaacgatgggaacggaaggagtgtaaaccaaacagccttcctatcttgcacaaaatgcatgttaaacttggagatacggtgcaagtcatatctggacgtgaaaggggtaaagttggggagattactaaaatcttcaagcataacagcactgttatagtgaaagatttaaatttgaagacaaagcatgtgaagagtagagaagagggggaaccagggcaaattattaagattgaaggtcctatccacagctcaaatgtgatgctctactccaaagatcagaaggtagcaagccgtgtggggcataaagtccttgataatggtaaaaaagtccgctaccttataaaaactggtgaaataattgatagtgcagagaactggaagaaactgaaggaggctactaagcaaactgaagaagctactgctgctgctgcctagttttacctacgtaattcattcattcactagtaatgtaactctagcagtacttgttgtgatctctcttccattttgttatctaatgtatatttttggtctgtctattgatctccatataatgaaacctgggtgatcaaatttgtctattgcttattgagcaattgagattttttgaagaactattgttcatac

SEQ ID NO: 57924 - protein, 194 aa, Glycine max
  peptide (1)..(194): Ceres Seq. ID no. 15173214
  misc_feature (71)..(104): Pfam Name: KOW motif Pfam Description: KOW motif
  misc_feature (59)..(171): Homolog of NCBI NO: 22297636 NR Description: 50S ribosomal protein L24 [Thermosynechococcus
  misc_feature (59)..(171): Homolog of NCBI NO: 16329930 NR Description: 50S ribosomal protein L24 [Synechocystis sp. PCC
  misc_feature (64)..(171): Homolog of NCBI NO: 23042779 NR Description: hypothetical protein [Trichodesmium erythraeum
  misc_feature (121)..(194): Homolog of NCBI NO: 30696487 NR Description: 50S ribosomal protein L24, chloroplast precursor
  misc_feature (1)..(101): Homolog of NCBI NO: 30696487 NR Description: 50S ribosomal protein L24, chloroplast precursor
  misc_feature (1)..(194): Homolog of NCBI NO: 132821 NR Description: 50S RIBOSOMAL PROTEIN L24, CHLOROPLAST PRECURSOR
  misc_feature (1)..(194): Homolog of NCBI NO: 1694974 NR Description: plastid ribosomal protein [Arabidopsis thaliana]
  misc_feature (1)..(194): Homolog of NCBI NO: 30696483 NR Description: 50S ribosomal protein L24, chloroplast precursor
  misc_feature (4)..(194): Homolog of NCBI NO: 400989 NR Description: 50S RIBOSOMAL PROTEIN L24, CHLOROPLAST PRECURSOR
  misc_feature (3)..(191): Homolog of NCBI NO: 132819 NR Description: 50S RIBOSOMAL PROTEIN L24, CHLOROPLAST PRECURSOR
MAAMAALQSSMVGLSLSSNSFLGQRLSPITLPSLLPGKSTEKQCPIVMRLKRWERKECKPNSLPILHKMHVKLGDTVQVISGRERGKVGEITKIFKHNSTVIVKDLNLKTKHVKSREEGEPGQIIKIEGPIHSSNVMLYSKDQKVASRVGHKVLDNGKKVRYLIKTGEIIDSAENWKKLKEATKQTEEATAAAA

SEQ ID NO: 57925 - protein, 191 aa, Glycine max
  peptide (1)..(191): Ceres Seq. ID no. 15173215
  misc_feature (68)..(101): Pfam Name: KOW motif Pfam Description: KOW motif
  misc_feature (56)..(168): Homolog of NCBI NO: 22297636 NR Description: 50S ribosomal protein L24 [Thermosynechococcus
  misc_feature (56)..(168): Homolog of NCBI NO: 16329930 NR Description: 50S ribosomal protein L24 [Synechocystis sp. PCC
  misc_feature (61)..(168): Homolog of NCBI NO: 23042779 NR Description: hypothetical protein [Trichodesmium erythraeum
  misc_feature (118)..(191): Homolog of NCBI NO: 30696487 NR Description: 50S ribosomal protein L24, chloroplast precursor
  misc_feature (1)..(98): Homolog of NCBI NO: 30696487 NR Description: 50S ribosomal protein L24, chloroplast precursor
  misc_feature (1)..(191): Homolog of NCBI NO: 132821 NR Description: 50S RIBOSOMAL PROTEIN L24, CHLOROPLAST PRECURSOR
  misc_feature (1)..(191): Homolog of NCBI NO: 1694974 NR Description: plastid ribosomal protein [Arabidopsis thaliana]
  misc_feature (1)..(191): Homolog of NCBI NO: 30696483 NR Description: 50S ribosomal protein L24, chloroplast precursor
  misc_feature (1)..(191): Homolog of NCBI NO: 400989 NR Description: 50S RIBOSOMAL PROTEIN L24, CHLOROPLAST PRECURSOR
  misc_feature (1)..(188): Homolog of NCBI NO: 132819 NR Description: 50S RIBOSOMAL PROTEIN L24, CHLOROPLAST PRECURSOR
MAALQSSMVGLSLSSNSFLGQRLSPITLPSLLPGKSTEKQCPIVMRLKRWERKECKPNSLPILHKMHVKLGDTVQVISGRERGKVGEITKIFKHNSTVIVKDLNLKTKHVKSREEGEPGQIIKIEGPIHSSNVMLYSKDQKVASRVGHKVLDNGKKVRYLIKTGEIIDSAENWKKLKEATKQTEEATAAAA

SEQ ID NO: 57926 - protein, 184 aa, Glycine max
  peptide (1)..(184): Ceres Seq. ID no. 15173216
  misc_feature (61)..(94): Pfam Name: KOW motif Pfam Description: KOW motif
  misc_feature (49)..(161): Homolog of NCBI NO: 22297636 NR Description: 50S ribosomal protein L24 [Thermosynechococcus
  misc_feature (49)..(161): Homolog of NCBI NO: 16329930 NR Description: 50S ribosomal protein L24 [Synechocystis sp. PCC
  misc_feature (54)..(161): Homolog of NCBI NO: 23042779 NR Description: hypothetical protein [Trichodesmium erythraeum
  misc_feature (111)..(184): Homolog of NCBI NO: 30696487 NR Description: 50S ribosomal protein L24, chloroplast precursor
  misc_feature (1)..(91): Homolog of NCBI NO: 30696487 NR Description: 50S ribosomal protein L24, chloroplast precursor
  misc_feature (1)..(184): Homolog of NCBI NO: 132821 NR Description: 50S RIBOSOMAL PROTEIN L24, CHLOROPLAST PRECURSOR
  misc_feature (1)..(184): Homolog of NCBI NO: 1694974 NR Description: plastid ribosomal protein [Arabidopsis thaliana]
  misc_feature (1)..(184): Homolog of NCBI NO: 30696483 NR Description: 50S ribosomal protein L24, chloroplast precursor
  misc_feature (1)..(184): Homolog of NCBI NO: 400989 NR Description: 50S RIBOSOMAL PROTEIN L24, CHLOROPLAST PRECURSOR
  misc_feature (1)..(181): Homolog of NCBI NO: 132819 NR Description: 50S RIBOSOMAL PROTEIN L24, CHLOROPLAST PRECURSOR
MVGLSLSSNSFLGQRLSPITLPSLLPGKSTEKQCPIVMRLKRWERKECKPNSLPILHKMHVKLGDTVQVISGRERGKVGEITKIFKHNSTVIVKDLNLKTKHVKSREEGEPGQIIKIEGPIHSSNVMLYSKDQKVASRVGHKVLDNGKKVRYLIKTGEIIDSAENWKKLKEATKQTEEATAAAA

SEQ ID NO: 57927 - DNA, 1148 bp, Glycine max
  misc_feature (1)..(1148): Ceres Seq. ID no. 15168480
acacaaacatctctctctctctctctctctctcatctctctctctctctctctctaagacacacaaacactacacatcacaatctcacattgttctcaagtttcaacactttctagttctaccatggcggtaggactctccgccgccataaccatgaagtccctcctccgtttccaccaacctcacctgaacctccccaaatcaatcccaacaacactccctttctcccccatgagaattttccaccacacagcatcaccaagaacccaaaaagtttcaactttcaccgtttgtgtcctcatgcaggacccaaaacaaggcacccacatggaaattgagccacaagaacaacctcctcctcctcctcctcctcccgctcaacaagttctgtcaccaaagttggctgagaaattggccagaaaagagtctgagaggttcacttaccttgttgctgctgtcatgtctagcttcggcatcacatccatggcagtgttcgctgtttattgcagattctcgtggcaaatggagggtggagaagtgccttggtctgaaatgtttggcacatttgctctatcagtgggagctgctgtgggtatggaattttgggctagatgggctcatagggctctctggcatgcttcgctgtggcacatgcatgagtcccaccatcgaccaagagaaggacccttcgagcttaacgatgtatttgcaataatcaacgctgtccctgccatcgctctcctttcctatggtttctttaacaagggactggtccctggcctttgctttggtgcgggtcttggaattacggtctttgggatggcctacatgtttgtacacgatggattggttcataagagattcccggtgggccccattgcaaacgtgccctatctcagaagggtggcctctgctcaccaacttcaccattcggaaaaattcaatggagtgccatatgggctgtttttgggacccaaggaaattgaagaggtgggagggctagaagagctggagaaagagataagtaggagagcaagatcatacaaaatagctaatgagaacaactaatacaaatcaagaatgtttcgaagaattatcagtgtaaatcagaaatatgaaataaaatgatccaaaaattttgcttgcac

SEQ ID NO: 57928 - protein, 314 aa, Glycine max
  peptide (1)..(314): Ceres Seq. ID no. 15168481
  misc_feature (145)..(303): Pfam Name: Carotene hydroxylase Pfam Description: Carotene hydroxylase
  misc_feature (1)..(306): Homolog of NCBI NO: 32488500 NR Description: OSJNBa0011J08.7 [Oryza sativa (japonica
  misc_feature (25)..(307): Homolog of NCBI NO: 9971820 NR Description: beta hydroxylase [Tagetes erecta]
  misc_feature (1)..(307): Homolog of NCBI NO: 15237204 NR Description: beta-carotene hydroxylase, putative [Arabidopsis
  misc_feature (45)..(311): Homolog of NCBI NO: 1575296 NR Description: beta-carotene hydroxylase [Arabidopsis thaliana]
  misc_feature (5)..(308): Homolog of NCBI NO: 5870600 NR Description: beta-carotene hydroxylase [Lycopersicon
  misc_feature (1)..(311): Homolog of NCBI NO: 15235959 NR Description: beta-carotene hydroxylase [Arabidopsis thaliana]
  misc_feature (2)..(308): Homolog of NCBI NO: 5870598 NR Description: beta-carotene hydroxylase [Lycopersicon
  misc_feature (5)..(308): Homolog of NCBI NO: 2956717 NR Description: beta-carotene hydroxylase 2 [Capsicum annuum]
  misc_feature (1)..(307): Homolog of NCBI NO: 11245486 NR Description: beta-carotene hydroxylase [Citrus unshiu]
  misc_feature (1)..(307): Homolog of NCBI NO: 9988836 NR Description: beta-carotene hydroxylase [Citrus unshiu]
MAVGLSAAITMKSLLRFHQPHLNLPKSIPTTLPFSPMRIFHHTASPRTQKVSTFTVCVLMQDPKQGTHMEIEPQEQPPPPPPPPAQQVLSPKLAEKLARKESERFTYLVAAVMSSFGITSMAVFAVYCRFSWQMEGGEVPWSEMFGTFALSVGAAVGMEFWARWAHRALWHASLWHMHESHHRPREGPFELNDVFAIINAVPAIALLSYGFFNKGLVPGLCFGAGLGITVFGMAYMFVHDGLVHKRFPVGPIANVPYLRRVASAHQLHHSEKFNGVPYGLFLGPKEIEEVGGLEELEKEISRRARSYKIANENN

SEQ ID NO: 57929 - protein, 304 aa, Glycine max
  peptide (1)..(304): Ceres Seq. ID no. 15168482
  misc_feature (135)..(293): Pfam Name: Carotene hydroxylase Pfam Description: Carotene hydroxylase
  misc_feature (1)..(296): Homolog of NCBI NO: 32488500 NR Description: OSJNBa0011J08.7 [Oryza sativa (japonica
  misc_feature (15)..(297): Homolog of NCBI NO: 9971820 NR Description: beta hydroxylase [Tagetes erecta]
  misc_feature (1)..(297): Homolog of NCBI NO: 15237204 NR Description: beta-carotene hydroxylase, putative [Arabidopsis
  misc_feature (35)..(301): Homolog of NCBI NO: 1575296 NR Description: beta-carotene hydroxylase [Arabidopsis thaliana]
  misc_feature (1)..(298): Homolog of NCBI NO: 5870600 NR Description: beta-carotene hydroxylase [Lycopersicon
  misc_feature (1)..(301): Homolog of NCBI NO: 15235959 NR Description: beta-carotene hydroxylase [Arabidopsis thaliana]
  misc_feature (1)..(298): Homolog of NCBI NO: 5870598 NR Description: beta-carotene hydroxylase [Lycopersicon
  misc_feature (1)..(298): Homolog of NCBI NO: 2956717 NR Description: beta-carotene hydroxylase 2 [Capsicum annuum]
  misc_feature (1)..(297): Homolog of NCBI NO: 11245486 NR Description: beta-carotene hydroxylase [Citrus unshiu]
  misc_feature (1)..(297): Homolog of NCBI NO: 9988836 NR Description: beta-carotene hydroxylase [Citrus unshiu]
MKSLLRFHQPHLNLPKSIPTTLPFSPMRIFHHTASPRTQKVSTFTVCVLMQDPKQGTHMEIEPQEQPPPPPPPPAQQVLSPKLAEKLARKESERFTYLVAAVMSSFGITSMAVFAVYCRFSWQMEGGEVPWSEMFGTFALSVGAAVGMEFWARWAHRALWHASLWHMHESHHRPREGPFELNDVFAIINAVPAIALLSYGFFNKGLVPGLCFGAGLGITVFGMAYMFVHDGLVHKRFPVGPIANVPYLRRVASAHQLHHSEKFNGVPYGLFLGPKEIEEVGGLEELEKEISRRARSYKIANENN

SEQ ID NO: 57930 - protein, 278 aa, Glycine max
  peptide (1)..(278): Ceres Seq. ID no. 15168483
  misc_feature (109)..(267): Pfam Name: Carotene hydroxylase Pfam Description: Carotene hydroxylase
  misc_feature (1)..(270): Homolog of NCBI NO: 32488500 NR Description: OSJNBa0011J08.7 [Oryza sativa (japonica
  misc_feature (1)..(271): Homolog of NCBI NO: 9971820 NR Description: beta hydroxylase [Tagetes erecta]
  misc_feature (1)..(271): Homolog of NCBI NO: 15237204 NR Description: beta-carotene hydroxylase, putative [Arabidopsis
  misc_feature (9)..(275): Homolog of NCBI NO: 1575296 NR Description: beta-carotene hydroxylase [Arabidopsis thaliana]
  misc_feature (1)..(272): Homolog of NCBI NO: 5870600 NR Description: beta-carotene hydroxylase [Lycopersicon
  misc_feature (1)..(275): Homolog of NCBI NO: 15235959 NR Description: beta-carotene hydroxylase [Arabidopsis thaliana]
  misc_feature (1)..(272): Homolog of NCBI NO: 5870598 NR Description: beta-carotene hydroxylase [Lycopersicon
  misc_feature (1)..(272): Homolog of NCBI NO: 2956717 NR Description: beta-carotene hydroxylase 2 [Capsicum annuum]
  misc_feature (1)..(271): Homolog of NCBI NO: 11245486 NR Description: beta-carotene hydroxylase [Citrus unshiu]
  misc_feature (1)..(271): Homolog of NCBI NO: 9988836 NR Description: beta-carotene hydroxylase [Citrus unshiu]
MRIFHHTASPRTQKVSTFTVCVLMQDPKQGTHMEIEPQEQPPPPPPPPAQQVLSPKLAEKLARKESERFTYLVAAVMSSFGITSMAVFAVYCRFSWQMEGGEVPWSEMFGTFALSVGAAVGMEFWARWAHRALWHASLWHMHESHHRPREGPFELNDVFAIINAVPAIALLSYGFFNKGLVPGLCFGAGLGITVFGMAYMFVHDGLVHKRFPVGPIANVPYLRRVASAHQLHHSEKFNGVPYGLFLGPKEIEEVGGLEELEKEISRRARSYKIANENN

SEQ ID NO: 57931 - DNA, 707 bp, Glycine max
  misc_feature (1)..(707): Ceres Seq. ID no. 15168561
ataaccaaaaccaaacattcttgggggaaaatggggtcactaatggcctctgcttctatcactcttgcattagccataatccttttcagcctcccatctgaaatctcagcaaacaactacatctactcctctcctccaccacccaaaaagccttaccgctatccatctcctcctcctccagttccttcaccacctccaccaaaggccctccaccaccaaccaagtctccaccaccaccagtttacatttatgcttcccctccaccacccatctacaagtaagcttggaattaagaagcagcaacaataataagtcatgttctagtattcattgtggaataaatttccgttccatttggagcagagttaagcatataatttgttatacaagttctttgaataagagtctgagtgtatcacctctaagctacgatcttcatgactcatatgaggttgcttctatttatttggtggccatttttcaagtgttgttcttactaagttcaaggaagcgacaaatcaaaaagattcaagacaaggaagcaagattagaaatgttgatatcaattcaggctgcttttagagctttcttatttgtttctttgtagattaatatggttgattgtgtatgatttcattcaaattattgtgaaattcttttaatatatctttttgtgttgtttgcaataaatttgtcaatatttgcat

SEQ ID NO: 57932 - protein, 102 aa, Glycine max
  peptide (1)..(102): Ceres Seq. ID no. 15168562
  misc_feature (32)..(67): Homolog of NCBI NO: 81870 NR Description: hydroxyproline-rich glycoprotein (clone Hyp3.6) -
  misc_feature (32)..(67): Homolog of NCBI NO: 81870 NR Description: hydroxyproline-rich glycoprotein (clone Hyp3.6) -
  misc_feature (11)..(89): Homolog of NCBI NO: 15021744 NR Description: root nodule extensin [Pisum sativum]
  misc_feature (32)..(67): Homolog of NCBI NO: 7488674 NR Description: extensin homolog HRGP2 - soybean (fragment)
  misc_feature (10)..(74): Homolog of NCBI NO: 11121502 NR Description: putative extensin [Nicotiana sylvestris]
  misc_feature (35)..(67): Homolog of NCBI NO: 37051101 NR Description: hydroxyproline-rich glycoprotein-2 [Pisum sativum]
  misc_feature (21)..(74): Homolog of NCBI NO: 1165128 NR Description: extensin [Nicotiana sylvestris]
  misc_feature (10)..(74): Homolog of NCBI NO: 11121504 NR Description: extensin [Nicotiana sylvestris]
  misc_feature (9)..(74): Homolog of NCBI NO: 2129943 NR Description: extensin precursor (clone 6PExt1.2) - wood tobacco
  misc_feature (11)..(67): Homolog of NCBI NO: 8132441 NR Description: extensin [Pisum sativum]
ITKTKHSWGKMGSLMASASITLALAIILFSLPSEISANNYIYSSPPPPKKPYRYPSPPPPVPSPPPPKALHHQPSLHHHQFTFMLPLHHPSTSKLGIKKQQQ

SEQ ID NO: 57933 - protein, 92 aa, Glycine max
  peptide (1)..(92): Ceres Seq. ID no. 15168563
  misc_feature (22)..(57): Homolog of NCBI NO: 81870 NR Description: hydroxyproline-rich glycoprotein (clone Hyp3.6) -
  misc_feature (22)..(57): Homolog of NCBI NO: 81870 NR Description: hydroxyproline-rich glycoprotein (clone Hyp3.6) -
  misc_feature (1)..(79): Homolog of NCBI NO: 15021744 NR Description: root nodule extensin [Pisum sativum]
  misc_feature (22)..(57): Homolog of NCBI NO: 7488674 NR Description: extensin homolog HRGP2 - soybean (fragment)
  misc_feature (1)..(64): Homolog of NCBI NO: 11121502 NR Description: putative extensin [Nicotiana sylvestris]
  misc_feature (25)..(57): Homolog of NCBI NO: 37051101 NR Description: hydroxyproline-rich glycoprotein-2 [Pisum sativum]
  misc_feature (11)..(64): Homolog of NCBI NO: 1165128 NR Description: extensin [Nicotiana sylvestris]
  misc_feature (1)..(64): Homolog of NCBI NO: 11121504 NR Description: extensin [Nicotiana sylvestris]
  misc_feature (1)..(64): Homolog of NCBI NO: 2129943 NR Description: extensin precursor (clone 6PExt1.2) - wood tobacco
  misc_feature (1)..(57): Homolog of NCBI NO: 8132441 NR Description: extensin [Pisum sativum]
MGSLMASASITLALAIILFSLPSEISANNYIYSSPPPPKKPYRYPSPPPPVPSPPPPKALHHQPSLHHHQFTFMLPLHHPSTSKLGIKKQQQ

SEQ ID NO: 57934 - protein, 88 aa, Glycine max
  peptide (1)..(88): Ceres Seq. ID no. 15168564
  misc_feature (18)..(53): Homolog of NCBI NO: 81870 NR Description: hydroxyproline-rich glycoprotein (clone Hyp3.6) -
  misc_feature (18)..(53): Homolog of NCBI NO: 81870 NR Description: hydroxyproline-rich glycoprotein (clone Hyp3.6) -
  misc_feature (1)..(75): Homolog of NCBI NO: 15021744 NR Description: root nodule extensin [Pisum sativum]
  misc_feature (18)..(53): Homolog of NCBI NO: 7488674 NR Description: extensin homolog HRGP2 - soybean (fragment)
  misc_feature (1)..(60): Homolog of NCBI NO: 11121502 NR Description: putative extensin [Nicotiana sylvestris]
  misc_feature (21)..(53): Homolog of NCBI NO: 37051101 NR Description: hydroxyproline-rich glycoprotein-2 [Pisum sativum]
  misc_feature (7)..(60): Homolog of NCBI NO: 1165128 NR Description: extensin [Nicotiana sylvestris]
  misc_feature (1)..(60): Homolog of NCBI NO: 11121504 NR Description: extensin [Nicotiana sylvestris]
  misc_feature (1)..(60): Homolog of NCBI NO: 2129943 NR Description: extensin precursor (clone 6PExt1.2) - wood tobacco
  misc_feature (1)..(53): Homolog of NCBI NO: 8132441 NR Description: extensin [Pisum sativum]
MASASITLALAIILFSLPSEISANNYIYSSPPPPKKPYRYPSPPPPVPSPPPPKALHHQPSLHHHQFTFMLPLHHPSTSKLGIKKQQQ

SEQ ID NO: 57935 - DNA, 1166 bp, Glycine max
  misc_feature (1)..(1166): Ceres Seq. ID no. 15177746
attttagttccttttcctctttaattcattcatttctctgcaatcccatgggcaagaaaatgaagctcccttccctactacacaacaaaccctcttcttcttcttggccctgccaccaaccgcgaaccctctctttccgaacccaaaacgacgccgcattcaaaaccatcaacgccgcttacttggacacgctggagagctccgaaacttccttcttcacagtctcccctgactccggaagcttctcaactgcctcagaacaagattctagaagaccccactcactagactccgtcattcgcggcttgcgttccgaccgcttattcttcgagccagacgagacaagctccatattagaggccaaaccaccaccaccaccaccaccaccaccatcaccaccaccaccaccaacaacaacaacaacgttgccgttcaaagacagcgttgtcatgtccgtggactctcaggacccttacgtcgatttccgcaggtccatggaggagatggtggaggcgcagtgcgtcaaggactgggagggtctccaagagcttctgtgttggtatttgaaagtcaatggaaaaaccaaccatggctatattgttggcgctttcgtcgatttattggtcgcttcttcttcttcttcttcctcttcctctttctcggtttcttcttcttctaataataataacaactcccaaatagtatctccttcttcccctttatctttttatagctcttctctctcttcctcttgcagcactcgctgtgtttcttgtttggaagctgaggtcgtcgaggttcataatgatatagccactagtactcctacttcttctttcttgttacaacaagttagggaagaccagccatcatcttcttcttcttcctatttgaattaaatattacttttttttttatttgaacctaagggaaatcagttatttttaattgtaatatttgttctgtattatatacttagtagtttataattagtagttgcatttttgtttcatatatggcgcgcgagcttccatggctctgttaatggaggaaattaatactgcaaccgtacgtgagagagagagagagagagagagattgtcaatttttgtttcctttatcccatgggaagccaacaaggagtaaaaatttctatatttgtcttg

SEQ ID NO: 57936 - protein, 298 aa, Glycine max
  peptide (1)..(298): Ceres Seq. ID no. 15177747
  misc_feature (154)..(213): Pfam Name: Protein of unknown function, DUF623 Pfam Description: Protein of unknown function, DUF623
  misc_feature (100)..(203): Homolog of NCBI NO: 34907848 NR Description: P0031D02.11 [Oryza sativa (japonica
  misc_feature (148)..(295): Homolog of NCBI NO: 21618162 NR Description: unknown [Arabidopsis thaliana]
  misc_feature (148)..(295): Homolog of NCBI NO: 18409629 NR Description: expressed protein [Arabidopsis thaliana]
  misc_feature (94)..(297): Homolog of NCBI NO: 18404030 NR Description: expressed protein [Arabidopsis thaliana]
  misc_feature (94)..(297): Homolog of NCBI NO: 26452010 NR Description: unknown protein [Arabidopsis thaliana]
  misc_feature (147)..(224): Homolog of NCBI NO: 32479730 NR Description: OJ991214_12.6 [Oryza sativa (japonica
  misc_feature (31)..(223): Homolog of NCBI NO: 32488711 NR Description: OSJNBa0088H09.12 [Oryza sativa (japonica
  misc_feature (35)..(225): Homolog of NCBI NO: 34908538 NR Description: P0423B08.18 [Oryza sativa (japonica
  misc_feature (35)..(231): Homolog of NCBI NO: 38637034 NR Description: hypothetical protein [Oryza sativa (japonica
  misc_feature (18)..(246): Homolog of NCBI NO: 15238336 NR Description: expressed protein [Arabidopsis thaliana]
FSSFSSLIHSFLCNPMGKKMKLPSLLHNKPSSSSWPCHQPRTLSFRTQNDAAFKTINAAYLDTLESSETSFFTVSPDSGSFSTASEQDSRRPHSLDSVIRGLRSDRLFFEPDETSSILEAKPPPPPPPPPSPPPPPTTTTTLPFKDSVVMSVDSQDPYVDFRRSMEEMVEAQCVKDWEGLQELLCWYLKVNGKTNHGYIVGAFVDLLVASSSSSSSSSFSVSSSSNNNNNSQIVSPSSPLSFYSSSLSSSCSTRCVSCLEAEVVEVHNDIATSTPTSSFLLQQVREDQPSSSSSSYLN

SEQ ID NO: 57937 - protein, 283 aa, Glycine max
  peptide (1)..(283): Ceres Seq. ID no. 15177748
  misc_feature (139)..(198): Pfam Name: Protein of unknown function, DUF623 Pfam Description: Protein of unknown function, DUF623
  misc_feature (85)..(188): Homolog of NCBI NO: 34907848 NR Description: P0031D02.11 [Oryza sativa (japonica
  misc_feature (133)..(280): Homolog of NCBI NO: 21618162 NR Description: unknown [Arabidopsis thaliana]
  misc_feature (133)..(280): Homolog of NCBI NO: 18409629 NR Description: expressed protein [Arabidopsis thaliana]
  misc_feature (79)..(282): Homolog of NCBI NO: 18404030 NR Description: expressed protein [Arabidopsis thaliana]
  misc_feature (79)..(282): Homolog of NCBI NO: 26452010 NR Description: unknown protein [Arabidopsis thaliana]
  misc_feature (132)..(209): Homolog of NCBI NO: 32479730 NR Description: OJ991214_12.6 [Oryza sativa (japonica
  misc_feature (16)..(208): Homolog of NCBI NO: 32488711 NR Description: OSJNBa0088H09.12 [Oryza sativa (japonica
  misc_feature (20)..(210): Homolog of NCBI NO: 34908538 NR Description: P0423B08.18 [Oryza sativa (japonica
  misc_feature (20)..(216): Homolog of NCBI NO: 38637034 NR Description: hypothetical protein [Oryza sativa (japonica
  misc_feature (3)..(231): Homolog of NCBI NO: 15238336 NR Description: expressed protein [Arabidopsis thaliana]
MGKKMKLPSLLHNKPSSSSWPCHQPRTLSFRTQNDAAFKTINAAYLDTLESSETSFFTVSPDSGSFSTASEQDSRRPHSLDSVIRGLRSDRLFFEPDETSSILEAKPPPPPPPPPSPPPPPTTTTTLPFKDSVVMSVDSQDPYVDFRRSMEEMVEAQCVKDWEGLQELLCWYLKVNGKTNHGYIVGAFVDLLVASSSSSSSSSFSVSSSSNNNNNSQIVSPSSPLSFYSSSLSSSCSTRCVSCLEAEVVEVHNDIATSTPTSSFLLQQVREDQPSSSSSSYLN

SEQ ID NO: 57938 - protein, 279 aa, Glycine max
  peptide (1)..(279): Ceres Seq. ID no. 15177749
  misc_feature (135)..(194): Pfam Name: Protein of unknown function, DUF623 Pfam Description: Protein of unknown function, DUF623
  misc_feature (81)..(184): Homolog of NCBI NO: 34907848 NR Description: P0031D02.11 [Oryza sativa (japonica
  misc_feature (129)..(276): Homolog of NCBI NO: 21618162 NR Description: unknown [Arabidopsis thaliana]
  misc_feature (129)..(276): Homolog of NCBI NO: 18409629 NR Description: expressed protein [Arabidopsis thaliana]
  misc_feature (75)..(278): Homolog of NCBI NO: 18404030 NR Description: expressed protein [Arabidopsis thaliana]
  misc_feature (75)..(278): Homolog of NCBI NO: 26452010 NR Description: unknown protein [Arabidopsis thaliana]
  misc_feature (128)..(205): Homolog of NCBI NO: 32479730 NR Description: OJ991214_12.6 [Oryza sativa (japonica
  misc_feature (12)..(204): Homolog of NCBI NO: 32488711 NR Description: OSJNBa0088H09.12 [Oryza sativa (japonica
  misc_feature (16)..(206): Homolog of NCBI NO: 34908538 NR Description: P0423B08.18 [Oryza sativa (japonica
  misc_feature (16)..(212): Homolog of NCBI NO: 38637034 NR Description: hypothetical protein [Oryza sativa (japonica
  misc_feature (1)..(227): Homolog of NCBI NO: 15238336 NR Description: expressed protein [Arabidopsis thaliana]
MKLPSLLHNKPSSSSWPCHQPRTLSFRTQNDAAFKTINAAYLDTLESSETSFFTVSPDSGSFSTASEQDSRRPHSLDSVIRGLRSDRLFFEPDETSSILEAKPPPPPPPPPSPPPPPTTTTTLPFKDSVVMSVDSQDPYVDFRRSMEEMVEAQCVKDWEGLQELLCWYLKVNGKTNHGYIVGAFVDLLVASSSSSSSSSFSVSSSSNNNNNSQIVSPSSPLSFYSSSLSSSCSTRCVSCLEAEVVEVHNDIATSTPTSSFLLQQVREDQPSSSSSSYLN

SEQ ID NO: 57939 - DNA, 763 bp, Glycine max
  misc_feature (1)..(763): Ceres Seq. ID no. 15172788
attgtttcctttccattgctgatatatgacaaaacacccgtagccatccaataagaccaccacacacacacacacacacatttcttcaaactcactcctttctttccattccctcactttcacacccacaagtcacacccacttggttccttcctccaccccattatttttttctctttttttgatccaaacatgtcctccacacacccaaaaaacccagcaacgacaacaacatccactactctcatcgtgctctcaattatactcctttgttttccgacaaccgcaaaaaccgacaaccctccatgcccttatccgtgttacccaccacccattggaacggttactcccaccactccttcaggtggttccactgttccaccagcaccacctcaacccggattactatatccaccaccttctgggaattacccttattaccccacaccaccttacggcggcggcggtcgtgttggcagcaacgacggtagcggtagcggtagtggtggttttggcagcccaccaccaccggaccctattctaccctactttccattctactacagaaagcctcctcacaagccagaagacaattcagcatcaacaaccactatgtacaaatggacagggatggttggtattactagtctattatcttcatctttgcttcttctctttgtataactctcatgaatcatgatcaaaatcttcatgtaatatctaaacagttaatttaatgcttgttaatttaatggtatttttt

SEQ ID NO: 57940 - protein, 163 aa, Glycine max
  peptide (1)..(163): Ceres Seq. ID no. 15172789
  misc_feature (53)..(107): Pfam Name: TT viral ORF2 Pfam Description: TT viral ORF2
  misc_feature (34)..(121): Homolog of NCBI NO: 31792269 NR Description: Probable Proline-rich antigen homolog pra
  misc_feature (34)..(121): Homolog of NCBI NO: 15608218 NR Description: pra [Mycobacterium tuberculosis H37Rv]
  misc_feature (36)..(109): Homolog of NCBI NO: 15240573 NR Description: proline-rich protein family [Arabidopsis
  misc_feature (35)..(128): Homolog of NCBI NO: 18397707 NR Description: proline-rich protein family [Arabidopsis
  misc_feature (13)..(158): Homolog of NCBI NO: 15234820 NR Description: proline-rich protein family [Arabidopsis
  misc_feature (38)..(163): Homolog of NCBI NO: 34894480 NR Description: OJ1116_C07.3 [Oryza sativa (japonica
  misc_feature (35)..(128): Homolog of NCBI NO: 18423010 NR Description: proline-rich protein family [Arabidopsis
  misc_feature (18)..(162): Homolog of NCBI NO: 34894212 NR Description: P0439B06.27 [Oryza sativa (japonica
  misc_feature (25)..(162): Homolog of NCBI NO: 18409730 NR Description: proline-rich protein family [Arabidopsis
  misc_feature (16)..(163): Homolog of NCBI NO: 15220010 NR Description: expressed protein [Arabidopsis thaliana]
MSSTHPKNPATTTTSTTLIVLSIILLCFPTTAKTDNPPCPYPCYPPPIGTVTPTTPSGGSTVPPAPPQPGLLYPPPSGNYPYYPTPPYGGGGRVGSNDGSGSGSGGFGSPPPPDPILPYFPFYYRKPPHKPEDNSASTTTMYKWTGMVGITSLLSSSLLLLFV

SEQ ID NO: 57941 - DNA, 898 bp, Glycine max
  misc_feature (1)..(898): Ceres Seq. ID no. 14316400
accaaaggcagtagtgtgttcaccgtggaactgttcttctctctcataacatgccctctgcccaggatccattttacgttgtcaaggccgagattcaagattctattgataagctgcaatctacttttcaccaatgggaaagcaagtccggtgctgcggaacaaggacatcttacaaaggaggttcttgctggatgcgaaagcatagagtggcaggtggatgaattggataaggcaattgctatagcatctagagatccttcttggtatgggatagatgaagctgaggtcgaaagccgaaggagatggacaagtaacactcgttctcaggttggcacaatgaagaaagcagtggaatctggcaagggctcaagtaccacaagccatgctagtgttaatgggatgcgccgagaactaatgaggctaccaaattctcatcaaactgatagctctaaccagtatgctgcccgagataatgatgatttcatactatcagaatcagatagacaaacacttcttataaagagacaggatgaggggtgggatgagcttagtgaaagtgtacgaagaatcggaggtgttgnacttacaatacatgatgaactcactgcacaggaaaagattctagatgaacttggttccgagatggacagtacaacaaatcgtcttgattttgtccaaaaaaaagtggcgatggttatgaaaaaggctagtgcaaagggtcagatcatgatgatattgggtttgttggccctgttcatcttcctctttatcttagtattcttcacctagtcattgagatgggaccagtctctgtgctgtttgtacatgaaaagagatctaatatttttttgttcagattcaagagtaataatagacatgcatttaactattcagtt

SEQ ID NO: 57942 - protein, 246 aa, Glycine max
  peptide (1)..(246): Ceres Seq. ID no. 14316401
  misc_feature (159)..(220): Pfam Name: SNARE domain Pfam Description: SNARE domain
  misc_feature (3)..(242): Homolog of NCBI NO: 5032131 NR Description: syntaxin 6 [Homo sapiens]
  misc_feature (3)..(242): Homolog of NCBI NO: 12857762 NR Description: unnamed protein product [Mus musculus]
  misc_feature (3)..(242): Homolog of NCBI NO: 10946800 NR Description: syntaxin 6 [Mus musculus]
  misc_feature (3)..(243): Homolog of NCBI NO: 13928922 NR Description: syntaxin 6 [Rattus norvegicus]
  misc_feature (1)..(191): Homolog of NCBI NO: 498040 NR Description: ORF
  misc_feature (13)..(210): Homolog of NCBI NO: 6560768 NR Description: F3M18.7 [Arabidopsis thaliana]
  misc_feature (1)..(55): Homolog of NCBI NO: 34905840 NR Description: putative syntaxin [Oryza sativa (japonica
  misc_feature (54)..(246): Homolog of NCBI NO: 34905840 NR Description: putative syntaxin [Oryza sativa (japonica
  misc_feature (1)..(246): Homolog of NCBI NO: 18396813 NR Description: syntaxin SYP6 family [Arabidopsis thaliana]
  misc_feature (1)..(246): Homolog of NCBI NO: 18175840 NR Description: unknown protein [Arabidopsis thaliana]
  misc_feature (178)..(178): Xaa is any aa, unknown or other
MPSAQDPFYVVKAEIQDSIDKLQSTFHQWESKSGAAEQGHLTKEVLAGCESIEWQVDELDKAIAIASRDPSWYGIDEAEVESRRRWTSNTRSQVGTMKKAVESGKGSSTTSHASVNGMRRELMRLPNSHQTDSSNQYAARDNDDFILSESDRQTLLIKRQDEGWDELSESVRRIGGVXLTIHDELTAQEKILDELGSEMDSTTNRLDFVQKKVAMVMKKASAKGQIMMILGLLALFIFLFILVFFT

SEQ ID NO: 57943 - protein, 150 aa, Glycine max
  peptide (1)..(150): Ceres Seq. ID no. 14316402
  misc_feature (63)..(124): Pfam Name: SNARE domain Pfam Description: SNARE domain
  misc_feature (1)..(142): Homolog of NCBI NO: 12844640 NR Description: unnamed protein product [Mus musculus]
  misc_feature (1)..(146): Homolog of NCBI NO: 5032131 NR Description: syntaxin 6 [Homo sapiens]
  misc_feature (1)..(146): Homolog of NCBI NO: 12857762 NR Description: unnamed protein product [Mus musculus]
  misc_feature (1)..(146): Homolog of NCBI NO: 10946800 NR Description: syntaxin 6 [Mus musculus]
  misc_feature (1)..(147): Homolog of NCBI NO: 13928922 NR Description: syntaxin 6 [Rattus norvegicus]
  misc_feature (1)..(95): Homolog of NCBI NO: 498040 NR Description: ORF
  misc_feature (1)..(114): Homolog of NCBI NO: 6560768 NR Description: F3M18.7 [Arabidopsis thaliana]
  misc_feature (1)..(150): Homolog of NCBI NO: 34905840 NR Description: putative syntaxin [Oryza sativa (japonica
  misc_feature (1)..(150): Homolog of NCBI NO: 18396813 NR Description: syntaxin SYP6 family [Arabidopsis thaliana]
  misc_feature (1)..(150): Homolog of NCBI NO: 18175840 NR Description: unknown protein [Arabidopsis thaliana]
  misc_feature (82)..(82): Xaa is any aa, unknown or other
MKKAVESGKGSSTTSHASVNGMRRELMRLPNSHQTDSSNQYAARDNDDFILSESDRQTLLIKRQDEGWDELSESVRRIGGVXLTIHDELTAQEKILDELGSEMDSTTNRLDFVQKKVAMVMKKASAKGQIMMILGLLALFIFLFILVFFT

SEQ ID NO: 57944 - protein, 129 aa, Glycine max
  peptide (1)..(129): Ceres Seq. ID no. 14316403
  misc_feature (42)..(103): Pfam Name: SNARE domain Pfam Description: SNARE domain
  misc_feature (1)..(121): Homolog of NCBI NO: 12844640 NR Description: unnamed protein product [Mus musculus]
  misc_feature (1)..(125): Homolog of NCBI NO: 5032131 NR Description: syntaxin 6 [Homo sapiens]
  misc_feature (1)..(125): Homolog of NCBI NO: 12857762 NR Description: unnamed protein product [Mus musculus]
  misc_feature (1)..(125): Homolog of NCBI NO: 10946800 NR Description: syntaxin 6 [Mus musculus]
  misc_feature (1)..(126): Homolog of NCBI NO: 13928922 NR Description: syntaxin 6 [Rattus norvegicus]
  misc_feature (1)..(74): Homolog of NCBI NO: 498040 NR Description: ORF
  misc_feature (1)..(93): Homolog of NCBI NO: 6560768 NR Description: F3M18.7 [Arabidopsis thaliana]
  misc_feature (1)..(129): Homolog of NCBI NO: 34905840 NR Description: putative syntaxin [Oryza sativa (japonica
  misc_feature (1)..(129): Homolog of NCBI NO: 18396813 NR Description: syntaxin SYP6 family [Arabidopsis thaliana]
  misc_feature (1)..(129): Homolog of NCBI NO: 18175840 NR Description: unknown protein [Arabidopsis thaliana]
  misc_feature (61)..(61): Xaa is any aa, unknown or other
MRRELMRLPNSHQTDSSNQYAARDNDDFILSESDRQTLLIKRQDEGWDELSESVRRIGGVXLTIHDELTAQEKILDELGSEMDSTTNRLDFVQKKVAMVMKKASAKGQIMMILGLLALFIFLFILVFFT

SEQ ID NO: 57945 - DNA, 902 bp, Glycine max
  misc_feature (1)..(902): Ceres Seq. ID no. 15177754
atcaacaccttttggtttccacggatatttggagacaacacagggcaatataggttactaataatggttaccaaggtttacattgtttattattctacgtatggacacattgagaagctagctagagagattgaaaaaggtgctgcttccgtggagggagtagaagcaaaactgtggcaggtacctgaaacactgtctgaagaagtccttgtgaagaagggagcacctccaaagagtgatgatgttcctattattaaaccccgtgagcttgccgatgccgatggctttctgttcggttttccaacaacatttggaaccatggcttctcaattcaaagcatttttagaaggcactatagggctgtggcatacacaggcactagcaggaaaacctgcagggttcttctctagcactagttctcaaggaggtggacaagaagagaccccgttgacctctgtcactcagcttgttcaccatggaatgatttttgttccggttgggtacacatttggagatggcatgtatgagatggagaaggtcaaaggtgggtccccttatggctcaggaactgttgtcggggatggctcaaggcaacctagtgacttggaattggctcaagcttttcatcagggtaaatactttgcagccattgcaaaaaagctcaagggatagataagatacatctcattcatctatctcccacactatactctctctccagttaccctattattaatatcaaaccagaataaggtcatgttagtagaaaaaataaaagtacgtacgtgtgagataatgatgaattaatacttcatcttcgatacaattgttgtcacttaattgtcataatatatgtatcctgtaatgcagtgtttgttgtcaataacaagaatttggtgatt

SEQ ID NO: 57946 - protein, 223 aa, Glycine max
  peptide (1)..(223): Ceres Seq. ID no. 15177755
  misc_feature (25)..(221): Homolog of NCBI NO: 15234512 NR Description: quinone reductase family [Arabidopsis thaliana]
  misc_feature (23)..(222): Homolog of NCBI NO: 22327957 NR Description: quinone reductase family [Arabidopsis thaliana]
  misc_feature (22)..(223): Homolog of NCBI NO: 34910128 NR Description: putative 1,4-benzoquinone reductase
  misc_feature (22)..(222): Homolog of NCBI NO: 12484052 NR Description: quinone-oxidoreductase QR2 [Triphysaria
  misc_feature (22)..(223): Homolog of NCBI NO: 7445353 NR Description: hypothetical protein M4I22.80 - Arabidopsis
  misc_feature (22)..(223): Homolog of NCBI NO: 38636776 NR Description: putative quinone-oxidoreductase QR2
  misc_feature (22)..(223): Homolog of NCBI NO: 15239652 NR Description: quinone reductase, putative [Arabidopsis
  misc_feature (22)..(223): Homolog of NCBI NO: 5031275 NR Description: unknown [Prunus armeniaca]
  misc_feature (22)..(223): Homolog of NCBI NO: 30687535 NR Description: quinone reductase family [Arabidopsis thaliana]
  misc_feature (24)..(223): Homolog of NCBI NO: 21068664 NR Description: putative quinone oxidoreductase [Cicer arietinum]
INTFWFPRIFGDNTGQYRLLIMVTKVYIVYYSTYGHIEKLAREIEKGAASVEGVEAKLWQVPETLSEEVLVKKGAPPKSDDVPIIKPRELADADGFLFGFPTTFGTMASQFKAFLEGTIGLWHTQALAGKPAGFFSSTSSQGGGQEETPLTSVTQLVHHGMIFVPVGYTFGDGMYEMEKVKGGSPYGSGTVVGDGSRQPSDLELAQAFHQGKYFAAIAKKLKG

SEQ ID NO: 57947 - protein, 202 aa, Glycine max
  peptide (1)..(202): Ceres Seq. ID no. 15177756
  misc_feature (4)..(200): Homolog of NCBI NO: 15234512 NR Description: quinone reductase family [Arabidopsis thaliana]
  misc_feature (2)..(201): Homolog of NCBI NO: 22327957 NR Description: quinone reductase family [Arabidopsis thaliana]
  misc_feature (1)..(202): Homolog of NCBI NO: 34910128 NR Description: putative 1,4-benzoquinone reductase
  misc_feature (1)..(201): Homolog of NCBI NO: 12484052 NR Description: quinone-oxidoreductase QR2 [Triphysaria
  misc_feature (1)..(202): Homolog of NCBI NO: 7445353 NR Description: hypothetical protein M4I22.80 - Arabidopsis
  misc_feature (1)..(202): Homolog of NCBI NO: 38636776 NR Description: putative quinone-oxidoreductase QR2
  misc_feature (1)..(202): Homolog of NCBI NO: 15239652 NR Description: quinone reductase, putative [Arabidopsis
  misc_feature (1)..(202): Homolog of NCBI NO: 5031275 NR Description: unknown [Prunus armeniaca]
  misc_feature (1)..(202): Homolog of NCBI NO: 30687535 NR Description: quinone reductase family [Arabidopsis thaliana]
  misc_feature (3)..(202): Homolog of NCBI NO: 21068664 NR Description: putative quinone oxidoreductase [Cicer arietinum]
MVTKVYIVYYSTYGHIEKLAREIEKGAASVEGVEAKLWQVPETLSEEVLVKKGAPPKSDDVPIIKPRELADADGFLFGFPTTFGTMASQFKAFLEGTIGLWHTQALAGKPAGFFSSTSSQGGGQEETPLTSVTQLVHHGMIFVPVGYTFGDGMYEMEKVKGGSPYGSGTVVGDGSRQPSDLELAQAFHQGKYFAAIAKKLKG

SEQ ID NO: 57948 - protein, 117 aa, Glycine max
  peptide (1)..(117): Ceres Seq. ID no. 15177757
  misc_feature (1)..(115): Homolog of NCBI NO: 15234512 NR Description: quinone reductase family [Arabidopsis thaliana]
  misc_feature (1)..(116): Homolog of NCBI NO: 22327957 NR Description: quinone reductase family [Arabidopsis thaliana]
  misc_feature (1)..(117): Homolog of NCBI NO: 34910128 NR Description: putative 1,4-benzoquinone reductase
  misc_feature (1)..(116): Homolog of NCBI NO: 12484052 NR Description: quinone-oxidoreductase QR2 [Triphysaria
  misc_feature (1)..(117): Homolog of NCBI NO: 7445353 NR Description: hypothetical protein M4I22.80 - Arabidopsis
  misc_feature (1)..(117): Homolog of NCBI NO: 38636776 NR Description: putative quinone-oxidoreductase QR2
  misc_feature (1)..(117): Homolog of NCBI NO: 15239652 NR Description: quinone reductase, putative [Arabidopsis
  misc_feature (1)..(117): Homolog of NCBI NO: 5031275 NR Description: unknown [Prunus armeniaca]
  misc_feature (1)..(117): Homolog of NCBI NO: 30687535 NR Description: quinone reductase family [Arabidopsis thaliana]
  misc_feature (1)..(117): Homolog of NCBI NO: 21068664 NR Description: putative quinone oxidoreductase [Cicer arietinum]
MASQFKAFLEGTIGLWHTQALAGKPAGFFSSTSSQGGGQEETPLTSVTQLVHHGMIFVPVGYTFGDGMYEMEKVKGGSPYGSGTVVGDGSRQPSDLELAQAFHQGKYFAAIAKKLKG

SEQ ID NO: 57949 - DNA, 757 bp, Glycine max
  misc_feature (1)..(757): Ceres Seq. ID no. 13639656
aacaaacatgggaagcaagaaaacctacgaggaagaagaaagcacggctctattttcccattcccaaacacaaacagacttgctgttacccttcaacgagaacgacccacaggacatggtcatataccaagtcctccacgaagccaatgctctcaccaacacattcctccctcagcccaccagaaacataacaaagaagcactacagaggagtccgccgccgtccttggggaaaatacgccgctgagattcgcgactcggcgcgccacggcgccaggatatggctcggcaccttccaaaccgctgaagaggctgccatggcttatgaccgagccgcgttcaagatgaggggctccaaggctttgctcaatttcccagctgaaattgttgctgctgctactgcaacagagttatctttcaaaagtagtagtaataataataataataataataataacaatcccgatgctgtttctgattccagtgctggtagctcttgcacgaacaattccacttgggtaaataggaatcagtcagaaatcacaagtggcacaggttagctaaatggtgttgaagttgaacaattaattgtagaaatctttttttgtttctttttctcaatcgttttggtttgttataactattataattatttgtatctgtctgtccaactggacaacaaaaattaattaattgaatgtgataccatgatcatgcatgggttaaaattataatggttagtgatttttcttcttctt

SEQ ID NO: 57950 - protein, 185 aa, Glycine max
  peptide (1)..(185): Ceres Seq. ID no. 13639657
  misc_feature (66)..(129): Pfam Name: AP2 domain Pfam Description: AP2 domain
  misc_feature (66)..(183): Homolog of NCBI NO: 18414897 NR Description: ethylene responsive element binding factor 1
  misc_feature (7)..(127): Homolog of NCBI NO: 40060531 NR Description: putative ethylene response factor 4 [Vitis
  misc_feature (66)..(171): Homolog of NCBI NO: 38346167 NR Description: OSJNBa0079A21.14 [Oryza sativa (japonica
  misc_feature (47)..(159): Homolog of NCBI NO: 12003376 NR Description: Avr9/Cf-9 rapidly elicited protein 1 [Nicotiana
  misc_feature (66)..(165): Homolog of NCBI NO: 14140141 NR Description: putative AP2-related transcription factor [Oryza
  misc_feature (4)..(129): Homolog of NCBI NO: 15229405 NR Description: ethylene response factor 1 (ERF1) [Arabidopsis
  misc_feature (4)..(129): Homolog of NCBI NO: 21554205 NR Description: ethylene response factor ERF1 [Arabidopsis
  misc_feature (14)..(51): Homolog of NCBI NO: 34909594 NR Description: P0046E05.31 [Oryza sativa (japonica
  misc_feature (66)..(147): Homolog of NCBI NO: 34909594 NR Description: P0046E05.31 [Oryza sativa (japonica
  misc_feature (24)..(161): Homolog of NCBI NO: 7531180 NR Description: PATHOGENESIS-RELATED GENES TRANSCRIPTIONAL
TNMGSKKTYEEEESTALFSHSQTQTDLLLPFNENDPQDMVIYQVLHEANALTNTFLPQPTRNITKKHYRGVRRRPWGKYAAEIRDSARHGARIWLGTFQTAEEAAMAYDRAAFKMRGSKALLNFPAEIVAAATATELSFKSSSNNNNNNNNNNPDAVSDSSAGSSCTNNSTWVNRNQSEITSGTG

SEQ ID NO: 57951 - protein, 183 aa, Glycine max
  peptide (1)..(183): Ceres Seq. ID no. 13639658
  misc_feature (64)..(127): Pfam Name: AP2 domain Pfam Description: AP2 domain
  misc_feature (64)..(181): Homolog of NCBI NO: 18414897 NR Description: ethylene responsive element binding factor 1
  misc_feature (5)..(125): Homolog of NCBI NO: 40060531 NR Description: putative ethylene response factor 4 [Vitis
  misc_feature (64)..(169): Homolog of NCBI NO: 38346167 NR Description: OSJNBa0079A21.14 [Oryza sativa (japonica
  misc_feature (45)..(157): Homolog of NCBI NO: 12003376 NR Description: Avr9/Cf-9 rapidly elicited protein 1 [Nicotiana
  misc_feature (64)..(163): Homolog of NCBI NO: 14140141 NR Description: putative AP2-related transcription factor [Oryza
  misc_feature (2)..(127): Homolog of NCBI NO: 15229405 NR Description: ethylene response factor 1 (ERF1) [Arabidopsis
  misc_feature (2)..(127): Homolog of NCBI NO: 21554205 NR Description: ethylene response factor ERF1 [Arabidopsis
  misc_feature (12)..(49): Homolog of NCBI NO: 34909594 NR Description: P0046E05.31 [Oryza sativa (japonica
  misc_feature (64)..(145): Homolog of NCBI NO: 34909594 NR Description: P0046E05.31 [Oryza sativa (japonica
  misc_feature (22)..(159): Homolog of NCBI NO: 7531180 NR Description: PATHOGENESIS-RELATED GENES TRANSCRIPTIONAL
MGSKKTYEEEESTALFSHSQTQTDLLLPFNENDPQDMVIYQVLHEANALTNTFLPQPTRNITKKHYRGVRRRPWGKYAAEIRDSARHGARIWLGTFQTAEEAAMAYDRAAFKMRGSKALLNFPAEIVAAATATELSFKSSSNNNNNNNNNNPDAVSDSSAGSSCTNNSTWVNRNQSEITSGTG

SEQ ID NO: 57952 - protein, 147 aa, Glycine max
  peptide (1)..(147): Ceres Seq. ID no. 13639659
  misc_feature (28)..(91): Pfam Name: AP2 domain Pfam Description: AP2 domain
  misc_feature (28)..(145): Homolog of NCBI NO: 18414897 NR Description: ethylene responsive element binding factor 1
  misc_feature (1)..(89): Homolog of NCBI NO: 40060531 NR Description: putative ethylene response factor 4 [Vitis
  misc_feature (28)..(133): Homolog of NCBI NO: 38346167 NR Description: OSJNBa0079A21.14 [Oryza sativa (japonica
  misc_feature (9)..(121): Homolog of NCBI NO: 12003376 NR Description: Avr9/Cf-9 rapidly elicited protein 1 [Nicotiana
  misc_feature (28)..(127): Homolog of NCBI NO: 14140141 NR Description: putative AP2-related transcription factor [Oryza
  misc_feature (1)..(91): Homolog of NCBI NO: 15229405 NR Description: ethylene response factor 1 (ERF1) [Arabidopsis
  misc_feature (1)..(91): Homolog of NCBI NO: 21554205 NR Description: ethylene response factor ERF1 [Arabidopsis
  misc_feature (1)..(13): Homolog of NCBI NO: 34909594 NR Description: P0046E05.31 [Oryza sativa (japonica
  misc_feature (28)..(109): Homolog of NCBI NO: 34909594 NR Description: P0046E05.31 [Oryza sativa (japonica
  misc_feature (1)..(123): Homolog of NCBI NO: 7531180 NR Description: PATHOGENESIS-RELATED GENES TRANSCRIPTIONAL
MVIYQVLHEANALTNTFLPQPTRNITKKHYRGVRRRPWGKYAAEIRDSARHGARIWLGTFQTAEEAAMAYDRAAFKMRGSKALLNFPAEIVAAATATELSFKSSSNNNNNNNNNNPDAVSDSSAGSSCTNNSTWVNRNQSEITSGTG

SEQ ID NO: 57953 - DNA, 741 bp, Glycine max
  misc_feature (1)..(741): Ceres Seq. ID no. 15172821
aaacccatcatcgctcccagaaagttgtatcggtttctcttcttaagttttcttcaccatctcaagattaagctttttgggttcattacaggaaaatgttgaaattcttgtcgagagtgaaaatcgagttcaacgcgttggacccgcgaacggcgtcgtgtatggagtttctggcgcaatgcaactcgcggaaggcgaaggagtcgaacccggcgtgcgaagtggaggtgaagcgcgtgagggaagagcgcgcgccgcagataacggtgacgttcgttaacggcgttgaggaagtgttcgacgcgacggcgacgccggctcagagcatacgaaacttgattctggaaaagggtcagcacctcgagacggagcagatgttccgcgaagctggggaaccctggcccgttgtcatccccgacgaggagctctcgcaaatcgcaccccctaccaaaccaaggaaagcagaagacaagaagcaataggcaatagctgaatattgttgagcttattaacggctatggattcttctgggttttgtcaccctttctcttgtttctttttggtgggagatatggcatctgattcctgctgttggtgctgcataccttgctgtatttcagcacttaattattgaatgcataactatgtatgagttgcacaataatgtaaggctctgaattgctaattttgaaactgtaatcttgtcatgattgtttttgcttagtttggtttccagaggat

SEQ ID NO: 57954 - protein, 128 aa, Glycine max
  peptide (1)..(128): Ceres Seq. ID no. 15172822
  misc_feature (1)..(119): Homolog of NCBI NO: 9758335 NR Description: gene_id:MIJ24.9~unknown protein [Arabidopsis
  misc_feature (1)..(127): Homolog of NCBI NO: 15241817 NR Description: expressed protein [Arabidopsis thaliana]
  misc_feature (1)..(128): Homolog of NCBI NO: 27450530 NR Description: hypothetical protein [Prunus persica]
MLKFLSRVKIEFNALDPRTASCMEFLAQCNSRKAKESNPACEVEVKRVREERAPQITVTFVNGVEEVFDATATPAQSIRNLILEKGQHLETEQMFREAGEPWPVVIPDEELSQIAPPTKPRKAEDKKQ

SEQ ID NO: 57955 - protein, 106 aa, Glycine max
  peptide (1)..(106): Ceres Seq. ID no. 15172823
  misc_feature (1)..(97): Homolog of NCBI NO: 9758335 NR Description: gene_id:MIJ24.9~unknown protein [Arabidopsis
  misc_feature (1)..(105): Homolog of NCBI NO: 15241817 NR Description: expressed protein [Arabidopsis thaliana]
  misc_feature (1)..(106): Homolog of NCBI NO: 27450530 NR Description: hypothetical protein [Prunus persica]
MEFLAQCNSRKAKESNPACEVEVKRVREERAPQITVTFVNGVEEVFDATATPAQSIRNLILEKGQHLETEQMFREAGEPWPVVIPDEELSQIAPPTKPRKAEDKKQ

SEQ ID NO: 57956 - DNA, 1168 bp, Glycine max
  misc_feature (1)..(1168): Ceres Seq. ID no. 14316451
aactatcccttcttcctttctctcttctattctcattcgcatttcgcaccaagtcaatggcttccaccaccactctctccttccacttcccatatccaacaacatcgctctcttctcactctcaactttcgccctctccgcaaccttccccattcaaaccctgcaccgttgcttcccgccaaaacctctgcacctccaacaccctctctgtctctgcttccagaaaaaactcaacctctccaatttttctcgctacggcttctggcaaatctgagcctatgctccctcctttcaacgttttgattactggctcaaccaaaggaatagggtatgcgttggcgaaagagtttttaaaagctggtgacaacgtcctgatttgctcaagatcagatgaaagggtaaagactgctgtccagaacttgagagtagaatttggggagcagcatgtgtggggaactaaatgtgatgtaaaaaatgcagaggatgtgaagaatttagtttcatttgctcaagaaaaaatgaaatacattgatatatggataaacaatgctggatcaaatgcatatagctataagccacttgttgaggcttcagatgaagatcttattgaggtggttacaacaaatacacttggcttgatgatatgttgtcgagaggcaatcaagatgatggtgaaccaacctcgtggaggtcatattttcaatatagacggggcaggttcagatggaagaccaactcctaggtttgctgcatatggagcaacaaagagaagtgtggtgcatttaacaaagtcattacaggcagaattgcggatgcaagatgttaaaaacgttgtggtgcataatctttcgccaggaatggttacaacggatcttctcatgtctggtgttaatacaaagcaggcaaagtttttcattaatgtcttggcagaaccagctgaagtggttgcagaatacttagttccaaacattagatctgtccctgcaaatggatcaatgaaaccaacatacattcgattcctcacgggtttgaaagcctattcccagatattttcaagattggcattcggcgcaagaaggaatcgatacattcttgaagattgaactgcataaatatttgtgctatgtgcaacttttatttcttgttttaaatatctattcatcccccc

SEQ ID NO: 57957 - protein, 366 aa, Glycine max
  peptide (1)..(366): Ceres Seq. ID no. 14316452
  misc_feature (100)..(314): Homolog of NCBI NO: 14521852 NR Description: 3-OXOACYL-[ACYL-CARRIER-PROTEIN] REDUCTASE
  misc_feature (100)..(300): Homolog of NCBI NO: 31213111 NR Description: ENSANGP00000021713 [Anopheles gambiae]
  misc_feature (94)..(332): Homolog of NCBI NO: 22971619 NR Description: hypothetical protein [Chloroflexus aurantiacus]
  misc_feature (131)..(330): Homolog of NCBI NO: 7485669 NR Description: hypothetical protein F17N18.140 - Arabidopsis
  misc_feature (96)..(366): Homolog of NCBI NO: 34904226 NR Description: P0443E07.30 [Oryza sativa (japonica
  misc_feature (93)..(362): Homolog of NCBI NO: 21673969 NR Description: oxidoreductase, short-chain
  misc_feature (96)..(330): Homolog of NCBI NO: 18413962 NR Description: short-chain dehydrogenase/reductase family
  misc_feature (37)..(351): Homolog of NCBI NO: 10178029 NR Description: gene_id:MUG13.25~pir||T07705~similar to unknown
  misc_feature (93)..(366): Homolog of NCBI NO: 29244639 NR Description: putative oxidoreductase protein
  misc_feature (37)..(366): Homolog of NCBI NO: 18414726 NR Description: short-chain dehydrogenase/reductase family
LSLLPFSLLFSFAFRTKSMASTTTLSFHFPYPTTSLSSHSQLSPSPQPSPFKPCTVASRQNLCTSNTLSVSASRKNSTSPIFLATASGKSEPMLPPFNVLITGSTKGIGYALAKEFLKAGDNVLICSRSDERVKTAVQNLRVEFGEQHVWGTKCDVKNAEDVKNLVSFAQEKMKYIDIWINNAGSNAYSYKPLVEASDEDLIEVVTTNTLGLMICCREAIKMMVNQPRGGHIFNIDGAGSDGRPTPRFAAYGATKRSVVHLTKSLQAELRMQDVKNVVVHNLSPGMVTTDLLMSGVNTKQAKFFINVLAEPAEVVAEYLVPNIRSVPANGSMKPTYIRFLTGLKAYSQIFSRLAFGARRNRYILED

SEQ ID NO: 57958 - protein, 348 aa, Glycine max
  peptide (1)..(348): Ceres Seq. ID no. 14316453
  misc_feature (82)..(296): Homolog of NCBI NO: 14521852 NR Description: 3-OXOACYL-[ACYL-CARRIER-PROTEIN] REDUCTASE
  misc_feature (82)..(282): Homolog of NCBI NO: 31213111 NR Description: ENSANGP00000021713 [Anopheles gambiae]
  misc_feature (76)..(314): Homolog of NCBI NO: 22971619 NR Description: hypothetical protein [Chloroflexus aurantiacus]
  misc_feature (113)..(312): Homolog of NCBI NO: 7485669 NR Description: hypothetical protein F17N18.140 - Arabidopsis
  misc_feature (78)..(348): Homolog of NCBI NO: 34904226 NR Description: P0443E07.30 [Oryza sativa (japonica
  misc_feature (75)..(344): Homolog of NCBI NO: 21673969 NR Description: oxidoreductase, short-chain
  misc_feature (78)..(312): Homolog of NCBI NO: 18413962 NR Description: short-chain dehydrogenase/reductase family
  misc_feature (19)..(333): Homolog of NCBI NO: 10178029 NR Description: gene_id:MUG13.25~pir||T07705~similar to unknown
  misc_feature (75)..(348): Homolog of NCBI NO: 29244639 NR Description: putative oxidoreductase protein
  misc_feature (19)..(348): Homolog of NCBI NO: 18414726 NR Description: short-chain dehydrogenase/reductase family
MASTTTLSFHFPYPTTSLSSHSQLSPSPQPSPFKPCTVASRQNLCTSNTLSVSASRKNSTSPIFLATASGKSEPMLPPFNVLITGSTKGIGYALAKEFLKAGDNVLICSRSDERVKTAVQNLRVEFGEQHVWGTKCDVKNAEDVKNLVSFAQEKMKYIDIWINNAGSNAYSYKPLVEASDEDLIEVVTTNTLGLMICCREAIKMMVNQPRGGHIFNIDGAGSDGRPTPRFAAYGATKRSVVHLTKSLQAELRMQDVKNVVVHNLSPGMVTTDLLMSGVNTKQAKFFINVLAEPAEVVAEYLVPNIRSVPANGSMKPTYIRFLTGLKAYSQIFSRLAFGARRNRYILED

SEQ ID NO: 57959 - protein, 274 aa, Glycine max
  peptide (1)..(274): Ceres Seq. ID no. 14316454
  misc_feature (8)..(222): Homolog of NCBI NO: 14521852 NR Description: 3-OXOACYL-[ACYL-CARRIER-PROTEIN] REDUCTASE
  misc_feature (8)..(208): Homolog of NCBI NO: 31213111 NR Description: ENSANGP00000021713 [Anopheles gambiae]
  misc_feature (2)..(240): Homolog of NCBI NO: 22971619 NR Description: hypothetical protein [Chloroflexus aurantiacus]
  misc_feature (39)..(238): Homolog of NCBI NO: 7485669 NR Description: hypothetical protein F17N18.140 - Arabidopsis
  misc_feature (4)..(274): Homolog of NCBI NO: 34904226 NR Description: P0443E07.30 [Oryza sativa (japonica
  misc_feature (1)..(270): Homolog of NCBI NO: 21673969 NR Description: oxidoreductase, short-chain
  misc_feature (4)..(238): Homolog of NCBI NO: 18413962 NR Description: short-chain dehydrogenase/reductase family
  misc_feature (1)..(259): Homolog of NCBI NO: 10178029 NR Description: gene_id:MUG13.25~pir||T07705~similar to unknown
  misc_feature (1)..(274): Homolog of NCBI NO: 29244639 NR Description: putative oxidoreductase protein
  misc_feature (1)..(274): Homolog of NCBI NO: 18414726 NR Description: short-chain dehydrogenase/reductase family
MLPPFNVLITGSTKGIGYALAKEFLKAGDNVLICSRSDERVKTAVQNLRVEFGEQHVWGTKCDVKNAEDVKNLVSFAQEKMKYIDIWINNAGSNAYSYKPLVEASDEDLIEVVTTNTLGLMICCREAIKMMVNQPRGGHIFNIDGAGSDGRPTPRFAAYGATKRSVVHLTKSLQAELRMQDVKNVVVHNLSPGMVTTDLLMSGVNTKQAKFFINVLAEPAEVVAEYLVPNIRSVPANGSMKPTYIRFLTGLKAYSQIFSRLAFGARRNRYILED

SEQ ID NO: 57960 - DNA, 765 bp, Glycine max
  misc_feature (1)..(765): Ceres Seq. ID no. 14316428
acaatctctcatcccttgtttgtttccatttcttgcttctattatttacttgtttttctctagtattcatggtgctcgctggtaaacttagtactgaacttggggtgaaagcatccgctaccaaatggttcaacctcttaaccacgcaacttcaccatgttcagaacctttgtgaaagagtgcatgaaaccaagctgcatgatggtgatgactggcacggtgttggtaattcggttaaacactggacttatgtcatagacggcaaggtacacacatgtcaggagagtattgaagccattgatgaagagaacaaaacaatcaaattcatgctcttcggtggagatattagtcagcactacaagagctttaagctgatctttgaagtgactgataagaacgatggcggtgctgctgttaaatggactcttgaatatgagaagatcaaagagaatattgatcctccacatggctacatggactactttgacaaatccactaaagagatggatgcttatcttgtcaaggcatagctcctaaaattatcaagaaaataacaacaaaggagtaatggatttggctttgaggatatatatatatatatatatatatatatatatatatatatatatatatatatataagtgttttatctatatagttattgtgatgtttgaaatgtagaataaaattataatatgcgtgtttgcttctgtccatccttcgtttctgtcgaataaatgcaggttggtggattgaagtatatgt

SEQ ID NO: 57961 - protein, 175 aa, Glycine max
  peptide (1)..(175): Ceres Seq. ID no. 14316429
  misc_feature (24)..(175): Pfam Name: Pathogenesis-related protein Bet v I family Pfam Description: Pathogenesis-related protein Bet v I family
  misc_feature (23)..(175): Homolog of NCBI NO: 20975622 NR Description: putative ripening related protein [Cicer
NLSSLVCFHFLLLLFTCFSLVFMVLAGKLSTELGVKASATKWFNLLTTQLHHVQNLCERVHETKLHDGDDWHGVGNSVKHWTYVIDGKVHTCQESIEAIDEENKTIKFMLFGGDISQHYKSFKLIFEVTDKNDGGAAVKWTLEYEKIKENIDPPHGYMDYFDKSTKEMDAYLVKA

SEQ ID NO: 57962 - protein, 153 aa, Glycine max
  peptide (1)..(153): Ceres Seq. ID no. 14316430
  misc_feature (2)..(153): Pfam Name: Pathogenesis-related protein Bet v I family Pfam Description: Pathogenesis-related protein Bet v I family
  misc_feature (1)..(153): Homolog of NCBI NO: 20975622 NR Description: putative ripening related protein [Cicer
MVLAGKLSTELGVKASATKWFNLLTTQLHHVQNLCERVHETKLHDGDDWHGVGNSVKHWTYVIDGKVHTCQESIEAIDEENKTIKFMLFGGDISQHYKSFKLIFEVTDKNDGGAAVKWTLEYEKIKENIDPPHGYMDYFDKSTKEMDAYLVKA

SEQ ID NO: 57963 - DNA, 958 bp, Glycine max
  misc_feature (1)..(958): Ceres Seq. ID no. 14306809
cattactttcaggtttcatttcaaaatattctctctctcctcttaaagcaaaacccttaattattaccaacgaccacacaccacagccactttcatcaatttccttaatccccacctccacataacaacaacaacgaactaacgccaccacattcattctttccttctttgtgcctacaatactactactactactactaattctacatggatggcaactcttttggaaacgtgccacccccaccaatacaagttcctgataacttggctatctcctcctcctcttcgccaactcccacgacatcatctccgtctccgacaccctctggaggctttcggtaccgcgggacgcggtgccggagcggaaagtgggtgtcggagataagggagccacgtaaaacgaatcgcatttggctggggacttacccgacagcggaaatggctgcggcggcatatgatgtcgccgcactcgcgttgaagggtcccgacacgcccgtcaacttccctaattcgatactgtcgtaccctattcctgcttcattgtcctccacggacattcgcgccgcggctgcggccgcggcgcaggctaggatcgtgagggcgccgcaggagagtgaggaaacggtaaaccctgatgatggcgggcaagggttatcggagaggcgtgaggagtacatttatgaggatgagttgttgaacatgccgaatttgctcgatgaaatggccagaggaatgcaggttagtccccttaggatcacttcctattcttcagatgattcgcctgggaattctgatggagataacctttggagttataccctttgatcactgatttgttgtttgttcagtgagtgagtatggtaatttgttttgtgtttgtttgaaagttcgagtcttgattatgtatgttcaaccttgttaaatatttgaaaggagggctttataacgggattgtggg

SEQ ID NO: 57964 - protein, 205 aa, Glycine max
  peptide (1)..(205): Ceres Seq. ID no. 14306810
  misc_feature (45)..(103): Pfam Name: AP2 domain Pfam Description: AP2 domain
  misc_feature (1)..(197): Homolog of NCBI NO: 14140163 NR Description: putative AP2 domain containing protein [Oryza
  misc_feature (28)..(203): Homolog of NCBI NO: 1899058 NR Description: transcriptional activator CBF1 [Arabidopsis
  misc_feature (6)..(203): Homolog of NCBI NO: 15242244 NR Description: C-repeat/DRE binding protein, putative
  misc_feature (26)..(193): Homolog of NCBI NO: 38605844 NR Description: OSJNBb0034G17.2 [Oryza sativa (japonica
  misc_feature (45)..(204): Homolog of NCBI NO: 37536218 NR Description: putative transcription factor
  misc_feature (45)..(203): Homolog of NCBI NO: 15227980 NR Description: C-repeat/DRE binding protein, putative
  misc_feature (45)..(192): Homolog of NCBI NO: 8493594 NR Description: Contains similarity to transcriptional activator from Arabidopsis thaliana gb|U77378 and contains an AP2 PF|00847
  misc_feature (45)..(203): Homolog of NCBI NO: 15222031 NR Description: C-repeat/DRE binding protein, putative
  misc_feature (12)..(203): Homolog of NCBI NO: 15242262 NR Description: C-repeat/DRE binding protein, putative
  misc_feature (45)..(203): Homolog of NCBI NO: 25404394 NR Description: hypothetical protein F16M19.1 [imported] -
MDGNSFGNVPPPPIQVPDNLAISSSSSPTPTTSSPSPTPSGGFRYRGTRCRSGKWVSEIREPRKTNRIWLGTYPTAEMAAAAYDVAALALKGPDTPVNFPNSILSYPIPASLSSTDIRAAAAAAAQARIVRAPQESEETVNPDDGGQGLSERREEYIYEDELLNMPNLLDEMARGMQVSPLRITSYSSDDSPGNSDGDNLWSYTL

SEQ ID NO: 57965 - protein, 128 aa, Glycine max
  peptide (1)..(128): Ceres Seq. ID no. 14306811
  misc_feature (1)..(120): Homolog of NCBI NO: 14140163 NR Description: putative AP2 domain containing protein [Oryza
  misc_feature (1)..(126): Homolog of NCBI NO: 1899058 NR Description: transcriptional activator CBF1 [Arabidopsis
  misc_feature (1)..(126): Homolog of NCBI NO: 15242244 NR Description: C-repeat/DRE binding protein, putative
  misc_feature (1)..(116): Homolog of NCBI NO: 38605844 NR Description: OSJNBb0034G17.2 [Oryza sativa (japonica
  misc_feature (1)..(127): Homolog of NCBI NO: 37536218 NR Description: putative transcription factor
  misc_feature (1)..(126): Homolog of NCBI NO: 15227980 NR Description: C-repeat/DRE binding protein, putative
  misc_feature (1)..(115): Homolog of NCBI NO: 8493594 NR Description: Contains similarity to transcriptional activator from Arabidopsis thaliana gb|U77378 and contains an AP2 PF|00847
  misc_feature (1)..(126): Homolog of NCBI NO: 15222031 NR Description: C-repeat/DRE binding protein, putative
  misc_feature (1)..(126): Homolog of NCBI NO: 15242262 NR Description: C-repeat/DRE binding protein, putative
  misc_feature (1)..(126): Homolog of NCBI NO: 25404394 NR Description: hypothetical protein F16M19.1 [imported] -
MAAAAYDVAALALKGPDTPVNFPNSILSYPIPASLSSTDIRAAAAAAAQARIVRAPQESEETVNPDDGGQGLSERREEYIYEDELLNMPNLLDEMARGMQVSPLRITSYSSDDSPGNSDGDNLWSYTL

SEQ ID NO: 57966 - DNA, 843 bp, Glycine max
  misc_feature (1)..(843): Ceres Seq. ID no. 15175208
ttattcatttcattgttcatactcactcgcacctaactccgccatggcttctcttcccaccactttcgctataaccaaatctgggttttcaaattctggtttctgccttaacgatgtcagtgtttcaaaaatcatcctccataaacaaggtggaccactctctggtcaagatcaaaccatacaacttctctctcaatctaaatcgtcaagggaccatgcaaacatctttaaccagaaggcctctaacaattcaagctacgtatagtgatggtggaaggcccagcagtgctagtgtatttgttggtgggtttctcttgggaggattaatagttggtactcttggttgcgtgtatgcacctcagatcagcaaggccctagctggagctgacaggaaggagttaatgagaaaattgccaaagtttatatatgatgaagaaaaggctttagagaaaacccggaaagtactggctgagaagattgaacaactgaatgctgccatagatgatgtttctgctcagctaaggtcagaggaggcctcaaatggagtagctgtgaactctgatgaaattgaagctgccacatgagactgctgcagtgatgtcatggtacacaatcggctattactctgtccagtaaaaatcttgttggtacaaaatgtatttgaatttcttgtaatatctttctatttcttcttaataataaactaagttgttttctgtttttggccaccgctactgtgggtatatagtcgtactgtttttatggctgatttcttgtgttctattggccatttagttatagtgaaaagtttccatgattggcataatactggaatttctagtt

SEQ ID NO: 57967 - protein, 156 aa, Glycine max
  peptide (1)..(156): Ceres Seq. ID no. 15175209
  misc_feature (34)..(156): Homolog of NCBI NO: 15233017 NR Description: expressed protein [Arabidopsis thaliana]
  misc_feature (42)..(156): Homolog of NCBI NO: 22326856 NR Description: protein; similar to unknown protein
  misc_feature (42)..(156): Homolog of NCBI NO: 17065406 NR Description: Unknown protein [Arabidopsis thaliana]
  misc_feature (42)..(156): Homolog of NCBI NO: 10176975 NR Description: protein; similar to unknown protein [Arabidopsis
  misc_feature (24)..(154): Homolog of NCBI NO: 18400762 NR Description: expressed protein [Arabidopsis thaliana]
MSVFQKSSSINKVDHSLVKIKPYNFSLNLNRQGTMQTSLTRRPLTIQATYSDGGRPSSASVFVGGFLLGGLIVGTLGCVYAPQISKALAGADRKELMRKLPKFIYDEEKALEKTRKVLAEKIEQLNAAIDDVSAQLRSEEASNGVAVNSDEIEAAT

SEQ ID NO: 57968 - protein, 122 aa, Glycine max
  peptide (1)..(122): Ceres Seq. ID no. 15175210
  misc_feature (1)..(122): Homolog of NCBI NO: 15233017 NR Description: expressed protein [Arabidopsis thaliana]
  misc_feature (8)..(122): Homolog of NCBI NO: 22326856 NR Description: protein; similar to unknown protein
  misc_feature (8)..(122): Homolog of NCBI NO: 17065406 NR Description: Unknown protein [Arabidopsis thaliana]
  misc_feature (8)..(122): Homolog of NCBI NO: 10176975 NR Description: protein; similar to unknown protein [Arabidopsis
  misc_feature (1)..(120): Homolog of NCBI NO: 18400762 NR Description: expressed protein [Arabidopsis thaliana]
MQTSLTRRPLTIQATYSDGGRPSSASVFVGGFLLGGLIVGTLGCVYAPQISKALAGADRKELMRKLPKFIYDEEKALEKTRKVLAEKIEQLNAAIDDVSAQLRSEEASNGVAVNSDEIEAAT

SEQ ID NO: 57969 - protein, 87 aa, Glycine max
  peptide (1)..(87): Ceres Seq. ID no. 15175211
YSFHCSYSLAPNSAMASLPTTFAITKSGFSNSGFCLNDVSVSKIILHKQGGPLSGQDQTIQLLSQSKSSRDHANIFNQKASNNSSYV

SEQ ID NO: 57970 - DNA, 1026 bp, Glycine max
  misc_feature (1)..(1026): Ceres Seq. ID no. 15170337
  misc_feature: Phenotype: ROSETTE LEAVES Petiole Length-Short Petioles
  misc_feature: Phenotype: ROSETTE LEAVES Shape-Oval
  misc_feature: Phenotype: WHOLE PLANT Size-Small
  misc_feature: Phenotype: ROSETTE LEAVES Petiole Length-Short Petioles
  misc_feature: Phenotype: ROSETTE LEAVES Shape-Oval
  misc_feature: Phenotype: WHOLE PLANT Size-Small
  misc_feature: Phenotype: INFLORESCENCE Flowering Time-Late Flowering
  misc_feature: Phenotype: INFLORESCENCE Flowering Time-Late Flowering
  misc_feature: Phenotype: INFLORESCENCE Flowering Time-Late Flowering
  misc_feature: Phenotype: INFLORESCENCE Flowering Time-Late Flowering
  misc_feature: Phenotype: INFLORESCENCE Flowering Time-Late Flowering
  misc_feature: Phenotype: INFLORESCENCE Flowering Time-Late Flowering
  misc_feature: Phenotype: INFLORESCENCE Flowering Time-Late Flowering
  misc_feature: Phenotype: ROSETTE LEAVES Petiole Length-Short Petioles
  misc_feature: Phenotype: ROSETTE LEAVES Shape-Oval
  misc_feature: Phenotype: WHOLE PLANT Size-Small
  misc_feature: Phenotype: FERTILITY Fertility-Reduced
  misc_feature: Phenotype: ROSETTE LEAVES Petiole Length-Short Petioles
  misc_feature: Phenotype: ROSETTE LEAVES Shape-Oval
  misc_feature: Phenotype: WHOLE PLANT Size-Small
  misc_feature: Phenotype: ROSETTE LEAVES Petiole Length-Short Petioles
  misc_feature: Phenotype: ROSETTE LEAVES Shape-Oval
  misc_feature: Phenotype: WHOLE PLANT Size-Small
  misc_feature: Phenotype: ROSETTE LEAVES Petiole Length-Short Petioles
  misc_feature: Phenotype: ROSETTE LEAVES Shape-Oval
  misc_feature: Phenotype: WHOLE PLANT Size-Small
  misc_feature: Phenotype: ROSETTE LEAVES Petiole Length-Short Petioles
  misc_feature: Phenotype: ROSETTE LEAVES Shape-Oval
  misc_feature: Phenotype: WHOLE PLANT Size-Small
  misc_feature: Phenotype: ROSETTE LEAVES Petiole Length-Short Petioles
  misc_feature: Phenotype: ROSETTE LEAVES Shape-Oval
  misc_feature: Phenotype: WHOLE PLANT Size-Small
  misc_feature: Phenotype: ROSETTE LEAVES Petiole Length-Short Petioles
  misc_feature: Phenotype: ROSETTE LEAVES Shape-Oval
  misc_feature: Phenotype: WHOLE PLANT Size-Small
  misc_feature: Phenotype: ROSETTE LEAVES Petiole Length-Short Petioles
  misc_feature: Phenotype: ROSETTE LEAVES Shape-Oval
  misc_feature: Phenotype: WHOLE PLANT Size-Small
aaaaaacgcagccaaaacagcaacaaacgacagagattcttcctcaacacaatcgaaaaaaaaaaaagcttccgattctaaaaccagaacaacaaaaaagtaaaacacacacgtcattttaaaacatttcatttttttggttatttatttaaagagcgagtgttgtaacaaatggtgaagccgaagagcgtggagaaacccgcagaggaacaacaacaacgaagtgtttcatcgtacagaggagtacggaagaggaagtgggggaagtacgtgtcggaaattaggttacccaacagccgtcaaaggatttggttgggttcctatgacagcgccgagaaggcggcacgcgcgttcgacgctgccatgttctgcttacgtggcagcggcgccaaatttaatttcccgagtgacccacccaacatcgccggcggggggaacatgacctcctcccagattcagatcgcggcggcgcgtttcgccaattcggagccccgaaatgagcgttcggatcaacccgtggagtctttaacttcggatgaggaaacggcatcgtttccggtcatttcggatacggatacatcatctcctcctctctcagacgtgacgttccaaaacgacgccgaattagtgactgggtcgttccctgatatgttttcggatttcgggtcgggcgattttgtgcccgatttctccgattttccgagcttcgacgatttcagccgggacttcttcttgcatgaacttccgggtttcaatttcggagaagagaacttggatggattgataattcaggactcgttcttgtggaatttctaagcgggtcagggttcggataattttattatatccgaacccgatatcagaatccggatcggatccgggtttgggttgggtcaaattttgcgtgccaagccctccatgtgttagtagttagtgatgattatagttttttttttaacgtaccaagtagtcaaatgtttcgattttttgggatgcgaatcataattcatttatttgtcatgactc

SEQ ID NO: 57971 - protein, 214 aa, Glycine max
  peptide (1)..(214): Ceres Seq. ID no. 15170338
  misc_feature (20)..(82): Pfam Name: AP2 domain Pfam Description: AP2 domain
  misc_feature (8)..(175): Homolog of NCBI NO: 15239501 NR Description: AP2 domain transcription factor TINY [Arabidopsis
  misc_feature (1)..(192): Homolog of NCBI NO: 15236020 NR Description: AP2 domain transcription factor, putative
  misc_feature (13)..(135): Homolog of NCBI NO: 25407707 NR Description: hypothetical protein AT4g31060 [imported] -
  misc_feature (16)..(214): Homolog of NCBI NO: 15224024 NR Description: AP2 domain transcription factor, putative
  misc_feature (15)..(135): Homolog of NCBI NO: 18417729 NR Description: AP2 domain transcription factor, putative
  misc_feature (1)..(194): Homolog of NCBI NO: 21908036 NR Description: DRE binding factor 1 [Zea mays]
  misc_feature (22)..(151): Homolog of NCBI NO: 22326940 NR Description: AP2 domain transcription factor, putative
  misc_feature (12)..(190): Homolog of NCBI NO: 15222040 NR Description: AP2 domain transcription factor, putative
  misc_feature (20)..(168): Homolog of NCBI NO: 29893536 NR Description: putative AP2 domain transcription factor
  misc_feature (20)..(168): Homolog of NCBI NO: 22329667 NR Description: AP2 domain transcription factor, putative
MVKPKSVEKPAEEQQQRSVSSYRGVRKRKWGKYVSEIRLPNSRQRIWLGSYDSAEKAARAFDAAMFCLRGSGAKFNFPSDPPNIAGGGNMTSSQIQIAAARFANSEPRNERSDQPVESLTSDEETASFPVISDTDTSSPPLSDVTFQNDAELVTGSFPDMFSDFGSGDFVPDFSDFPSFDDFSRDFFLHELPGFNFGEENLDGLIIQDSFLWNF

SEQ ID NO: 57972 - protein, 150 aa, Glycine max
  peptide (1)..(150): Ceres Seq. ID no. 15170339
  misc_feature (1)..(111): Homolog of NCBI NO: 15239501 NR Description: AP2 domain transcription factor TINY [Arabidopsis
  misc_feature (1)..(128): Homolog of NCBI NO: 15236020 NR Description: AP2 domain transcription factor, putative
  misc_feature (1)..(71): Homolog of NCBI NO: 25407707 NR Description: hypothetical protein AT4g31060 [imported] -
  misc_feature (1)..(150): Homolog of NCBI NO: 15224024 NR Description: AP2 domain transcription factor, putative
  misc_feature (1)..(71): Homolog of NCBI NO: 18417729 NR Description: AP2 domain transcription factor, putative
  misc_feature (1)..(130): Homolog of NCBI NO: 21908036 NR Description: DRE binding factor 1 [Zea mays]
  misc_feature (1)..(87): Homolog of NCBI NO: 22326940 NR Description: AP2 domain transcription factor, putative
  misc_feature (1)..(126): Homolog of NCBI NO: 15222040 NR Description: AP2 domain transcription factor, putative
  misc_feature (1)..(104): Homolog of NCBI NO: 29893536 NR Description: putative AP2 domain transcription factor
  misc_feature (1)..(104): Homolog of NCBI NO: 22329667 NR Description: AP2 domain transcription factor, putative
MFCLRGSGAKFNFPSDPPNIAGGGNMTSSQIQIAAARFANSEPRNERSDQPVESLTSDEETASFPVISDTDTSSPPLSDVTFQNDAELVTGSFPDMFSDFGSGDFVPDFSDFPSFDDFSRDFFLHELPGFNFGEENLDGLIIQDSFLWNF

SEQ ID NO: 57973 - protein, 125 aa, Glycine max
  peptide (1)..(125): Ceres Seq. ID no. 15170340
  misc_feature (1)..(86): Homolog of NCBI NO: 15239501 NR Description: AP2 domain transcription factor TINY [Arabidopsis
  misc_feature (1)..(103): Homolog of NCBI NO: 15236020 NR Description: AP2 domain transcription factor, putative
  misc_feature (1)..(46): Homolog of NCBI NO: 25407707 NR Description: hypothetical protein AT4g31060 [imported] -
  misc_feature (1)..(125): Homolog of NCBI NO: 15224024 NR Description: AP2 domain transcription factor, putative
  misc_feature (1)..(46): Homolog of NCBI NO: 18417729 NR Description: AP2 domain transcription factor, putative
  misc_feature (1)..(105): Homolog of NCBI NO: 21908036 NR Description: DRE binding factor 1 [Zea mays]
  misc_feature (1)..(62): Homolog of NCBI NO: 22326940 NR Description: AP2 domain transcription factor, putative
  misc_feature (1)..(101): Homolog of NCBI NO: 15222040 NR Description: AP2 domain transcription factor, putative
  misc_feature (1)..(79): Homolog of NCBI NO: 29893536 NR Description: putative AP2 domain transcription factor
  misc_feature (1)..(79): Homolog of NCBI NO: 22329667 NR Description: AP2 domain transcription factor, putative
MTSSQIQIAAARFANSEPRNERSDQPVESLTSDEETASFPVISDTDTSSPPLSDVTFQNDAELVTGSFPDMFSDFGSGDFVPDFSDFPSFDDFSRDFFLHELPGFNFGEENLDGLIIQDSFLWNF

SEQ ID NO: 57974 - DNA, 1848 bp, Glycine max
  misc_feature (1)..(1848): Ceres Seq. ID no. 12608629
aatggaaaactcagacgaacaacttcccttctctccacaaaaccctaacaatgccgaagaagaagacgacgacatcgaagagccagaagacgaagacgaagaagaggaggaagacgacgacgacgacgacggcgtcgtttcgcaggagcaatccccattgtcgcggctgcgcgagcagcgttcgaagctggaaaccctgtcccggcgattggcgtcggagctggtcccaatccgagtccacgacgtgctgattcgcggcaacacgaagacgaaggagtgggtgatcgaggcggagctcaagctcctcgaggaggccaccaacgtgcaggagctcattcgcgcctccgaaatcgccctcgccaggctccgcggcctcgagattttcgacaccgccgagctcacgctccaggccgggccgccggagctgcctcacaccgccaatgtcgtcgtcgacgtcgtcgagtccgccaacagaatctccggcgatttcggcgtttacaccaaacccgcgactagttcttggtctgctgaaggtggtcttaagtacaaaaacttattaggttatggtgatctatgggatgcctcgttggcctatggtgccaaccaaacaacagaggtaagtgtaggagtgtatgcccctcgactgaaaggattgttaaccccctttgtagcacgactatccatgctttctcaagattggcaagagttctcttcatataaagagcagttgctaggcttgtctcttggcttgatctcaacaaggcaccatgacttagtctacactcttggatggcgtaccttgactgatccatcacaaatgtcatccaggtctataaggaggcaacttgggcatggtttactatcatccttgaagtatacatttaaaattgacaggagaaactcaccaattaggcctacaaatggatatgcttttctttctaccactcactttggtggccttacaccagatcatcggagcttgcgatttctgcgccaggaatttgatgttcgctgtgccatcccctttgggttttataatacggcacttaaccttgggatttctgccagtgctgtttttccctgggggcatggcttcatgaacaagccatctccgcttcctgaaaggttttatttgggtggtgatttctctccagtttgcacccttggaggaccaataacattgtggggatttaaaactaggggattaggtcctactgaaccacgaagacgaagtagagatggaattattgatgacagtgatgattcctctagatgggacttcattggaggagatctagctgttactgcatttgcagacctgtcttttgatcttccaattaggtggttgagagatcatggaattcatggtcatgtttttgctggtgctgggaatactgctaaattaactcagaatgaatataagcacttttcacctcggaagttcttagaatcctttcgaacatctgtgggatgtggatttgttgttcccactagactttttcgcctagagggtaatttctattacatactcaagcagaatgagcatgatcgtgggaaaactggatttaggttcagcttctcggctccttcttagtgattgagtccacagctgagattctttttctttttcatttattctgtagcattaaacatttttgctgcctgtcaatggatggctagtactcttctttttcttctcgtttaaaagccagactgaaatcgggaaagggcactgttccagtgttgaggatttataggatcagtttttggaaaagacattacccctcgagacatataagccgatgctcattgcatgacgatggtgtatgaaattccaaattattcgcg

SEQ ID NO: 57975 - protein, 530 aa, Glycine max
  peptide (1)..(530): Ceres Seq. ID no. 12608630
  misc_feature (58)..(383): Homolog of NCBI NO: 31542301 NR Description: CGI-51 protein [Homo sapiens]
  misc_feature (58)..(383): Homolog of NCBI NO: 5596714 NR Description: dJ796I17.2 (CGI-51) [Homo sapiens]
  misc_feature (58)..(383): Homolog of NCBI NO: 4929571 NR Description: CGI-51 protein [Homo sapiens]
  misc_feature (58)..(383): Homolog of NCBI NO: 14043738 NR Description: Unknown (protein for MGC:14085) [Homo sapiens]
  misc_feature (58)..(383): Homolog of NCBI NO: 28436784 NR Description: Unknown (protein for MGC:53756) [Xenopus laevis]
  misc_feature (58)..(383): Homolog of NCBI NO: 30519943 NR Description: RIKEN cDNA 1110030L07 [Mus musculus]
  misc_feature (47)..(383): Homolog of NCBI NO: 38511778 NR Description: CGI-51 protein [Silurana tropicalis]
  misc_feature (1)..(530): Homolog of NCBI NO: 21553544 NR Description: unknown [Arabidopsis thaliana]
  misc_feature (1)..(530): Homolog of NCBI NO: 18414910 NR Description: expressed protein
  misc_feature (1)..(530): Homolog of NCBI NO: 15228433 NR Description: unknown protein
MENSDEQLPFSPQNPNNAEEEDDDIEEPEDEDEEEEEDDDDDDGVVSQEQSPLSRLREQRSKLETLSRRLASELVPIRVHDVLIRGNTKTKEWVIEAELKLLEEATNVQELIRASEIALARLRGLEIFDTAELTLQAGPPELPHTANVVVDVVESANRISGDFGVYTKPATSSWSAEGGLKYKNLLGYGDLWDASLAYGANQTTEVSVGVYAPRLKGLLTPFVARLSMLSQDWQEFSSYKEQLLGLSLGLISTRHHDLVYTLGWRTLTDPSQMSSRSIRRQLGHGLLSSLKYTFKIDRRNSPIRPTNGYAFLSTTHFGGLTPDHRSLRFLRQEFDVRCAIPFGFYNTALNLGISASAVFPWGHGFMNKPSPLPERFYLGGDFSPVCTLGGPITLWGFKTRGLGPTEPRRRSRDGIIDDSDDSSRWDFIGGDLAVTAFADLSFDLPIRWLRDHGIHGHVFAGAGNTAKLTQNEYKHFSPRKFLESFRTSVGCGFVVPTRLFRLEGNFYYILKQNEHDRGKTGFRFSFSAPS

SEQ ID NO: 57976 - protein, 303 aa, Glycine max
  peptide (1)..(303): Ceres Seq. ID no. 12608631
  misc_feature (1)..(156): Homolog of NCBI NO: 31542301 NR Description: CGI-51 protein [Homo sapiens]
  misc_feature (1)..(156): Homolog of NCBI NO: 5596714 NR Description: dJ796I17.2 (CGI-51) [Homo sapiens]
  misc_feature (1)..(156): Homolog of NCBI NO: 4929571 NR Description: CGI-51 protein [Homo sapiens]
  misc_feature (1)..(156): Homolog of NCBI NO: 14043738 NR Description: Unknown (protein for MGC:14085) [Homo sapiens]
  misc_feature (1)..(156): Homolog of NCBI NO: 28436784 NR Description: Unknown (protein for MGC:53756) [Xenopus laevis]
  misc_feature (1)..(156): Homolog of NCBI NO: 30519943 NR Description: RIKEN cDNA 1110030L07 [Mus musculus]
  misc_feature (1)..(156): Homolog of NCBI NO: 38511778 NR Description: CGI-51 protein [Silurana tropicalis]
  misc_feature (1)..(303): Homolog of NCBI NO: 21553544 NR Description: unknown [Arabidopsis thaliana]
  misc_feature (1)..(303): Homolog of NCBI NO: 18414910 NR Description: expressed protein
  misc_feature (1)..(303): Homolog of NCBI NO: 15228433 NR Description: unknown protein
MLSQDWQEFSSYKEQLLGLSLGLISTRHHDLVYTLGWRTLTDPSQMSSRSIRRQLGHGLLSSLKYTFKIDRRNSPIRPTNGYAFLSTTHFGGLTPDHRSLRFLRQEFDVRCAIPFGFYNTALNLGISASAVFPWGHGFMNKPSPLPERFYLGGDFSPVCTLGGPITLWGFKTRGLGPTEPRRRSRDGIIDDSDDSSRWDFIGGDLAVTAFADLSFDLPIRWLRDHGIHGHVFAGAGNTAKLTQNEYKHFSPRKFLESFRTSVGCGFVVPTRLFRLEGNFYYILKQNEHDRGKTGFRFSFSAPS

SEQ ID NO: 57977 - DNA, 1535 bp, Glycine max
  misc_feature (1)..(1535): Ceres Seq. ID no. 13594435
attcacttctgatttgattcttttccccactttcagaacatcaacaaagtagagagagagaaccaaaaaaaaaaaactactactcaacaaaaagagctagagagaagataccccttaaatcctaatttctacctcaaagaaagtactcttcaaacattttgtattcactgaagaaggatctttgcacttgcacctgcagccatctaccatggttaagtcagaacacaagatcaaaaccgaaccatcatcaaaggcaatgcggttatcttcaccctcatcatcaacatcagattgcaagaagaagaagtacaagggagtgagaatgaggagctggggatcatgggtttctgagattagagcaccaaatcagaaaacaagaatatggttaggctcttattcaaccccagaagctgcagctagagcctatgatgctgcacttctatgccttaaaggctcctcagcaaatctcaatttccctttaagctcttcacaacaatacattcctggagatgctgtcatgtcccccaaatcaatccaaagagttgctgcggccgccgcaaatagtttcatcgacaatgccaccactcccccttccccacctccggcttcgaccccatcatcatcatcattggcctcatccccctcattggtttcttctccctcggatcaaatcgatgacgacgccttgctgatatcgtctttccaagcctacactagttgtggtcaagcaaatcaatcaatggctgtgaatgtgatggagccttggtacacctttggtgatggtcttcaatcccccaagtatgctgatcagatgctaagtggtgatttcttccatgtcgattcttcccatctgcttgatgatctatacgaagaaagtgacattcgtttgtggagcttctgctgagaaaaaaaatcaattcaagccacctacaatatttcttcttttctcaaaaattcaattcgtttgtcttcagtggtatagcttaagatgttactgactgtgaccaaattaaaatttgtataccctatgctacataaatggtgcattttagatgaaattcatatagagataagacaattttcggcctctcatgtgaatttctaagagtttgaaattatgtatcatcgatacaaatcttggtatgtcaatgtcatgaatggtttcccatgtgtcacagaatataagggagaaaaaaaaatgtagtcaccaaaatccttaggtataagcaattcgtttcactgtttttggaatgtaactatgggaggagacttttgctattgtgagtatctttggaaggcctttgttgcatgggaaggtatcagagatgcttatttccaattcagtgagaatagggaaccatgtacagagcgtggtaacttgaaaccattggaaaaattgcatcttttctaagccttgtctgctctcccgcgtgcccaaagaacaaagagtgttcccttgttttgatgtttaagtttggtattttataccctattctattcttcttttagatggaaataaatcctggttaattttc

SEQ ID NO: 57978 - protein, 231 aa, Glycine max
  peptide (1)..(231): Ceres Seq. ID no. 15221357
  misc_feature (32)..(94): Pfam Name: AP2 domain Pfam Description: AP2 domain
  misc_feature (3)..(192): Homolog of NCBI NO: 37536842 NR Description: putative DNA binding protein
  misc_feature (15)..(140): Homolog of NCBI NO: 15228171 NR Description: AP2 domain transcription factor TINY, putative
  misc_feature (15)..(140): Homolog of NCBI NO: 9279711 NR Description: transcription factor TINY-like protein
  misc_feature (1)..(158): Homolog of NCBI NO: 15235858 NR Description: transcription factor TINY, putative [Arabidopsis
  misc_feature (1)..(161): Homolog of NCBI NO: 15227471 NR Description: AP2 domain transcription factor, putative
  misc_feature (32)..(231): Homolog of NCBI NO: 34902130 NR Description: hypothetical protein [Oryza sativa (japonica
  misc_feature (1)..(168): Homolog of NCBI NO: 21554056 NR Description: TINY-like protein [Arabidopsis thaliana]
  misc_feature (1)..(168): Homolog of NCBI NO: 15219139 NR Description: transcription factor TINY family [Arabidopsis
  misc_feature (1)..(208): Homolog of NCBI NO: 15219452 NR Description: AP2 domain transcription factor TINY, putative
  misc_feature (1)..(230): Homolog of NCBI NO: 15224024 NR Description: AP2 domain transcription factor, putative
MVKSEHKIKTEPSSKAMRLSSPSSSTSDCKKKKYKGVRMRSWGSWVSEIRAPNQKTRIWLGSYSTPEAAARAYDAALLCLKGSSANLNFPLSSSQQYIPGDAVMSPKSIQRVAAAAANSFIDNATTPPSPPPASTPSSSSLASSPSLVSSPSDQIDDDALLISSFQAYTSCGQANQSMAVNVMEPWYTFGDGLQSPKYADQMLSGDFFHVDSSHLLDDLYEESDIRLWSFC

SEQ ID NO: 57979 - protein, 215 aa, Glycine max
  peptide (1)..(215): Ceres Seq. ID no. 15221358
  misc_feature (16)..(78): Pfam Name: AP2 domain Pfam Description: AP2 domain
  misc_feature (1)..(176): Homolog of NCBI NO: 37536842 NR Description: putative DNA binding protein
  misc_feature (1)..(124): Homolog of NCBI NO: 15228171 NR Description: AP2 domain transcription factor TINY, putative
  misc_feature (1)..(124): Homolog of NCBI NO: 9279711 NR Description: transcription factor TINY-like protein
  misc_feature (1)..(142): Homolog of NCBI NO: 15235858 NR Description: transcription factor TINY, putative [Arabidopsis
  misc_feature (1)..(145): Homolog of NCBI NO: 15227471 NR Description: AP2 domain transcription factor, putative
  misc_feature (16)..(215): Homolog of NCBI NO: 34902130 NR Description: hypothetical protein [Oryza sativa (japonica
  misc_feature (1)..(152): Homolog of NCBI NO: 21554056 NR Description: TINY-like protein [Arabidopsis thaliana]
  misc_feature (1)..(152): Homolog of NCBI NO: 15219139 NR Description: transcription factor TINY family [Arabidopsis
  misc_feature (1)..(192): Homolog of NCBI NO: 15219452 NR Description: AP2 domain transcription factor TINY, putative
  misc_feature (1)..(214): Homolog of NCBI NO: 15224024 NR Description: AP2 domain transcription factor, putative
MRLSSPSSSTSDCKKKKYKGVRMRSWGSWVSEIRAPNQKTRIWLGSYSTPEAAARAYDAALLCLKGSSANLNFPLSSSQQYIPGDAVMSPKSIQRVAAAAANSFIDNATTPPSPPPASTPSSSSLASSPSLVSSPSDQIDDDALLISSFQAYTSCGQANQSMAVNVMEPWYTFGDGLQSPKYADQMLSGDFFHVDSSHLLDDLYEESDIRLWSFC

SEQ ID NO: 57980 - protein, 193 aa, Glycine max
  peptide (1)..(193): Ceres Seq. ID no. 15221359
  misc_feature (1)..(56): Pfam Name: AP2 domain Pfam Description: AP2 domain
  misc_feature (1)..(154): Homolog of NCBI NO: 37536842 NR Description: putative DNA binding protein
  misc_feature (1)..(102): Homolog of NCBI NO: 15228171 NR Description: AP2 domain transcription factor TINY, putative
  misc_feature (1)..(102): Homolog of NCBI NO: 9279711 NR Description: transcription factor TINY-like protein
  misc_feature (1)..(120): Homolog of NCBI NO: 15235858 NR Description: transcription factor TINY, putative [Arabidopsis
  misc_feature (1)..(123): Homolog of NCBI NO: 15227471 NR Description: AP2 domain transcription factor, putative
  misc_feature (1)..(193): Homolog of NCBI NO: 34902130 NR Description: hypothetical protein [Oryza sativa (japonica
  misc_feature (1)..(130): Homolog of NCBI NO: 21554056 NR Description: TINY-like protein [Arabidopsis thaliana]
  misc_feature (1)..(130): Homolog of NCBI NO: 15219139 NR Description: transcription factor TINY family [Arabidopsis
  misc_feature (1)..(170): Homolog of NCBI NO: 15219452 NR Description: AP2 domain transcription factor TINY, putative
  misc_feature (1)..(192): Homolog of NCBI NO: 15224024 NR Description: AP2 domain transcription factor, putative
MRSWGSWVSEIRAPNQKTRIWLGSYSTPEAAARAYDAALLCLKGSSANLNFPLSSSQQYIPGDAVMSPKSIQRVAAAAANSFIDNATTPPSPPPASTPSSSSLASSPSLVSSPSDQIDDDALLISSFQAYTSCGQANQSMAVNVMEPWYTFGDGLQSPKYADQMLSGDFFHVDSSHLLDDLYEESDIRLWSFC

SEQ ID NO: 57981 - DNA, 1283 bp, Glycine max
  misc_feature (1)..(1283): Ceres Seq. ID no. 14311675
gttgtgtgtaagtgtgaagagaagagaatggtagtaggattgaatgtgcctcagccatttctgtcaccagtttgcaagacggcaccttacccacttgatctcatcgccaccgccgcgtccctccacttcggccaccttctccgccgccgcgcgacccaccatctccgccttggggttcttcttcactcctgtttcaagaaactcgctcctttaactcacatttttagattgaacgataagtggtgtcaaagatgctttcaactcaatgggttgaactatcttcaactgtcagccggtgatttgacttcctcatggtcaactagtttctctttctttaatgggggaggagatggaggccgccgctatggaaaggctgggatgtccaactccaagatgtctggaaaagatccatttaatggaaggaaatggacagaaattctccttgctgccaatgttttattttatattgcacaacttgcaacccaaggcaagctattattgtggggagcaaagataaatagtctaattgacaaaggacaactttggagacttgccacgtcttcctttttgcatgccaacatcggacaccttttggtaaattgttattccttgaactcagttggtcctactgtggagagcttcagtggccctcggagatttcttgcagtttactttatctctgcaattgcaagttctgctacgagttattggttctgcagaatgcctgctgtaggtgcatcaggagcaatttttggactagttggatcagttgccgtatttgtattaaggcacaaagaccttgtgggaggtggtaaaaaagatttacaacacatagcccaagtaattgccctcaatatggttattgggctattatccactgggattgacaactggggacatttaggagggttggttggtggagttgctgcatcatggtttattggaccggcatggaaacatgaatccacatcaagtgatggaagaagacttttcattgacactgcaccaatgtataaactcttcaagattaaaagagtacctaagcaatggaaatagaaacatttcattatgtatggaatggaactcataactaatcattgctcgttgtttattggtaaaatgattcactgctgtgagcttctcttaaaatacttaatattgtggggttgtagtacaagtacctgacacgtctgaattattttgtatactttaataaccttcacactgggacattgtatttataaattgtatttgtgtaattggtatccttcattttccctctt

SEQ ID NO: 57982 - protein, 351 aa, Glycine max
  peptide (1)..(351): Ceres Seq. ID no. 14311676
  misc_feature (164)..(313): Homolog of NCBI NO: 18310434 NR Description: conserved hypothetical protein [Clostridium
  misc_feature (139)..(320): Homolog of NCBI NO: 23099378 NR Description: hypothetical protein [Oceanobacillus iheyensis
  misc_feature (169)..(319): Homolog of NCBI NO: 15894241 NR Description: Uncharacterized membrane protein [Clostridium
  misc_feature (122)..(314): Homolog of NCBI NO: 23121840 NR Description: hypothetical protein [Desulfitobacterium
  misc_feature (105)..(319): Homolog of NCBI NO: 23020903 NR Description: hypothetical protein [Clostridium thermocellum
  misc_feature (165)..(316): Homolog of NCBI NO: 22972591 NR Description: hypothetical protein [Chloroflexus aurantiacus]
  misc_feature (144)..(314): Homolog of NCBI NO: 28210270 NR Description: conserved membrane protein (rhomboid family)
  misc_feature (83)..(333): Homolog of NCBI NO: 25518651 NR Description: hypothetical protein F4F7.14 - Arabidopsis
  misc_feature (83)..(342): Homolog of NCBI NO: 11761473 NR Description: unknown protein [Arabidopsis thaliana]
  misc_feature (36)..(342): Homolog of NCBI NO: 30689150 NR Description: membrane protein, Rhomboid family [Arabidopsis
VVCKCEEKRMVVGLNVPQPFLSPVCKTAPYPLDLIATAASLHFGHLLRRRATHHLRLGVLLHSCFKKLAPLTHIFRLNDKWCQRCFQLNGLNYLQLSAGDLTSSWSTSFSFFNGGGDGGRRYGKAGMSNSKMSGKDPFNGRKWTEILLAANVLFYIAQLATQGKLLLWGAKINSLIDKGQLWRLATSSFLHANIGHLLVNCYSLNSVGPTVESFSGPRRFLAVYFISAIASSATSYWFCRMPAVGASGAIFGLVGSVAVFVLRHKDLVGGGKKDLQHIAQVIALNMVIGLLSTGIDNWGHLGGLVGGVAASWFIGPAWKHESTSSDGRRLFIDTAPMYKLFKIKRVPKQWK

SEQ ID NO: 57983 - protein, 342 aa, Glycine max
  peptide (1)..(342): Ceres Seq. ID no. 14311677
  misc_feature (155)..(304): Homolog of NCBI NO: 18310434 NR Description: conserved hypothetical protein [Clostridium
  misc_feature (130)..(311): Homolog of NCBI NO: 23099378 NR Description: hypothetical protein [Oceanobacillus iheyensis
  misc_feature (160)..(310): Homolog of NCBI NO: 15894241 NR Description: Uncharacterized membrane protein [Clostridium
  misc_feature (113)..(305): Homolog of NCBI NO: 23121840 NR Description: hypothetical protein [Desulfitobacterium
  misc_feature (96)..(310): Homolog of NCBI NO: 23020903 NR Description: hypothetical protein [Clostridium thermocellum
  misc_feature (156)..(307): Homolog of NCBI NO: 22972591 NR Description: hypothetical protein [Chloroflexus aurantiacus]
  misc_feature (135)..(305): Homolog of NCBI NO: 28210270 NR Description: conserved membrane protein (rhomboid family)
  misc_feature (74)..(324): Homolog of NCBI NO: 25518651 NR Description: hypothetical protein F4F7.14 - Arabidopsis
  misc_feature (74)..(333): Homolog of NCBI NO: 11761473 NR Description: unknown protein [Arabidopsis thaliana]
  misc_feature (27)..(333): Homolog of NCBI NO: 30689150 NR Description: membrane protein, Rhomboid family [Arabidopsis
MVVGLNVPQPFLSPVCKTAPYPLDLIATAASLHFGHLLRRRATHHLRLGVLLHSCFKKLAPLTHIFRLNDKWCQRCFQLNGLNYLQLSAGDLTSSWSTSFSFFNGGGDGGRRYGKAGMSNSKMSGKDPFNGRKWTEILLAANVLFYIAQLATQGKLLLWGAKINSLIDKGQLWRLATSSFLHANIGHLLVNCYSLNSVGPTVESFSGPRRFLAVYFISAIASSATSYWFCRMPAVGASGAIFGLVGSVAVFVLRHKDLVGGGKKDLQHIAQVIALNMVIGLLSTGIDNWGHLGGLVGGVAASWFIGPAWKHESTSSDGRRLFIDTAPMYKLFKIKRVPKQWK

SEQ ID NO: 57984 - protein, 225 aa, Glycine max
  peptide (1)..(225): Ceres Seq. ID no. 14311678
  misc_feature (38)..(187): Homolog of NCBI NO: 18310434 NR Description: conserved hypothetical protein [Clostridium
  misc_feature (13)..(194): Homolog of NCBI NO: 23099378 NR Description: hypothetical protein [Oceanobacillus iheyensis
  misc_feature (43)..(193): Homolog of NCBI NO: 15894241 NR Description: Uncharacterized membrane protein [Clostridium
  misc_feature (1)..(188): Homolog of NCBI NO: 23121840 NR Description: hypothetical protein [Desulfitobacterium
  misc_feature (1)..(193): Homolog of NCBI NO: 23020903 NR Description: hypothetical protein [Clostridium thermocellum
  misc_feature (39)..(190): Homolog of NCBI NO: 22972591 NR Description: hypothetical protein [Chloroflexus aurantiacus]
  misc_feature (18)..(188): Homolog of NCBI NO: 28210270 NR Description: conserved membrane protein (rhomboid family)
  misc_feature (1)..(207): Homolog of NCBI NO: 25518651 NR Description: hypothetical protein F4F7.14 - Arabidopsis
  misc_feature (1)..(216): Homolog of NCBI NO: 11761473 NR Description: unknown protein [Arabidopsis thaliana]
  misc_feature (1)..(216): Homolog of NCBI NO: 30689150 NR Description: membrane protein, Rhomboid family [Arabidopsis
MSNSKMSGKDPFNGRKWTEILLAANVLFYIAQLATQGKLLLWGAKINSLIDKGQLWRLATSSFLHANIGHLLVNCYSLNSVGPTVESFSGPRRFLAVYFISAIASSATSYWFCRMPAVGASGAIFGLVGSVAVFVLRHKDLVGGGKKDLQHIAQVIALNMVIGLLSTGIDNWGHLGGLVGGVAASWFIGPAWKHESTSSDGRRLFIDTAPMYKLFKIKRVPKQWK

SEQ ID NO: 57985 - DNA, 1363 bp, Glycine max
  misc_feature (1)..(1363): Ceres Seq. ID no. 14314925
atcttctcttctcacaacacgttcccattcctctctccctaacctcaccggcagcgccttcacggtcatcgccgccgacaccccccctcccttcttaatggcctcaatcccagtcgcgtgttccacacaccccaggctccaagcctcacccttattccaatcccacgcgcgctcccgcagcgcgtccttctggagggttcagcagaggggttcgatgggtggtggtggtgccgcgtcgagtttcgcctgctccacttctcagttccgcggcggattcgggttccggttccaccggagacaggggaagttctcgttgctctctttcggcggtgacgacgacggaagcgccgttggcggcgaagcgagagaaagagacttgtctcagcttctctccgcattgcttcccgttgttgttgctgccaccgccgttgccgctctcgctaaaccctccacttttacttgggtatcaaaagagttatatgctcctgcacttggtgggattatgttgtctattggaataagactatccgtagatgacttcgctcttgcatttaaaagacctttgccacttaccattgggttaattgcgcaatacgtgcttaagcctgttcttggaatcttggttgcaaaggcttttggtttgtctaggatgttttacgcgggctttgtcctcacagcttgtgtttcgggggctcaactatccagctatgcaaacttcttaagcaaaggggatgtagccttgggcattcttctcacaagctataccacaattgcatcagttattgttacacctctgttaactggtcttctgattggatcagtagtgccagttgatgcagttgccatgtcaaagtcaattctgcaggttgtacttgttccggtgacccttggtcttcttctcaatacatatgcaaagtcagttgtatctgttcttcaacctgtgatgccctttgttgccatgatttgtacttcactgtgcattggcagccctcttgctttaaacaggagtcaaattttgacaggcgaaggtctccggttggtttttccagtattaacatttcatgttgttgccttcactttaggatattggttctcaaagattccatccttgaggcaggaagaacaggtgagcaggacgatttcactatgcactggaatgcagagttccacccttgcaggactccttgcaacgcaatttttggatagtagtcaggcagttcctcctgcatgttctgtcattgctatggctataatgggtctctgtcttgcctctttttggggaagtggctttgtaattagaaacctgttgccattacctcctctcagaaccaattctgctgttaaaacttaacttttttgtttc

SEQ ID NO: 57986 - protein, 449 aa, Glycine max
  peptide (1)..(449): Ceres Seq. ID no. 14314926
  misc_feature (161)..(340): Pfam Name: Sodium Bile acid symporter family Pfam Description: Sodium Bile acid symporter family
  misc_feature (167)..(426): Homolog of NCBI NO: 18413732 NR Description: bile acid:sodium symporter family [Arabidopsis
  misc_feature (149)..(417): Homolog of NCBI NO: 7485401 NR Description: hypothetical protein At2g26900 [imported] -
  misc_feature (125)..(426): Homolog of NCBI NO: 7486890 NR Description: hypothetical protein T12H17.230 - Arabidopsis
  misc_feature (125)..(426): Homolog of NCBI NO: 18416020 NR Description: bile acid:sodium symporter family [Arabidopsis
  misc_feature (128)..(439): Homolog of NCBI NO: 30683305 NR Description: bile acid:sodium symporter family [Arabidopsis
  misc_feature (128)..(439): Homolog of NCBI NO: 20269901 NR Description: putative sodium-dependent bile acid symporter
  misc_feature (116)..(426): Homolog of NCBI NO: 34911708 NR Description: P0707D10.18 [Oryza sativa (japonica
  misc_feature (45)..(413): Homolog of NCBI NO: 9279722 NR Description: contains similarity to transporter
  misc_feature (45)..(438): Homolog of NCBI NO: 18404505 NR Description: bile acid:sodium symporter family [Arabidopsis
  misc_feature (45)..(438): Homolog of NCBI NO: 21554890 NR Description: unknown [Arabidopsis thaliana]
SSLLTTRSHSSLPNLTGSAFTVIAADTPPPFLMASIPVACSTHPRLQASPLFQSHARSRSASFWRVQQRGSMGGGGAASSFACSTSQFRGGFGFRFHRRQGKFSLLSFGGDDDGSAVGGEARERDLSQLLSALLPVVVAATAVAALAKPSTFTWVSKELYAPALGGIMLSIGIRLSVDDFALAFKRPLPLTIGLIAQYVLKPVLGILVAKAFGLSRMFYAGFVLTACVSGAQLSSYANFLSKGDVALGILLTSYTTIASVIVTPLLTGLLIGSVVPVDAVAMSKSILQVVLVPVTLGLLLNTYAKSVVSVLQPVMPFVAMICTSLCIGSPLALNRSQILTGEGLRLVFPVLTFHVVAFTLGYWFSKIPSLRQEEQVSRTISLCTGMQSSTLAGLLATQFLDSSQAVPPACSVIAMAIMGLCLASFWGSGFVIRNLLPLPPLRTNSAVKT

SEQ ID NO: 57987 - protein, 417 aa, Glycine max
  peptide (1)..(417): Ceres Seq. ID no. 14314927
  misc_feature (129)..(308): Pfam Name: Sodium Bile acid symporter family Pfam Description: Sodium Bile acid symporter family
  misc_feature (135)..(394): Homolog of NCBI NO: 18413732 NR Description: bile acid:sodium symporter family [Arabidopsis
  misc_feature (117)..(385): Homolog of NCBI NO: 7485401 NR Description: hypothetical protein At2g26900 [imported] -
  misc_feature (93)..(394): Homolog of NCBI NO: 7486890 NR Description: hypothetical protein T12H17.230 - Arabidopsis
  misc_feature (93)..(394): Homolog of NCBI NO: 18416020 NR Description: bile acid:sodium symporter family [Arabidopsis
  misc_feature (96)..(407): Homolog of NCBI NO: 30683305 NR Description: bile acid:sodium symporter family [Arabidopsis
  misc_feature (96)..(407): Homolog of NCBI NO: 20269901 NR Description: putative sodium-dependent bile acid symporter
  misc_feature (84)..(394): Homolog of NCBI NO: 34911708 NR Description: P0707D10.18 [Oryza sativa (japonica
  misc_feature (13)..(381): Homolog of NCBI NO: 9279722 NR Description: contains similarity to transporter
  misc_feature (13)..(406): Homolog of NCBI NO: 18404505 NR Description: bile acid:sodium symporter family [Arabidopsis
  misc_feature (13)..(406): Homolog of NCBI NO: 21554890 NR Description: unknown [Arabidopsis thaliana]
MASIPVACSTHPRLQASPLFQSHARSRSASFWRVQQRGSMGGGGAASSFACSTSQFRGGFGFRFHRRQGKFSLLSFGGDDDGSAVGGEARERDLSQLLSALLPVVVAATAVAALAKPSTFTWVSKELYAPALGGIMLSIGIRLSVDDFALAFKRPLPLTIGLIAQYVLKPVLGILVAKAFGLSRMFYAGFVLTACVSGAQLSSYANFLSKGDVALGILLTSYTTIASVIVTPLLTGLLIGSVVPVDAVAMSKSILQVVLVPVTLGLLLNTYAKSVVSVLQPVMPFVAMICTSLCIGSPLALNRSQILTGEGLRLVFPVLTFHVVAFTLGYWFSKIPSLRQEEQVSRTISLCTGMQSSTLAGLLATQFLDSSQAVPPACSVIAMAIMGLCLASFWGSGFVIRNLLPLPPLRTNSAVKT

SEQ ID NO: 57988 - protein, 378 aa, Glycine max
  peptide (1)..(378): Ceres Seq. ID no. 14314928
  misc_feature (90)..(269): Pfam Name: Sodium Bile acid symporter family Pfam Description: Sodium Bile acid symporter family
  misc_feature (96)..(355): Homolog of NCBI NO: 18413732 NR Description: bile acid:sodium symporter family [Arabidopsis
  misc_feature (78)..(346): Homolog of NCBI NO: 7485401 NR Description: hypothetical protein At2g26900 [imported] -
  misc_feature (54)..(355): Homolog of NCBI NO: 7486890 NR Description: hypothetical protein T12H17.230 - Arabidopsis
  misc_feature (54)..(355): Homolog of NCBI NO: 18416020 NR Description: bile acid:sodium symporter family [Arabidopsis
  misc_feature (57)..(368): Homolog of NCBI NO: 30683305 NR Description: bile acid:sodium symporter family [Arabidopsis
  misc_feature (57)..(368): Homolog of NCBI NO: 20269901 NR Description: putative sodium-dependent bile acid symporter
  misc_feature (45)..(355): Homolog of NCBI NO: 34911708 NR Description: P0707D10.18 [Oryza sativa (japonica
  misc_feature (1)..(342): Homolog of NCBI NO: 9279722 NR Description: contains similarity to transporter
  misc_feature (1)..(367): Homolog of NCBI NO: 18404505 NR Description: bile acid:sodium symporter family [Arabidopsis
  misc_feature (1)..(367): Homolog of NCBI NO: 21554890 NR Description: unknown [Arabidopsis thaliana]
MGGGGAASSFACSTSQFRGGFGFRFHRRQGKFSLLSFGGDDDGSAVGGEARERDLSQLLSALLPVVVAATAVAALAKPSTFTWVSKELYAPALGGIMLSIGIRLSVDDFALAFKRPLPLTIGLIAQYVLKPVLGILVAKAFGLSRMFYAGFVLTACVSGAQLSSYANFLSKGDVALGILLTSYTTIASVIVTPLLTGLLIGSVVPVDAVAMSKSILQVVLVPVTLGLLLNTYAKSVVSVLQPVMPFVAMICTSLCIGSPLALNRSQILTGEGLRLVFPVLTFHVVAFTLGYWFSKIPSLRQEEQVSRTISLCTGMQSSTLAGLLATQFLDSSQAVPPACSVIAMAIMGLCLASFWGSGFVIRNLLPLPPLRTNSAVKT

SEQ ID NO: 57989 - DNA, 1773 bp, Glycine max
  misc_feature (1)..(1773): Ceres Seq. ID no. 14315028
actcactctgaaaccctaaacatgccgccattagcgcctctgcatcttcggaagctcttactccgttctcgttccttatcattcacttctcccactccgattcaccctcctcctctgtttccccaacaaccttcttcccatttccattcccgaaccctcctcactccttcttcgctcttcataatcagacatttctcatcggaaacccaaacggatcagattgcgcactccctctcctcagagcttctcaaagagccagactcggacgctctctccgtctcgcagcgccttcacctgagcttctcccacatcactccaacccccaatttgattctccaaaccctaaacctctcccacgaatctggccgcactgtattagggttccatcaatggctctcttccaacccccaattctcccacacggacgacactctttcctacttcgtcgactactttggccgccgtaaggacttcaaggccacgcatgacgtcctctccgccgcttcccccgccgccggccccaaaaccctagcctccgcgatcgaccgcctcgtccgcgcgggccgccccagccaggcggttcagttcttcgagcgaatggagagagactacgggctgaagcgcgatcgtgcttccttaaaagtggtcgtggagaagctgtgttcgaagggtttcgctagttacgcggaaaaaatggttaaggatttggcgaaggtgtttttccccgacgaagccacgtgtgatatgttgatcaaagggtggtgcgttgatgggaagctcgatgaagctcaaaggctcgccggtgagatgtatcgtggtgggtttgagcttggtgtggggtcttacaatgccatgcttgattgcgtttgcaagctttgtcgccaaaaggatccgtttcaacttcactcggaagcagagaaggtgttggtggagatggagcaccgtggggttccaaggaatgtggagacattcaatgtgttgataacgaatttatgtaagattaggaagaccgaagatgctttgggattgtttcgtagcatgggagagtgggggtgttaccctaatgagactacttttcttgttttgattaggagtctgtatcaggctgctaggttggaagagggggatgagatgattgataggatgaggtctgctgggtttggtgagtttctagataagaaggcttactatcagctcctcaagattttgtgtggcattgagagggttgatcatgctttgagtgtgtttgctatgatgaaggatggtgggtgtgaacccgggcttataacttatgacttgttgatgggaaaattgggtgctcacaatcgtatcgataaggctaatgctctattcaatgaagcgaagagtagagggctgcctgtgatgctcaaagagtatgctgttgacccgaggtatttgaagaagaagaaggttgtcaagggtgtgaagaagagggaaaccttgcctgagaaaatggctaggaagagaagccgcctgaaacagattcggttgagttttgtgaagaagcccaaaagagtgatgggtcgttgatcattttttgtactttataaaggtttcggaatagatttccttatttaatcatcattttctttgtttcattgttagttttgaatatttggagataaatctttgcatggaaatggctccattgtaggacataaatgccgccacatattcagaaataattttttgtacttggtgctttatgttggttcaacttctgggagatgtatgctgggcttcttaatgatt

SEQ ID NO: 57990 - protein, 516 aa, Glycine max
  peptide (1)..(516): Ceres Seq. ID no. 14315029
  misc_feature (175)..(209): Pfam Name: PPR repeat Pfam Description: PPR repeat
  misc_feature (99)..(443): Homolog of NCBI NO: 15228825 NR Description: pentatricopeptide (PPR) repeat-containing protein
  misc_feature (10)..(467): Homolog of NCBI NO: 32526676 NR Description: chloroplast RNA processing 1 -like protein
  misc_feature (28)..(435): Homolog of NCBI NO: 21686921 NR Description: putative reverse transcriptase
  misc_feature (53)..(435): Homolog of NCBI NO: 18394846 NR Description: expressed protein [Arabidopsis thaliana]
  misc_feature (121)..(482): Homolog of NCBI NO: 37534458 NR Description: putative endopeptidase [Oryza sativa (japonica
  misc_feature (52)..(512): Homolog of NCBI NO: 21593376 NR Description: unknown [Arabidopsis thaliana]
  misc_feature (52)..(512): Homolog of NCBI NO: 15240232 NR Description: pentatricopeptide (PPR) repeat-containing protein
  misc_feature (74)..(516): Homolog of NCBI NO: 34394565 NR Description: unknown protein [Oryza sativa (japonica
  misc_feature (8)..(516): Homolog of NCBI NO: 21554346 NR Description: unknown [Arabidopsis thaliana]
  misc_feature (8)..(516): Homolog of NCBI NO: 15239488 NR Description: pentatricopeptide (PPR) repeat-containing protein
THSETLNMPPLAPLHLRKLLLRSRSLSFTSPTPIHPPPLFPQQPSSHFHSRTLLTPSSLFIIRHFSSETQTDQIAHSLSSELLKEPDSDALSVSQRLHLSFSHITPTPNLILQTLNLSHESGRTVLGFHQWLSSNPQFSHTDDTLSYFVDYFGRRKDFKATHDVLSAASPAAGPKTLASAIDRLVRAGRPSQAVQFFERMERDYGLKRDRASLKVVVEKLCSKGFASYAEKMVKDLAKVFFPDEATCDMLIKGWCVDGKLDEAQRLAGEMYRGGFELGVGSYNAMLDCVCKLCRQKDPFQLHSEAEKVLVEMEHRGVPRNVETFNVLITNLCKIRKTEDALGLFRSMGEWGCYPNETTFLVLIRSLYQAARLEEGDEMIDRMRSAGFGEFLDKKAYYQLLKILCGIERVDHALSVFAMMKDGGCEPGLITYDLLMGKLGAHNRIDKANALFNEAKSRGLPVMLKEYAVDPRYLKKKKVVKGVKKRETLPEKMARKRSRLKQIRLSFVKKPKRVMGR

SEQ ID NO: 57991 - protein, 509 aa, Glycine max
  peptide (1)..(509): Ceres Seq. ID no. 14315030
  misc_feature (168)..(202): Pfam Name: PPR repeat Pfam Description: PPR repeat
  misc_feature (92)..(436): Homolog of NCBI NO: 15228825 NR Description: pentatricopeptide (PPR) repeat-containing protein
  misc_feature (3)..(460): Homolog of NCBI NO: 32526676 NR Description: chloroplast RNA processing 1 -like protein
  misc_feature (21)..(428): Homolog of NCBI NO: 21686921 NR Description: putative reverse transcriptase
  misc_feature (46)..(428): Homolog of NCBI NO: 18394846 NR Description: expressed protein [Arabidopsis thaliana]
  misc_feature (114)..(475): Homolog of NCBI NO: 37534458 NR Description: putative endopeptidase [Oryza sativa (japonica
  misc_feature (45)..(505): Homolog of NCBI NO: 21593376 NR Description: unknown [Arabidopsis thaliana]
  misc_feature (45)..(505): Homolog of NCBI NO: 15240232 NR Description: pentatricopeptide (PPR) repeat-containing protein
  misc_feature (67)..(509): Homolog of NCBI NO: 34394565 NR Description: unknown protein [Oryza sativa (japonica
  misc_feature (1)..(509): Homolog of NCBI NO: 21554346 NR Description: unknown [Arabidopsis thaliana]
  misc_feature (1)..(509): Homolog of NCBI NO: 15239488 NR Description: pentatricopeptide (PPR) repeat-containing protein
MPPLAPLHLRKLLLRSRSLSFTSPTPIHPPPLFPQQPSSHFHSRTLLTPSSLFIIRHFSSETQTDQIAHSLSSELLKEPDSDALSVSQRLHLSFSHITPTPNLILQTLNLSHESGRTVLGFHQWLSSNPQFSHTDDTLSYFVDYFGRRKDFKATHDVLSAASPAAGPKTLASAIDRLVRAGRPSQAVQFFERMERDYGLKRDRASLKVVVEKLCSKGFASYAEKMVKDLAKVFFPDEATCDMLIKGWCVDGKLDEAQRLAGEMYRGGFELGVGSYNAMLDCVCKLCRQKDPFQLHSEAEKVLVEMEHRGVPRNVETFNVLITNLCKIRKTEDALGLFRSMGEWGCYPNETTFLVLIRSLYQAARLEEGDEMIDRMRSAGFGEFLDKKAYYQLLKILCGIERVDHALSVFAMMKDGGCEPGLITYDLLMGKLGAHNRIDKANALFNEAKSRGLPVMLKEYAVDPRYLKKKKVVKGVKKRETLPEKMARKRSRLKQIRLSFVKKPKRVMGR

SEQ ID NO: 57992 - protein, 317 aa, Glycine max
  peptide (1)..(317): Ceres Seq. ID no. 14315031
  misc_feature (1)..(244): Homolog of NCBI NO: 15228825 NR Description: pentatricopeptide (PPR) repeat-containing protein
  misc_feature (1)..(268): Homolog of NCBI NO: 32526676 NR Description: chloroplast RNA processing 1 -like protein
  misc_feature (1)..(236): Homolog of NCBI NO: 21686921 NR Description: putative reverse transcriptase
  misc_feature (1)..(236): Homolog of NCBI NO: 18394846 NR Description: expressed protein [Arabidopsis thaliana]
  misc_feature (1)..(283): Homolog of NCBI NO: 37534458 NR Description: putative endopeptidase [Oryza sativa (japonica
  misc_feature (1)..(313): Homolog of NCBI NO: 21593376 NR Description: unknown [Arabidopsis thaliana]
  misc_feature (1)..(313): Homolog of NCBI NO: 15240232 NR Description: pentatricopeptide (PPR) repeat-containing protein
  misc_feature (1)..(317): Homolog of NCBI NO: 34394565 NR Description: unknown protein [Oryza sativa (japonica
  misc_feature (1)..(317): Homolog of NCBI NO: 21554346 NR Description: unknown [Arabidopsis thaliana]
  misc_feature (1)..(317): Homolog of NCBI NO: 15239488 NR Description: pentatricopeptide (PPR) repeat-containing protein
MERDYGLKRDRASLKVVVEKLCSKGFASYAEKMVKDLAKVFFPDEATCDMLIKGWCVDGKLDEAQRLAGEMYRGGFELGVGSYNAMLDCVCKLCRQKDPFQLHSEAEKVLVEMEHRGVPRNVETFNVLITNLCKIRKTEDALGLFRSMGEWGCYPNETTFLVLIRSLYQAARLEEGDEMIDRMRSAGFGEFLDKKAYYQLLKILCGIERVDHALSVFAMMKDGGCEPGLITYDLLMGKLGAHNRIDKANALFNEAKSRGLPVMLKEYAVDPRYLKKKKVVKGVKKRETLPEKMARKRSRLKQIRLSFVKKPKRVMGR

SEQ ID NO: 57993 - DNA, 871 bp, Glycine max
  misc_feature (1)..(871): Ceres Seq. ID no. 13594385
gaacatcctaatcgaaaagaggaaacatttgcaatggctaacaacgtcgttgttgttcttaaggtagctcctgtttctctgcctccatttcccataacaaacaatgctctcactttcaagagccaaagacacacacttcatctgaattgcttccaaaccaaaaacagaacaacctcattcccttcttcctcgtcaatcctcagaaacaaagctagttgctctgtgttggcgtgtctccctcctgaatcctcaacctcatcttccactgctaaaccctcttttccttctcctcaaactaagctttatgtcagtgggctatcatttcgtaccactgaagagagtttgcgaaatgcatttaagaattttggtcaacttgtggaagtcaagctggtgatggatagaattgctaatagaccaagagggtttgcttttcttcgttatgcaactgaagaagagtcgcagaaggctattgagggaatgcatggaaagttcttggatggaagggtcatatttgtggaagttgccaaaccgagatcagagttagcgccaaggaaacaggaagacactagattgtaatgaagatccaatcaaaggatacagtagccatatgttcatcttggattcttggtgtgcaataggaagaatcattgcagcattgtacttgacattttataaaagacccctacttgattaaagttttttgcctcccttattttccaccccactgacactcttaggattcagcaatgaaaactcttttaagcaccacggccatttctgcaatatattgccaaatttatgccatttgtgcataatgtactcgttgacaatgttacaaatgtcaatggcgtttcttgaagtagttgttatc

SEQ ID NO: 57994 - protein, 191 aa, Glycine max
  peptide (1)..(191): Ceres Seq. ID no. 13594386
  misc_feature (101)..(172): Pfam Name: RNA recognition motif. (a.k.a. RRM, RBD, or RNP domain) Pfam Description: RNA recognition motif. (a.k.a. RRM, RBD, or RNP
  misc_feature (100)..(181): Homolog of NCBI NO: 15231311 NR Description: RNA-binding protein, putative [Arabidopsis
  misc_feature (78)..(181): Homolog of NCBI NO: 15239958 NR Description: RNA-binding protein, putative [Arabidopsis
  misc_feature (100)..(178): Homolog of NCBI NO: 38344030 NR Description: OJ991214_12.1 [Oryza sativa (japonica
  misc_feature (128)..(181): Homolog of NCBI NO: 38346812 NR Description: OSJNBa0088A01.19 [Oryza sativa (japonica
  misc_feature (84)..(186): Homolog of NCBI NO: 18402803 NR Description: RNA recognition motif (RRM)-containing protein
  misc_feature (64)..(190): Homolog of NCBI NO: 15224298 NR Description: RNA-binding protein, putative [Arabidopsis
  misc_feature (90)..(183): Homolog of NCBI NO: 34898598 NR Description: P0534A03.25 [Oryza sativa (japonica
  misc_feature (74)..(187): Homolog of NCBI NO: 38636774 NR Description: putative RNA recognition motif (RRM)-containing
  misc_feature (71)..(180): Homolog of NCBI NO: 15239676 NR Description: RNA recognition motif (RRM)-containing protein
  misc_feature (84)..(185): Homolog of NCBI NO: 15219486 NR Description: RNA recognition motif (RRM)-containing protein
EHPNRKEETFAMANNVVVVLKVAPVSLPPFPITNNALTFKSQRHTLHLNCFQTKNRTTSFPSSSSILRNKASCSVLACLPPESSTSSSTAKPSFPSPQTKLYVSGLSFRTTEESLRNAFKNFGQLVEVKLVMDRIANRPRGFAFLRYATEEESQKAIEGMHGKFLDGRVIFVEVAKPRSELAPRKQEDTRL

SEQ ID NO: 57995 - protein, 180 aa, Glycine max
  peptide (1)..(180): Ceres Seq. ID no. 13594387
  misc_feature (90)..(161): Pfam Name: RNA recognition motif. (a.k.a. RRM, RBD, or RNP domain) Pfam Description: RNA recognition motif. (a.k.a. RRM, RBD, or RNP
  misc_feature (89)..(170): Homolog of NCBI NO: 15231311 NR Description: RNA-binding protein, putative [Arabidopsis
  misc_feature (67)..(170): Homolog of NCBI NO: 15239958 NR Description: RNA-binding protein, putative [Arabidopsis
  misc_feature (89)..(167): Homolog of NCBI NO: 38344030 NR Description: OJ991214_12.1 [Oryza sativa (japonica
  misc_feature (117)..(170): Homolog of NCBI NO: 38346812 NR Description: OSJNBa0088A01.19 [Oryza sativa (japonica
  misc_feature (73)..(175): Homolog of NCBI NO: 18402803 NR Description: RNA recognition motif (RRM)-containing protein
  misc_feature (53)..(179): Homolog of NCBI NO: 15224298 NR Description: RNA-binding protein, putative [Arabidopsis
  misc_feature (79)..(172): Homolog of NCBI NO: 34898598 NR Description: P0534A03.25 [Oryza sativa (japonica
  misc_feature (63)..(176): Homolog of NCBI NO: 38636774 NR Description: putative RNA recognition motif (RRM)-containing
  misc_feature (60)..(169): Homolog of NCBI NO: 15239676 NR Description: RNA recognition motif (RRM)-containing protein
  misc_feature (73)..(174): Homolog of NCBI NO: 15219486 NR Description: RNA recognition motif (RRM)-containing protein
MANNVVVVLKVAPVSLPPFPITNNALTFKSQRHTLHLNCFQTKNRTTSFPSSSSILRNKASCSVLACLPPESSTSSSTAKPSFPSPQTKLYVSGLSFRTTEESLRNAFKNFGQLVEVKLVMDRIANRPRGFAFLRYATEEESQKAIEGMHGKFLDGRVIFVEVAKPRSELAPRKQEDTRL

SEQ ID NO: 57996 - DNA, 1125 bp, Glycine max
  misc_feature (1)..(1125): Ceres Seq. ID no. 14305461
cttcttcggttaaacctttttcaccttccccctttgtttctcaacatcattctcctcattcccctacctacccccaattttcccttctgtatttctctttttcaattctcgatttcccttctcccttttgtgtcttcataatccagatcctctcttcgatctagggtttctggcttaattaacaatcaaatgtttaaggaagaatttctatgacgattcgcaaccccatgcgacgaatccgtctcctccactccttctccgtcgtcttcctctactggttctacgtcttctcatgaactaactccctctcaatcccctaccctaattcctccaatttccccattttttttctaattaatcagatttgcaaaatcctaatttctctatcctaacaaaacccccaaattcaaacaaatccaatggcttcgattccgcgtccggcgagttcgggatcttcggagggaggaggagatccggctgcgatggacgagagaamgaggaagcggatggagtcgaaccgcgagtccgcacggcgatcgcggatgaagaagcagaagctgctcgaagacctatccgacgtagcgagtcgccttcaaggcgagaacgtgcgcttagcgcagagcataaaggcgaaggaggaagcgtacgttgagatcgaagccgcgaacgacatcctcagagcacagaccatggaactcgccgaccggttaaggtttctgaactccattctcgagatcgccgatgaggtcggcggcggtggtgaatccttcgagattccgcagattccagaccctctcttcatgccctggcagatcccccaccctatgatggcgtcacctgacatgctcctccatggaaatcaaggcctgtttgcttgatagtacttcaattaggctaggtttattgttgatgttccctagtgttttggtgaataaagaaagggaatggtgttagatgtttatgagttatatcgtgtgttggtgtgctgttttttttttttaagatctgtgtttatgttttgtgtgtgcactatcgtcgttatatagttgaattgaatgtatctgctttgtcgtagtgactggcattgtgtatcgatataaaattatgtttctgtttaaaattaat

SEQ ID NO: 57997 - protein, 152 aa, Glycine max
  peptide (1)..(152): Ceres Seq. ID no. 14305462
  misc_feature (22)..(85): Pfam Name: bZIP transcription factor Pfam Description: bZIP transcription factor
  misc_feature (1)..(140): Homolog of NCBI NO: 479696 NR Description: oxidase lip19 - rice
  misc_feature (1)..(144): Homolog of NCBI NO: 7489118 NR Description: DNA-binding protein tbz17 - common tobacco
  misc_feature (1)..(136): Homolog of NCBI NO: 16580134 NR Description: bZIP transcription factor BZI-4 [Nicotiana
  misc_feature (23)..(138): Homolog of NCBI NO: 7489297 NR Description: DNA-binding protein bZIP-1 - garden snapdragon
  misc_feature (1)..(135): Homolog of NCBI NO: 9650826 NR Description: common plant regulatory factor 6 [Petroselinum
  misc_feature (1)..(142): Homolog of NCBI NO: 5901747 NR Description: bZIP DNA-binding protein [Lycopersicon esculentum]
  misc_feature (1)..(142): Homolog of NCBI NO: 16580132 NR Description: bZIP transcription factor BZI-3 [Nicotiana
  misc_feature (1)..(142): Homolog of NCBI NO: 10241920 NR Description: TBZF [Nicotiana tabacum]
  misc_feature (8)..(145): Homolog of NCBI NO: 7489298 NR Description: DNA-binding protein bZIP-2 - garden snapdragon
  misc_feature (12)..(142): Homolog of NCBI NO: 15228754 NR Description: bZIP family transcription factor [Arabidopsis
  misc_feature (26)..(26): Xaa is any aa, unknown or other
MASIPRPASSGSSEGGGDPAAMDERXRKRMESNRESARRSRMKKQKLLEDLSDVASRLQGENVRLAQSIKAKEEAYVEIEAANDILRAQTMELADRLRFLNSILEIADEVGGGGESFEIPQIPDPLFMPWQIPHPMMASPDMLLHGNQGLFA

SEQ ID NO: 57998 - protein, 131 aa, Glycine max
  peptide (1)..(131): Ceres Seq. ID no. 14305463
  misc_feature (1)..(64): Pfam Name: bZIP transcription factor Pfam Description: bZIP transcription factor
  misc_feature (1)..(119): Homolog of NCBI NO: 479696 NR Description: oxidase lip19 - rice
  misc_feature (1)..(123): Homolog of NCBI NO: 7489118 NR Description: DNA-binding protein tbz17 - common tobacco
  misc_feature (1)..(115): Homolog of NCBI NO: 16580134 NR Description: bZIP transcription factor BZI-4 [Nicotiana
  misc_feature (2)..(117): Homolog of NCBI NO: 7489297 NR Description: DNA-binding protein bZIP-1 - garden snapdragon
  misc_feature (1)..(114): Homolog of NCBI NO: 9650826 NR Description: common plant regulatory factor 6 [Petroselinum
  misc_feature (1)..(121): Homolog of NCBI NO: 5901747 NR Description: bZIP DNA-binding protein [Lycopersicon esculentum]
  misc_feature (1)..(121): Homolog of NCBI NO: 16580132 NR Description: bZIP transcription factor BZI-3 [Nicotiana
  misc_feature (1)..(121): Homolog of NCBI NO: 10241920 NR Description: TBZF [Nicotiana tabacum]
  misc_feature (1)..(124): Homolog of NCBI NO: 7489298 NR Description: DNA-binding protein bZIP-2 - garden snapdragon
  misc_feature (1)..(121): Homolog of NCBI NO: 15228754 NR Description: bZIP family transcription factor [Arabidopsis
  misc_feature (5)..(5): Xaa is any aa, unknown or other
MDERXRKRMESNRESARRSRMKKQKLLEDLSDVASRLQGENVRLAQSIKAKEEAYVEIEAANDILRAQTMELADRLRFLNSILEIADEVGGGGESFEIPQIPDPLFMPWQIPHPMMASPDMLLHGNQGLFA

SEQ ID NO: 57999 - protein, 123 aa, Glycine max
  peptide (1)..(123): Ceres Seq. ID no. 14305464
  misc_feature (1)..(56): Pfam Name: bZIP transcription factor Pfam Description: bZIP transcription factor
  misc_feature (1)..(111): Homolog of NCBI NO: 479696 NR Description: oxidase lip19 - rice
  misc_feature (1)..(115): Homolog of NCBI NO: 7489118 NR Description: DNA-binding protein tbz17 - common tobacco
  misc_feature (1)..(107): Homolog of NCBI NO: 16580134 NR Description: bZIP transcription factor BZI-4 [Nicotiana
  misc_feature (1)..(109): Homolog of NCBI NO: 7489297 NR Description: DNA-binding protein bZIP-1 - garden snapdragon
  misc_feature (1)..(106): Homolog of NCBI NO: 9650826 NR Description: common plant regulatory factor 6 [Petroselinum
  misc_feature (1)..(113): Homolog of NCBI NO: 5901747 NR Description: bZIP DNA-binding protein [Lycopersicon esculentum]
  misc_feature (1)..(113): Homolog of NCBI NO: 16580132 NR Description: bZIP transcription factor BZI-3 [Nicotiana
  misc_feature (1)..(113): Homolog of NCBI NO: 10241920 NR Description: TBZF [Nicotiana tabacum]
  misc_feature (1)..(116): Homolog of NCBI NO: 7489298 NR Description: DNA-binding protein bZIP-2 - garden snapdragon
  misc_feature (1)..(113): Homolog of NCBI NO: 15228754 NR Description: bZIP family transcription factor [Arabidopsis
MESNRESARRSRMKKQKLLEDLSDVASRLQGENVRLAQSIKAKEEAYVEIEAANDILRAQTMELADRLRFLNSILEIADEVGGGGESFEIPQIPDPLFMPWQIPHPMMASPDMLLHGNQGLFA

SEQ ID NO: 58000 - DNA, 1205 bp, Glycine max
  misc_feature (1)..(1205): Ceres Seq. ID no. 13639619
gaacatcctaatcgaaaacttcgggttctcgtcaaaacgcaaagatgcaagttccattgatcgacatcgacagaatcaacgatctccaagtgggtctgaactctctgcagaacccatccttcccaatcccttctcagatcacaacctccctcgcttacaatttctgcaaatggggcgcagtcattctcgcccttgtcgccaccttcggcagcatcatcaacagagtcactatcttcatcatccgcttccgcgccaaagccccttctctcccatccctaaccctaaacgacgacaatttttacacctcctcctcctctgacgacgacgacgacgacgataacgacgacgacctaacctactcctcttccgagcccgaagacgagccctccgcgtcttccagtttcatccgtttggacgactatttccgactcagaggaaccgataataataataataataacctagacgacgagtttcagactcaaaacggcacgcacaaacgatgtcgtagcatcggggatattttctccctctcggaactagccaacagcaagagcgtggtgaagctctgggacaccataggcttcggcctgggcttggacttcgatgattacgatggttactacgttggtaacgcggcggttccgacgagctccaccgcgtctccctcggtggttgtctcggcgggggaaggcgcgtgcgggaatctggcgctggagatctgggacacgcggctgcggcggcggaagcccacggtggtggcggagtggggtcccaccgtgggaaagaccctgcgcgtggaatctggtggcgtccagaaggtctacgtcatagatgacgggcgttacggcgtgacggtcggggatatgagaaaggtcagcacgccgttagagagcgtaacggaatctgacgcggatacttggtgggatgcggacgctattgttgtttcggacgagtcttttggcgaacagcaatcaatgttgcaacaaccaacttgaataataattgcagttcctttttcggtgctggaaatataattataataatcgaaaaaaaaataaggcgccaccatccgagattttctcaagagaaattgtttatttgtattattattcaatttaaaatttatacattgtatattcatcaaaaaaaaaaaaaaaaaagcttatcgataccgtcgacctcgagggggggcccggtaccca

SEQ ID NO: 58001 - protein, 317 aa, Glycine max
  peptide (1)..(317): Ceres Seq. ID no. 13639620
  misc_feature (203)..(300): Homolog of NCBI NO: 12324878 NR Description: unknown protein, 5' partial; 67-381 [Arabidopsis
  misc_feature (1)..(291): Homolog of NCBI NO: 18395663 NR Description: expressed protein [Arabidopsis thaliana]
  misc_feature (1)..(300): Homolog of NCBI NO: 18409031 NR Description: expressed protein [Arabidopsis thaliana]
MQVPLIDIDRINDLQVGLNSLQNPSFPIPSQITTSLAYNFCKWGAVILALVATFGSIINRVTIFIIRFRAKAPSLPSLTLNDDNFYTSSSSDDDDDDDNDDDLTYSSSEPEDEPSASSSFIRLDDYFRLRGTDNNNNNNLDDEFQTQNGTHKRCRSIGDIFSLSELANSKSVVKLWDTIGFGLGLDFDDYDGYYVGNAAVPTSSTASPSVVVSAGEGACGNLALEIWDTRLRRRKPTVVAEWGPTVGKTLRVESGGVQKVYVIDDGRYGVTVGDMRKVSTPLESVTESDADTWWDADAIVVSDESFGEQQSMLQQPT

SEQ ID NO: 58002 - DNA, 1085 bp, Glycine max
  misc_feature (1)..(1085): Ceres Seq. ID no. 14314909
aagtcttttttccttcgtaacatcttttttctctttttcttcccatagcattctgactcatacccaaattatttattgtttgtctacgaaagcagtgaaaaaaaatgacagtggagcttatggggttccccaaaatggaggaacagaaggcaattcaagaagctgcctccgaaggcctcaaggccatggaacacctcctccgtctcctatcctatcaaccctctcacctccacgctcaccacaccgacgccaccgtttccaacttcaaaaaactcatctccttactcagccgccgcaccggccacgcccgtttccgtcgcgcacctctcccttccccgccaccggctaacccggtcaccctccaccaacctccctccaccttcgtcccttcgcactcccagtctctaaccctcgatttcacaaaacctagcattttcgcctccaacgccaaatccatggacctccaattctctaaagaaaccttcagcgtctcctccaactcctccttcatgtcctccgccatcaccggcgacgccagtgtctcttacggcaaactaggatcctccctcttcctcactcctccgccagtctcagccggaaaacctcctctctcctccgctccgatcaagaagaggtgtcacgaccaccgcgaacactccgacgagatctccgggaaactctccggctccagcaagtgccactgcactaagagaaggaagaatcgagtgaagaaaacggtaagagttccggtgatcagttcgaagatcgccgatattccgccggacgagtactcgtggaggaagtacgggcagaagccgatcaagggatcgccgtacccgagggggtattacaagtgcagtagcgttatagggtgtccggcgaggaaacacgtggagcgtgctccggacgatccgacgatgttgattgtgacatatgaaggggagcaccggcactcgatgcaggagaacatttccgggggagtgggtttgggattcgagtcaacgtgagggtggttgcaatgtaaatctgacattattaaaagaaaagattatattacaggggaatcttaatcttctcccgaaaag

SEQ ID NO: 58003 - protein, 300 aa, Glycine max
  peptide (1)..(300): Ceres Seq. ID no. 14314910
  misc_feature (225)..(284): Pfam Name: WRKY DNA -binding domain Pfam Description: WRKY DNA -binding domain
  misc_feature (8)..(284): Homolog of NCBI NO: 4894963 NR Description: DNA-binding protein WRKY3 [Avena sativa]
  misc_feature (47)..(284): Homolog of NCBI NO: 38568048 NR Description: OSJNBa0065J03.18 [Oryza sativa (japonica
  misc_feature (47)..(299): Homolog of NCBI NO: 21537078 NR Description: putaive DNA-binding protein [Arabidopsis thaliana]
  misc_feature (47)..(299): Homolog of NCBI NO: 16604573 NR Description: putative putaive DNA-binding protein [Arabidopsis
  misc_feature (47)..(299): Homolog of NCBI NO: 30689072 NR Description: WRKY family transcription factor [Arabidopsis
  misc_feature (47)..(299): Homolog of NCBI NO: 22329054 NR Description: WRKY family transcription factor [Arabidopsis
  misc_feature (47)..(290): Homolog of NCBI NO: 25348152 NR Description: probable WRKY-type DNA binding protein
  misc_feature (47)..(299): Homolog of NCBI NO: 18400580 NR Description: WRKY family transcription factor [Arabidopsis
  misc_feature (1)..(91): Homolog of NCBI NO: 4760596 NR Description: DNA-binding protein NtWRKY3 [Nicotiana tabacum]
  misc_feature (89)..(288): Homolog of NCBI NO: 4760596 NR Description: DNA-binding protein NtWRKY3 [Nicotiana tabacum]
MTVELMGFPKMEEQKAIQEAASEGLKAMEHLLRLLSYQPSHLHAHHTDATVSNFKKLISLLSRRTGHARFRRAPLPSPPPANPVTLHQPPSTFVPSHSQSLTLDFTKPSIFASNAKSMDLQFSKETFSVSSNSSFMSSAITGDASVSYGKLGSSLFLTPPPVSAGKPPLSSAPIKKRCHDHREHSDEISGKLSGSSKCHCTKRRKNRVKKTVRVPVISSKIADIPPDEYSWRKYGQKPIKGSPYPRGYYKCSSVIGCPARKHVERAPDDPTMLIVTYEGEHRHSMQENISGGVGLGFEST

SEQ ID NO: 58004 - protein, 295 aa, Glycine max
  peptide (1)..(295): Ceres Seq. ID no. 14314911
  misc_feature (220)..(279): Pfam Name: WRKY DNA -binding domain Pfam Description: WRKY DNA -binding domain
  misc_feature (3)..(279): Homolog of NCBI NO: 4894963 NR Description: DNA-binding protein WRKY3 [Avena sativa]
  misc_feature (42)..(279): Homolog of NCBI NO: 38568048 NR Description: OSJNBa0065J03.18 [Oryza sativa (japonica
  misc_feature (42)..(294): Homolog of NCBI NO: 21537078 NR Description: putaive DNA-binding protein [Arabidopsis thaliana]
  misc_feature (42)..(294): Homolog of NCBI NO: 16604573 NR Description: putative putaive DNA-binding protein [Arabidopsis
  misc_feature (42)..(294): Homolog of NCBI NO: 30689072 NR Description: WRKY family transcription factor [Arabidopsis
  misc_feature (42)..(294): Homolog of NCBI NO: 22329054 NR Description: WRKY family transcription factor [Arabidopsis
  misc_feature (42)..(285): Homolog of NCBI NO: 25348152 NR Description: probable WRKY-type DNA binding protein
  misc_feature (42)..(294): Homolog of NCBI NO: 18400580 NR Description: WRKY family transcription factor [Arabidopsis
  misc_feature (1)..(86): Homolog of NCBI NO: 4760596 NR Description: DNA-binding protein NtWRKY3 [Nicotiana tabacum]
  misc_feature (84)..(283): Homolog of NCBI NO: 4760596 NR Description: DNA-binding protein NtWRKY3 [Nicotiana tabacum]
MGFPKMEEQKAIQEAASEGLKAMEHLLRLLSYQPSHLHAHHTDATVSNFKKLISLLSRRTGHARFRRAPLPSPPPANPVTLHQPPSTFVPSHSQSLTLDFTKPSIFASNAKSMDLQFSKETFSVSSNSSFMSSAITGDASVSYGKLGSSLFLTPPPVSAGKPPLSSAPIKKRCHDHREHSDEISGKLSGSSKCHCTKRRKNRVKKTVRVPVISSKIADIPPDEYSWRKYGQKPIKGSPYPRGYYKCSSVIGCPARKHVERAPDDPTMLIVTYEGEHRHSMQENISGGVGLGFEST

SEQ ID NO: 58005 - protein, 290 aa, Glycine max
  peptide (1)..(290): Ceres Seq. ID no. 14314912
  misc_feature (215)..(274): Pfam Name: WRKY DNA -binding domain Pfam Description: WRKY DNA -binding domain
  misc_feature (1)..(274): Homolog of NCBI NO: 4894963 NR Description: DNA-binding protein WRKY3 [Avena sativa]
  misc_feature (37)..(274): Homolog of NCBI NO: 38568048 NR Description: OSJNBa0065J03.18 [Oryza sativa (japonica
  misc_feature (37)..(289): Homolog of NCBI NO: 21537078 NR Description: putaive DNA-binding protein [Arabidopsis thaliana]
  misc_feature (37)..(289): Homolog of NCBI NO: 16604573 NR Description: putative putaive DNA-binding protein [Arabidopsis
  misc_feature (37)..(289): Homolog of NCBI NO: 30689072 NR Description: WRKY family transcription factor [Arabidopsis
  misc_feature (37)..(289): Homolog of NCBI NO: 22329054 NR Description: WRKY family transcription factor [Arabidopsis
  misc_feature (37)..(280): Homolog of NCBI NO: 25348152 NR Description: probable WRKY-type DNA binding protein
  misc_feature (37)..(289): Homolog of NCBI NO: 18400580 NR Description: WRKY family transcription factor [Arabidopsis
  misc_feature (1)..(81): Homolog of NCBI NO: 4760596 NR Description: DNA-binding protein NtWRKY3 [Nicotiana tabacum]
  misc_feature (79)..(278): Homolog of NCBI NO: 4760596 NR Description: DNA-binding protein NtWRKY3 [Nicotiana tabacum]
MEEQKAIQEAASEGLKAMEHLLRLLSYQPSHLHAHHTDATVSNFKKLISLLSRRTGHARFRRAPLPSPPPANPVTLHQPPSTFVPSHSQSLTLDFTKPSIFASNAKSMDLQFSKETFSVSSNSSFMSSAITGDASVSYGKLGSSLFLTPPPVSAGKPPLSSAPIKKRCHDHREHSDEISGKLSGSSKCHCTKRRKNRVKKTVRVPVISSKIADIPPDEYSWRKYGQKPIKGSPYPRGYYKCSSVIGCPARKHVERAPDDPTMLIVTYEGEHRHSMQENISGGVGLGFEST

SEQ ID NO: 58006 - DNA, 1294 bp, Glycine max
  misc_feature (1)..(1294): Ceres Seq. ID no. 13594429
cctagaacatcataatcgaaaaaaatcactgagtctcacaccaaccaacaatcaacaacaagaacttagccacatacatacagaatacagattaataacccaaccacatgccaaacaccactgaagaattccataacaacaactgcttcgagtctctccatgtttcccttcgcaacctctcccaactcagcacccgaatggattcccttcaaagcttcctgtcccattccatccaatcccacactctcctcactcaccaccaaatgagcacagtctccaacgagatcctaaccgccattcgccacgtcatcaccaacagcgccgccctcgtcgccgcctcgggaaacgtgctccctctctcggagactccgactttggactctccgaacctcaacaacaacaacagcaacgacaacgtggtggagctcgacgcgatggagctgctggcgaagcaccttcacttctgcgaggtgtgcgggaaaggcttcacgcgcgacgcgaatctgagaatgcacatgcgcgcgcacggggacgagttcaagaccccggaggcactcgccaacaaggcgcgtggggagacgcgcctcaaggcggcgcggttttcgtgccccttggaggggtgcaaccgtaacaagacgcacaagaagttcaggccgttgaagtcggtgttctgtctgaggaaccacttcaagaggagccactgtcccaaaacgctgtcgtgccagcggtgtcggaagaagagcttcgcggtgctgtcggacttgaggagccacgtcaagcagtgtcggggagaggccacgtggaagtgctcatgcgggactacgttttcgaggaaggacaagctgttgggacacgtggcgctgttcgaggggcattcgccgatgcttgaagaggaggccccagtggcagtggcggtgaaggaaagtgagggtggtttggatgggttacctgaagggttctttgatggtttggatgaatttggatttggatccattcaaaacaactgttcacatgcaggagcaagcttagccttagggcttccctcaaataatttatatgcatgggaactctctttttctaatttaatctagaagctaaataatcaaattcaacactgaaaagtgtcatataatgcaatcaattctttataaatttaatttataaatatattaaaaatgkgatagattagctttwttwtttaaaaaaaaaaaaaaaaaaaaaaaaaaaaaaaaaaaaaaaaaaycmmaaaaaaaaaaaaaaaagsttwttcratmccgycgaccctcgagggggg

SEQ ID NO: 58007 - protein, 327 aa, Glycine max
  peptide (1)..(327): Ceres Seq. ID no. 15221349
  misc_feature (118)..(140): Pfam Name: Zinc finger, C2H2 type Pfam Description: Zinc finger, C2H2 type
  misc_feature (111)..(274): Homolog of NCBI NO: 34908460 NR Description: P0683F02.21 [Oryza sativa (japonica
  misc_feature (23)..(257): Homolog of NCBI NO: 15222242 NR Description: zinc finger protein -related [Arabidopsis
  misc_feature (104)..(263): Homolog of NCBI NO: 28376689 NR Description: putative zinc finger protein
  misc_feature (103)..(259): Homolog of NCBI NO: 38346456 NR Description: OSJNBa0019G23.4 [Oryza sativa (japonica
  misc_feature (103)..(259): Homolog of NCBI NO: 10241636 NR Description: putative zinc finger protein
  misc_feature (88)..(271): Homolog of NCBI NO: 30688719 NR Description: expressed protein [Arabidopsis thaliana]
  misc_feature (88)..(271): Homolog of NCBI NO: 10177236 NR Description: contains similarity to C2H2-type zinc finger
  misc_feature (104)..(275): Homolog of NCBI NO: 34908682 NR Description: putative zinc finger protein
  misc_feature (104)..(298): Homolog of NCBI NO: 21593564 NR Description: zinc finger protein, putative [Arabidopsis
  misc_feature (104)..(298): Homolog of NCBI NO: 15218606 NR Description: zinc finger protein -related [Arabidopsis
MPNTTEEFHNNNCFESLHVSLRNLSQLSTRMDSLQSFLSHSIQSHTLLTHHQMSTVSNEILTAIRHVITNSAALVAASGNVLPLSETPTLDSPNLNNNNSNDNVVELDAMELLAKHLHFCEVCGKGFTRDANLRMHMRAHGDEFKTPEALANKARGETRLKAARFSCPLEGCNRNKTHKKFRPLKSVFCLRNHFKRSHCPKTLSCQRCRKKSFAVLSDLRSHVKQCRGEATWKCSCGTTFSRKDKLLGHVALFEGHSPMLEEEAPVAVAVKESEGGLDGLPEGFFDGLDEFGFGSIQNNCSHAGASLALGLPSNNLYAWELSFSNLI

SEQ ID NO: 58008 - protein, 297 aa, Glycine max
  peptide (1)..(297): Ceres Seq. ID no. 15221350
  misc_feature (88)..(110): Pfam Name: Zinc finger, C2H2 type Pfam Description: Zinc finger, C2H2 type
  misc_feature (81)..(244): Homolog of NCBI NO: 34908460 NR Description: P0683F02.21 [Oryza sativa (japonica
  misc_feature (1)..(227): Homolog of NCBI NO: 15222242 NR Description: zinc finger protein -related [Arabidopsis
  misc_feature (74)..(233): Homolog of NCBI NO: 28376689 NR Description: putative zinc finger protein
  misc_feature (73)..(229): Homolog of NCBI NO: 38346456 NR Description: OSJNBa0019G23.4 [Oryza sativa (japonica
  misc_feature (73)..(229): Homolog of NCBI NO: 10241636 NR Description: putative zinc finger protein
  misc_feature (58)..(241): Homolog of NCBI NO: 30688719 NR Description: expressed protein [Arabidopsis thaliana]
  misc_feature (58)..(241): Homolog of NCBI NO: 10177236 NR Description: contains similarity to C2H2-type zinc finger
  misc_feature (74)..(245): Homolog of NCBI NO: 34908682 NR Description: putative zinc finger protein
  misc_feature (74)..(268): Homolog of NCBI NO: 21593564 NR Description: zinc finger protein, putative [Arabidopsis
  misc_feature (74)..(268): Homolog of NCBI NO: 15218606 NR Description: zinc finger protein -related [Arabidopsis
MDSLQSFLSHSIQSHTLLTHHQMSTVSNEILTAIRHVITNSAALVAASGNVLPLSETPTLDSPNLNNNNSNDNVVELDAMELLAKHLHFCEVCGKGFTRDANLRMHMRAHGDEFKTPEALANKARGETRLKAARFSCPLEGCNRNKTHKKFRPLKSVFCLRNHFKRSHCPKTLSCQRCRKKSFAVLSDLRSHVKQCRGEATWKCSCGTTFSRKDKLLGHVALFEGHSPMLEEEAPVAVAVKESEGGLDGLPEGFFDGLDEFGFGSIQNNCSHAGASLALGLPSNNLYAWELSFSNLI

SEQ ID NO: 58009 - protein, 275 aa, Glycine max
  peptide (1)..(275): Ceres Seq. ID no. 15221351
  misc_feature (66)..(88): Pfam Name: Zinc finger, C2H2 type Pfam Description: Zinc finger, C2H2 type
  misc_feature (59)..(222): Homolog of NCBI NO: 34908460 NR Description: P0683F02.21 [Oryza sativa (japonica
  misc_feature (1)..(205): Homolog of NCBI NO: 15222242 NR Description: zinc finger protein -related [Arabidopsis
  misc_feature (52)..(211): Homolog of NCBI NO: 28376689 NR Description: putative zinc finger protein
  misc_feature (51)..(207): Homolog of NCBI NO: 38346456 NR Description: OSJNBa0019G23.4 [Oryza sativa (japonica
  misc_feature (51)..(207): Homolog of NCBI NO: 10241636 NR Description: putative zinc finger protein
  misc_feature (36)..(219): Homolog of NCBI NO: 30688719 NR Description: expressed protein [Arabidopsis thaliana]
  misc_feature (36)..(219): Homolog of NCBI NO: 10177236 NR Description: contains similarity to C2H2-type zinc finger
  misc_feature (52)..(223): Homolog of NCBI NO: 34908682 NR Description: putative zinc finger protein
  misc_feature (52)..(246): Homolog of NCBI NO: 21593564 NR Description: zinc finger protein, putative [Arabidopsis
  misc_feature (52)..(246): Homolog of NCBI NO: 15218606 NR Description: zinc finger protein -related [Arabidopsis
MSTVSNEILTAIRHVITNSAALVAASGNVLPLSETPTLDSPNLNNNNSNDNVVELDAMELLAKHLHFCEVCGKGFTRDANLRMHMRAHGDEFKTPEALANKARGETRLKAARFSCPLEGCNRNKTHKKFRPLKSVFCLRNHFKRSHCPKTLSCQRCRKKSFAVLSDLRSHVKQCRGEATWKCSCGTTFSRKDKLLGHVALFEGHSPMLEEEAPVAVAVKESEGGLDGLPEGFFDGLDEFGFGSIQNNCSHAGASLALGLPSNNLYAWELSFSNLI

SEQ ID NO: 58010 - DNA, 1061 bp, Glycine max
  misc_feature (1)..(1061): Ceres Seq. ID no. 14314939
aattcaggcgatggcgccgcgtctctggtcctgcttccgcagcagcagtagcaagggcagcaccaccggcggcggtgtctccgacgcctccgcctcgcggcgcgtggtgactgcggacctgacatcggaggagcagaagcgcgggggcccggtggtggtggagatgttctcgtcgcaggggtgcgcgacttcaccggcggcggagctggtgctgtcgcggctggggagaggggatttcgagctggaggcgccggtggtggtgctggctttccacgttgactactgggactatatgggatggaaggatccgttcggggccagccagtggacggttcggcagaaggcctatgttgaggcccttgggcttgacaccattttcacgccacaggttgtggttcagggaaaggcccagtgtgttggaaatgacgagaacgcccttgtttctgccattactagtgctcctaggttccctgctccaaccttccaggcaactttcaccaggcctgcaccagattcattgcaagtgtccctaacaggagcattgaggaccaaggtggacagcgatggcgcgaatgtcatggttgcattatacgaaaacggtttggtcaccgattgtccaagaggggagaacaaagggcgtgtcctatccaacgactatgttgttagaaagctcgaaaagctctgcactgtcaaagacatctctgccaagaaaacagtatcaggaatggttaactttcccttatgggaaggattcaaaagcagcaaatgtggtttggctgtctttgttcagagcaaatctcaccagatttttggttcacagagttttcagctgccggatgatatatgattctgattctttagtttcatttgatctgcttgctgttatcatattcgggttacattgtgttttgttaggctatatgtacagattgtgatatgatttaggataataaatgttgttttctttcttttcttacatattttttcctatgtactttgtccttccttactattgaccctatgtttaggagatggagagagaagtctaaatttgtggcgtg

SEQ ID NO: 58011 - protein, 281 aa, Glycine max
  peptide (1)..(281): Ceres Seq. ID no. 14314940
  misc_feature (45)..(225): Homolog of NCBI NO: 22959698 NR Description: hypothetical protein [Rhodobacter sphaeroides]
  misc_feature (40)..(216): Homolog of NCBI NO: 15889939 NR Description: AGR_C_4864p [Agrobacterium tumefaciens]
  misc_feature (50)..(222): Homolog of NCBI NO: 23014426 NR Description: hypothetical protein [Magnetospirillum
  misc_feature (35)..(227): Homolog of NCBI NO: 22962198 NR Description: hypothetical protein [Rhodopseudomonas palustris]
  misc_feature (209)..(281): Homolog of NCBI NO: 28393652 NR Description: unknown protein [Arabidopsis thaliana]
  misc_feature (4)..(281): Homolog of NCBI NO: 34394018 NR Description: membrane lipoprotein lipid attachment
  misc_feature (4)..(281): Homolog of NCBI NO: 13265463 NR Description: AT4g27350 [Arabidopsis thaliana]
  misc_feature (4)..(281): Homolog of NCBI NO: 21593063 NR Description: unknown [Arabidopsis thaliana]
  misc_feature (4)..(281): Homolog of NCBI NO: 15234089 NR Description: membrane lipo protein lipid attachment
  misc_feature (4)..(281): Homolog of NCBI NO: 15239579 NR Description: expressed protein [Arabidopsis thaliana]
IQAMAPRLWSCFRSSSSKGSTTGGGVSDASASRRVVTADLTSEEQKRGGPVVVEMFSSQGCATSPAAELVLSRLGRGDFELEAPVVVLAFHVDYWDYMGWKDPFGASQWTVRQKAYVEALGLDTIFTPQVVVQGKAQCVGNDENALVSAITSAPRFPAPTFQATFTRPAPDSLQVSLTGALRTKVDSDGANVMVALYENGLVTDCPRGENKGRVLSNDYVVRKLEKLCTVKDISAKKTVSGMVNFPLWEGFKSSKCGLAVFVQSKSHQIFGSQSFQLPDDI

SEQ ID NO: 58012 - protein, 278 aa, Glycine max
  peptide (1)..(278): Ceres Seq. ID no. 14314941
  misc_feature (42)..(222): Homolog of NCBI NO: 22959698 NR Description: hypothetical protein [Rhodobacter sphaeroides]
  misc_feature (37)..(213): Homolog of NCBI NO: 15889939 NR Description: AGR_C_4864p [Agrobacterium tumefaciens]
  misc_feature (47)..(219): Homolog of NCBI NO: 23014426 NR Description: hypothetical protein [Magnetospirillum
  misc_feature (32)..(224): Homolog of NCBI NO: 22962198 NR Description: hypothetical protein [Rhodopseudomonas palustris]
  misc_feature (206)..(278): Homolog of NCBI NO: 28393652 NR Description: unknown protein [Arabidopsis thaliana]
  misc_feature (1)..(278): Homolog of NCBI NO: 34394018 NR Description: membrane lipoprotein lipid attachment
  misc_feature (1)..(278): Homolog of NCBI NO: 13265463 NR Description: AT4g27350 [Arabidopsis thaliana]
  misc_feature (1)..(278): Homolog of NCBI NO: 21593063 NR Description: unknown [Arabidopsis thaliana]
  misc_feature (1)..(278): Homolog of NCBI NO: 15234089 NR Description: membrane lipo protein lipid attachment
  misc_feature (1)..(278): Homolog of NCBI NO: 15239579 NR Description: expressed protein [Arabidopsis thaliana]
MAPRLWSCFRSSSSKGSTTGGGVSDASASRRVVTADLTSEEQKRGGPVVVEMFSSQGCATSPAAELVLSRLGRGDFELEAPVVVLAFHVDYWDYMGWKDPFGASQWTVRQKAYVEALGLDTIFTPQVVVQGKAQCVGNDENALVSAITSAPRFPAPTFQATFTRPAPDSLQVSLTGALRTKVDSDGANVMVALYENGLVTDCPRGENKGRVLSNDYVVRKLEKLCTVKDISAKKTVSGMVNFPLWEGFKSSKCGLAVFVQSKSHQIFGSQSFQLPDDI

SEQ ID NO: 58013 - protein, 227 aa, Glycine max
  peptide (1)..(227): Ceres Seq. ID no. 14314942
  misc_feature (1)..(171): Homolog of NCBI NO: 22959698 NR Description: hypothetical protein [Rhodobacter sphaeroides]
  misc_feature (1)..(162): Homolog of NCBI NO: 15889939 NR Description: AGR_C_4864p [Agrobacterium tumefaciens]
  misc_feature (1)..(168): Homolog of NCBI NO: 23014426 NR Description: hypothetical protein [Magnetospirillum
  misc_feature (1)..(173): Homolog of NCBI NO: 22962198 NR Description: hypothetical protein [Rhodopseudomonas palustris]
  misc_feature (155)..(227): Homolog of NCBI NO: 28393652 NR Description: unknown protein [Arabidopsis thaliana]
  misc_feature (1)..(227): Homolog of NCBI NO: 34394018 NR Description: membrane lipoprotein lipid attachment
  misc_feature (1)..(227): Homolog of NCBI NO: 13265463 NR Description: AT4g27350 [Arabidopsis thaliana]
  misc_feature (1)..(227): Homolog of NCBI NO: 21593063 NR Description: unknown [Arabidopsis thaliana]
  misc_feature (1)..(227): Homolog of NCBI NO: 15234089 NR Description: membrane lipo protein lipid attachment
  misc_feature (1)..(227): Homolog of NCBI NO: 15239579 NR Description: expressed protein [Arabidopsis thaliana]
MFSSQGCATSPAAELVLSRLGRGDFELEAPVVVLAFHVDYWDYMGWKDPFGASQWTVRQKAYVEALGLDTIFTPQVVVQGKAQCVGNDENALVSAITSAPRFPAPTFQATFTRPAPDSLQVSLTGALRTKVDSDGANVMVALYENGLVTDCPRGENKGRVLSNDYVVRKLEKLCTVKDISAKKTVSGMVNFPLWEGFKSSKCGLAVFVQSKSHQIFGSQSFQLPDDI

SEQ ID NO: 58014 - DNA, 1624 bp, Glycine max
  misc_feature (1)..(1624): Ceres Seq. ID no. 15225233
ttctgtcagtttaagactttattgtatagtnatacctattgggtagttaagatttatttctaaaacatctgataggtgtggattacttatattggagcgaagctggattctagcctcgcaaaatctgaaacatcaccctctgacttcacaagattaaaagattcaaagatttgcgaggtagcctctcatgcttgtttctactccattttaatggaaataaatcctcgaactttcagccgagttctttaggataagaggctaaatattcgatcacatgtactagtatatgttatccatattttaaggcaatgctcaaattgattattagattaattcaaagttagtaacttactataaaaaaaaaaaaaaaagctaacgttttaatttgtgggctgagcctggtttttctgggtacaaggccagaacccaacttgtagaaattcaagccaccactcatgatttttacatgagagggctatctgaaaatcgcattgataagaaagtttaatgatggaagcgggaactgctctcagtctccgactccacactcgcattcccattcccatcaacactgccaattcaaataccttattattccaacctcgcttcactctttcatctcattctccttcttccttttccgcttacagttacagaggccccacaccaaaacgccccttcctcgccgactgggtctcccaaaacgacgacgtcgttcgcaccctcccaatctacgtcggctctgcctccctcttcgccatcctcctaaaccgctccctgtccggcatcgcccccgtcgtcgacgccggcagttcgcagtcccgagctgacctcttgactttgggattggccgttaccaatattttggcaggcctcgtttggctttcagtaaaacctaaatctattactgtggtaaatcctcgaggagttgaatgcaagagtttgtgcgctacactccctgaagttgcacgtaatgagttgctttgggtgtgggaatctctatcagatgccacttgttgtcgttcacttgttgttgtttatgagagcagttgtgtactccaaattggttttgcagcagaatcttctcctggggatggtgacgctgtaagtgtggatgccaataaattgatgcaaggatcagtataccagggggttatgaaatctggtgctcagagttacttggctaatctatctctttatcctgggaaatctgagctgccatttctaccttcaaatacacaggcagtaattttacaaccacttggagataaagggattgcaattattggtggtgacacgatacgaggtttcactggttctgatcaggtgtggattacttatattggagcgaagctggattctagccttgcaaaatatctgaaacatcaccctctgacttcacaagattaaaagattcaaagatttgcgaggtagcctctcatgcttgtttctactccattttaatggaaataaatcctcgaactttcagccgagttctttaggataagaggctaaatattcgatcacatgtactagtatatgttatccatattttaaggcaatgctcaaattgattattagattaattcaaagttagtaacttactataaaaaaaaaaaaaaaa

SEQ ID NO: 58015 - protein, 300 aa, Glycine max
  peptide (1)..(300): Ceres Seq. ID no. 15225234
  misc_feature (85)..(287): Homolog of NCBI NO: 33865754 NR Description: conserved hypothetical protein [Synechococcus sp.
  misc_feature (91)..(287): Homolog of NCBI NO: 37523882 NR Description: hypothetical protein gll4313 [Gloeobacter
  misc_feature (103)..(289): Homolog of NCBI NO: 22298227 NR Description: ORF_ID:tll0685~hypothetical protein
  misc_feature (102)..(291): Homolog of NCBI NO: 23039835 NR Description: hypothetical protein [Trichodesmium erythraeum
  misc_feature (77)..(288): Homolog of NCBI NO: 16331001 NR Description: unknown protein [Synechocystis sp. PCC 6803]
  misc_feature (103)..(288): Homolog of NCBI NO: 23127716 NR Description: hypothetical protein [Nostoc punctiforme]
  misc_feature (102)..(287): Homolog of NCBI NO: 17231313 NR Description: hypothetical protein [Nostoc sp. PCC 7120]
  misc_feature (28)..(289): Homolog of NCBI NO: 38345907 NR Description: OSJNBb0059K02.12 [Oryza sativa (japonica
  misc_feature (2)..(290): Homolog of NCBI NO: 15218930 NR Description: expressed protein [Arabidopsis thaliana]
  misc_feature (2)..(290): Homolog of NCBI NO: 34146872 NR Description: At1g59840 [Arabidopsis thaliana]
MMEAGTALSLRLHTRIPIPINTANSNTLLFQPRFTLSSHSPSSFSAYSYRGPTPKRPFLADWVSQNDDVVRTLPIYVGSASLFAILLNRSLSGIAPVVDAGSSQSRADLLTLGLAVTNILAGLVWLSVKPKSITVVNPRGVECKSLCATLPEVARNELLWVWESLSDATCCRSLVVVYESSCVLQIGFAAESSPGDGDAVSVDANKLMQGSVYQGVMKSGAQSYLANLSLYPGKSELPFLPSNTQAVILQPLGDKGIAIIGGDTIRGFTGSDQVWITYIGAKLDSSLAKYLKHHPLTSQD

SEQ ID NO: 58016 - protein, 299 aa, Glycine max
  peptide (1)..(299): Ceres Seq. ID no. 15225235
  misc_feature (84)..(286): Homolog of NCBI NO: 33865754 NR Description: conserved hypothetical protein [Synechococcus sp.
  misc_feature (90)..(286): Homolog of NCBI NO: 37523882 NR Description: hypothetical protein gll4313 [Gloeobacter
  misc_feature (102)..(288): Homolog of NCBI NO: 22298227 NR Description: ORF_ID:tll0685~hypothetical protein
  misc_feature (101)..(290): Homolog of NCBI NO: 23039835 NR Description: hypothetical protein [Trichodesmium erythraeum
  misc_feature (76)..(287): Homolog of NCBI NO: 16331001 NR Description: unknown protein [Synechocystis sp. PCC 6803]
  misc_feature (102)..(287): Homolog of NCBI NO: 23127716 NR Description: hypothetical protein [Nostoc punctiforme]
  misc_feature (101)..(286): Homolog of NCBI NO: 17231313 NR Description: hypothetical protein [Nostoc sp. PCC 7120]
  misc_feature (27)..(288): Homolog of NCBI NO: 38345907 NR Description: OSJNBb0059K02.12 [Oryza sativa (japonica
  misc_feature (1)..(289): Homolog of NCBI NO: 15218930 NR Description: expressed protein [Arabidopsis thaliana]
  misc_feature (1)..(289): Homolog of NCBI NO: 34146872 NR Description: At1g59840 [Arabidopsis thaliana]
MEAGTALSLRLHTRIPIPINTANSNTLLFQPRFTLSSHSPSSFSAYSYRGPTPKRPFLADWVSQNDDVVRTLPIYVGSASLFAILLNRSLSGIAPVVDAGSSQSRADLLTLGLAVTNILAGLVWLSVKPKSITVVNPRGVECKSLCATLPEVARNELLWVWESLSDATCCRSLVVVYESSCVLQIGFAAESSPGDGDAVSVDANKLMQGSVYQGVMKSGAQSYLANLSLYPGKSELPFLPSNTQAVILQPLGDKGIAIIGGDTIRGFTGSDQVWITYIGAKLDSSLAKYLKHHPLTSQD

SEQ ID NO: 58017 - DNA, 848 bp, Glycine max
  misc_feature (1)..(848): Ceres Seq. ID no. 12608406
gtgacaatctttcttagctagatcagtgcctcatttttctttcagttttcctgcttcttctcttcttcaactggttttgagattgccattttcttatcttgtttagtttagcttgtttggttgagaggaattaattattttgtataaaacaatgaaggagagtgtaggaaaccctttgcgtcttcaatctgtgaatcatatctccctcatatgcagatcagtggaacaatcaatggatttctatcagaacgttcttggattttaccccatcaggaggcctggctctttagattttgatggggcatggctattcggctacggaattggaattcatttgctagaagcagagaaccctgaaaagttgccaaagaagaaggaaattaatccaaaggataatcatatatctttccagtgtgagagcatggttgcagtggagaagaagctgaaagaaatggaaattgactatgtgcgagcaacggtggaggaaggtggaatccaagtggatcaactgtttttccacgaccctgatgggttcatgatcgagatatgcaactgtgatagcctccctgtgattcccttagttggtgaggtggcaagatcatgttcccttgtgaatcttgagaagatgcagaatcagcagcagatacagaaaatgctccagcaactttgatgagccttttctgttatgttatgtgatcagagcatcctcacggatcacgaggacttgttgcttttttttttatgtggttgagttgtcaatgtgtcattctgttccttttgttttgttttctttaattgtgttatataataataaacaatctgccaaatagatcagcgcttttgcaacc

SEQ ID NO: 58018 - protein, 172 aa, Glycine max
  peptide (1)..(172): Ceres Seq. ID no. 12608407
  misc_feature (1)..(131): Homolog of NCBI NO: 33146737 NR Description: unknown protein [Oryza sativa (japonica
  misc_feature (4)..(144): Homolog of NCBI NO: 21740426 NR Description: OSJNBa0091D06.24 [Oryza sativa (japonica
  misc_feature (11)..(149): Homolog of NCBI NO: 34899038 NR Description: hypothetical protein~similar to Arabidopsis
  misc_feature (11)..(149): Homolog of NCBI NO: 34395261 NR Description: glyoxalase family-like protein
  misc_feature (11)..(142): Homolog of NCBI NO: 15529260 NR Description: At2g28420/T1B3.6 [Arabidopsis thaliana]
  misc_feature (11)..(142): Homolog of NCBI NO: 18401734 NR Description: expressed protein
  misc_feature (6)..(150): Homolog of NCBI NO: 34910246 NR Description: OSJNBa0089K24.9 [Oryza sativa (japonica
  misc_feature (1)..(166): Homolog of NCBI NO: 18394235 NR Description: expressed protein
  misc_feature (1)..(165): Homolog of NCBI NO: 25406639 NR Description: hypothetical protein F18B13.24 [imported] -
  misc_feature (1)..(165): Homolog of NCBI NO: 18412683 NR Description: expressed protein
MKESVGNPLRLQSVNHISLICRSVEQSMDFYQNVLGFYPIRRPGSLDFDGAWLFGYGIGIHLLEAENPEKLPKKKEINPKDNHISFQCESMVAVEKKLKEMEIDYVRATVEEGGIQVDQLFFHDPDGFMIEICNCDSLPVIPLVGEVARSCSLVNLEKMQNQQQIQKMLQQL

SEQ ID NO: 58019 - protein, 145 aa, Glycine max
  peptide (1)..(145): Ceres Seq. ID no. 12608408
  misc_feature (1)..(104): Homolog of NCBI NO: 33146737 NR Description: unknown protein [Oryza sativa (japonica
  misc_feature (1)..(117): Homolog of NCBI NO: 21740426 NR Description: OSJNBa0091D06.24 [Oryza sativa (japonica
  misc_feature (1)..(122): Homolog of NCBI NO: 34899038 NR Description: hypothetical protein~similar to Arabidopsis
  misc_feature (1)..(122): Homolog of NCBI NO: 34395261 NR Description: glyoxalase family-like protein
  misc_feature (1)..(115): Homolog of NCBI NO: 15529260 NR Description: At2g28420/T1B3.6 [Arabidopsis thaliana]
  misc_feature (1)..(115): Homolog of NCBI NO: 18401734 NR Description: expressed protein
  misc_feature (1)..(123): Homolog of NCBI NO: 34910246 NR Description: OSJNBa0089K24.9 [Oryza sativa (japonica
  misc_feature (1)..(139): Homolog of NCBI NO: 18394235 NR Description: expressed protein
  misc_feature (1)..(138): Homolog of NCBI NO: 25406639 NR Description: hypothetical protein F18B13.24 [imported] -
  misc_feature (1)..(138): Homolog of NCBI NO: 18412683 NR Description: expressed protein
MDFYQNVLGFYPIRRPGSLDFDGAWLFGYGIGIHLLEAENPEKLPKKKEINPKDNHISFQCESMVAVEKKLKEMEIDYVRATVEEGGIQVDQLFFHDPDGFMIEICNCDSLPVIPLVGEVARSCSLVNLEKMQNQQQIQKMLQQL

SEQ ID NO: 58020 - DNA, 752 bp, Glycine max
  misc_feature (1)..(752): Ceres Seq. ID no. 15172839
actcaatacaaacgaaattggtacaaaacaaaatgctactgtttctccggctgatgatgcagttgttgtgatgcgtcaaagcactgctccaactgctcgataattattctcgctgttaccgccagcaactgcttcttttgttagatctcaaagactgagttagtggttggaaaaggtttaattaacaagatgtgcaaaagaaagtgtccaggtcgagaattgaagctgccaagcaggcccacatcggcggagttatcatcgtcgacatcatcaggtgagtggccggaattatcatcgtcatcgtctgcatcttcggtatcatgtacatcaaagatgccgaaggagtcagaagaagagaacgagcaacgtgaaaattctactccagaaacaaaggccatggatctcgttggttgtcctcgatgcttcatgtacgtcatgttatccgaggtggatccaaagtgccctaagtgcaagaccacagtgtttcttgaacttttcaaagatgaaaacttgaagactaacagttgagttatggggagaattatgggaattaaataaataaaatcctcgtggttttaggacgtttgtttgtttgtgcttattttgtttgtaaaatctgaagcttcatatcttgttgagagtgaagtaaagattatgggagctagtatatggtagtgtaacgcgatgccacactatatgggtacggaacgaggaatcgtggtagtaataagatgcgcctattttttttcttt

SEQ ID NO: 58021 - protein, 112 aa, Glycine max
  peptide (1)..(112): Ceres Seq. ID no. 15172840
  misc_feature (32)..(107): Homolog of NCBI NO: 34908532 NR Description: P0423B08.15 [Oryza sativa (japonica
  misc_feature (3)..(112): Homolog of NCBI NO: 32479729 NR Description: OJ991214_12.5 [Oryza sativa (japonica
  misc_feature (7)..(107): Homolog of NCBI NO: 18399295 NR Description: expressed protein [Arabidopsis thaliana]
  misc_feature (4)..(112): Homolog of NCBI NO: 15239988 NR Description: B-type cyclin -related [Arabidopsis thaliana]
MCKRKCPGRELKLPSRPTSAELSSSTSSGEWPELSSSSSASSVSCTSKMPKESEEENEQRENSTPETKAMDLVGCPRCFMYVMLSEVDPKCPKCKTTVFLELFKDENLKTNS

SEQ ID NO: 58022 - protein, 64 aa, Glycine max
  peptide (1)..(64): Ceres Seq. ID no. 15172841
  misc_feature (1)..(59): Homolog of NCBI NO: 34908532 NR Description: P0423B08.15 [Oryza sativa (japonica
  misc_feature (1)..(64): Homolog of NCBI NO: 32479729 NR Description: OJ991214_12.5 [Oryza sativa (japonica
  misc_feature (1)..(59): Homolog of NCBI NO: 18399295 NR Description: expressed protein [Arabidopsis thaliana]
  misc_feature (1)..(64): Homolog of NCBI NO: 15239988 NR Description: B-type cyclin -related [Arabidopsis thaliana]
MPKESEEENEQRENSTPETKAMDLVGCPRCFMYVMLSEVDPKCPKCKTTVFLELFKDENLKTNS

SEQ ID NO: 58023 - DNA, 524 bp, Glycine max
  misc_feature (1)..(524): Ceres Seq. ID no. 15172842
aaaaacaaacaagggaatagaaagaaaagcgcaatgttgttacttgttgaaatcgaaaaagtaaagtgtttccattgaatcaatggggttatgggaggccttcggcaattggttacgcagctgatcatgacaatttatctgtctctaaatgaacttcatgacttgttgagcaaaccttctttaagtgggattcctatgcttattttgggtaataagattgacaaacctggggcattgtctaagcaagacctgacagagcagatgggactgaaatgcatcaatggtagagacgtttgttgcttcatgatctcctgtaaaaactccatcaacattgatacagttattgattggcttgtaaaacattctaaatggatgaactgaagcttgagttctgccctattgatctatttgtatgttgtattacagatgaacctagctgattgaacttctgttggtgtgatactagtttttcttttcccttttttgactagcttacaccaaaccagacaacatgtgatttgata

SEQ ID NO: 58024 - protein, 96 aa, Glycine max
  peptide (1)..(96): Ceres Seq. ID no. 15172843
  misc_feature (17)..(92): Pfam Name: ADP-ribosylation factor family Pfam Description: ADP-ribosylation factor family
  misc_feature (15)..(93): Homolog of NCBI NO: 20270343 NR Description: hypothetical protein BC015408 [Homo sapiens]
  misc_feature (17)..(96): Homolog of NCBI NO: 15229626 NR Description: ADP-ribosylation factor, putative [Arabidopsis
  misc_feature (23)..(96): Homolog of NCBI NO: 40641591 NR Description: putative ADP-rybosylation factor-like protein
  misc_feature (14)..(93): Homolog of NCBI NO: 18421676 NR Description: ADP-ribosylation factor, putative [Arabidopsis
  misc_feature (14)..(93): Homolog of NCBI NO: 9757978 NR Description: ADP-ribosylation factor-like protein [Arabidopsis
  misc_feature (59)..(96): Homolog of NCBI NO: 11274625 NR Description: ADP-ribosylation factor-like protein T16K5.220 -
  misc_feature (17)..(58): Homolog of NCBI NO: 11274625 NR Description: ADP-ribosylation factor-like protein T16K5.220 -
  misc_feature (17)..(96): Homolog of NCBI NO: 22331720 NR Description: ADP-ribosylation factor, putative [Arabidopsis
  misc_feature (17)..(96): Homolog of NCBI NO: 18425204 NR Description: ADP-ribosylation factor, putative [Arabidopsis
  misc_feature (17)..(96): Homolog of NCBI NO: 9757877 NR Description: ADP-ribosylation factor-like protein [Arabidopsis
MGGLRQLVTQLIMTIYLSLNELHDLLSKPSLSGIPMLILGNKIDKPGALSKQDLTEQMGLKCINGRDVCCFMISCKNSINIDTVIDWLVKHSKWMN

SEQ ID NO: 58025 - protein, 84 aa, Glycine max
  peptide (1)..(84): Ceres Seq. ID no. 15172844
  misc_feature (5)..(80): Pfam Name: ADP-ribosylation factor family Pfam Description: ADP-ribosylation factor family
  misc_feature (3)..(81): Homolog of NCBI NO: 20270343 NR Description: hypothetical protein BC015408 [Homo sapiens]
  misc_feature (5)..(84): Homolog of NCBI NO: 15229626 NR Description: ADP-ribosylation factor, putative [Arabidopsis
  misc_feature (11)..(84): Homolog of NCBI NO: 40641591 NR Description: putative ADP-rybosylation factor-like protein
  misc_feature (2)..(81): Homolog of NCBI NO: 18421676 NR Description: ADP-ribosylation factor, putative [Arabidopsis
  misc_feature (2)..(81): Homolog of NCBI NO: 9757978 NR Description: ADP-ribosylation factor-like protein [Arabidopsis
  misc_feature (47)..(84): Homolog of NCBI NO: 11274625 NR Description: ADP-ribosylation factor-like protein T16K5.220 -
  misc_feature (5)..(46): Homolog of NCBI NO: 11274625 NR Description: ADP-ribosylation factor-like protein T16K5.220 -
  misc_feature (5)..(84): Homolog of NCBI NO: 22331720 NR Description: ADP-ribosylation factor, putative [Arabidopsis
  misc_feature (5)..(84): Homolog of NCBI NO: 18425204 NR Description: ADP-ribosylation factor, putative [Arabidopsis
  misc_feature (5)..(84): Homolog of NCBI NO: 9757877 NR Description: ADP-ribosylation factor-like protein [Arabidopsis
MTIYLSLNELHDLLSKPSLSGIPMLILGNKIDKPGALSKQDLTEQMGLKCINGRDVCCFMISCKNSINIDTVIDWLVKHSKWMN

SEQ ID NO: 58026 - protein, 61 aa, Glycine max
  peptide (1)..(61): Ceres Seq. ID no. 15172845
  misc_feature (1)..(57): Pfam Name: ADP-ribosylation factor family Pfam Description: ADP-ribosylation factor family
  misc_feature (1)..(58): Homolog of NCBI NO: 20270343 NR Description: hypothetical protein BC015408 [Homo sapiens]
  misc_feature (1)..(61): Homolog of NCBI NO: 15229626 NR Description: ADP-ribosylation factor, putative [Arabidopsis
  misc_feature (1)..(61): Homolog of NCBI NO: 40641591 NR Description: putative ADP-rybosylation factor-like protein
  misc_feature (1)..(58): Homolog of NCBI NO: 18421676 NR Description: ADP-ribosylation factor, putative [Arabidopsis
  misc_feature (1)..(58): Homolog of NCBI NO: 9757978 NR Description: ADP-ribosylation factor-like protein [Arabidopsis
  misc_feature (24)..(61): Homolog of NCBI NO: 11274625 NR Description: ADP-ribosylation factor-like protein T16K5.220 -
  misc_feature (1)..(23): Homolog of NCBI NO: 11274625 NR Description: ADP-ribosylation factor-like protein T16K5.220 -
  misc_feature (1)..(61): Homolog of NCBI NO: 22331720 NR Description: ADP-ribosylation factor, putative [Arabidopsis
  misc_feature (1)..(61): Homolog of NCBI NO: 18425204 NR Description: ADP-ribosylation factor, putative [Arabidopsis
  misc_feature (1)..(61): Homolog of NCBI NO: 9757877 NR Description: ADP-ribosylation factor-like protein [Arabidopsis
MLILGNKIDKPGALSKQDLTEQMGLKCINGRDVCCFMISCKNSINIDTVIDWLVKHSKWMN

SEQ ID NO: 58027 - DNA, 532 bp, Glycine max
  misc_feature (1)..(532): Ceres Seq. ID no. 15172614
caagttctgtatttccttctcttttccaattgtttgagcgtgaatttttgcgttaatgaagtctgaaacctatgataaggggatatctgttgatgactggaaaatactggtaaagtggtaataggcaaagaagtgaagaatcacaattggtttggaggcccatcgcattgaggcaagtagaaaattgacccgcccaagtggagattcaagtcgggtaccgaacgtgcgactataaagggaatgaacgtggacaccccacgctttcttcacggcaacagaagaataatcaaatttctcagatctatccgacgtcgtcgcagatccaccaaccgttatggctgccttcagcggtgatgaaacggctccgtttttcggcttccttggagccgcagctgccctcgtcttctcctgtactccttccactctcttcaattcccccaatcacttccattagatccgtatttaccgtttcattatttatgtaatccgttcctaaaattgacttttaatccaatttcatgttccactgccc

SEQ ID NO: 58028 - protein, 43 aa, Glycine max
  peptide (1)..(43): Ceres Seq. ID no. 15172615
MKRLRFSASLEPQLPSSSPVLLPLSSIPPITSIRSVFTVSLFM

SEQ ID NO: 58029 - protein, 39 aa, Glycine max
  peptide (1)..(39): Ceres Seq. ID no. 15172616
  misc_feature (2)..(26): Homolog of NCBI NO: 4519260 NR Description: vacuolar H+-ATPase c subunit [Citrus unshiu]
  misc_feature (1)..(26): Homolog of NCBI NO: 6164957 NR Description: vacuolar H+-ATP synthase 16kDa proteolipid
  misc_feature (1)..(26): Homolog of NCBI NO: 30144705 NR Description: vacuolar H(+)-ATPase subunit c [Suaeda maritima
  misc_feature (1)..(26): Homolog of NCBI NO: 15227232 NR Description: H+-pumping ATPase 16 kDa proteolipid, vacuolar
  misc_feature (1)..(26): Homolog of NCBI NO: 3334413 NR Description: Vacuolar ATP synthase 16 kDa proteolipid subunit
MAAFSGDETAPFFGFLGAAAALVFSCTPSTLFNSPNHFH

SEQ ID NO: 58030 - protein, 37 aa, Glycine max
  peptide (1)..(37): Ceres Seq. ID no. 15172617
MNVDTPRFLHGNRRIIKFLRSIRRRRRSTNRYGCLQR

SEQ ID NO: 58031 - DNA, 1614 bp, Glycine max
  misc_feature (1)..(1614): Ceres Seq. ID no. 14314945
agagaaagaagaagacattctcagttgtgttgtctgacaaaacgaacagcaattgggagcagatgcaagatccatcttcaaaccctaattccaatccaaatcccaatcctcacaatgccaatgccgcatcccagctaccgcgtccaccgccggccaccaccgccggcgccggcgcctcctcgtcctcgctgttcgcgcgctccggcgggcctcaccaccggcgagcccattcggaagtgagtttccggctgccggacgacatgatggacctctcgccgtcggatccgttcgccggcgggtcgtcgacggccagcatggaggagatcggatcggaggacgacctgttctcgacgtacattgacgtggacaagctcggcggcgcaaacgggtcgggcgcctccggaaacggagcggatccgaccggcgaaaccgagaagagtccggcgaggccgcgacaccggcacagtagctccgtcgatttcggggaaattatggatgcgaagaaagctatgcctcctgataagttagctgagctatggacaattgatcccaagcgtgctaagagaatacttgcaaatcggcaatctgctgctcgatcgaaggagagaaaagcgcgctacatacaagaacttgagcgcaaggttcagactcttcagacggaagccacaactctttctgcccaattgaccttataccagagggacacaacaggactgagtactgaaaatacagagctaaagctccgtttgcaagccatggagcaacaagcacaacttcgtgacgctcttaatgaagcattgaagaaggaagttgagaggcttaaggttgctactggtgagatgatgagccacactgattcctttaatctgggaatgcacctgatgccattttccggatcaaatttcgttccaatcccgccacaatcaggtccttctggtcaccaaaacatgcagatgccaccatttggtctcaccccatccacaatgccaagccatctactgcatcaaacaagttctcatccatattcagaaatattgcaaaatgaccagcttggtcgtttccaggggcttgacattagtagcaaaggatcaactctcgtgaagtctgaaggcccctcactctccgcaagtgagagtagcactacattttgaatttgacagaaaatgcttgacctgctgacttatccatgccattcattgttcatagggttgacatttagtcaactaatgaaggtaccttatttcatgattcaaatttgaggattaattttaactatttattctaagggggtgctcaccaaaaaggggaagcacccatggggttttgttgcaaagttcacgtaatcatgtttcagcatggcatttggtgtttctgggagctggaatattgggaatgaaaggtcattcccattgtatctttgtatttgtatcatcgtttacgtgatagcatgtaaactgtgtgatttattgttgtgtttcactacattcagagtccaagacggactctttttctttctttctataattacttagtttcaggtttattcatagtcgttgtacaatgcaagagttttgggtactccgtacgtgttgtattaagcttcttccgagatcg

SEQ ID NO: 58032 - protein, 382 aa, Glycine max
  peptide (1)..(382): Ceres Seq. ID no. 14314946
  misc_feature (181)..(244): Pfam Name: bZIP transcription factor Pfam Description: bZIP transcription factor
  misc_feature (138)..(378): Homolog of NCBI NO: 21740783 NR Description: OSJNBa0067K08.2 [Oryza sativa (japonica
  misc_feature (131)..(340): Homolog of NCBI NO: 2921823 NR Description: shoot-forming PKSF1 [Paulownia kawakamii]
  misc_feature (27)..(343): Homolog of NCBI NO: 7489564 NR Description: probable transcription activator RF2a - rice
  misc_feature (48)..(287): Homolog of NCBI NO: 17065884 NR Description: AtbZIP transcription factor [Arabidopsis thaliana]
  misc_feature (125)..(382): Homolog of NCBI NO: 34394739 NR Description: putative transcription activator RF2a
  misc_feature (21)..(342): Homolog of NCBI NO: 25453519 NR Description: b-Zip DNA binding protein [imported] -
  misc_feature (21)..(342): Homolog of NCBI NO: 15226727 NR Description: bZip DNA binding protein [Arabidopsis thaliana]
  misc_feature (48)..(376): Homolog of NCBI NO: 25406943 NR Description: hypothetical protein [imported] - Arabidopsis
  misc_feature (48)..(382): Homolog of NCBI NO: 15222213 NR Description: bZIP protein [Arabidopsis thaliana]
  misc_feature (69)..(382): Homolog of NCBI NO: 39579226 NR Description: bZIP transcription factor RF2b
RKKKTFSVVLSDKTNSNWEQMQDPSSNPNSNPNPNPHNANAASQLPRPPPATTAGAGASSSSLFARSGGPHHRRAHSEVSFRLPDDMMDLSPSDPFAGGSSTASMEEIGSEDDLFSTYIDVDKLGGANGSGASGNGADPTGETEKSPARPRHRHSSSVDFGEIMDAKKAMPPDKLAELWTIDPKRAKRILANRQSAARSKERKARYIQELERKVQTLQTEATTLSAQLTLYQRDTTGLSTENTELKLRLQAMEQQAQLRDALNEALKKEVERLKVATGEMMSHTDSFNLGMHLMPFSGSNFVPIPPQSGPSGHQNMQMPPFGLTPSTMPSHLLHQTSSHPYSEILQNDQLGRFQGLDISSKGSTLVKSEGPSLSASESSTTF

SEQ ID NO: 58033 - protein, 362 aa, Glycine max
  peptide (1)..(362): Ceres Seq. ID no. 14314947
  misc_feature (161)..(224): Pfam Name: bZIP transcription factor Pfam Description: bZIP transcription factor
  misc_feature (118)..(358): Homolog of NCBI NO: 21740783 NR Description: OSJNBa0067K08.2 [Oryza sativa (japonica
  misc_feature (111)..(320): Homolog of NCBI NO: 2921823 NR Description: shoot-forming PKSF1 [Paulownia kawakamii]
  misc_feature (7)..(323): Homolog of NCBI NO: 7489564 NR Description: probable transcription activator RF2a - rice
  misc_feature (28)..(267): Homolog of NCBI NO: 17065884 NR Description: AtbZIP transcription factor [Arabidopsis thaliana]
  misc_feature (105)..(362): Homolog of NCBI NO: 34394739 NR Description: putative transcription activator RF2a
  misc_feature (1)..(322): Homolog of NCBI NO: 25453519 NR Description: b-Zip DNA binding protein [imported] -
  misc_feature (1)..(322): Homolog of NCBI NO: 15226727 NR Description: bZip DNA binding protein [Arabidopsis thaliana]
  misc_feature (28)..(356): Homolog of NCBI NO: 25406943 NR Description: hypothetical protein [imported] - Arabidopsis
  misc_feature (28)..(362): Homolog of NCBI NO: 15222213 NR Description: bZIP protein [Arabidopsis thaliana]
  misc_feature (49)..(362): Homolog of NCBI NO: 39579226 NR Description: bZIP transcription factor RF2b
MQDPSSNPNSNPNPNPHNANAASQLPRPPPATTAGAGASSSSLFARSGGPHHRRAHSEVSFRLPDDMMDLSPSDPFAGGSSTASMEEIGSEDDLFSTYIDVDKLGGANGSGASGNGADPTGETEKSPARPRHRHSSSVDFGEIMDAKKAMPPDKLAELWTIDPKRAKRILANRQSAARSKERKARYIQELERKVQTLQTEATTLSAQLTLYQRDTTGLSTENTELKLRLQAMEQQAQLRDALNEALKKEVERLKVATGEMMSHTDSFNLGMHLMPFSGSNFVPIPPQSGPSGHQNMQMPPFGLTPSTMPSHLLHQTSSHPYSEILQNDQLGRFQGLDISSKGSTLVKSEGPSLSASESSTTF

SEQ ID NO: 58034 - protein, 296 aa, Glycine max
  peptide (1)..(296): Ceres Seq. ID no. 14314948
  misc_feature (95)..(158): Pfam Name: bZIP transcription factor Pfam Description: bZIP transcription factor
  misc_feature (52)..(292): Homolog of NCBI NO: 21740783 NR Description: OSJNBa0067K08.2 [Oryza sativa (japonica
  misc_feature (45)..(254): Homolog of NCBI NO: 2921823 NR Description: shoot-forming PKSF1 [Paulownia kawakamii]
  misc_feature (1)..(257): Homolog of NCBI NO: 7489564 NR Description: probable transcription activator RF2a - rice
  misc_feature (1)..(201): Homolog of NCBI NO: 17065884 NR Description: AtbZIP transcription factor [Arabidopsis thaliana]
  misc_feature (39)..(296): Homolog of NCBI NO: 34394739 NR Description: putative transcription activator RF2a
  misc_feature (1)..(256): Homolog of NCBI NO: 25453519 NR Description: b-Zip DNA binding protein [imported] -
  misc_feature (1)..(256): Homolog of NCBI NO: 15226727 NR Description: bZip DNA binding protein [Arabidopsis thaliana]
  misc_feature (1)..(290): Homolog of NCBI NO: 25406943 NR Description: hypothetical protein [imported] - Arabidopsis
  misc_feature (1)..(296): Homolog of NCBI NO: 15222213 NR Description: bZIP protein [Arabidopsis thaliana]
  misc_feature (1)..(296): Homolog of NCBI NO: 39579226 NR Description: bZIP transcription factor RF2b
MMDLSPSDPFAGGSSTASMEEIGSEDDLFSTYIDVDKLGGANGSGASGNGADPTGETEKSPARPRHRHSSSVDFGEIMDAKKAMPPDKLAELWTIDPKRAKRILANRQSAARSKERKARYIQELERKVQTLQTEATTLSAQLTLYQRDTTGLSTENTELKLRLQAMEQQAQLRDALNEALKKEVERLKVATGEMMSHTDSFNLGMHLMPFSGSNFVPIPPQSGPSGHQNMQMPPFGLTPSTMPSHLLHQTSSHPYSEILQNDQLGRFQGLDISSKGSTLVKSEGPSLSASESSTTF

SEQ ID NO: 58035 - DNA, 1062 bp, Glycine max
  misc_feature (1)..(1062): Ceres Seq. ID no. 15226854
gcttagtcgttcccaccatttttcctaatcccatttctctttttctcgttctcttgaatttctagggttaccgttggaaccactcgccagccacgtacgtacggaggctctctcttcctccgccatgaactcacggcaatcctctctgtcgccctgtgacatctgcggcgccacccaaaccctatctctgaccatccacaacatccgccaccgcgcccacacctgccgccactgcaccaactgcgtcctcaagcagcaccctggcctcttctgccctctctgcttcgaactccacgacgactcgcccctccctccccaccaccgcctcatgtgcgtccgctgccccgccgtcgcacaccgttcctgtgcgttcccctccaccaacccctccgctgcacccgcgccagcaccaccgttcttctgccctacttgtctcgattctaacttcacctacttcaaactccccgaccgcaagaccggagccgtcgacgtccagtccgccaaggtgctcgtcactgctgcccggatcgctgccgtgtccatgagcaaggcggccgccgtggcacggttcgatgcggaacgtcgcgccagggaggccgccgtggccaggaagagggcgaaggacgcgctggagcatctcgcggagatcctcgccagggagcaggcggagcaggacgaggaggaacagaacggcaccgtttctgctggccggaggcgtggcgcgtaatagttatatcctaagagttgaaggctgctgtactgtttgctatcaattctggaagtgcctcctccactgggtttctcttgggttctttggagatttcttcttgggagcatatgactcggagtttgactatggcaatctacctaaggatttactgaagctgcgtaatcatattttggtgtcattactatgctaaattgtgtatagaaaataaaaaggtttacatgactcacagcagttaataagtgcagctctcggaatttctttgccattgggcctcttataaattgtgattggtatattttatgaataagatttgtgtcattttctagcaaagt

SEQ ID NO: 58036 - protein, 200 aa, Glycine max
  peptide (1)..(200): Ceres Seq. ID no. 15226855
  misc_feature (49)..(103): Pfam Name: PHD-finger Pfam Description: PHD-finger
  misc_feature (11)..(186): Homolog of NCBI NO: 34904592 NR Description: B1008C01.29 [Oryza sativa (japonica
  misc_feature (1)..(188): Homolog of NCBI NO: 15229050 NR Description: hypothetical protein [Arabidopsis thaliana]
  misc_feature (1)..(181): Homolog of NCBI NO: 18391032 NR Description: expressed protein [Arabidopsis thaliana]
MNSRQSSLSPCDICGATQTLSLTIHNIRHRAHTCRHCTNCVLKQHPGLFCPLCFELHDDSPLPPHHRLMCVRCPAVAHRSCAFPSTNPSAAPAPAPPFFCPTCLDSNFTYFKLPDRKTGAVDVQSAKVLVTAARIAAVSMSKAAAVARFDAERRAREAAVARKRAKDALEHLAEILAREQAEQDEEEQNGTVSAGRRRGA

SEQ ID NO: 58037 - protein, 132 aa, Glycine max
  peptide (1)..(132): Ceres Seq. ID no. 15226856
  misc_feature (1)..(118): Homolog of NCBI NO: 34904592 NR Description: B1008C01.29 [Oryza sativa (japonica
  misc_feature (1)..(120): Homolog of NCBI NO: 15229050 NR Description: hypothetical protein [Arabidopsis thaliana]
  misc_feature (1)..(113): Homolog of NCBI NO: 18391032 NR Description: expressed protein [Arabidopsis thaliana]
MCVRCPAVAHRSCAFPSTNPSAAPAPAPPFFCPTCLDSNFTYFKLPDRKTGAVDVQSAKVLVTAARIAAVSMSKAAAVARFDAERRAREAAVARKRAKDALEHLAEILAREQAEQDEEEQNGTVSAGRRRGA

SEQ ID NO: 58038 - protein, 115 aa, Glycine max
  peptide (1)..(115): Ceres Seq. ID no. 15226857
  misc_feature (1)..(12): Homolog of NCBI NO: 38345019 NR Description: OSJNBa0029H02.3 [Oryza sativa (japonica
  misc_feature (1)..(28): Homolog of NCBI NO: 38345019 NR Description: OSJNBa0029H02.3 [Oryza sativa (japonica
  misc_feature (1)..(13): Homolog of NCBI NO: 38099936 NR Description: hypothetical protein MG11009.4 [Magnaporthe
  misc_feature (1)..(17): Homolog of NCBI NO: 27375632 NR Description: blr0521 [Bradyrhizobium japonicum]
  misc_feature (1)..(17): Homolog of NCBI NO: 22330504 NR Description: arabinogalactan-protein, putative (AGP19)
  misc_feature (1)..(12): Homolog of NCBI NO: 20138131 NR Description: Vegetative cell wall protein gp1 precursor
  misc_feature (1)..(12): Homolog of NCBI NO: 15233976 NR Description: leucine-rich repeat extensin family [Arabidopsis
  misc_feature (1)..(17): Homolog of NCBI NO: 25404769 NR Description: hypothetical protein F14K14.17 [imported] -
  misc_feature (1)..(90): Homolog of NCBI NO: 38175466 NR Description: putative high-affinity potassium transporter
MRNVAPGRPPWPGRGRRTRWSISRRSSPGSRRSRTRRNRTAPFLLAGGVARNSYILRVEGCCTVCYQFWKCLLHWVSLGFFGDFFLGAYDSEFDYGNLPKDLLKLRNHILVSLLC

SEQ ID NO: 58039 - DNA, 661 bp, Glycine max
  misc_feature (1)..(661): Ceres Seq. ID no. 13594380
actacaacattcactccctctctcttgtcttttcctctacgttcctgcattgctcgtctcaaacgctaaccatggccggcggaggtttcaccagcggcggcggcgccggagatttcgaggccaaaatcactcccatcgtcatcatttcatgtatcatggctgccaccggaggtctcatgttcggctacgacgtcggcgtttcaggtggtgtgacgtctatgcccccgttcttgaagaagttttttccgacggtatacagaaagacagtggaagagaaaggactggacagtaattactgcaaatacgacaaccaaggattacagcttttcacgtcgtctctgtatctggctggtttgacttcgacgttctttgcttcatacacgactcgtaggttgggaagaaggctgaccatgttgattgctggggtattcttcatctgtggagttgtccttaatgctgctgctcaagaccttgccatgctcatcgttggcagaatcttacttggctgtggtgttggctttgctaatcaggttcatcaatcatcatattttatttttcaaaactcaattgcacaatgttaattaattggatttaaatgaattcgtgtatattgctagtaagtattaattataaataaataaataaatattgcacatgtwtc

SEQ ID NO: 58040 - protein, 192 aa, Glycine max
  peptide (1)..(192): Ceres Seq. ID no. 15221340
  misc_feature (49)..(176): Pfam Name: Sugar (and other) transporter Pfam Description: Sugar (and other) transporter
  misc_feature (24)..(176): Homolog of NCBI NO: 81619 NR Description: glucose transport protein STP1 - Arabidopsis
  misc_feature (24)..(176): Homolog of NCBI NO: 15222935 NR Description: sugar transporter, putative [Arabidopsis
  misc_feature (24)..(176): Homolog of NCBI NO: 1353516 NR Description: sugar transporter
  misc_feature (27)..(176): Homolog of NCBI NO: 3108161 NR Description: putative monosaccharide transporter 1 [Petunia x
  misc_feature (24)..(176): Homolog of NCBI NO: 34915514 NR Description: monosaccharide transporter 3
  misc_feature (24)..(176): Homolog of NCBI NO: 33694266 NR Description: monosaccharide transporter 4
  misc_feature (24)..(176): Homolog of NCBI NO: 15240313 NR Description: hexose transporter, putative [Arabidopsis
  misc_feature (24)..(176): Homolog of NCBI NO: 15010580 NR Description: AT5g26340/F9D12_17 [Arabidopsis thaliana]
  misc_feature (24)..(176): Homolog of NCBI NO: 7446737 NR Description: hexose transport protein - tomato
  misc_feature (24)..(176): Homolog of NCBI NO: 5734440 NR Description: hexose transporter [Lycopersicon esculentum]
YNIHSLSLVFSSTFLHCSSQTLTMAGGGFTSGGGAGDFEAKITPIVIISCIMAATGGLMFGYDVGVSGGVTSMPPFLKKFFPTVYRKTVEEKGLDSNYCKYDNQGLQLFTSSLYLAGLTSTFFASYTTRRLGRRLTMLIAGVFFICGVVLNAAAQDLAMLIVGRILLGCGVGFANQVHQSSYFIFQNSIAQC

SEQ ID NO: 58041 - protein, 169 aa, Glycine max
  peptide (1)..(169): Ceres Seq. ID no. 15221341
  misc_feature (26)..(153): Pfam Name: Sugar (and other) transporter Pfam Description: Sugar (and other) transporter
  misc_feature (1)..(153): Homolog of NCBI NO: 81619 NR Description: glucose transport protein STP1 - Arabidopsis
  misc_feature (1)..(153): Homolog of NCBI NO: 15222935 NR Description: sugar transporter, putative [Arabidopsis
  misc_feature (1)..(153): Homolog of NCBI NO: 1353516 NR Description: sugar transporter
  misc_feature (4)..(153): Homolog of NCBI NO: 3108161 NR Description: putative monosaccharide transporter 1 [Petunia x
  misc_feature (1)..(153): Homolog of NCBI NO: 34915514 NR Description: monosaccharide transporter 3
  misc_feature (1)..(153): Homolog of NCBI NO: 33694266 NR Description: monosaccharide transporter 4
  misc_feature (1)..(153): Homolog of NCBI NO: 15240313 NR Description: hexose transporter, putative [Arabidopsis
  misc_feature (1)..(153): Homolog of NCBI NO: 15010580 NR Description: AT5g26340/F9D12_17 [Arabidopsis thaliana]
  misc_feature (1)..(153): Homolog of NCBI NO: 7446737 NR Description: hexose transport protein - tomato
  misc_feature (1)..(153): Homolog of NCBI NO: 5734440 NR Description: hexose transporter [Lycopersicon esculentum]
MAGGGFTSGGGAGDFEAKITPIVIISCIMAATGGLMFGYDVGVSGGVTSMPPFLKKFFPTVYRKTVEEKGLDSNYCKYDNQGLQLFTSSLYLAGLTSTFFASYTTRRLGRRLTMLIAGVFFICGVVLNAAAQDLAMLIVGRILLGCGVGFANQVHQSSYFIFQNSIAQC

SEQ ID NO: 58042 - protein, 141 aa, Glycine max
  peptide (1)..(141): Ceres Seq. ID no. 15221342
  misc_feature (1)..(125): Pfam Name: Sugar (and other) transporter Pfam Description: Sugar (and other) transporter
  misc_feature (1)..(125): Homolog of NCBI NO: 81619 NR Description: glucose transport protein STP1 - Arabidopsis
  misc_feature (1)..(125): Homolog of NCBI NO: 15222935 NR Description: sugar transporter, putative [Arabidopsis
  misc_feature (1)..(125): Homolog of NCBI NO: 1353516 NR Description: sugar transporter
  misc_feature (1)..(125): Homolog of NCBI NO: 3108161 NR Description: putative monosaccharide transporter 1 [Petunia x
  misc_feature (1)..(125): Homolog of NCBI NO: 34915514 NR Description: monosaccharide transporter 3
  misc_feature (1)..(125): Homolog of NCBI NO: 33694266 NR Description: monosaccharide transporter 4
  misc_feature (1)..(125): Homolog of NCBI NO: 15240313 NR Description: hexose transporter, putative [Arabidopsis
  misc_feature (1)..(125): Homolog of NCBI NO: 15010580 NR Description: AT5g26340/F9D12_17 [Arabidopsis thaliana]
  misc_feature (1)..(125): Homolog of NCBI NO: 7446737 NR Description: hexose transport protein - tomato
  misc_feature (1)..(125): Homolog of NCBI NO: 5734440 NR Description: hexose transporter [Lycopersicon esculentum]
MAATGGLMFGYDVGVSGGVTSMPPFLKKFFPTVYRKTVEEKGLDSNYCKYDNQGLQLFTSSLYLAGLTSTFFASYTTRRLGRRLTMLIAGVFFICGVVLNAAAQDLAMLIVGRILLGCGVGFANQVHQSSYFIFQNSIAQC

SEQ ID NO: 58043 - DNA, 1705 bp, Glycine max
  misc_feature (1)..(1705): Ceres Seq. ID no. 13594345
aaaatgtctcttttccctctctcactgtttttataagtttgattgccaaatcaatatccatggcttcggaggacagaaacgaagaagagcttcacgttctattggtggcattctctgcccaaggtcacatcaaccctttgcttaggcttggcaaaaaactactaagcagaggcctccacgtcaccctcgccaccaccgaattagtttaccaccgcgtcttcaagtcctccgccgccacccccaccgccaccgtccccacttcaatcaccaccaacggaatccaagtgctattcttctccgacggcttcggaaccggcctagacaacaagaccatcacccccgaccaatacatggaactcataggaaaatttggtcccatcagcctctccaacatcatcaaagaccacttcctcaacggttcccaaaaactcgtttgcatcatcaacaacccctttgtcccatgggttgcagatgtagctgccaacttcaacatcccatgcgcatgtctctggatccaaccctgtgctctctacgccatatactaccgtttctacaacaaccttaacacgttccccactctggaggacccttcaatgaatgtcgagttaccaggtcttcccttactacaaccccaagaccttccttctttcgttctcccatcaaacccccatggaagtattcccaaggtgctgtcttcgatgttccaacacatgaagaagctgaagtgggtactcgcgaactcgtttcacgaactggagaaagaggtaatagactccatggctgagttatgccccataacaacggtgggcccactagtccctccatcgttactcggccaagacgaaaacatcgaaggagacgtgggaatcgaaatgtggaagccacaggactcgtgcatggagtggctaaaccagcaacctccttcttcggttatctacgtttcctttgggagcattattgtgcttaccgctaaacaattggagagcatagcgagggctcttaggaacagtgaaaaaccttttctttgggtggttaagcgtcgagatggagaagaagcgcttccacttccagaagggtttgttgaagagaccaaagagaagggcatggtggtgccgtggtgcccgcaaacgaaggtgctgagtcacccttcggtggcgtgtttcttaacgcactgtggttggaattcgatgctggaagcaatcactgcgggcacgcccatgattgcttggccgcaatggaccgaccaacccaccaacgcgaaactgatttcggatgtgtttcgtttggggattcggctcgcgcaggagagtgatgggttcgttgcgacggaggaaatggaaagggcttttgagcggattttctcggcgggggactttaagagaaaggcgtcggagctaaaacgggcggcgagagaagcggtggctcagggtggctcgtcggagcagaatatccaatgcttcgtggatgaaattatagggacaaagtctacttgatggttggaccaggaccagatacagctttggtaacttcttgtcggtattggagattaagattctgctagagtttggagttttatgatcattatatttatcgccttcttccaaaaaaagttgtggttattatttttaattcctagttttgtgcttactatgattcggtgattacataattatagaacaagaacaagggtcacaggactttgtgg

SEQ ID NO: 58044 - protein, 496 aa, Glycine max
  peptide (1)..(496): Ceres Seq. ID no. 13594346
  misc_feature (30)..(490): Homolog of NCBI NO: 25082972 NR Description: indole-3-acetate beta-glucosyltransferase like
  misc_feature (31)..(494): Homolog of NCBI NO: 15234616 NR Description: UDP-glycosyltransferase, putative [Arabidopsis
  misc_feature (31)..(494): Homolog of NCBI NO: 20259348 NR Description: putative UDP-glucose:indole-3-acetate
  misc_feature (31)..(494): Homolog of NCBI NO: 21593030 NR Description: indole-3-acetate beta-glucosyltransferase like
  misc_feature (31)..(494): Homolog of NCBI NO: 15233091 NR Description: UDP-glucosyltransferase, putative [Arabidopsis
  misc_feature (93)..(490): Homolog of NCBI NO: 15227795 NR Description: UDP-glycosyltransferase family [Arabidopsis
  misc_feature (53)..(490): Homolog of NCBI NO: 15227796 NR Description: UDP-glycosyltransferase family [Arabidopsis
  misc_feature (28)..(133): Homolog of NCBI NO: 15227791 NR Description: UDP-glycosyltransferase family [Arabidopsis
  misc_feature (93)..(490): Homolog of NCBI NO: 15227791 NR Description: UDP-glycosyltransferase family [Arabidopsis
  misc_feature (27)..(490): Homolog of NCBI NO: 13431605 NR Description: Limonoid UDP-glucosyltransferase (Limonoid
NVSFPSLTVFISLIAKSISMASEDRNEEELHVLLVAFSAQGHINPLLRLGKKLLSRGLHVTLATTELVYHRVFKSSAATPTATVPTSITTNGIQVLFFSDGFGTGLDNKTITPDQYMELIGKFGPISLSNIIKDHFLNGSQKLVCIINNPFVPWVADVAANFNIPCACLWIQPCALYAIYYRFYNNLNTFPTLEDPSMNVELPGLPLLQPQDLPSFVLPSNPHGSIPKVLSSMFQHMKKLKWVLANSFHELEKEVIDSMAELCPITTVGPLVPPSLLGQDENIEGDVGIEMWKPQDSCMEWLNQQPPSSVIYVSFGSIIVLTAKQLESIARALRNSEKPFLWVVKRRDGEEALPLPEGFVEETKEKGMVVPWCPQTKVLSHPSVACFLTHCGWNSMLEAITAGTPMIAWPQWTDQPTNAKLISDVFRLGIRLAQESDGFVATEEMERAFERIFSAGDFKRKASELKRAAREAVAQGGSSEQNIQCFVDEIIGTKST

SEQ ID NO: 58045 - protein, 477 aa, Glycine max
  peptide (1)..(477): Ceres Seq. ID no. 13594347
  misc_feature (11)..(471): Homolog of NCBI NO: 25082972 NR Description: indole-3-acetate beta-glucosyltransferase like
  misc_feature (12)..(475): Homolog of NCBI NO: 15234616 NR Description: UDP-glycosyltransferase, putative [Arabidopsis
  misc_feature (12)..(475): Homolog of NCBI NO: 20259348 NR Description: putative UDP-glucose:indole-3-acetate
  misc_feature (12)..(475): Homolog of NCBI NO: 21593030 NR Description: indole-3-acetate beta-glucosyltransferase like
  misc_feature (12)..(475): Homolog of NCBI NO: 15233091 NR Description: UDP-glucosyltransferase, putative [Arabidopsis
  misc_feature (74)..(471): Homolog of NCBI NO: 15227795 NR Description: UDP-glycosyltransferase family [Arabidopsis
  misc_feature (34)..(471): Homolog of NCBI NO: 15227796 NR Description: UDP-glycosyltransferase family [Arabidopsis
  misc_feature (9)..(114): Homolog of NCBI NO: 15227791 NR Description: UDP-glycosyltransferase family [Arabidopsis
  misc_feature (74)..(471): Homolog of NCBI NO: 15227791 NR Description: UDP-glycosyltransferase family [Arabidopsis
  misc_feature (8)..(471): Homolog of NCBI NO: 13431605 NR Description: Limonoid UDP-glucosyltransferase (Limonoid
MASEDRNEEELHVLLVAFSAQGHINPLLRLGKKLLSRGLHVTLATTELVYHRVFKSSAATPTATVPTSITTNGIQVLFFSDGFGTGLDNKTITPDQYMELIGKFGPISLSNIIKDHFLNGSQKLVCIINNPFVPWVADVAANFNIPCACLWIQPCALYAIYYRFYNNLNTFPTLEDPSMNVELPGLPLLQPQDLPSFVLPSNPHGSIPKVLSSMFQHMKKLKWVLANSFHELEKEVIDSMAELCPITTVGPLVPPSLLGQDENIEGDVGIEMWKPQDSCMEWLNQQPPSSVIYVSFGSIIVLTAKQLESIARALRNSEKPFLWVVKRRDGEEALPLPEGFVEETKEKGMVVPWCPQTKVLSHPSVACFLTHCGWNSMLEAITAGTPMIAWPQWTDQPTNAKLISDVFRLGIRLAQESDGFVATEEMERAFERIFSAGDFKRKASELKRAAREAVAQGGSSEQNIQCFVDEIIGTKST

SEQ ID NO: 58046 - protein, 380 aa, Glycine max
  peptide (1)..(380): Ceres Seq. ID no. 13594348
  misc_feature (1)..(374): Homolog of NCBI NO: 25082972 NR Description: indole-3-acetate beta-glucosyltransferase like
  misc_feature (1)..(378): Homolog of NCBI NO: 15234616 NR Description: UDP-glycosyltransferase, putative [Arabidopsis
  misc_feature (1)..(378): Homolog of NCBI NO: 20259348 NR Description: putative UDP-glucose:indole-3-acetate
  misc_feature (1)..(378): Homolog of NCBI NO: 21593030 NR Description: indole-3-acetate beta-glucosyltransferase like
  misc_feature (1)..(378): Homolog of NCBI NO: 15233091 NR Description: UDP-glucosyltransferase, putative [Arabidopsis
  misc_feature (1)..(374): Homolog of NCBI NO: 15227795 NR Description: UDP-glycosyltransferase family [Arabidopsis
  misc_feature (1)..(374): Homolog of NCBI NO: 15227796 NR Description: UDP-glycosyltransferase family [Arabidopsis
  misc_feature (1)..(17): Homolog of NCBI NO: 15227791 NR Description: UDP-glycosyltransferase family [Arabidopsis
  misc_feature (1)..(374): Homolog of NCBI NO: 15227791 NR Description: UDP-glycosyltransferase family [Arabidopsis
  misc_feature (1)..(374): Homolog of NCBI NO: 13431605 NR Description: Limonoid UDP-glucosyltransferase (Limonoid
MELIGKFGPISLSNIIKDHFLNGSQKLVCIINNPFVPWVADVAANFNIPCACLWIQPCALYAIYYRFYNNLNTFPTLEDPSMNVELPGLPLLQPQDLPSFVLPSNPHGSIPKVLSSMFQHMKKLKWVLANSFHELEKEVIDSMAELCPITTVGPLVPPSLLGQDENIEGDVGIEMWKPQDSCMEWLNQQPPSSVIYVSFGSIIVLTAKQLESIARALRNSEKPFLWVVKRRDGEEALPLPEGFVEETKEKGMVVPWCPQTKVLSHPSVACFLTHCGWNSMLEAITAGTPMIAWPQWTDQPTNAKLISDVFRLGIRLAQESDGFVATEEMERAFERIFSAGDFKRKASELKRAAREAVAQGGSSEQNIQCFVDEIIGTKST

SEQ ID NO: 58047 - DNA, 1850 bp, Glycine max
  misc_feature (1)..(1850): Ceres Seq. ID no. 13638331
atcgaaaagtattacaattagtctcagtccccaacgactggttctgttttctctctgctgcttcgattcattcacacaaccatgactagccttactaatggcgatgctggctccctcaacaaggtccccacgatcaagttcaccaagctcttcattaatggagacttcgttgactctctgtcaggaaagacatttgagacaatagatccaagaacaggagatgttatagcgaggataagcgagggagataaagaagacattgacattgctgttaaagcagcacgtcatgcatttgacaacggtccatggcctcgccttcccggctctgagagagcaagaatattgctgaaatgggcagaaataattgaggaaaacgcagaagaacttgcagcactagatgcgattgatgcggggaagttgtaccatatgtgtaggaatgtggaagttccagcagcggcaaacactcttcgttactatgctggtgcagccgataagattcatggagaggtgttgaaaatgtctcgagagttccatgcctatacattacttgaaccacttggtgttgtgggacacattactccctggaatttccccaataccatgttctacatcaaagtcgctccttctttagctgctggctgcaccatggtcctcaagcctgctgagcaaacacccctctctgctttgttttctgctcatcttgctaaattggctggaatcccagatggagtgatcaatgtagtgcctggatttggcccaactgctggtgctgcattaagctcacacatggatgttgataaggtcagctttaccggttcaacacaaacaggccgtgtgataatgcaggctgcagcaaagagtaacttgaaacaagtttcacttgaattaggaggcaagtcacccctcataatttttgatgatgcagatatagacaaagctactgagctagctctactaggcatcctatataacaagggagaagtttgtgttgcaagttcccgtgtgtttgttcaagaagggatctatgatgaatttgagaaaaaactggtggagaaggcaaaagcttgggtcgttggggatccctttgatcctaaagttcaacaaggccctcaggttgacaaggaacaatttgaaaaagttctttcatatattgagcatggaaagaaagaaggagctacccttttgaccgggggtaaaacagtggggaacaagggctactttattgagccgacaattttctccaatataagggaggatatgcttatagcacaggatgaaatatttggcccagtgatggcactgaagaagtttaagaccactgaggaagcaattaagagtgctaacaataccaagtatggcctagcagcaggcatagtgaccaagaatttggatacagcaaacacagtgtcaaggtctattcgggcaggcactatatggatcaactgctattttgcctttggcgatgatgttccctttggaggatataagatgagtggatttggaaaagatcatggattggaagcccttcacaagtacctacaagttaaatctgttgttactcccctttacaattctccctggctttgaatgtctactgcatggatcttggaaaatggtccattctggccatttcctatcaatttgcatctgccatgaggcatggaaattcagttcttgaacagtggtgtctattatattgtcaacaagctggccttttcctacttttcagtcatgctttaatagaaaatgtatggaagaaaaatagtaattttatttttgtttggtttgtaattaaaaggaaatatcaacacaatttaacttattgcttcaacaganatatatgaattgtt

SEQ ID NO: 58048 - protein, 501 aa, Glycine max
  peptide (1)..(501): Ceres Seq. ID no. 13638332
  misc_feature (18)..(501): Homolog of NCBI NO: 11691926 NR Description: aldehyde dehydrogenase ALDH2b
  misc_feature (18)..(501): Homolog of NCBI NO: 14276718 NR Description: T-cytoplasm male sterility restorer factor 2 [Zea
  misc_feature (18)..(501): Homolog of NCBI NO: 20530131 NR Description: mitochondrial aldehyde dehydrogenase [Sorghum
  misc_feature (18)..(501): Homolog of NCBI NO: 7431451 NR Description: rf2 nuclear restorer protein - maize
  misc_feature (36)..(500): Homolog of NCBI NO: 19850245 NR Description: cytosolic aldehyde dehydrogenase RF2D [Zea mays]
  misc_feature (6)..(500): Homolog of NCBI NO: 19850247 NR Description: cytosolic aldehyde dehydrogenase RF2D [Zea mays]
  misc_feature (14)..(501): Homolog of NCBI NO: 18404212 NR Description: aldehyde dehydrogenase (ALDH1a) [Arabidopsis
  misc_feature (6)..(501): Homolog of NCBI NO: 19850243 NR Description: cytosolic aldehyde dehydrogenase RF2C [Zea mays]
  misc_feature (6)..(501): Homolog of NCBI NO: 19850241 NR Description: cytosolic aldehyde dehydrogenase RF2C [Zea mays]
  misc_feature (1)..(501): Homolog of NCBI NO: 34912248 NR Description: cytosolic aldehyde dehydrogenase
MTSLTNGDAGSLNKVPTIKFTKLFINGDFVDSLSGKTFETIDPRTGDVIARISEGDKEDIDIAVKAARHAFDNGPWPRLPGSERARILLKWAEIIEENAEELAALDAIDAGKLYHMCRNVEVPAAANTLRYYAGAADKIHGEVLKMSREFHAYTLLEPLGVVGHITPWNFPNTMFYIKVAPSLAAGCTMVLKPAEQTPLSALFSAHLAKLAGIPDGVINVVPGFGPTAGAALSSHMDVDKVSFTGSTQTGRVIMQAAAKSNLKQVSLELGGKSPLIIFDDADIDKATELALLGILYNKGEVCVASSRVFVQEGIYDEFEKKLVEKAKAWVVGDPFDPKVQQGPQVDKEQFEKVLSYIEHGKKEGATLLTGGKTVGNKGYFIEPTIFSNIREDMLIAQDEIFGPVMALKKFKTTEEAIKSANNTKYGLAAGIVTKNLDTANTVSRSIRAGTIWINCYFAFGDDVPFGGYKMSGFGKDHGLEALHKYLQVKSVVTPLYNSPWL

SEQ ID NO: 58049 - protein, 386 aa, Glycine max
  peptide (1)..(386): Ceres Seq. ID no. 13638333
  misc_feature (1)..(386): Homolog of NCBI NO: 11691926 NR Description: aldehyde dehydrogenase ALDH2b
  misc_feature (1)..(386): Homolog of NCBI NO: 14276718 NR Description: T-cytoplasm male sterility restorer factor 2 [Zea
  misc_feature (1)..(386): Homolog of NCBI NO: 20530131 NR Description: mitochondrial aldehyde dehydrogenase [Sorghum
  misc_feature (1)..(386): Homolog of NCBI NO: 7431451 NR Description: rf2 nuclear restorer protein - maize
  misc_feature (1)..(385): Homolog of NCBI NO: 19850245 NR Description: cytosolic aldehyde dehydrogenase RF2D [Zea mays]
  misc_feature (1)..(385): Homolog of NCBI NO: 19850247 NR Description: cytosolic aldehyde dehydrogenase RF2D [Zea mays]
  misc_feature (1)..(386): Homolog of NCBI NO: 18404212 NR Description: aldehyde dehydrogenase (ALDH1a) [Arabidopsis
  misc_feature (1)..(386): Homolog of NCBI NO: 19850243 NR Description: cytosolic aldehyde dehydrogenase RF2C [Zea mays]
  misc_feature (1)..(386): Homolog of NCBI NO: 19850241 NR Description: cytosolic aldehyde dehydrogenase RF2C [Zea mays]
  misc_feature (1)..(386): Homolog of NCBI NO: 34912248 NR Description: cytosolic aldehyde dehydrogenase
MCRNVEVPAAANTLRYYAGAADKIHGEVLKMSREFHAYTLLEPLGVVGHITPWNFPNTMFYIKVAPSLAAGCTMVLKPAEQTPLSALFSAHLAKLAGIPDGVINVVPGFGPTAGAALSSHMDVDKVSFTGSTQTGRVIMQAAAKSNLKQVSLELGGKSPLIIFDDADIDKATELALLGILYNKGEVCVASSRVFVQEGIYDEFEKKLVEKAKAWVVGDPFDPKVQQGPQVDKEQFEKVLSYIEHGKKEGATLLTGGKTVGNKGYFIEPTIFSNIREDMLIAQDEIFGPVMALKKFKTTEEAIKSANNTKYGLAAGIVTKNLDTANTVSRSIRAGTIWINCYFAFGDDVPFGGYKMSGFGKDHGLEALHKYLQVKSVVTPLYNSPWL

SEQ ID NO: 58050 - protein, 356 aa, Glycine max
  peptide (1)..(356): Ceres Seq. ID no. 13638334
  misc_feature (1)..(356): Homolog of NCBI NO: 11691926 NR Description: aldehyde dehydrogenase ALDH2b
  misc_feature (1)..(356): Homolog of NCBI NO: 14276718 NR Description: T-cytoplasm male sterility restorer factor 2 [Zea
  misc_feature (1)..(356): Homolog of NCBI NO: 20530131 NR Description: mitochondrial aldehyde dehydrogenase [Sorghum
  misc_feature (1)..(356): Homolog of NCBI NO: 7431451 NR Description: rf2 nuclear restorer protein - maize
  misc_feature (1)..(355): Homolog of NCBI NO: 19850245 NR Description: cytosolic aldehyde dehydrogenase RF2D [Zea mays]
  misc_feature (1)..(355): Homolog of NCBI NO: 19850247 NR Description: cytosolic aldehyde dehydrogenase RF2D [Zea mays]
  misc_feature (1)..(356): Homolog of NCBI NO: 18404212 NR Description: aldehyde dehydrogenase (ALDH1a) [Arabidopsis
  misc_feature (1)..(356): Homolog of NCBI NO: 19850243 NR Description: cytosolic aldehyde dehydrogenase RF2C [Zea mays]
  misc_feature (1)..(356): Homolog of NCBI NO: 19850241 NR Description: cytosolic aldehyde dehydrogenase RF2C [Zea mays]
  misc_feature (1)..(356): Homolog of NCBI NO: 34912248 NR Description: cytosolic aldehyde dehydrogenase
MSREFHAYTLLEPLGVVGHITPWNFPNTMFYIKVAPSLAAGCTMVLKPAEQTPLSALFSAHLAKLAGIPDGVINVVPGFGPTAGAALSSHMDVDKVSFTGSTQTGRVIMQAAAKSNLKQVSLELGGKSPLIIFDDADIDKATELALLGILYNKGEVCVASSRVFVQEGIYDEFEKKLVEKAKAWVVGDPFDPKVQQGPQVDKEQFEKVLSYIEHGKKEGATLLTGGKTVGNKGYFIEPTIFSNIREDMLIAQDEIFGPVMALKKFKTTEEAIKSANNTKYGLAAGIVTKNLDTANTVSRSIRAGTIWINCYFAFGDDVPFGGYKMSGFGKDHGLEALHKYLQVKSVVTPLYNSPWL

SEQ ID NO: 58051 - DNA, 1202 bp, Glycine max
  misc_feature (1)..(1202): Ceres Seq. ID no. 14304408
ctgtaccacaataatcaaagtctcaaccatgagaaaacgtatcaatatggaaagtgatgctgacttcaattcctttgccacatcctcctcttccaccacaccttcaatcttctttgacactaacacttctagcacatcctcctcctcaacatctcctacctcaaattcagaatcatgcaccaaagaacactccaaaacacctcaaaatgactcaaccacttctcaaacctcattggaaaatggaaaggactcaaaagggtgcaagaagaggcagatagacaatagcaaccagaatcaccaccctacttataggggtgtaaggatgaggaattggggcaaatgggtgtccgaaatccgtgagccgagaaagaagtcaagaatatggctaggaacataccctacagcagaaatggcagctagagcacatgatgtggctgccttagccatcaagggccattcagcatacctcaattttcctgaattggctcaagagcttccaaggccagttagcacatctcctaaggacattcaagctgcagctgcaaaagctgcaaatactgcctttgaggaggttaggcattgtcaaataactgaagaagaagcagaacaaaaccaagcagaacaagcttcatcttcaactctctcaatggacaatcctcaagagccttcaagttctcattctaccattgatgatgacactttgtttgaccttccagatcttttccctgatggaaacaatggactttgctccttttcttcttcttggcatttgtgtgcagttgatagtggctttaggcttgaggagtcatttttttatgagaaccattagaatttagaggctttttattttctttttaattcaagtaaaatacagagtttaataagaccaaaaggaaggagagcaacatgcggagtttttcttctttgtttggtcactgcaactgcattctgcgcagagaataaccagttgaggaagactttacatttttatctgtaaatggtgctgtctattgctaatattttgtccgatatagtttttttttctattttggggaataaaggtttaggtgagccgtgagcaaagactattccatcatcaagtaagttacgtattcaactaggagtgcataacatctgagacaaggtttctcttctactgtatatgaaaggtatttatgatttgagagaatatcctttcctct

SEQ ID NO: 58052 - protein, 275 aa, Glycine max
  peptide (1)..(275): Ceres Seq. ID no. 14304409
  misc_feature (100)..(164): Pfam Name: AP2 domain Pfam Description: AP2 domain
  misc_feature (83)..(275): Homolog of NCBI NO: 15233928 NR Description: AP2 domain transcription factor TINY, putative
  misc_feature (10)..(261): Homolog of NCBI NO: 37536842 NR Description: putative DNA binding protein
  misc_feature (2)..(255): Homolog of NCBI NO: 38605844 NR Description: OSJNBb0034G17.2 [Oryza sativa (japonica
  misc_feature (86)..(250): Homolog of NCBI NO: 14140155 NR Description: putative AP2 domain transcription factor [Oryza
  misc_feature (46)..(273): Homolog of NCBI NO: 14140163 NR Description: putative AP2 domain containing protein [Oryza
  misc_feature (26)..(273): Homolog of NCBI NO: 25990951 NR Description: DREB-like protein [Zea mays]
  misc_feature (26)..(273): Homolog of NCBI NO: 21908034 NR Description: DRE binding factor 2 [Zea mays]
  misc_feature (10)..(228): Homolog of NCBI NO: 21592664 NR Description: putative AP2 domain transcription factor
  misc_feature (10)..(228): Homolog of NCBI NO: 15225381 NR Description: AP2 domain transcription factor TINY, putative
  misc_feature (66)..(274): Homolog of NCBI NO: 15232340 NR Description: AP2 domain transcription factor TINY, putative
CTTIIKVSTMRKRINMESDADFNSFATSSSSTTPSIFFDTNTSSTSSSSTSPTSNSESCTKEHSKTPQNDSTTSQTSLENGKDSKGCKKRQIDNSNQNHHPTYRGVRMRNWGKWVSEIREPRKKSRIWLGTYPTAEMAARAHDVAALAIKGHSAYLNFPELAQELPRPVSTSPKDIQAAAAKAANTAFEEVRHCQITEEEAEQNQAEQASSSTLSMDNPQEPSSSHSTIDDDTLFDLPDLFPDGNNGLCSFSSSWHLCAVDSGFRLEESFFYENH

SEQ ID NO: 58053 - protein, 266 aa, Glycine max
  peptide (1)..(266): Ceres Seq. ID no. 14304410
  misc_feature (91)..(155): Pfam Name: AP2 domain Pfam Description: AP2 domain
  misc_feature (74)..(266): Homolog of NCBI NO: 15233928 NR Description: AP2 domain transcription factor TINY, putative
  misc_feature (1)..(252): Homolog of NCBI NO: 37536842 NR Description: putative DNA binding protein
  misc_feature (1)..(246): Homolog of NCBI NO: 38605844 NR Description: OSJNBb0034G17.2 [Oryza sativa (japonica
  misc_feature (77)..(241): Homolog of NCBI NO: 14140155 NR Description: putative AP2 domain transcription factor [Oryza
  misc_feature (37)..(264): Homolog of NCBI NO: 14140163 NR Description: putative AP2 domain containing protein [Oryza
  misc_feature (17)..(264): Homolog of NCBI NO: 25990951 NR Description: DREB-like protein [Zea mays]
  misc_feature (17)..(264): Homolog of NCBI NO: 21908034 NR Description: DRE binding factor 2 [Zea mays]
  misc_feature (1)..(219): Homolog of NCBI NO: 21592664 NR Description: putative AP2 domain transcription factor
  misc_feature (1)..(219): Homolog of NCBI NO: 15225381 NR Description: AP2 domain transcription factor TINY, putative
  misc_feature (57)..(265): Homolog of NCBI NO: 15232340 NR Description: AP2 domain transcription factor TINY, putative
MRKRINMESDADFNSFATSSSSTTPSIFFDTNTSSTSSSSTSPTSNSESCTKEHSKTPQNDSTTSQTSLENGKDSKGCKKRQIDNSNQNHHPTYRGVRMRNWGKWVSEIREPRKKSRIWLGTYPTAEMAARAHDVAALAIKGHSAYLNFPELAQELPRPVSTSPKDIQAAAAKAANTAFEEVRHCQITEEEAEQNQAEQASSSTLSMDNPQEPSSSHSTIDDDTLFDLPDLFPDGNNGLCSFSSSWHLCAVDSGFRLEESFFYENH

SEQ ID NO: 58054 - protein, 260 aa, Glycine max
  peptide (1)..(260): Ceres Seq. ID no. 14304411
  misc_feature (85)..(149): Pfam Name: AP2 domain Pfam Description: AP2 domain
  misc_feature (68)..(260): Homolog of NCBI NO: 15233928 NR Description: AP2 domain transcription factor TINY, putative
  misc_feature (1)..(246): Homolog of NCBI NO: 37536842 NR Description: putative DNA binding protein
  misc_feature (1)..(240): Homolog of NCBI NO: 38605844 NR Description: OSJNBb0034G17.2 [Oryza sativa (japonica
  misc_feature (71)..(235): Homolog of NCBI NO: 14140155 NR Description: putative AP2 domain transcription factor [Oryza
  misc_feature (31)..(258): Homolog of NCBI NO: 14140163 NR Description: putative AP2 domain containing protein [Oryza
  misc_feature (11)..(258): Homolog of NCBI NO: 25990951 NR Description: DREB-like protein [Zea mays]
  misc_feature (11)..(258): Homolog of NCBI NO: 21908034 NR Description: DRE binding factor 2 [Zea mays]
  misc_feature (1)..(213): Homolog of NCBI NO: 21592664 NR Description: putative AP2 domain transcription factor
  misc_feature (1)..(213): Homolog of NCBI NO: 15225381 NR Description: AP2 domain transcription factor TINY, putative
  misc_feature (51)..(259): Homolog of NCBI NO: 15232340 NR Description: AP2 domain transcription factor TINY, putative
MESDADFNSFATSSSSTTPSIFFDTNTSSTSSSSTSPTSNSESCTKEHSKTPQNDSTTSQTSLENGKDSKGCKKRQIDNSNQNHHPTYRGVRMRNWGKWVSEIREPRKKSRIWLGTYPTAEMAARAHDVAALAIKGHSAYLNFPELAQELPRPVSTSPKDIQAAAAKAANTAFEEVRHCQITEEEAEQNQAEQASSSTLSMDNPQEPSSSHSTIDDDTLFDLPDLFPDGNNGLCSFSSSWHLCAVDSGFRLEESFFYENH

SEQ ID NO: 58055 - DNA, 759 bp, Glycine max
  misc_feature (1)..(759): Ceres Seq. ID no. 15170395
aaaacctttttactatcagtcacttgctattttccttgtcctctttttcgtccaatcctaatacgatcatggaggatgctgctacttctaatgaggatagagaaaacaagttcctaactatggcaattgaagaagcatataaggcggttgaaagtggccatggtcgcccatttggtgcagttattgttcgaaacgatgaaatactttcaagctgtcataacatggttgtaagaaatgctgatcccactgcccatgctgagattactgctataagagaggcttgtcgaaagctgaatcaagttgaacttgctgactctgaaatctatgcttcttgcgagccttgtccaatgtgccttagtgcaattcatttttccaaaattaagaaactggtttatggagctaaagcagaagctgcggtagcaattgggtttgagagtatcattgctgatgcactgaaggacactggtttttatgagaaactcaacttagaggtaaaaaaggctgaaggtagtgttgctgtaatggcagaacaagtattcgagaagaccaaagacaagtttattattccctgattagttagctttaatcatcttattaaatgtgagcgcaagttacaattgttcaggaaaacttttgattcttggacaaaaataattttttgtcagactttattttggattagtcaggtctcattttcctgataatccggaggattagacaaaaaagaaatataaaatttgcacgttcatgtttctgtac

SEQ ID NO: 58056 - protein, 189 aa, Glycine max
  peptide (1)..(189): Ceres Seq. ID no. 15170396
  misc_feature (31)..(133): Pfam Name: Cytidine and deoxycytidylate deaminase Pfam Description: Cytidine and deoxycytidylate deaminase
  misc_feature (36)..(185): Homolog of NCBI NO: 17554608 NR Description: deaminase (3I668) [Caenorhabditis elegans]
  misc_feature (34)..(185): Homolog of NCBI NO: 23049830 NR Description: hypothetical protein [Methanosarcina barkeri]
  misc_feature (36)..(185): Homolog of NCBI NO: 39582012 NR Description: Hypothetical protein CBG09150 [Caenorhabditis
  misc_feature (37)..(185): Homolog of NCBI NO: 23021911 NR Description: hypothetical protein [Clostridium thermocellum
  misc_feature (74)..(186): Homolog of NCBI NO: 15229953 NR Description: hypothetical protein [Arabidopsis thaliana]
  misc_feature (32)..(186): Homolog of NCBI NO: 15241124 NR Description: putative cytidine deaminase - like [Arabidopsis
  misc_feature (31)..(186): Homolog of NCBI NO: 18266045 NR Description: deoxycytidine deaminase [Brassica oleracea]
  misc_feature (31)..(186): Homolog of NCBI NO: 40714681 NR Description: putative deoxycytidine deaminase
  misc_feature (31)..(186): Homolog of NCBI NO: 3204108 NR Description: putative cytidine deaminase; putative
  misc_feature (31)..(186): Homolog of NCBI NO: 23928436 NR Description: putative cytidine deaminase [Zea mays]
NLFTISHLLFSLSSFSSNPNTIMEDAATSNEDRENKFLTMAIEEAYKAVESGHGRPFGAVIVRNDEILSSCHNMVVRNADPTAHAEITAIREACRKLNQVELADSEIYASCEPCPMCLSAIHFSKIKKLVYGAKAEAAVAIGFESIIADALKDTGFYEKLNLEVKKAEGSVAVMAEQVFEKTKDKFIIP

SEQ ID NO: 58057 - protein, 167 aa, Glycine max
  peptide (1)..(167): Ceres Seq. ID no. 15170397
  misc_feature (9)..(111): Pfam Name: Cytidine and deoxycytidylate deaminase Pfam Description: Cytidine and deoxycytidylate deaminase
  misc_feature (14)..(163): Homolog of NCBI NO: 17554608 NR Description: deaminase (3I668) [Caenorhabditis elegans]
  misc_feature (12)..(163): Homolog of NCBI NO: 23049830 NR Description: hypothetical protein [Methanosarcina barkeri]
  misc_feature (14)..(163): Homolog of NCBI NO: 39582012 NR Description: Hypothetical protein CBG09150 [Caenorhabditis
  misc_feature (15)..(163): Homolog of NCBI NO: 23021911 NR Description: hypothetical protein [Clostridium thermocellum
  misc_feature (52)..(164): Homolog of NCBI NO: 15229953 NR Description: hypothetical protein [Arabidopsis thaliana]
  misc_feature (10)..(164): Homolog of NCBI NO: 15241124 NR Description: putative cytidine deaminase - like [Arabidopsis
  misc_feature (9)..(164): Homolog of NCBI NO: 18266045 NR Description: deoxycytidine deaminase [Brassica oleracea]
  misc_feature (9)..(164): Homolog of NCBI NO: 40714681 NR Description: putative deoxycytidine deaminase
  misc_feature (9)..(164): Homolog of NCBI NO: 3204108 NR Description: putative cytidine deaminase; putative
  misc_feature (9)..(164): Homolog of NCBI NO: 23928436 NR Description: putative cytidine deaminase [Zea mays]
MEDAATSNEDRENKFLTMAIEEAYKAVESGHGRPFGAVIVRNDEILSSCHNMVVRNADPTAHAEITAIREACRKLNQVELADSEIYASCEPCPMCLSAIHFSKIKKLVYGAKAEAAVAIGFESIIADALKDTGFYEKLNLEVKKAEGSVAVMAEQVFEKTKDKFIIP

SEQ ID NO: 58058 - protein, 150 aa, Glycine max
  peptide (1)..(150): Ceres Seq. ID no. 15170398
  misc_feature (1)..(94): Pfam Name: Cytidine and deoxycytidylate deaminase Pfam Description: Cytidine and deoxycytidylate deaminase
  misc_feature (1)..(146): Homolog of NCBI NO: 17554608 NR Description: deaminase (3I668) [Caenorhabditis elegans]
  misc_feature (1)..(146): Homolog of NCBI NO: 23049830 NR Description: hypothetical protein [Methanosarcina barkeri]
  misc_feature (1)..(146): Homolog of NCBI NO: 39582012 NR Description: Hypothetical protein CBG09150 [Caenorhabditis
  misc_feature (1)..(146): Homolog of NCBI NO: 23021911 NR Description: hypothetical protein [Clostridium thermocellum
  misc_feature (35)..(147): Homolog of NCBI NO: 15229953 NR Description: hypothetical protein [Arabidopsis thaliana]
  misc_feature (1)..(147): Homolog of NCBI NO: 15241124 NR Description: putative cytidine deaminase - like [Arabidopsis
  misc_feature (1)..(147): Homolog of NCBI NO: 18266045 NR Description: deoxycytidine deaminase [Brassica oleracea]
  misc_feature (1)..(147): Homolog of NCBI NO: 40714681 NR Description: putative deoxycytidine deaminase
  misc_feature (1)..(147): Homolog of NCBI NO: 3204108 NR Description: putative cytidine deaminase; putative
  misc_feature (1)..(147): Homolog of NCBI NO: 23928436 NR Description: putative cytidine deaminase [Zea mays]
MAIEEAYKAVESGHGRPFGAVIVRNDEILSSCHNMVVRNADPTAHAEITAIREACRKLNQVELADSEIYASCEPCPMCLSAIHFSKIKKLVYGAKAEAAVAIGFESIIADALKDTGFYEKLNLEVKKAEGSVAVMAEQVFEKTKDKFIIP

SEQ ID NO: 58059 - DNA, 1149 bp, Glycine max
  misc_feature (1)..(1149): Ceres Seq. ID no. 15224827
gcacgagwccaktmcctagaacatccamtcgaaaacctggttgatatcaattgatgagaatggtkggagaaccataccacaaaaacaagctgtgttgtggagcctaagaaagagtttttaaaatcttggggataaaaatggccgatctatataatctcaattctcaaagactaatttaagggtttattcccagaaaaaaacttgttactgaaaatactgaactactattctacttgcctatttatgatagcagcaatttgatggaaactaaggcagaaacttgaaattcagctgaattttattggactgcaaattttctaatggtgtccaaagaaaggccaaatgctacagtcactttgtcacaatttgtcctgaacatttattcttgtactactaactgattatatattatctaccaaatcacacaggagaatgggaaaacaaccacgtacacatggattttgagcactggctggtggcagagtagagcaccagttaacccagatgctgttgttgtagttgtcttcttatgtgcttgcttaattggtggctttttttacctcaacaggtttttgttttttgcaacttcccatgttaaccatcaagttaatagtatagacactgcttggttttgacttgttatcctctccttaattgccgcgcagagcaaatgcctcaaactccataaagaagaagtcatatcagtcaatgcttcttgtgatgtccatagcttgtttgtactgcttttggtgtgcaattcagatatactggatcagtccacgtcgtccagccgtaggtgaagaggccgatcttggtgttctcgtgttcttagctatatactttttcctaccttatggtttgtgtataatgtccatgtccccaaaagatcatgatcctaatctgattcctctttaatagtgttcaccctattagagatgtgttctgcttttgccactcctatatagttgtgagggtagctagaatatttcgccagtaagtaaattgtataatcactcagcaaaactatgtgaagctatgcatccattccttgttggaactggattcttttgagcttacaggttatatttcactgactcatacgttgttatctgtatcttgttgcaaagtgatccaatatagaagtttggc

SEQ ID NO: 58060 - protein, 68 aa, Glycine max
  peptide (1)..(68): Ceres Seq. ID no. 15224828
  misc_feature (1)..(61): Homolog of NCBI NO: 21741227 NR Description: OSJNBb0048E02.14 [Oryza sativa (japonica
MLLVMSIACLYCFWCAIQIYWISPRRPAVGEEADLGVLVFLAIYFFLPYGLCIMSMSPKDHDPNLIPL

SEQ ID NO: 58061 - protein, 64 aa, Glycine max
  peptide (1)..(64): Ceres Seq. ID no. 15224829
  misc_feature (1)..(57): Homolog of NCBI NO: 21741227 NR Description: OSJNBb0048E02.14 [Oryza sativa (japonica
MSIACLYCFWCAIQIYWISPRRPAVGEEADLGVLVFLAIYFFLPYGLCIMSMSPKDHDPNLIPL

SEQ ID NO: 58062 - DNA, 1285 bp, Glycine max
  misc_feature (1)..(1285): Ceres Seq. ID no. 13638375
cctagaacatcctaatcgaaaaattaaattcaaaattgaaaacggaaggaaaactcagcgtgtgattgaaatttgaagagtgtgaagatggcgatggaagtggagcagaatcagaatcatcaattagggtttcccttctggaaaccgctccgtcgcaggttcggacccgaatctcctttcttcgctcatggcaacctcgaacgggaacttctcgccaaacagcttgctttggaattaacagaagagaaacaacagcttgagaaatggatgcaagaggaagaaggaagggaagtcttttgtcccattgtgggttgtggtgcacgcttgacctcaatggaggactttgaaaatcactataatgcaaggcatactgcatcctgttctgtgtgctccagagtttacccgacatcttggttgctcagcatacatgtatctgaagtgcatgattctttctttcaggcaaaagttgcacgtggctatgatatgtatgaatgcttggtggaaaggtgtggattgaaattcaaaagctacaatagtaggcagcagcatctggttgacaagcataaattccccacctcatttgagtttttcaagaaggctaagccttcaaagaaacataggttgaagtcccaacgcaaacaagctgtttgtaaggaggattcttcaggaatgatggaagtggaaaatgcatccatggatgaccttgtttcagcagtctctaaattgaacacttctgactccaccccttcatctatcagttttggtcgccgccacaaaggcttgtcatttgtccctcgagctgttcagcgtggaggtggatcaaactcaacagcatctgtgacaaagaaataagcttggactcaaacaaatctgcattcttaattgctgaatgatcaacatgcagatgcagctccattataaaatccgtgtggacgtcttgcattctaagtttgaagaagccaattaagttgaagatggaaaattagaatcatgctggaggatgtaataacagcatttgtcagtattatctttttttgctcccacttggggctgtaagtttgcccaacacaggcaatatgagcatgcgaatatgcctggcttgtataatgtggagattttgagcttctttttctatgatattgttctgttaacatctaaccactttactgaatagccacattgtaattagagttgaaagaaatcactcttaaagcttgtcatacgtttgtggcagcacatgaataagaaaaaaaaaaaaaaaaaagcttatcgataccgtcgacct

SEQ ID NO: 58063 - protein, 254 aa, Glycine max
  peptide (1)..(254): Ceres Seq. ID no. 15220403
  misc_feature (134)..(159): Pfam Name: Zinc finger, C2H2 type Pfam Description: Zinc finger, C2H2 type
  misc_feature (97)..(182): Homolog of NCBI NO: 28573317 NR Description: CG13951-PA [Drosophila melanogaster]
  misc_feature (68)..(240): Homolog of NCBI NO: 31201613 NR Description: ENSANGP00000012483 [Anopheles gambiae]
  misc_feature (24)..(198): Homolog of NCBI NO: 21750147 NR Description: unnamed protein product [Homo sapiens]
  misc_feature (24)..(227): Homolog of NCBI NO: 28274701 NR Description: hypothetical protein MGC30006 [Homo sapiens]
  misc_feature (24)..(227): Homolog of NCBI NO: 15929411 NR Description: Unknown (protein for IMAGE:4040789) [Homo sapiens]
  misc_feature (16)..(198): Homolog of NCBI NO: 34861715 NR Description: similar to hypothetical protein MGC30006 [Rattus
  misc_feature (16)..(227): Homolog of NCBI NO: 27802782 NR Description: SI:zC217G15.6 (novel protein with three zinc
  misc_feature (12)..(237): Homolog of NCBI NO: 15241318 NR Description: zinc finger (C2H2 type) protein family
  misc_feature (12)..(250): Homolog of NCBI NO: 27808566 NR Description: At5g14140 [Arabidopsis thaliana]
MAMEVEQNQNHQLGFPFWKPLRRRFGPESPFFAHGNLERELLAKQLALELTEEKQQLEKWMQEEEGREVFCPIVGCGARLTSMEDFENHYNARHTASCSVCSRVYPTSWLLSIHVSEVHDSFFQAKVARGYDMYECLVERCGLKFKSYNSRQQHLVDKHKFPTSFEFFKKAKPSKKHRLKSQRKQAVCKEDSSGMMEVENASMDDLVSAVSKLNTSDSTPSSISFGRRHKGLSFVPRAVQRGGGSNSTASVTKK

SEQ ID NO: 58064 - protein, 252 aa, Glycine max
  peptide (1)..(252): Ceres Seq. ID no. 15220404
  misc_feature (132)..(157): Pfam Name: Zinc finger, C2H2 type Pfam Description: Zinc finger, C2H2 type
  misc_feature (95)..(180): Homolog of NCBI NO: 28573317 NR Description: CG13951-PA [Drosophila melanogaster]
  misc_feature (66)..(238): Homolog of NCBI NO: 31201613 NR Description: ENSANGP00000012483 [Anopheles gambiae]
  misc_feature (22)..(196): Homolog of NCBI NO: 21750147 NR Description: unnamed protein product [Homo sapiens]
  misc_feature (22)..(225): Homolog of NCBI NO: 28274701 NR Description: hypothetical protein MGC30006 [Homo sapiens]
  misc_feature (22)..(225): Homolog of NCBI NO: 15929411 NR Description: Unknown (protein for IMAGE:4040789) [Homo sapiens]
  misc_feature (14)..(196): Homolog of NCBI NO: 34861715 NR Description: similar to hypothetical protein MGC30006 [Rattus
  misc_feature (14)..(225): Homolog of NCBI NO: 27802782 NR Description: SI:zC217G15.6 (novel protein with three zinc
  misc_feature (10)..(235): Homolog of NCBI NO: 15241318 NR Description: zinc finger (C2H2 type) protein family
  misc_feature (10)..(248): Homolog of NCBI NO: 27808566 NR Description: At5g14140 [Arabidopsis thaliana]
MEVEQNQNHQLGFPFWKPLRRRFGPESPFFAHGNLERELLAKQLALELTEEKQQLEKWMQEEEGREVFCPIVGCGARLTSMEDFENHYNARHTASCSVCSRVYPTSWLLSIHVSEVHDSFFQAKVARGYDMYECLVERCGLKFKSYNSRQQHLVDKHKFPTSFEFFKKAKPSKKHRLKSQRKQAVCKEDSSGMMEVENASMDDLVSAVSKLNTSDSTPSSISFGRRHKGLSFVPRAVQRGGGSNSTASVTKK

SEQ ID NO: 58065 - protein, 194 aa, Glycine max
  peptide (1)..(194): Ceres Seq. ID no. 15220405
  misc_feature (74)..(99): Pfam Name: Zinc finger, C2H2 type Pfam Description: Zinc finger, C2H2 type
  misc_feature (37)..(122): Homolog of NCBI NO: 28573317 NR Description: CG13951-PA [Drosophila melanogaster]
  misc_feature (8)..(180): Homolog of NCBI NO: 31201613 NR Description: ENSANGP00000012483 [Anopheles gambiae]
  misc_feature (1)..(138): Homolog of NCBI NO: 21750147 NR Description: unnamed protein product [Homo sapiens]
  misc_feature (1)..(167): Homolog of NCBI NO: 28274701 NR Description: hypothetical protein MGC30006 [Homo sapiens]
  misc_feature (1)..(167): Homolog of NCBI NO: 15929411 NR Description: Unknown (protein for IMAGE:4040789) [Homo sapiens]
  misc_feature (1)..(138): Homolog of NCBI NO: 34861715 NR Description: similar to hypothetical protein MGC30006 [Rattus
  misc_feature (1)..(167): Homolog of NCBI NO: 27802782 NR Description: SI:zC217G15.6 (novel protein with three zinc
  misc_feature (1)..(177): Homolog of NCBI NO: 15241318 NR Description: zinc finger (C2H2 type) protein family
  misc_feature (1)..(190): Homolog of NCBI NO: 27808566 NR Description: At5g14140 [Arabidopsis thaliana]
MQEEEGREVFCPIVGCGARLTSMEDFENHYNARHTASCSVCSRVYPTSWLLSIHVSEVHDSFFQAKVARGYDMYECLVERCGLKFKSYNSRQQHLVDKHKFPTSFEFFKKAKPSKKHRLKSQRKQAVCKEDSSGMMEVENASMDDLVSAVSKLNTSDSTPSSISFGRRHKGLSFVPRAVQRGGGSNSTASVTKK

SEQ ID NO: 58066 - DNA, 1724 bp, Glycine max
  misc_feature (1)..(1724): Ceres Seq. ID no. 13638441
aattaacactcatcacattcgttgtgtttggcttcttcactcgctttctctatttttttctcactaaaaagttccatcttttttttttttttaatttctggggttattattgctttctgtgattctgtctcagttccattttggtatctttgagggaaattcattgggtttgcagggttttatcttgttagaatttagaccaattggctaacagataatagtcttcattgaacatcaatttcaagcattctctctgatttttttgatcaagtggctcttttctagattccgattcccttcaaaatgcttctggatttatccttagtattgttgtggtaaaacctccacttctgttatcattttctctcttctgccttatcttcctcagtttccactcatcaagtttcaatcttcctttgaataagcccaaatttgattgtatgaaccagtagctttttgcttgtacaaaattgaattgatgaagtgggaaagtataaccctctcttctcctacaccttgcactccaaactccaacaccaattggttggtgatggaggataataatagcaggagcacaaaatggacctctgaagagaacaagctctttgaaaatgctcttgcagtgcatgataaggacaccccggatcggtggcacagagtggctgagatgattcctggaaagacagtggttgatgtgataaggcagtacaaggagttggaagtagatgttagcaatatagaagctggtttgattccagttcctggctatagtagcactgctacctcacccttcaccttagattgggtgaacactcctggctatgatgggtttaaaggatgtggaaagagatcttcctcagtgagaccgattgagcatgaaaggaagaaaggagtgccttggactgaagacgaacataaattgtttctattgggtctgaagaagtatgggaaaggtgattggagaaatatatctcgcaattttgttattacaagaactccaacacaggttgctagtcatgctcagaagtacttcataaggcagctttcaggaggcaaagacaagaggagggctagcatacatgacataacaacagtgaatctcacagaaaccataacaacttcttcagaagacaccaatggatcctcttcaccacatgtgctctcacagcaacaacagccaaattctactcctactacaccaagaactcgttttcagtggagtaatcagtctaacacaggagtagctatgactctcaaccctgctcatgaaagagtcttcatgtctcattatggtgctaactcctttggggttaaaattgagggacagaatcttcatgagtcttcttacttgcgacctcagacacagaacatggttttccaaatgcaacagtcctctcaacactagttccatgcattatcacttgttgtagtgaattattaatgggcagaagtagaaccagaatcttctgtccatttcaataagtacagtgcttgagttgagctttttccccaagttcttatgtgaataccctagattgttggttagttattatgaacttgaaggaaggtacatacatttgtttcttcaacaaataagaacttcctgaaaggagtggcaggcaaccaagtccccaacgttggttttggttggtttttctatgtkgtctaagaataatggatttcaagccccgtgtwtaattaatgaaatgtttcmmcttrgrggc

SEQ ID NO: 58067 - protein, 308 aa, Glycine max
  peptide (1)..(308): Ceres Seq. ID no. 15220411
  misc_feature (138)..(185): Pfam Name: Myb-like DNA-binding domain Pfam Description: Myb-like DNA-binding domain
  misc_feature (16)..(208): Homolog of NCBI NO: 15229712 NR Description: MYB-family transcription factor -related
  misc_feature (1)..(225): Homolog of NCBI NO: 34908386 NR Description: P0529E05.19 [Oryza sativa (japonica
  misc_feature (16)..(290): Homolog of NCBI NO: 15239231 NR Description: hypothetical protein [Arabidopsis thaliana]
  misc_feature (18)..(235): Homolog of NCBI NO: 15240915 NR Description: myb family transcription factor [Arabidopsis
  misc_feature (12)..(302): Homolog of NCBI NO: 30687381 NR Description: MYB family transcription factor -related
  misc_feature (12)..(302): Homolog of NCBI NO: 7446171 NR Description: probable MYB family transcription factor
  misc_feature (13)..(302): Homolog of NCBI NO: 15237776 NR Description: I-box binding factor - like protein [Arabidopsis
  misc_feature (12)..(302): Homolog of NCBI NO: 18874265 NR Description: MYB-like transcription factor DVL1 [Antirrhinum
  misc_feature (12)..(303): Homolog of NCBI NO: 12005328 NR Description: unknown [Hevea brasiliensis]
  misc_feature (13)..(308): Homolog of NCBI NO: 18874263 NR Description: MYB-like transcription factor DIVARICATA
MKWESITLSSPTPCTPNSNTNWLVMEDNNSRSTKWTSEENKLFENALAVHDKDTPDRWHRVAEMIPGKTVVDVIRQYKELEVDVSNIEAGLIPVPGYSSTATSPFTLDWVNTPGYDGFKGCGKRSSSVRPIEHERKKGVPWTEDEHKLFLLGLKKYGKGDWRNISRNFVITRTPTQVASHAQKYFIRQLSGGKDKRRASIHDITTVNLTETITTSSEDTNGSSSPHVLSQQQQPNSTPTTPRTRFQWSNQSNTGVAMTLNPAHERVFMSHYGANSFGVKIEGQNLHESSYLRPQTQNMVFQMQQSSQH

SEQ ID NO: 58068 - protein, 284 aa, Glycine max
  peptide (1)..(284): Ceres Seq. ID no. 15220412
  misc_feature (114)..(161): Pfam Name: Myb-like DNA-binding domain Pfam Description: Myb-like DNA-binding domain
  misc_feature (1)..(184): Homolog of NCBI NO: 15229712 NR Description: MYB-family transcription factor -related
  misc_feature (1)..(201): Homolog of NCBI NO: 34908386 NR Description: P0529E05.19 [Oryza sativa (japonica
  misc_feature (1)..(266): Homolog of NCBI NO: 15239231 NR Description: hypothetical protein [Arabidopsis thaliana]
  misc_feature (1)..(211): Homolog of NCBI NO: 15240915 NR Description: myb family transcription factor [Arabidopsis
  misc_feature (1)..(278): Homolog of NCBI NO: 30687381 NR Description: MYB family transcription factor -related
  misc_feature (1)..(278): Homolog of NCBI NO: 7446171 NR Description: probable MYB family transcription factor
  misc_feature (1)..(278): Homolog of NCBI NO: 15237776 NR Description: I-box binding factor - like protein [Arabidopsis
  misc_feature (1)..(278): Homolog of NCBI NO: 18874265 NR Description: MYB-like transcription factor DVL1 [Antirrhinum
  misc_feature (1)..(279): Homolog of NCBI NO: 12005328 NR Description: unknown [Hevea brasiliensis]
  misc_feature (1)..(284): Homolog of NCBI NO: 18874263 NR Description: MYB-like transcription factor DIVARICATA
MEDNNSRSTKWTSEENKLFENALAVHDKDTPDRWHRVAEMIPGKTVVDVIRQYKELEVDVSNIEAGLIPVPGYSSTATSPFTLDWVNTPGYDGFKGCGKRSSSVRPIEHERKKGVPWTEDEHKLFLLGLKKYGKGDWRNISRNFVITRTPTQVASHAQKYFIRQLSGGKDKRRASIHDITTVNLTETITTSSEDTNGSSSPHVLSQQQQPNSTPTTPRTRFQWSNQSNTGVAMTLNPAHERVFMSHYGANSFGVKIEGQNLHESSYLRPQTQNMVFQMQQSSQH

SEQ ID NO: 58069 - protein, 245 aa, Glycine max
  peptide (1)..(245): Ceres Seq. ID no. 15220413
  misc_feature (75)..(122): Pfam Name: Myb-like DNA-binding domain Pfam Description: Myb-like DNA-binding domain
  misc_feature (1)..(145): Homolog of NCBI NO: 15229712 NR Description: MYB-family transcription factor -related
  misc_feature (1)..(162): Homolog of NCBI NO: 34908386 NR Description: P0529E05.19 [Oryza sativa (japonica
  misc_feature (1)..(227): Homolog of NCBI NO: 15239231 NR Description: hypothetical protein [Arabidopsis thaliana]
  misc_feature (1)..(172): Homolog of NCBI NO: 15240915 NR Description: myb family transcription factor [Arabidopsis
  misc_feature (1)..(239): Homolog of NCBI NO: 30687381 NR Description: MYB family transcription factor -related
  misc_feature (1)..(239): Homolog of NCBI NO: 7446171 NR Description: probable MYB family transcription factor
  misc_feature (1)..(239): Homolog of NCBI NO: 15237776 NR Description: I-box binding factor - like protein [Arabidopsis
  misc_feature (1)..(239): Homolog of NCBI NO: 18874265 NR Description: MYB-like transcription factor DVL1 [Antirrhinum
  misc_feature (1)..(240): Homolog of NCBI NO: 12005328 NR Description: unknown [Hevea brasiliensis]
  misc_feature (1)..(245): Homolog of NCBI NO: 18874263 NR Description: MYB-like transcription factor DIVARICATA
MIPGKTVVDVIRQYKELEVDVSNIEAGLIPVPGYSSTATSPFTLDWVNTPGYDGFKGCGKRSSSVRPIEHERKKGVPWTEDEHKLFLLGLKKYGKGDWRNISRNFVITRTPTQVASHAQKYFIRQLSGGKDKRRASIHDITTVNLTETITTSSEDTNGSSSPHVLSQQQQPNSTPTTPRTRFQWSNQSNTGVAMTLNPAHERVFMSHYGANSFGVKIEGQNLHESSYLRPQTQNMVFQMQQSSQH

SEQ ID NO: 58070 - DNA, 1798 bp, Glycine max
  misc_feature (1)..(1798): Ceres Seq. ID no. 14311667
atcttgttggtccattcgtgcggtaacggaaggagacaataagcgtctccatcgcttaaattgccgagaacttcattacccattatctgttacagttctacgctctcgctccaaaccccacttcagatttggtttactggaaggaaagtgcttgaaggacccaatctacacgagagatgcaatggcaataaacacacacatgttagcttcaatgtgttattattgctgccactgtgattaatgagtaagtcactgtgtcaaaggatatagagctgttttcttccagtgcatctttggtttgagatttatgtagttttctctgaaaagtgattactagtttccctcaaacaataatggaggcagcaaaggttctttcacactgcaaaactgccccttttggtttctctatcgtgagcaacaaagtatctctgagacctttcgacaaacattttcatgctgatgtacttgctaacagacccaagagcattagttttcaattgaattgttcctatggaaaccctttttcctctgtgctgaaacctgcaagaaaaagggctaattttttaccttctcccagatgctcaatttccagtagtgccagcactgaatctcaaaatccagtcctagagttctttagaaatgtgccatttgattcaataaaagctacacttctgcagttgactccaattgatgttgtgaagtggtctgggatattatgcatcatagctgcagccacaaaatggactatgaatatgcttttcagtcccttcttttggatgtattttagctggacgtggttgttctggccttggatggtggccatagggcttgcagtctatgggttatattgctttcggaaacatctgcacagtgaggcaaacatatttgagcaattggctattgttacatcagtttttacgtggctcactcttgttccacctggtcatttcaatggctaccttgaaggctggccttatgttttcttttttgtgtatcattatttctttttcttcaatgttagtgttagaaagcggttatatggagattattttgctcagccccatgacccaaagtgggacgtgaacttgccaatgtggtctcgcctattgttcagcacaggagtcatggttggccattggcttgcagcatttgaagggcctgagcttcacctcataccgggtgggtggagcaatcttggaatctgggctttaatcattacaactctgctaatgcagtataatgctacattgtatctcgctaagtattcagaaaatgtggtggagccaacttctgtagtgcaatttggaccttatcgttgggtccgtcatccaatatattcatcaacaatgcttttgtttgtaacatactgcattgcgcttcgagcacctctgagtctgctatttattgtggcagtatgcttgttgtattataagcagaaggcagagaaggaagaggatttgatggttgagacttttggccagagttacacagaatatgcaagcaaagttaagtacaagcttattccttttatctattagttgatctccagaagtttagtcagtcatcaaaatctgattgtactgtcaggtttaggcaaaagatagtgttaattctcaaaatccaagtgtatctctttgtttactctttactctgttatctttagtgtagccttaaattatggtatcatgtgcacttgtggtgattagatttttgaagattttggttttcaatgatgttttgtttcatagaacatgcaaaatttgactatataaatcttgtctatattaagctgtgtgcc

SEQ ID NO: 58071 - protein, 394 aa, Glycine max
  peptide (1)..(394): Ceres Seq. ID no. 14311668
  misc_feature (297)..(372): Pfam Name: Isoprenylcysteine carboxyl methyltransferase Pfam Description: Isoprenylcysteine carboxyl methyltransferase
  misc_feature (247)..(394): Homolog of NCBI NO: 21229585 NR Description: conserved hypothetical protein
  misc_feature (209)..(394): Homolog of NCBI NO: 15896653 NR Description: Predicted protein-S-isoprenylcysteine
  misc_feature (273)..(394): Homolog of NCBI NO: 24378738 NR Description: conserved hypothetical protein [Streptococcus
  misc_feature (297)..(394): Homolog of NCBI NO: 15921450 NR Description: 199aa long conserved hypothetical protein
  misc_feature (131)..(394): Homolog of NCBI NO: 19347912 NR Description: unknown protein [Arabidopsis thaliana]
  misc_feature (1)..(394): Homolog of NCBI NO: 21593420 NR Description: unknown [Arabidopsis thaliana]
  misc_feature (1)..(394): Homolog of NCBI NO: 15238431 NR Description: expressed protein [Arabidopsis thaliana]
MEAAKVLSHCKTAPFGFSIVSNKVSLRPFDKHFHADVLANRPKSISFQLNCSYGNPFSSVLKPARKRANFLPSPRCSISSSASTESQNPVLEFFRNVPFDSIKATLLQLTPIDVVKWSGILCIIAAATKWTMNMLFSPFFWMYFSWTWLFWPWMVAIGLAVYGLYCFRKHLHSEANIFEQLAIVTSVFTWLTLVPPGHFNGYLEGWPYVFFFVYHYFFFFNVSVRKRLYGDYFAQPHDPKWDVNLPMWSRLLFSTGVMVGHWLAAFEGPELHLIPGGWSNLGIWALIITTLLMQYNATLYLAKYSENVVEPTSVVQFGPYRWVRHPIYSSTMLLFVTYCIALRAPLSLLFIVAVCLLYYKQKAEKEEDLMVETFGQSYTEYASKVKYKLIPFIY

SEQ ID NO: 58072 - protein, 263 aa, Glycine max
  peptide (1)..(263): Ceres Seq. ID no. 14311669
  misc_feature (166)..(241): Pfam Name: Isoprenylcysteine carboxyl methyltransferase Pfam Description: Isoprenylcysteine carboxyl methyltransferase
  misc_feature (116)..(263): Homolog of NCBI NO: 21229585 NR Description: conserved hypothetical protein
  misc_feature (78)..(263): Homolog of NCBI NO: 15896653 NR Description: Predicted protein-S-isoprenylcysteine
  misc_feature (142)..(263): Homolog of NCBI NO: 24378738 NR Description: conserved hypothetical protein [Streptococcus
  misc_feature (166)..(263): Homolog of NCBI NO: 15921450 NR Description: 199aa long conserved hypothetical protein
  misc_feature (1)..(263): Homolog of NCBI NO: 19347912 NR Description: unknown protein [Arabidopsis thaliana]
  misc_feature (1)..(263): Homolog of NCBI NO: 21593420 NR Description: unknown [Arabidopsis thaliana]
  misc_feature (1)..(263): Homolog of NCBI NO: 15238431 NR Description: expressed protein [Arabidopsis thaliana]
MNMLFSPFFWMYFSWTWLFWPWMVAIGLAVYGLYCFRKHLHSEANIFEQLAIVTSVFTWLTLVPPGHFNGYLEGWPYVFFFVYHYFFFFNVSVRKRLYGDYFAQPHDPKWDVNLPMWSRLLFSTGVMVGHWLAAFEGPELHLIPGGWSNLGIWALIITTLLMQYNATLYLAKYSENVVEPTSVVQFGPYRWVRHPIYSSTMLLFVTYCIALRAPLSLLFIVAVCLLYYKQKAEKEEDLMVETFGQSYTEYASKVKYKLIPFIY

SEQ ID NO: 58073 - protein, 261 aa, Glycine max
  peptide (1)..(261): Ceres Seq. ID no. 14311670
  misc_feature (164)..(239): Pfam Name: Isoprenylcysteine carboxyl methyltransferase Pfam Description: Isoprenylcysteine carboxyl methyltransferase
  misc_feature (114)..(261): Homolog of NCBI NO: 21229585 NR Description: conserved hypothetical protein
  misc_feature (76)..(261): Homolog of NCBI NO: 15896653 NR Description: Predicted protein-S-isoprenylcysteine
  misc_feature (140)..(261): Homolog of NCBI NO: 24378738 NR Description: conserved hypothetical protein [Streptococcus
  misc_feature (164)..(261): Homolog of NCBI NO: 15921450 NR Description: 199aa long conserved hypothetical protein
  misc_feature (1)..(261): Homolog of NCBI NO: 19347912 NR Description: unknown protein [Arabidopsis thaliana]
  misc_feature (1)..(261): Homolog of NCBI NO: 21593420 NR Description: unknown [Arabidopsis thaliana]
  misc_feature (1)..(261): Homolog of NCBI NO: 15238431 NR Description: expressed protein [Arabidopsis thaliana]
MLFSPFFWMYFSWTWLFWPWMVAIGLAVYGLYCFRKHLHSEANIFEQLAIVTSVFTWLTLVPPGHFNGYLEGWPYVFFFVYHYFFFFNVSVRKRLYGDYFAQPHDPKWDVNLPMWSRLLFSTGVMVGHWLAAFEGPELHLIPGGWSNLGIWALIITTLLMQYNATLYLAKYSENVVEPTSVVQFGPYRWVRHPIYSSTMLLFVTYCIALRAPLSLLFIVAVCLLYYKQKAEKEEDLMVETFGQSYTEYASKVKYKLIPFIY

SEQ ID NO: 58074 - DNA, 1613 bp, Glycine max
  misc_feature (1)..(1613): Ceres Seq. ID no. 15168348
ttggacaggttctaaagtttttgatagcctcagaaacaaaatcagacctcatcatagttttgctaacacaagtacattcattctcaaaaggtttaatttcatcctttctttccctctcttttcattggtgtgcactttcacttgtggagctagctgcaccaacagcagtggaaattgccttgttcttgagatgtctggtgttcttctttgggtgagttctggacccaaagagaacatcaactccttggtgagtttttcatgcaggagtggtggtggtggtgaaagaacacaaaagaggttttctggaatcagttttgcaagtggtgcctctgctttttcaagtgcagtggcagctgagactttaagatcctcagaggagagggtctatgaagtggtgctgaagcaagcagctctggtaaaagaaaacaaaaggggtacaaagatagctctagatttggacaaagacgttgaaggtgatttcaccaatgtggatctgttgaatgcagcttatgatcggtgtggtgaagtctgtgctgagtatgccaagacattttacttaggcacacaattgatgactgcagagcgccgaaaagctatttgggcaatttatgtgtggtgcagaagaactgatgagctagtggatggcccaaatgcttcgcacatcacccccggggccttggacaggtgggagcaacgactgagtgatgtttttgaaggtcgaccctatgatatgtatgatgctgccctctcacatactgtctcaaagtacccagttgatattcagccattcaaggacatgatcgaagggatgaggatggacctgagaaagtcaagatacgataactttgatgagctctacctttattgctactatgttgctgggacagtaggccttatgagtgtcccagtaatggggatagcaccagaagcaaatgcttcaacagagagcatttataatgctgcattggctctaggcattgcaaatcaacttactaacatactcagagatgttggagaggatgctagaagaggaagagtatatctcccacaagatgaattggcactagctggcctttcagatgaagacattttcagcggaagagttacagacaaatggcggaaattcatgaagggacaaataaagagggcgaggatgttttttgatgaagcagagaggggagttgcagacctcaactcagctagcaggtggcctgtgtgggcatcattgttgttgtataggcaaatattagattccattgaagccaatgattataataacttcacaaaaagggcatatgtaggaaaagtaaagaagctattatcactacctactgcctatggtttttcacttctaggccctcagaagtttgccaaaatggttaggagataactgttacaatgtgtgatacttttcagttagagttgtatacatctcaatttaccatgtgttgaagcgcatgagcaacccattcaattcatttaatcaatttgcaagatatcttagtaatcagttttaaaatgtgtaaaaaagaagaaggaagaatgtatcaatccatttgtataccataaatttcagatatcattcttcaaagggatacaacattttacttttg

SEQ ID NO: 58075 - protein, 462 aa, Glycine max
  peptide (1)..(462): Ceres Seq. ID no. 15168349
  misc_feature (177)..(451): Pfam Name: Squalene/phytoene synthase Pfam Description: Squalene/phytoene synthase
  misc_feature (117)..(453): Homolog of NCBI NO: 1709885 NR Description: Phytoene synthase, chloroplast precursor
  misc_feature (109)..(451): Homolog of NCBI NO: 21553694 NR Description: phytoene synthase [Arabidopsis thaliana]
  misc_feature (109)..(451): Homolog of NCBI NO: 15237933 NR Description: phytoene synthase
  misc_feature (81)..(461): Homolog of NCBI NO: 585746 NR Description: Phytoene synthase 1, chloroplast precursor (Fruit
  misc_feature (101)..(455): Homolog of NCBI NO: 6959860 NR Description: phytoene synthase [Citrus unshiu]
  misc_feature (52)..(451): Homolog of NCBI NO: 585749 NR Description: Phytoene synthase, chloroplast precursor
  misc_feature (64)..(453): Homolog of NCBI NO: 21360353 NR Description: phytoene synthase [Tagetes erecta]
  misc_feature (76)..(453): Homolog of NCBI NO: 1346882 NR Description: Phytoene synthase, chloroplast precursor (MEL5)
  misc_feature (109)..(453): Homolog of NCBI NO: 40456029 NR Description: phytoene synthase [Momordica charantia var.
  misc_feature (114)..(453): Homolog of NCBI NO: 8928282 NR Description: Phytoene synthase, chloroplast precursor
WTGSKVFDSLRNKIRPHHSFANTSTFILKRFNFILSFPLFSLVCTFTCGASCTNSSGNCLVLEMSGVLLWVSSGPKENINSLVSFSCRSGGGGERTQKRFSGISFASGASAFSSAVAAETLRSSEERVYEVVLKQAALVKENKRGTKIALDLDKDVEGDFTNVDLLNAAYDRCGEVCAEYAKTFYLGTQLMTAERRKAIWAIYVWCRRTDELVDGPNASHITPGALDRWEQRLSDVFEGRPYDMYDAALSHTVSKYPVDIQPFKDMIEGMRMDLRKSRYDNFDELYLYCYYVAGTVGLMSVPVMGIAPEANASTESIYNAALALGIANQLTNILRDVGEDARRGRVYLPQDELALAGLSDEDIFSGRVTDKWRKFMKGQIKRARMFFDEAERGVADLNSASRWPVWASLLLYRQILDSIEANDYNNFTKRAYVGKVKKLLSLPTAYGFSLLGPQKFAKMVRR

SEQ ID NO: 58076 - protein, 399 aa, Glycine max
  peptide (1)..(399): Ceres Seq. ID no. 15168350
  misc_feature (114)..(388): Pfam Name: Squalene/phytoene synthase Pfam Description: Squalene/phytoene synthase
  misc_feature (54)..(390): Homolog of NCBI NO: 1709885 NR Description: Phytoene synthase, chloroplast precursor
  misc_feature (46)..(388): Homolog of NCBI NO: 21553694 NR Description: phytoene synthase [Arabidopsis thaliana]
  misc_feature (46)..(388): Homolog of NCBI NO: 15237933 NR Description: phytoene synthase
  misc_feature (18)..(398): Homolog of NCBI NO: 585746 NR Description: Phytoene synthase 1, chloroplast precursor (Fruit
  misc_feature (38)..(392): Homolog of NCBI NO: 6959860 NR Description: phytoene synthase [Citrus unshiu]
  misc_feature (1)..(388): Homolog of NCBI NO: 585749 NR Description: Phytoene synthase, chloroplast precursor
  misc_feature (1)..(390): Homolog of NCBI NO: 21360353 NR Description: phytoene synthase [Tagetes erecta]
  misc_feature (13)..(390): Homolog of NCBI NO: 1346882 NR Description: Phytoene synthase, chloroplast precursor (MEL5)
  misc_feature (46)..(390): Homolog of NCBI NO: 40456029 NR Description: phytoene synthase [Momordica charantia var.
  misc_feature (51)..(390): Homolog of NCBI NO: 8928282 NR Description: Phytoene synthase, chloroplast precursor
MSGVLLWVSSGPKENINSLVSFSCRSGGGGERTQKRFSGISFASGASAFSSAVAAETLRSSEERVYEVVLKQAALVKENKRGTKIALDLDKDVEGDFTNVDLLNAAYDRCGEVCAEYAKTFYLGTQLMTAERRKAIWAIYVWCRRTDELVDGPNASHITPGALDRWEQRLSDVFEGRPYDMYDAALSHTVSKYPVDIQPFKDMIEGMRMDLRKSRYDNFDELYLYCYYVAGTVGLMSVPVMGIAPEANASTESIYNAALALGIANQLTNILRDVGEDARRGRVYLPQDELALAGLSDEDIFSGRVTDKWRKFMKGQIKRARMFFDEAERGVADLNSASRWPVWASLLLYRQILDSIEANDYNNFTKRAYVGKVKKLLSLPTAYGFSLLGPQKFAKMVRR

SEQ ID NO: 58077 - protein, 272 aa, Glycine max
  peptide (1)..(272): Ceres Seq. ID no. 15168351
  misc_feature (1)..(261): Pfam Name: Squalene/phytoene synthase Pfam Description: Squalene/phytoene synthase
  misc_feature (1)..(263): Homolog of NCBI NO: 1709885 NR Description: Phytoene synthase, chloroplast precursor
  misc_feature (1)..(261): Homolog of NCBI NO: 21553694 NR Description: phytoene synthase [Arabidopsis thaliana]
  misc_feature (1)..(261): Homolog of NCBI NO: 15237933 NR Description: phytoene synthase
  misc_feature (1)..(271): Homolog of NCBI NO: 585746 NR Description: Phytoene synthase 1, chloroplast precursor (Fruit
  misc_feature (1)..(265): Homolog of NCBI NO: 6959860 NR Description: phytoene synthase [Citrus unshiu]
  misc_feature (1)..(261): Homolog of NCBI NO: 585749 NR Description: Phytoene synthase, chloroplast precursor
  misc_feature (1)..(263): Homolog of NCBI NO: 21360353 NR Description: phytoene synthase [Tagetes erecta]
  misc_feature (1)..(263): Homolog of NCBI NO: 1346882 NR Description: Phytoene synthase, chloroplast precursor (MEL5)
  misc_feature (1)..(263): Homolog of NCBI NO: 40456029 NR Description: phytoene synthase [Momordica charantia var.
  misc_feature (1)..(263): Homolog of NCBI NO: 8928282 NR Description: Phytoene synthase, chloroplast precursor
MTAERRKAIWAIYVWCRRTDELVDGPNASHITPGALDRWEQRLSDVFEGRPYDMYDAALSHTVSKYPVDIQPFKDMIEGMRMDLRKSRYDNFDELYLYCYYVAGTVGLMSVPVMGIAPEANASTESIYNAALALGIANQLTNILRDVGEDARRGRVYLPQDELALAGLSDEDIFSGRVTDKWRKFMKGQIKRARMFFDEAERGVADLNSASRWPVWASLLLYRQILDSIEANDYNNFTKRAYVGKVKKLLSLPTAYGFSLLGPQKFAKMVRR

SEQ ID NO: 58078 - DNA, 1188 bp, Glycine max
  misc_feature (1)..(1188): Ceres Seq. ID no. 15177225
ctgctcaatttgtgagattccaaagcaattctttgctgccaacacaatggattcaagagcttacatccttagagtcaccattgcaattctttgcatctcaatgctagcttccactcttttccctgtgtgtgatgctataaatcatggaagagcaataaggggtcacaaaatccgtagaagctccccaatcaaatctttaaagaaactgaaaataaaatctttaagacatttaaacaagtacacaccatttgattcatttgggtactcagactttgattcatatgggtactcaaactttgatgattcatatggctctccctcttccctacccttaccacctttcaattcactagcaccacatccacaacctacaccatcaagttccattgctcctccaaatttggcacctccaagcataggtggcaactcctctctcccagcactctcaccagttccaagctcacctcatggtgctgtctttgggccaccaaacccaagaagcatgccaccacctccttatcccttaagcccaccaaagcatgctccaagcctaagcccaccaaagagtgctccaagcctaaacccaccaccactagtgtacctcccacctgttgtgttcccaccacccccttcaccttctacgcaccgcaaaaagccgccacaatacgcactttggtgtgtggcaaagcccacggttcctgacccaataattcaggaggccatggactatgcctgtgggtctggtgcggattgcaagtcaattcagcccaatggaatgtgcttccagcccaacactttgctggcccatgcttcgtatgccttcaatagctactggcagaacactaagattggtggaggcacgtgtgattttggtggaactgccatgctagtcactgttgatccaagctatgacaaatgcaacttcatgttgacttagctgcccttgccatatagcacatgtttggagacataatgttcagtgttcaaatattctctctcatcccaacatggatttttgatgtaacaataataattaattccctggcccataagttattggagctacgtaggttgtctttcccccctttcttctcggattattatagctgtcgtatttggaagtatcttatcttttttgtaataatctcattatttttatcgccatttcattatcatgttcgttttgtt

SEQ ID NO: 58079 - protein, 311 aa, Glycine max
  peptide (1)..(311): Ceres Seq. ID no. 15177226
  misc_feature (106)..(235): Pfam Name: Extensin-like region Pfam Description: Extensin-like region
  misc_feature (223)..(308): Homolog of NCBI NO: 22775658 NR Description: glycosyl hydrolase family 17-like protein
  misc_feature (225)..(308): Homolog of NCBI NO: 34912962 NR Description: beta-1,3 glucanase-like protein
  misc_feature (223)..(302): Homolog of NCBI NO: 22328593 NR Description: glycosyl hydrolase family 17 [Arabidopsis
  misc_feature (223)..(302): Homolog of NCBI NO: 7487744 NR Description: hypothetical protein T6G15.150 - Arabidopsis
  misc_feature (112)..(302): Homolog of NCBI NO: 25402549 NR Description: hypothetical protein [imported] - Arabidopsis
  misc_feature (112)..(306): Homolog of NCBI NO: 22329437 NR Description: expressed protein [Arabidopsis thaliana]
  misc_feature (105)..(302): Homolog of NCBI NO: 40714691 NR Description: putative glucanase [Oryza sativa (japonica
  misc_feature (121)..(302): Homolog of NCBI NO: 37533178 NR Description: hypothetical protein [Oryza sativa (japonica
  misc_feature (108)..(311): Homolog of NCBI NO: 15240743 NR Description: glycosyl hydrolase family 17 [Arabidopsis
  misc_feature (92)..(311): Homolog of NCBI NO: 15219387 NR Description: hypothetical protein [Arabidopsis thaliana]
CSICEIPKQFFAANTMDSRAYILRVTIAILCISMLASTLFPVCDAINHGRAIRGHKIRRSSPIKSLKKLKIKSLRHLNKYTPFDSFGYSDFDSYGYSNFDDSYGSPSSLPLPPFNSLAPHPQPTPSSSIAPPNLAPPSIGGNSSLPALSPVPSSPHGAVFGPPNPRSMPPPPYPLSPPKHAPSLSPPKSAPSLNPPPLVYLPPVVFPPPPSPSTHRKKPPQYALWCVAKPTVPDPIIQEAMDYACGSGADCKSIQPNGMCFQPNTLLAHASYAFNSYWQNTKIGGGTCDFGGTAMLVTVDPSYDKCNFMLT

SEQ ID NO: 58080 - protein, 296 aa, Glycine max
  peptide (1)..(296): Ceres Seq. ID no. 15177227
  misc_feature (91)..(220): Pfam Name: Extensin-like region Pfam Description: Extensin-like region
  misc_feature (208)..(293): Homolog of NCBI NO: 22775658 NR Description: glycosyl hydrolase family 17-like protein
  misc_feature (210)..(293): Homolog of NCBI NO: 34912962 NR Description: beta-1,3 glucanase-like protein
  misc_feature (208)..(287): Homolog of NCBI NO: 22328593 NR Description: glycosyl hydrolase family 17 [Arabidopsis
  misc_feature (208)..(287): Homolog of NCBI NO: 7487744 NR Description: hypothetical protein T6G15.150 - Arabidopsis
  misc_feature (97)..(287): Homolog of NCBI NO: 25402549 NR Description: hypothetical protein [imported] - Arabidopsis
  misc_feature (97)..(291): Homolog of NCBI NO: 22329437 NR Description: expressed protein [Arabidopsis thaliana]
  misc_feature (90)..(287): Homolog of NCBI NO: 40714691 NR Description: putative glucanase [Oryza sativa (japonica
  misc_feature (106)..(287): Homolog of NCBI NO: 37533178 NR Description: hypothetical protein [Oryza sativa (japonica
  misc_feature (93)..(296): Homolog of NCBI NO: 15240743 NR Description: glycosyl hydrolase family 17 [Arabidopsis
  misc_feature (77)..(296): Homolog of NCBI NO: 15219387 NR Description: hypothetical protein [Arabidopsis thaliana]
MDSRAYILRVTIAILCISMLASTLFPVCDAINHGRAIRGHKIRRSSPIKSLKKLKIKSLRHLNKYTPFDSFGYSDFDSYGYSNFDDSYGSPSSLPLPPFNSLAPHPQPTPSSSIAPPNLAPPSIGGNSSLPALSPVPSSPHGAVFGPPNPRSMPPPPYPLSPPKHAPSLSPPKSAPSLNPPPLVYLPPVVFPPPPSPSTHRKKPPQYALWCVAKPTVPDPIIQEAMDYACGSGADCKSIQPNGMCFQPNTLLAHASYAFNSYWQNTKIGGGTCDFGGTAMLVTVDPSYDKCNFMLT

SEQ ID NO: 58081 - protein, 278 aa, Glycine max
  peptide (1)..(278): Ceres Seq. ID no. 15177228
  misc_feature (73)..(202): Pfam Name: Extensin-like region Pfam Description: Extensin-like region
  misc_feature (190)..(275): Homolog of NCBI NO: 22775658 NR Description: glycosyl hydrolase family 17-like protein
  misc_feature (192)..(275): Homolog of NCBI NO: 34912962 NR Description: beta-1,3 glucanase-like protein
  misc_feature (190)..(269): Homolog of NCBI NO: 22328593 NR Description: glycosyl hydrolase family 17 [Arabidopsis
  misc_feature (190)..(269): Homolog of NCBI NO: 7487744 NR Description: hypothetical protein T6G15.150 - Arabidopsis
  misc_feature (79)..(269): Homolog of NCBI NO: 25402549 NR Description: hypothetical protein [imported] - Arabidopsis
  misc_feature (79)..(273): Homolog of NCBI NO: 22329437 NR Description: expressed protein [Arabidopsis thaliana]
  misc_feature (72)..(269): Homolog of NCBI NO: 40714691 NR Description: putative glucanase [Oryza sativa (japonica
  misc_feature (88)..(269): Homolog of NCBI NO: 37533178 NR Description: hypothetical protein [Oryza sativa (japonica
  misc_feature (75)..(278): Homolog of NCBI NO: 15240743 NR Description: glycosyl hydrolase family 17 [Arabidopsis
  misc_feature (59)..(278): Homolog of NCBI NO: 15219387 NR Description: hypothetical protein [Arabidopsis thaliana]
MLASTLFPVCDAINHGRAIRGHKIRRSSPIKSLKKLKIKSLRHLNKYTPFDSFGYSDFDSYGYSNFDDSYGSPSSLPLPPFNSLAPHPQPTPSSSIAPPNLAPPSIGGNSSLPALSPVPSSPHGAVFGPPNPRSMPPPPYPLSPPKHAPSLSPPKSAPSLNPPPLVYLPPVVFPPPPSPSTHRKKPPQYALWCVAKPTVPDPIIQEAMDYACGSGADCKSIQPNGMCFQPNTLLAHASYAFNSYWQNTKIGGGTCDFGGTAMLVTVDPSYDKCNFMLT

SEQ ID NO: 58082 - DNA, 921 bp, Glycine max
  misc_feature (1)..(921): Ceres Seq. ID no. 13594354
aaattcctcgacttagctatcaattcattcataaagaaataaaaacaaaagagaagcacgaacagtaactttagaagatcgatcatcatcaatggctgtccaagtttatattgtgtactactctatgtacgggcatgtggagagattagcagaagaaataaagaaaggagctgattcggtggaaggcgttgaggccaaactatggcaggtagctgagatattgccagaagaggttcttggcaaaatgggagcaccaccaaagagtgacgtaccaatcattacccctaatgagctctctgaggctgatgggtttgtctttggcttcccaacaagatttggaatgatggctgctcagttcaaagcttttatagatgcaactggaggtttgtggaaaacacaacaacttgcagggaagccggctggaatcttctatagcactagttcccagggtggtggacaagagactacagcgctaactgctataactcagttggttcatcatggaatgctatttgttccaattggatacacatttggtgctggaatgtttgagatggaggaactcaaaggtggaagcccatatggttcaggaacttatgctggtgatggttcaagacagccaactaagcttgaactggagcaagcattccaccaaggcaagtatattgccggcatcacaaagaagctcaaggaagctgcataatgttgaatcaattaagatttagaattaaatatatgtttgagaatcgttcattatattttagtcctagaatgttctgagttctgtttctttaggtgcttgcatgttatagttttcttatctttcaaaaagaaaatactatgtattgagttatatttttatgttacactacggtgtagtgattattgaaatttattgaataaaggaagtttgttttgtcg

SEQ ID NO: 58083 - protein, 203 aa, Glycine max
  peptide (1)..(203): Ceres Seq. ID no. 15221337
  misc_feature (14)..(152): Pfam Name: NADPH-dependent FMN reductase Pfam Description: NADPH-dependent FMN reductase
  misc_feature (1)..(200): Homolog of NCBI NO: 2564066 NR Description: LEDI-3 protein [Lithospermum erythrorhizon]
  misc_feature (38)..(203): Homolog of NCBI NO: 37724581 NR Description: putative quinone reductase [Vitis vinifera]
  misc_feature (1)..(203): Homolog of NCBI NO: 34910128 NR Description: putative 1,4-benzoquinone reductase
  misc_feature (1)..(203): Homolog of NCBI NO: 7445353 NR Description: hypothetical protein M4I22.80 - Arabidopsis
  misc_feature (1)..(203): Homolog of NCBI NO: 12484052 NR Description: quinone-oxidoreductase QR2 [Triphysaria
  misc_feature (1)..(203): Homolog of NCBI NO: 38636776 NR Description: putative quinone-oxidoreductase QR2
  misc_feature (4)..(200): Homolog of NCBI NO: 21068664 NR Description: putative quinone oxidoreductase [Cicer arietinum]
  misc_feature (1)..(200): Homolog of NCBI NO: 5031275 NR Description: unknown [Prunus armeniaca]
  misc_feature (1)..(203): Homolog of NCBI NO: 30687535 NR Description: quinone reductase family [Arabidopsis thaliana]
  misc_feature (1)..(200): Homolog of NCBI NO: 15239652 NR Description: quinone reductase, putative [Arabidopsis
MAVQVYIVYYSMYGHVERLAEEIKKGADSVEGVEAKLWQVAEILPEEVLGKMGAPPKSDVPIITPNELSEADGFVFGFPTRFGMMAAQFKAFIDATGGLWKTQQLAGKPAGIFYSTSSQGGGQETTALTAITQLVHHGMLFVPIGYTFGAGMFEMEELKGGSPYGSGTYAGDGSRQPTKLELEQAFHQGKYIAGITKKLKEAA

SEQ ID NO: 58084 - protein, 192 aa, Glycine max
  peptide (1)..(192): Ceres Seq. ID no. 15221338
  misc_feature (3)..(141): Pfam Name: NADPH-dependent FMN reductase Pfam Description: NADPH-dependent FMN reductase
  misc_feature (1)..(189): Homolog of NCBI NO: 2564066 NR Description: LEDI-3 protein [Lithospermum erythrorhizon]
  misc_feature (27)..(192): Homolog of NCBI NO: 37724581 NR Description: putative quinone reductase [Vitis vinifera]
  misc_feature (1)..(192): Homolog of NCBI NO: 34910128 NR Description: putative 1,4-benzoquinone reductase
  misc_feature (1)..(192): Homolog of NCBI NO: 7445353 NR Description: hypothetical protein M4I22.80 - Arabidopsis
  misc_feature (1)..(192): Homolog of NCBI NO: 12484052 NR Description: quinone-oxidoreductase QR2 [Triphysaria
  misc_feature (1)..(192): Homolog of NCBI NO: 38636776 NR Description: putative quinone-oxidoreductase QR2
  misc_feature (1)..(189): Homolog of NCBI NO: 21068664 NR Description: putative quinone oxidoreductase [Cicer arietinum]
  misc_feature (1)..(189): Homolog of NCBI NO: 5031275 NR Description: unknown [Prunus armeniaca]
  misc_feature (1)..(192): Homolog of NCBI NO: 30687535 NR Description: quinone reductase family [Arabidopsis thaliana]
  misc_feature (1)..(189): Homolog of NCBI NO: 15239652 NR Description: quinone reductase, putative [Arabidopsis
MYGHVERLAEEIKKGADSVEGVEAKLWQVAEILPEEVLGKMGAPPKSDVPIITPNELSEADGFVFGFPTRFGMMAAQFKAFIDATGGLWKTQQLAGKPAGIFYSTSSQGGGQETTALTAITQLVHHGMLFVPIGYTFGAGMFEMEELKGGSPYGSGTYAGDGSRQPTKLELEQAFHQGKYIAGITKKLKEAA

SEQ ID NO: 58085 - protein, 152 aa, Glycine max
  peptide (1)..(152): Ceres Seq. ID no. 15221339
  misc_feature (1)..(101): Pfam Name: NADPH-dependent FMN reductase Pfam Description: NADPH-dependent FMN reductase
  misc_feature (1)..(149): Homolog of NCBI NO: 2564066 NR Description: LEDI-3 protein [Lithospermum erythrorhizon]
  misc_feature (1)..(152): Homolog of NCBI NO: 37724581 NR Description: putative quinone reductase [Vitis vinifera]
  misc_feature (1)..(152): Homolog of NCBI NO: 34910128 NR Description: putative 1,4-benzoquinone reductase
  misc_feature (1)..(152): Homolog of NCBI NO: 7445353 NR Description: hypothetical protein M4I22.80 - Arabidopsis
  misc_feature (1)..(152): Homolog of NCBI NO: 12484052 NR Description: quinone-oxidoreductase QR2 [Triphysaria
  misc_feature (1)..(152): Homolog of NCBI NO: 38636776 NR Description: putative quinone-oxidoreductase QR2
  misc_feature (1)..(149): Homolog of NCBI NO: 21068664 NR Description: putative quinone oxidoreductase [Cicer arietinum]
  misc_feature (1)..(149): Homolog of NCBI NO: 5031275 NR Description: unknown [Prunus armeniaca]
  misc_feature (1)..(152): Homolog of NCBI NO: 30687535 NR Description: quinone reductase family [Arabidopsis thaliana]
  misc_feature (1)..(149): Homolog of NCBI NO: 15239652 NR Description: quinone reductase, putative [Arabidopsis
MGAPPKSDVPIITPNELSEADGFVFGFPTRFGMMAAQFKAFIDATGGLWKTQQLAGKPAGIFYSTSSQGGGQETTALTAITQLVHHGMLFVPIGYTFGAGMFEMEELKGGSPYGSGTYAGDGSRQPTKLELEQAFHQGKYIAGITKKLKEAA

SEQ ID NO: 58086 - DNA, 1211 bp, Glycine max
  misc_feature (1)..(1211): Ceres Seq. ID no. 13594359
aaaaaaccctataaaacttaaatttcaggcataaactgagagagagataacatcgttgcagtggcgcgcccaatggctctgggaatctctaacatactgcactgccccaaattgagtttctcccacaataattttctccccaaagttccaacctctatcagcctcaggtttccccagacagcagcatggagtgatagaaagattatctgtgctgctgcatctgcggcaggaagctctaatcccgatggtgaatttaatccttatgaggtgctaggtgtaagccctattgagaaatttgacatggtcaaggcagcatatgctaaaaaaaagaaggaggctgagatgaatggcgatgaagcaactgcttcaagactggaaaaggcatatgacaaactcatgatggctcaattgtctaatcggaaaaagggtgtgacttttggatcatttaaggtttcaaaggagatcaagtatgctgacaagcttccagttataccttgggggccaaggcttactaaatcaagtcaaaatgacatgcgcatcaacttggcaatatctgctgtttttacagcttggatccttgtcaagcgcagtgctgaatataaacctttgcagtttttagcctttgcctttgtttataggctttttgagaagttaaaagcctctgaatctcctgtaacccccaaatataatgaagagggtgaagacacaggagaaggactccgcatgggaaaacgactgctccgatcactagccttggtttttggatgtgtagctatttcatctttggcatacactttcattttgaacataattgagtttgcaggtggttttattcctactcttttgtacaacagtcaggagttgataatcaccacttcatcggcactcatgctttatatcatggcatcttattatggatagtggagtgtgtcttgaagacgaagaaaccatgcatctattcaccatccctttttttttttaagtctttttcctcccttctctttcttttgttcttattgtgaactaaagtgcttttcttacaaattttgtcaaaagagatgctttttccttgttttaatatactaaattagggatagtgtcaactttcttatggtacttttttcttttcttttttgggaagggaggggggtcatttatattgattttgactattcacatcatagtggtatataagtcttgtattcttgctc

SEQ ID NO: 58087 - protein, 282 aa, Glycine max
  peptide (1)..(282): Ceres Seq. ID no. 13594360
  misc_feature (62)..(123): Pfam Name: DnaJ domain Pfam Description: DnaJ domain
  misc_feature (207)..(281): Homolog of NCBI NO: 37535386 NR Description: unknown protein [Oryza sativa (japonica
  misc_feature (44)..(146): Homolog of NCBI NO: 37535386 NR Description: unknown protein [Oryza sativa (japonica
  misc_feature (31)..(262): Homolog of NCBI NO: 7485979 NR Description: hypothetical protein F22O13.12 - Arabidopsis
  misc_feature (1)..(262): Homolog of NCBI NO: 25341936 NR Description: protein F22O13.12 [imported] - Arabidopsis
  misc_feature (1)..(281): Homolog of NCBI NO: 23397051 NR Description: unknown protein [Arabidopsis thaliana]
  misc_feature (1)..(281): Homolog of NCBI NO: 21593057 NR Description: unknown [Arabidopsis thaliana]
  misc_feature (1)..(281): Homolog of NCBI NO: 18390922 NR Description: expressed protein [Arabidopsis thaliana]
MALGISNILHCPKLSFSHNNFLPKVPTSISLRFPQTAAWSDRKIICAAASAAGSSNPDGEFNPYEVLGVSPIEKFDMVKAAYAKKKKEAEMNGDEATASRLEKAYDKLMMAQLSNRKKGVTFGSFKVSKEIKYADKLPVIPWGPRLTKSSQNDMRINLAISAVFTAWILVKRSAEYKPLQFLAFAFVYRLFEKLKASESPVTPKYNEEGEDTGEGLRMGKRLLRSLALVFGCVAISSLAYTFILNIIEFAGGFIPTLLYNSQELIITTSSALMLYIMASYYG

SEQ ID NO: 58088 - protein, 206 aa, Glycine max
  peptide (1)..(206): Ceres Seq. ID no. 13594361
  misc_feature (1)..(47): Pfam Name: DnaJ domain Pfam Description: DnaJ domain
  misc_feature (131)..(205): Homolog of NCBI NO: 37535386 NR Description: unknown protein [Oryza sativa (japonica
  misc_feature (1)..(70): Homolog of NCBI NO: 37535386 NR Description: unknown protein [Oryza sativa (japonica
  misc_feature (1)..(186): Homolog of NCBI NO: 7485979 NR Description: hypothetical protein F22O13.12 - Arabidopsis
  misc_feature (1)..(186): Homolog of NCBI NO: 25341936 NR Description: protein F22O13.12 [imported] - Arabidopsis
  misc_feature (1)..(205): Homolog of NCBI NO: 23397051 NR Description: unknown protein [Arabidopsis thaliana]
  misc_feature (1)..(205): Homolog of NCBI NO: 21593057 NR Description: unknown [Arabidopsis thaliana]
  misc_feature (1)..(205): Homolog of NCBI NO: 18390922 NR Description: expressed protein [Arabidopsis thaliana]
MVKAAYAKKKKEAEMNGDEATASRLEKAYDKLMMAQLSNRKKGVTFGSFKVSKEIKYADKLPVIPWGPRLTKSSQNDMRINLAISAVFTAWILVKRSAEYKPLQFLAFAFVYRLFEKLKASESPVTPKYNEEGEDTGEGLRMGKRLLRSLALVFGCVAISSLAYTFILNIIEFAGGFIPTLLYNSQELIITTSSALMLYIMASYYG

SEQ ID NO: 58089 - protein, 192 aa, Glycine max
  peptide (1)..(192): Ceres Seq. ID no. 13594362
  misc_feature (117)..(191): Homolog of NCBI NO: 37535386 NR Description: unknown protein [Oryza sativa (japonica
  misc_feature (1)..(56): Homolog of NCBI NO: 37535386 NR Description: unknown protein [Oryza sativa (japonica
  misc_feature (1)..(172): Homolog of NCBI NO: 7485979 NR Description: hypothetical protein F22O13.12 - Arabidopsis
  misc_feature (1)..(172): Homolog of NCBI NO: 25341936 NR Description: protein F22O13.12 [imported] - Arabidopsis
  misc_feature (1)..(191): Homolog of NCBI NO: 23397051 NR Description: unknown protein [Arabidopsis thaliana]
  misc_feature (1)..(191): Homolog of NCBI NO: 21593057 NR Description: unknown [Arabidopsis thaliana]
  misc_feature (1)..(191): Homolog of NCBI NO: 18390922 NR Description: expressed protein [Arabidopsis thaliana]
MNGDEATASRLEKAYDKLMMAQLSNRKKGVTFGSFKVSKEIKYADKLPVIPWGPRLTKSSQNDMRINLAISAVFTAWILVKRSAEYKPLQFLAFAFVYRLFEKLKASESPVTPKYNEEGEDTGEGLRMGKRLLRSLALVFGCVAISSLAYTFILNIIEFAGGFIPTLLYNSQELIITTSSALMLYIMASYYG

SEQ ID NO: 58090 - DNA, 796 bp, Glycine max
  misc_feature (1)..(796): Ceres Seq. ID no. 12608513
attctctctttcccctgtaatctctatatattgtttacaattattcgagagtcatggcaacaagggtgcttttgttgatggccctcaccctctatatcttccccattgctacagcaacattccatgtcaagggttccgtttattgtgatacctgccgtgctggattcgaaaccaatgccaccttttatattcgaggtgcaagggtcggaattcagtgcaaagagaggaagaccatgaaggtagctttctactctgagggtgtgacggactccacgggaacataccacattgaggttgaaaatgaccaccgtgacaatatttgcgaatgcttgcttgttaaaagccctatcaaatggtgtagcaccccagactctgggcgtgacaaatccagcatagtactaacccactcccaaaatggcatagtcaaccatcttcactatgcaaatgctatgggttacttgagggacgaacccttgcctgaatgccacaaactgcttaaatactacttggcagactcagatgtttgatcaataaggtagaagaacgacttgttctttgtttaaatcatgtgttaatttaacgacggatctatttctatggttaagtatttgttgacatcagagtggtactatgtattagttactagcttgttactacttagttttgcttcatatgtctgtttgtaattaagtcacttaattgtggcgtcgtaatgattgatgatgtttaagtctcttatttaattttatgacaatgaagagaaaaaagggtacagacaatgctaaatgcatggttt

SEQ ID NO: 58091 - protein, 157 aa, Glycine max
  peptide (1)..(157): Ceres Seq. ID no. 12608514
  misc_feature (25)..(144): Pfam Name: Pollen proteins Ole e I family Pfam Description: Pollen proteins Ole e I family
  misc_feature (26)..(144): Homolog of NCBI NO: 29836469 NR Description: putative SAH7 protein [Gossypium barbadense]
  misc_feature (7)..(157): Homolog of NCBI NO: 15218200 NR Description: allergen, putative
  misc_feature (5)..(151): Homolog of NCBI NO: 37533594 NR Description: putative Pollen specific protein C13 precursor
  misc_feature (1)..(156): Homolog of NCBI NO: 18413144 NR Description: Expressed protein
  misc_feature (25)..(156): Homolog of NCBI NO: 416731 NR Description: Pollen specific protein C13 precursor
  misc_feature (7)..(156): Homolog of NCBI NO: 322854 NR Description: pollen-specific protein - rice
  misc_feature (22)..(154): Homolog of NCBI NO: 25990491 NR Description: LLP-B3 protein [Lilium longiflorum]
  misc_feature (7)..(156): Homolog of NCBI NO: 38347168 NR Description: OSJNBa0039C07.14 [Oryza sativa (japonica
  misc_feature (5)..(156): Homolog of NCBI NO: 15238066 NR Description: pollen allergen -like protein; protein id:
  misc_feature (4)..(156): Homolog of NCBI NO: 6561156 NR Description: allergen-like protein BRSn20 [Sambucus nigra]
MATRVLLLMALTLYIFPIATATFHVKGSVYCDTCRAGFETNATFYIRGARVGIQCKERKTMKVAFYSEGVTDSTGTYHIEVENDHRDNICECLLVKSPIKWCSTPDSGRDKSSIVLTHSQNGIVNHLHYANAMGYLRDEPLPECHKLLKYYLADSDV

SEQ ID NO: 58092 - protein, 149 aa, Glycine max
  peptide (1)..(149): Ceres Seq. ID no. 12608515
  misc_feature (17)..(136): Pfam Name: Pollen proteins Ole e I family Pfam Description: Pollen proteins Ole e I family
  misc_feature (18)..(136): Homolog of NCBI NO: 29836469 NR Description: putative SAH7 protein [Gossypium barbadense]
  misc_feature (1)..(149): Homolog of NCBI NO: 15218200 NR Description: allergen, putative
  misc_feature (1)..(143): Homolog of NCBI NO: 37533594 NR Description: putative Pollen specific protein C13 precursor
  misc_feature (1)..(148): Homolog of NCBI NO: 18413144 NR Description: Expressed protein
  misc_feature (17)..(148): Homolog of NCBI NO: 416731 NR Description: Pollen specific protein C13 precursor
  misc_feature (1)..(148): Homolog of NCBI NO: 322854 NR Description: pollen-specific protein - rice
  misc_feature (14)..(146): Homolog of NCBI NO: 25990491 NR Description: LLP-B3 protein [Lilium longiflorum]
  misc_feature (1)..(148): Homolog of NCBI NO: 38347168 NR Description: OSJNBa0039C07.14 [Oryza sativa (japonica
  misc_feature (1)..(148): Homolog of NCBI NO: 15238066 NR Description: pollen allergen -like protein; protein id:
  misc_feature (1)..(148): Homolog of NCBI NO: 6561156 NR Description: allergen-like protein BRSn20 [Sambucus nigra]
MALTLYIFPIATATFHVKGSVYCDTCRAGFETNATFYIRGARVGIQCKERKTMKVAFYSEGVTDSTGTYHIEVENDHRDNICECLLVKSPIKWCSTPDSGRDKSSIVLTHSQNGIVNHLHYANAMGYLRDEPLPECHKLLKYYLADSDV

SEQ ID NO: 58093 - protein, 97 aa, Glycine max
  peptide (1)..(97): Ceres Seq. ID no. 12608516
  misc_feature (1)..(84): Pfam Name: Pollen proteins Ole e I family Pfam Description: Pollen proteins Ole e I family
  misc_feature (1)..(84): Homolog of NCBI NO: 29836469 NR Description: putative SAH7 protein [Gossypium barbadense]
  misc_feature (1)..(97): Homolog of NCBI NO: 15218200 NR Description: allergen, putative
  misc_feature (1)..(91): Homolog of NCBI NO: 37533594 NR Description: putative Pollen specific protein C13 precursor
  misc_feature (1)..(96): Homolog of NCBI NO: 18413144 NR Description: Expressed protein
  misc_feature (1)..(96): Homolog of NCBI NO: 416731 NR Description: Pollen specific protein C13 precursor
  misc_feature (1)..(96): Homolog of NCBI NO: 322854 NR Description: pollen-specific protein - rice
  misc_feature (1)..(94): Homolog of NCBI NO: 25990491 NR Description: LLP-B3 protein [Lilium longiflorum]
  misc_feature (1)..(96): Homolog of NCBI NO: 38347168 NR Description: OSJNBa0039C07.14 [Oryza sativa (japonica
  misc_feature (1)..(96): Homolog of NCBI NO: 15238066 NR Description: pollen allergen -like protein; protein id:
  misc_feature (1)..(96): Homolog of NCBI NO: 6561156 NR Description: allergen-like protein BRSn20 [Sambucus nigra]
MKVAFYSEGVTDSTGTYHIEVENDHRDNICECLLVKSPIKWCSTPDSGRDKSSIVLTHSQNGIVNHLHYANAMGYLRDEPLPECHKLLKYYLADSDV

SEQ ID NO: 58094 - DNA, 1298 bp, Glycine max
  misc_feature (1)..(1298): Ceres Seq. ID no. 14315846
aaaacccacgtccgtgcccttgaagctaagcaacagtacaaccaaagactcctccaagctgtctgttttcctgtgtagttcttttgtctgctttcctttgtccttgagagggtttcatttttttgcgtatcacaaaaggtaacagagtcaaaaccctgcaaaaagtacaaaatgatgccaggcaatggacagttaactgttcctccgggcttcaggttccaccctactgatgaggagcttctctactattatctgaggaagaaagtttcttatgaagtcattgatcttgatgtcataagagaagtagatctcaacaaacttgagccttgggacctcaaagataagtgtaggattggatcagggcctcagaatgagtggtatttcttcagccataaggacaagaaatacccaacaggaaccagaacaaatcgagcaactacagctggtttttggaaagcaactggaagagacaagtccatataccacactaattccaagaggattggcatgaggaaaaccctagttttctacactggtcgtgctcctcatggccagaagactgattggatcatgcatgagtatcgccttgatgaagatgatgctgatgttcaagaagatgggtgggtggtatgcagggtcttcaaaaagaaaaaccaaagccgaggtttccaacaagaacttgaagaagaagagcacttaaccacccacatgagagcaagtggtccatgccaggttctagagcagaagcatcttcacatgcaaggaggaccatatgatcattacaactttgatgggacaatgcacctcccacagttgttcagtccagaatcagctattgcaccacctacaaattcttccttggccttatccatgaatgccatggacatccttgagtgctctcaaaacctgttgaggctcacaaccactggctgtggacttaatcttatgcagcaacaacaagaagagaggttcagtggtgactggtctttcttggacaagctactagcatcacaccatggcatggatcaaagcaaatgtaaccctcctactaatcatcatgctgcaactgttgtgggcacttctgctcaaaaattcccatttcattaccttggctgtgacaccacccatgatatcatgaaattttccaagtaggaagggatattgcattttaatgtgttattatacttaaggtgatcatgaggtgagaaatatttggtttctaagtatgtgtaatatgtagcaccttgttagatactcattgagattccactcattaatttagttatttcttgagtgtc

SEQ ID NO: 58095 - protein, 326 aa, Glycine max
  peptide (1)..(326): Ceres Seq. ID no. 14315847
  misc_feature (10)..(140): Pfam Name: No apical meristem (NAM) protein Pfam Description: No apical meristem (NAM) protein
  misc_feature (5)..(161): Homolog of NCBI NO: 7485760 NR Description: NAM (no apical meristem)-like protein
  misc_feature (5)..(164): Homolog of NCBI NO: 15223299 NR Description: No apical meristem (NAM) protein family
  misc_feature (10)..(291): Homolog of NCBI NO: 38605889 NR Description: OSJNBb0020O11.1 [Oryza sativa (japonica
  misc_feature (1)..(161): Homolog of NCBI NO: 15217491 NR Description: No apical meristem (NAM) protein family
  misc_feature (10)..(287): Homolog of NCBI NO: 15235031 NR Description: No apical meristem (NAM) protein family
  misc_feature (143)..(161): Homolog of NCBI NO: 6006373 NR Description: Similar to NAM like protein (AC005310)
  misc_feature (5)..(141): Homolog of NCBI NO: 6006373 NR Description: Similar to NAM like protein (AC005310)
  misc_feature (1)..(218): Homolog of NCBI NO: 6730944 NR Description: OsNAC7 protein [Oryza sativa]
  misc_feature (192)..(297): Homolog of NCBI NO: 15219419 NR Description: NAM (no apical meristem) protein -related
  misc_feature (4)..(175): Homolog of NCBI NO: 15219419 NR Description: NAM (no apical meristem) protein -related
MMPGNGQLTVPPGFRFHPTDEELLYYYLRKKVSYEVIDLDVIREVDLNKLEPWDLKDKCRIGSGPQNEWYFFSHKDKKYPTGTRTNRATTAGFWKATGRDKSIYHTNSKRIGMRKTLVFYTGRAPHGQKTDWIMHEYRLDEDDADVQEDGWVVCRVFKKKNQSRGFQQELEEEEHLTTHMRASGPCQVLEQKHLHMQGGPYDHYNFDGTMHLPQLFSPESAIAPPTNSSLALSMNAMDILECSQNLLRLTTTGCGLNLMQQQQEERFSGDWSFLDKLLASHHGMDQSKCNPPTNHHAATVVGTSAQKFPFHYLGCDTTHDIMKFSK

SEQ ID NO: 58096 - protein, 325 aa, Glycine max
  peptide (1)..(325): Ceres Seq. ID no. 14315848
  misc_feature (9)..(139): Pfam Name: No apical meristem (NAM) protein Pfam Description: No apical meristem (NAM) protein
  misc_feature (4)..(160): Homolog of NCBI NO: 7485760 NR Description: NAM (no apical meristem)-like protein
  misc_feature (4)..(163): Homolog of NCBI NO: 15223299 NR Description: No apical meristem (NAM) protein family
  misc_feature (9)..(290): Homolog of NCBI NO: 38605889 NR Description: OSJNBb0020O11.1 [Oryza sativa (japonica
  misc_feature (1)..(160): Homolog of NCBI NO: 15217491 NR Description: No apical meristem (NAM) protein family
  misc_feature (9)..(286): Homolog of NCBI NO: 15235031 NR Description: No apical meristem (NAM) protein family
  misc_feature (142)..(160): Homolog of NCBI NO: 6006373 NR Description: Similar to NAM like protein (AC005310)
  misc_feature (4)..(140): Homolog of NCBI NO: 6006373 NR Description: Similar to NAM like protein (AC005310)
  misc_feature (1)..(217): Homolog of NCBI NO: 6730944 NR Description: OsNAC7 protein [Oryza sativa]
  misc_feature (191)..(296): Homolog of NCBI NO: 15219419 NR Description: NAM (no apical meristem) protein -related
  misc_feature (3)..(174): Homolog of NCBI NO: 15219419 NR Description: NAM (no apical meristem) protein -related
MPGNGQLTVPPGFRFHPTDEELLYYYLRKKVSYEVIDLDVIREVDLNKLEPWDLKDKCRIGSGPQNEWYFFSHKDKKYPTGTRTNRATTAGFWKATGRDKSIYHTNSKRIGMRKTLVFYTGRAPHGQKTDWIMHEYRLDEDDADVQEDGWVVCRVFKKKNQSRGFQQELEEEEHLTTHMRASGPCQVLEQKHLHMQGGPYDHYNFDGTMHLPQLFSPESAIAPPTNSSLALSMNAMDILECSQNLLRLTTTGCGLNLMQQQQEERFSGDWSFLDKLLASHHGMDQSKCNPPTNHHAATVVGTSAQKFPFHYLGCDTTHDIMKFSK

SEQ ID NO: 58097 - protein, 214 aa, Glycine max
  peptide (1)..(214): Ceres Seq. ID no. 14315849
  misc_feature (1)..(49): Homolog of NCBI NO: 7485760 NR Description: NAM (no apical meristem)-like protein
  misc_feature (1)..(52): Homolog of NCBI NO: 15223299 NR Description: No apical meristem (NAM) protein family
  misc_feature (1)..(179): Homolog of NCBI NO: 38605889 NR Description: OSJNBb0020O11.1 [Oryza sativa (japonica
  misc_feature (1)..(49): Homolog of NCBI NO: 15217491 NR Description: No apical meristem (NAM) protein family
  misc_feature (1)..(175): Homolog of NCBI NO: 15235031 NR Description: No apical meristem (NAM) protein family
  misc_feature (31)..(49): Homolog of NCBI NO: 6006373 NR Description: Similar to NAM like protein (AC005310)
  misc_feature (1)..(29): Homolog of NCBI NO: 6006373 NR Description: Similar to NAM like protein (AC005310)
  misc_feature (1)..(106): Homolog of NCBI NO: 6730944 NR Description: OsNAC7 protein [Oryza sativa]
  misc_feature (80)..(185): Homolog of NCBI NO: 15219419 NR Description: NAM (no apical meristem) protein -related
  misc_feature (1)..(63): Homolog of NCBI NO: 15219419 NR Description: NAM (no apical meristem) protein -related
MRKTLVFYTGRAPHGQKTDWIMHEYRLDEDDADVQEDGWVVCRVFKKKNQSRGFQQELEEEEHLTTHMRASGPCQVLEQKHLHMQGGPYDHYNFDGTMHLPQLFSPESAIAPPTNSSLALSMNAMDILECSQNLLRLTTTGCGLNLMQQQQEERFSGDWSFLDKLLASHHGMDQSKCNPPTNHHAATVVGTSAQKFPFHYLGCDTTHDIMKFSK

SEQ ID NO: 58098 - DNA, 432 bp, Glycine max
  misc_feature (1)..(432): Ceres Seq. ID no. 12608522
agctaggtagggttttctctttctcacgttcctcttcgcagcaccacagtagcttcgcattagcaatggcgagaatcaaggtgtacgagctgaggtacaagacaaaagcagagcttctgaaccaacttaaggatctcaaagcagaactcgctctcctccgcgtcgntaaggagagcgagttctgctttgagatccttaagtgtcgtatgctcttctttgcttttgagaagatatagaaaacccaaacttactacaatacttgaaatagttgtaaattaacgagaattgaaacagaataacttgagggtgcaaatgaatttgacccttgtaattccaattttgtgcattttcctttagatccgctgcacccattggggtgcaattgtaattgtagctgccaattcattgtaaatgctcttgtaatttcatagt

SEQ ID NO: 58099 - protein, 77 aa, Glycine max
  peptide (1)..(77): Ceres Seq. ID no. 12608523
  misc_feature (22)..(56): Homolog of NCBI NO: 38346113 NR Description: OSJNBb0006N15.8 [Oryza sativa (japonica
  misc_feature (22)..(56): Homolog of NCBI NO: 15232693 NR Description: putative 60S ribosomal protein L35
  misc_feature (22)..(56): Homolog of NCBI NO: 6984224 NR Description: 60S ribosomal protein L35 [Euphorbia esula]
  misc_feature (55)..(55): Xaa is any aa, unknown or other
LGRVFSFSRSSSQHHSSFALAMARIKVYELRYKTKAELLNQLKDLKAELALLRVXKESEFCFEILKCRMLFFAFEKI

SEQ ID NO: 58100 - protein, 56 aa, Glycine max
  peptide (1)..(56): Ceres Seq. ID no. 12608524
  misc_feature (1)..(35): Homolog of NCBI NO: 38346113 NR Description: OSJNBb0006N15.8 [Oryza sativa (japonica
  misc_feature (1)..(35): Homolog of NCBI NO: 15232693 NR Description: putative 60S ribosomal protein L35
  misc_feature (1)..(35): Homolog of NCBI NO: 6984224 NR Description: 60S ribosomal protein L35 [Euphorbia esula]
  misc_feature (34)..(34): Xaa is any aa, unknown or other
MARIKVYELRYKTKAELLNQLKDLKAELALLRVXKESEFCFEILKCRMLFFAFEKI

SEQ ID NO: 58101 - DNA, 505 bp, Glycine max
  misc_feature (1)..(505): Ceres Seq. ID no. 13594351
acaagggaggcttggagatttctttattcttctggtcttaccaatcaaattgacctttttttgctttgccccggtatgattccttgtgatcaacgtcacttgttaatggtgcatgcaatatgaataagtagtgtatggaacagtgccaccataaggtttcttttgttgtattctttcttataacatggtagcagcggaggatttctgcacctttacggcatttttcttatgtccatagagcatggatgctacatcctcaccgtttgtttcctcaagaagaatgggtgtatatgatcctatccaccaaattagcacgtgggaagaaaatttcaaaagtaatgatactaataatttaactgtatccacatccataattggggaggtggacatgaagttagataatcagtttcaggtgcaatcagaggatgatactcatggaatatttggcacatctgtgaagtacgaccaagacactaacagacttactgataagacacaacgacgt

SEQ ID NO: 58102 - protein, 88 aa, Glycine max
  peptide (1)..(88): Ceres Seq. ID no. 13594352
  misc_feature (3)..(87): Homolog of NCBI NO: 14600166 NR Description: leucine-zipper transcription factor [Lycopersicon
  misc_feature (3)..(87): Homolog of NCBI NO: 7489280 NR Description: transcription factor TGA1a homolog MBF2 - potato
  misc_feature (1)..(87): Homolog of NCBI NO: 100288 NR Description: transcription activator TGA1a - tobacco
  misc_feature (3)..(87): Homolog of NCBI NO: 13195751 NR Description: mas-binding factor MBF3 [Solanum tuberosum]
  misc_feature (1)..(87): Homolog of NCBI NO: 15238046 NR Description: bZIP transcription factor, OBF4 [Arabidopsis
  misc_feature (1)..(87): Homolog of NCBI NO: 1076422 NR Description: transcription factor OBF4 - Arabidopsis thaliana
  misc_feature (1)..(87): Homolog of NCBI NO: 15238367 NR Description: bZIP transcription factor, TGA1
  misc_feature (1)..(87): Homolog of NCBI NO: 320563 NR Description: transcription factor tga1 - Arabidopsis thaliana
  misc_feature (1)..(87): Homolog of NCBI NO: 7488719 NR Description: transcription factor STGA1 - soybean
  misc_feature (1)..(87): Homolog of NCBI NO: 15148922 NR Description: TGA-type basic leucine zipper protein TGA1.1
MDATSSPFVSSRRMGVYDPIHQISTWEENFKSNDTNNLTVSTSIIGEVDMKLDNQFQVQSEDDTHGIFGTSVKYDQDTNRLTDKTQRR

SEQ ID NO: 58103 - protein, 75 aa, Glycine max
  peptide (1)..(75): Ceres Seq. ID no. 13594353
  misc_feature (1)..(74): Homolog of NCBI NO: 14600166 NR Description: leucine-zipper transcription factor [Lycopersicon
  misc_feature (1)..(74): Homolog of NCBI NO: 7489280 NR Description: transcription factor TGA1a homolog MBF2 - potato
  misc_feature (1)..(74): Homolog of NCBI NO: 100288 NR Description: transcription activator TGA1a - tobacco
  misc_feature (1)..(74): Homolog of NCBI NO: 13195751 NR Description: mas-binding factor MBF3 [Solanum tuberosum]
  misc_feature (1)..(74): Homolog of NCBI NO: 15238046 NR Description: bZIP transcription factor, OBF4 [Arabidopsis
  misc_feature (1)..(74): Homolog of NCBI NO: 1076422 NR Description: transcription factor OBF4 - Arabidopsis thaliana
  misc_feature (1)..(74): Homolog of NCBI NO: 15238367 NR Description: bZIP transcription factor, TGA1
  misc_feature (1)..(74): Homolog of NCBI NO: 320563 NR Description: transcription factor tga1 - Arabidopsis thaliana
  misc_feature (1)..(74): Homolog of NCBI NO: 7488719 NR Description: transcription factor STGA1 - soybean
  misc_feature (1)..(74): Homolog of NCBI NO: 15148922 NR Description: TGA-type basic leucine zipper protein TGA1.1
MGVYDPIHQISTWEENFKSNDTNNLTVSTSIIGEVDMKLDNQFQVQSEDDTHGIFGTSVKYDQDTNRLTDKTQRR

SEQ ID NO: 58104 - DNA, 1409 bp, Glycine max
  misc_feature (1)..(1409): Ceres Seq. ID no. 15168492
aacgaaatcttcctctgaaatcatagtaaaatacatccccactgaagttcaagttcttgtgtgtaaaatggccaacattttcctacacaatgggggcaacacttgcaaggctaccctctatctcttattcataaccacagccttttttatcgcaaactctgcaaggattctagatgaagtggaatcccaaccccaagccataggcaatctaccagcacctggagctaccaatccttcactcacaacagctccagtcaccaccacaccacagatagatcctgccaccactttgccaagtggccaaacatctgcacccaccaccatatcacagcaggtaggtcctgccaccactttgccaagtggccaaacacctgcaaccgccgccaccatgaaccctgctactaaagaagactctggagaggaagatgataaccaagtagagccgccagttccagaaacagaagctccagctgctgtcactgcaccggctgaagaggaaactccagctatccctagtgcagctccagtgacaccaaactctttggcaaaagagccatctttttctttcttcatgcatgacatccttggagggtcacgtccatcagcaagagtggtagcaggaatagtagcaaacactgatgtcactggcctaccattctcaaagctcaacaacaacctcttcccaatcactggaggaattccactggtaaaccccaagctcaacggcatcataaccaacaacaatctcccaaaccttgtaggcctcagtggtgcacaatcctccactgtgttcaagaacagtggcaccagcaacactgtcactggtggcaacaaccaaccatttgtctcagcaggtaacctccctgcaggattcaccatccagaagctcatgttcggctcggtgacggtgatcgacgaccagctaactgaagggcacgagcttgattctgctgtgattggaaaggcacaagggttctacttggcaagttcattggatggtagcagccagaccattttgttgacagttttggtgcatggtggtgaacatgatcaacatcatgatgtggtggatgacagtatcaatttctttgggattcataggacagcttcatcagaatctgaggtagcagtgattggtgggactggcaagtatgagaatgctagagggtatgcttcacttgagactcttctcaaggaggaccagcacaccactgatggggtggacaccatcctgcatttcaatgtctacctcactgagtagagagactagctacctgtcattgtgattgattgcctttcatatttagagtttgaatttgaatatttgtgtatggtttgttcaaattggtgctatatgtctctgttaatgcttcatcaagtttgaaacaaagctcattctgctttctttt

SEQ ID NO: 58105 - protein, 419 aa, Glycine max
  peptide (1)..(419): Ceres Seq. ID no. 15168493
  misc_feature (225)..(418): Pfam Name: Dirigent-like protein Pfam Description: Dirigent-like protein
  misc_feature (148)..(349): Homolog of NCBI NO: 27497202 NR Description: Putative disease resistance response protein
  misc_feature (183)..(381): Homolog of NCBI NO: 9294671 NR Description: contains similarity to disease resistance
  misc_feature (196)..(417): Homolog of NCBI NO: 27497202 NR Description: Putative disease resistance response protein
  misc_feature (183)..(417): Homolog of NCBI NO: 15236315 NR Description: disease resistance response protein-related
  misc_feature (183)..(417): Homolog of NCBI NO: 15229564 NR Description: disease resistance response protein-related
  misc_feature (157)..(417): Homolog of NCBI NO: 34895944 NR Description: P0011G08.13 [Oryza sativa (japonica
  misc_feature (180)..(418): Homolog of NCBI NO: 15226923 NR Description: fibroin-related [Arabidopsis thaliana]
  misc_feature (35)..(418): Homolog of NCBI NO: 25407001 NR Description: hypothetical protein [imported] - Arabidopsis
  misc_feature (145)..(418): Homolog of NCBI NO: 15233217 NR Description: disease resistance response protein-related
  misc_feature (142)..(418): Homolog of NCBI NO: 15225466 NR Description: disease resistance response protein-related/
TKSSSEIIVKYIPTEVQVLVCKMANIFLHNGGNTCKATLYLLFITTAFFIANSARILDEVESQPQAIGNLPAPGATNPSLTTAPVTTTPQIDPATTLPSGQTSAPTTISQQVGPATTLPSGQTPATAATMNPATKEDSGEEDDNQVEPPVPETEAPAAVTAPAEEETPAIPSAAPVTPNSLAKEPSFSFFMHDILGGSRPSARVVAGIVANTDVTGLPFSKLNNNLFPITGGIPLVNPKLNGIITNNNLPNLVGLSGAQSSTVFKNSGTSNTVTGGNNQPFVSAGNLPAGFTIQKLMFGSVTVIDDQLTEGHELDSAVIGKAQGFYLASSLDGSSQTILLTVLVHGGEHDQHHDVVDDSINFFGIHRTASSESEVAVIGGTGKYENARGYASLETLLKEDQHTTDGVDTILHFNVYLTE

SEQ ID NO: 58106 - protein, 397 aa, Glycine max
  peptide (1)..(397): Ceres Seq. ID no. 15168494
  misc_feature (203)..(396): Pfam Name: Dirigent-like protein Pfam Description: Dirigent-like protein
  misc_feature (126)..(327): Homolog of NCBI NO: 27497202 NR Description: Putative disease resistance response protein
  misc_feature (161)..(359): Homolog of NCBI NO: 9294671 NR Description: contains similarity to disease resistance
  misc_feature (174)..(395): Homolog of NCBI NO: 27497202 NR Description: Putative disease resistance response protein
  misc_feature (161)..(395): Homolog of NCBI NO: 15236315 NR Description: disease resistance response protein-related
  misc_feature (161)..(395): Homolog of NCBI NO: 15229564 NR Description: disease resistance response protein-related
  misc_feature (135)..(395): Homolog of NCBI NO: 34895944 NR Description: P0011G08.13 [Oryza sativa (japonica
  misc_feature (158)..(396): Homolog of NCBI NO: 15226923 NR Description: fibroin-related [Arabidopsis thaliana]
  misc_feature (13)..(396): Homolog of NCBI NO: 25407001 NR Description: hypothetical protein [imported] - Arabidopsis
  misc_feature (123)..(396): Homolog of NCBI NO: 15233217 NR Description: disease resistance response protein-related
  misc_feature (120)..(396): Homolog of NCBI NO: 15225466 NR Description: disease resistance response protein-related/
MANIFLHNGGNTCKATLYLLFITTAFFIANSARILDEVESQPQAIGNLPAPGATNPSLTTAPVTTTPQIDPATTLPSGQTSAPTTISQQVGPATTLPSGQTPATAATMNPATKEDSGEEDDNQVEPPVPETEAPAAVTAPAEEETPAIPSAAPVTPNSLAKEPSFSFFMHDILGGSRPSARVVAGIVANTDVTGLPFSKLNNNLFPITGGIPLVNPKLNGIITNNNLPNLVGLSGAQSSTVFKNSGTSNTVTGGNNQPFVSAGNLPAGFTIQKLMFGSVTVIDDQLTEGHELDSAVIGKAQGFYLASSLDGSSQTILLTVLVHGGEHDQHHDVVDDSINFFGIHRTASSESEVAVIGGTGKYENARGYASLETLLKEDQHTTDGVDTILHFNVYLTE

SEQ ID NO: 58107 - protein, 290 aa, Glycine max
  peptide (1)..(290): Ceres Seq. ID no. 15168495
  misc_feature (96)..(289): Pfam Name: Dirigent-like protein Pfam Description: Dirigent-like protein
  misc_feature (19)..(220): Homolog of NCBI NO: 27497202 NR Description: Putative disease resistance response protein
  misc_feature (54)..(252): Homolog of NCBI NO: 9294671 NR Description: contains similarity to disease resistance
  misc_feature (67)..(288): Homolog of NCBI NO: 27497202 NR Description: Putative disease resistance response protein
  misc_feature (54)..(288): Homolog of NCBI NO: 15236315 NR Description: disease resistance response protein-related
  misc_feature (54)..(288): Homolog of NCBI NO: 15229564 NR Description: disease resistance response protein-related
  misc_feature (28)..(288): Homolog of NCBI NO: 34895944 NR Description: P0011G08.13 [Oryza sativa (japonica
  misc_feature (51)..(289): Homolog of NCBI NO: 15226923 NR Description: fibroin-related [Arabidopsis thaliana]
  misc_feature (1)..(289): Homolog of NCBI NO: 25407001 NR Description: hypothetical protein [imported] - Arabidopsis
  misc_feature (16)..(289): Homolog of NCBI NO: 15233217 NR Description: disease resistance response protein-related
  misc_feature (13)..(289): Homolog of NCBI NO: 15225466 NR Description: disease resistance response protein-related/
MNPATKEDSGEEDDNQVEPPVPETEAPAAVTAPAEEETPAIPSAAPVTPNSLAKEPSFSFFMHDILGGSRPSARVVAGIVANTDVTGLPFSKLNNNLFPITGGIPLVNPKLNGIITNNNLPNLVGLSGAQSSTVFKNSGTSNTVTGGNNQPFVSAGNLPAGFTIQKLMFGSVTVIDDQLTEGHELDSAVIGKAQGFYLASSLDGSSQTILLTVLVHGGEHDQHHDVVDDSINFFGIHRTASSESEVAVIGGTGKYENARGYASLETLLKEDQHTTDGVDTILHFNVYLTE

SEQ ID NO: 58108 - DNA, 1372 bp, Glycine max
  misc_feature (1)..(1372): Ceres Seq. ID no. 13518893
accttaaacttttgcattgacattgcaaactgtttttctctcttagcttaaaagttctctcttgctatccctcctccattaaccccattaataataagcaccatcaatttccttaattgcttcatatataggaaaatacaatgaccaagatctttgtgctgttatgtctgctcttcttagcttcttctgggtttgtccatggctcttctaagaaggatcatattaggttatttgagctcaagaaaggtgatttttctataaaggtcaccaattggggtgcaacacttgtgtccgtaatacttcccgataagaatgggaagttgggtgatattgttcttggatatgattctcccaaggcatacacaaatgatacatcatactttggagctactgtgggccgggttgctaacagaattggaggagctcagttcactctaaatggaatccattacaaattagttgctaatgaaggaaacaacacacttcattctggacccaaagcattcagtgatgttctttggaaagtgacaaggtacataaaagatgatgacaaacccagaatcaccttcagttatcacagttatgatggtgaaggaggatttcctggggacctcctagtaactgtgagctacattcttgggaaaaactcattaagcataatcatgaaagcaaaagctctgaacaagcctaccccagtgaacatggtgaaccatgcttactggaacctaggaaaccacaacagtggcaacattctagatgaagtggttcagatctttggatcccaagtcacactatttgatgacaatctcattcccacaggccaatatgcctcagttagaggaaccccaaatgatttccttgagccacacattgttggagaaaggatcaaccaattgcctaagacaaatggctataacatcaactatgtgcttgatggtgaaaaaggcaatgcagagattaagctggcagctatagcggtggataagaagtcagggagagtgatgaagctcttcacaaatgctcctggtttgcagttttacactgctaattttgtcaagaatgacaagggaaaaggagggtttgtttatcagccacgttcagcactttgtttggagagtcaagcatttcctgactccgtgaatcaccctaattttccatcaactattgtgaccccagataagccttacaagcatgtcatgttgcttaagttttccaccaaagttccatatgctttttcacagttctaattagaattgtgtgctttgatgaaccactttttatgtgtttggtatcaatgtatagcacgactctttttgtgctcttgcaaaacttggcttgggttcattaaaatgaataatgagatattttaatt

SEQ ID NO: 58109 - protein, 368 aa, Glycine max
  peptide (1)..(368): Ceres Seq. ID no. 13518894
  misc_feature (30)..(354): Pfam Name: Aldose 1-epimerase Pfam Description: Aldose 1-epimerase
  misc_feature (30)..(358): Homolog of NCBI NO: 37531218 NR Description: putative aldose 1-epimerase - like protein
  misc_feature (25)..(358): Homolog of NCBI NO: 40882679 NR Description: putative aldose 1-epimerase
  misc_feature (4)..(125): Homolog of NCBI NO: 38567883 NR Description: OSJNBa0036B21.18 [Oryza sativa (japonica
  misc_feature (116)..(358): Homolog of NCBI NO: 38567883 NR Description: OSJNBa0036B21.18 [Oryza sativa (japonica
  misc_feature (23)..(358): Homolog of NCBI NO: 15242223 NR Description: aldose 1-epimerase family [Arabidopsis thaliana]
  misc_feature (26)..(358): Homolog of NCBI NO: 15228261 NR Description: aldose 1-epimerase family [Arabidopsis thaliana]
  misc_feature (26)..(358): Homolog of NCBI NO: 21537069 NR Description: aldose 1-epimerase-like protein [Arabidopsis
  misc_feature (2)..(360): Homolog of NCBI NO: 15824567 NR Description: non-cell-autonomous protein pathway2;
  misc_feature (3)..(360): Homolog of NCBI NO: 7430313 NR Description: probable aldose 1-epimerase (EC 5.1.3.3) - common
  misc_feature (2)..(360): Homolog of NCBI NO: 15824565 NR Description: non-cell-autonomous protein pathway1;
MTKIFVLLCLLFLASSGFVHGSSKKDHIRLFELKKGDFSIKVTNWGATLVSVILPDKNGKLGDIVLGYDSPKAYTNDTSYFGATVGRVANRIGGAQFTLNGIHYKLVANEGNNTLHSGPKAFSDVLWKVTRYIKDDDKPRITFSYHSYDGEGGFPGDLLVTVSYILGKNSLSIIMKAKALNKPTPVNMVNHAYWNLGNHNSGNILDEVVQIFGSQVTLFDDNLIPTGQYASVRGTPNDFLEPHIVGERINQLPKTNGYNINYVLDGEKGNAEIKLAAIAVDKKSGRVMKLFTNAPGLQFYTANFVKNDKGKGGFVYQPRSALCLESQAFPDSVNHPNFPSTIVTPDKPYKHVMLLKFSTKVPYAFSQF

SEQ ID NO: 58110 - protein, 194 aa, Glycine max
  peptide (1)..(194): Ceres Seq. ID no. 13518895
  misc_feature (1)..(180): Pfam Name: Aldose 1-epimerase Pfam Description: Aldose 1-epimerase
  misc_feature (1)..(184): Homolog of NCBI NO: 26452398 NR Description: putative aldose 1-epimerase [Arabidopsis thaliana]
  misc_feature (1)..(184): Homolog of NCBI NO: 37531218 NR Description: putative aldose 1-epimerase - like protein
  misc_feature (1)..(184): Homolog of NCBI NO: 40882679 NR Description: putative aldose 1-epimerase
  misc_feature (1)..(184): Homolog of NCBI NO: 38567883 NR Description: OSJNBa0036B21.18 [Oryza sativa (japonica
  misc_feature (1)..(184): Homolog of NCBI NO: 15242223 NR Description: aldose 1-epimerase family [Arabidopsis thaliana]
  misc_feature (1)..(184): Homolog of NCBI NO: 15228261 NR Description: aldose 1-epimerase family [Arabidopsis thaliana]
  misc_feature (1)..(184): Homolog of NCBI NO: 21537069 NR Description: aldose 1-epimerase-like protein [Arabidopsis
  misc_feature (1)..(186): Homolog of NCBI NO: 15824567 NR Description: non-cell-autonomous protein pathway2;
  misc_feature (1)..(186): Homolog of NCBI NO: 7430313 NR Description: probable aldose 1-epimerase (EC 5.1.3.3) - common
  misc_feature (1)..(186): Homolog of NCBI NO: 15824565 NR Description: non-cell-autonomous protein pathway1;
MKAKALNKPTPVNMVNHAYWNLGNHNSGNILDEVVQIFGSQVTLFDDNLIPTGQYASVRGTPNDFLEPHIVGERINQLPKTNGYNINYVLDGEKGNAEIKLAAIAVDKKSGRVMKLFTNAPGLQFYTANFVKNDKGKGGFVYQPRSALCLESQAFPDSVNHPNFPSTIVTPDKPYKHVMLLKFSTKVPYAFSQF

SEQ ID NO: 58111 - DNA, 1461 bp, Glycine max
  misc_feature (1)..(1461): Ceres Seq. ID no. 15171131
aggaagtaatagcccctacactcgacagtctcttcttctcttctctgcagcttctctcccctcaacagtgagtaattttggcagaatctccgccaagtatcccaaaatttcctccaatctcttcagagttctgcagacattcatccactttccctctataaaaccattcacaatcccaatccaacttgcaaaaccaaaacctagggttcccaaatcctaattgcactaaaacccagaatgaaagcctctttgaagttccgcgaggaacagcaaaaacccctcttgagagcaaaagtcccactcggcatcctcggcatgcccttccaatccggcatagtcgctggcgaatccaaagaactcactctcaacctttctaccttcttcgaatcgggtccttctctcaaagttgcgtatcgacccaacgactcaaagaaccctttttccttcatagtgaaaacgggaaccggacccttcggttcccctctcaagagctccatgctcatgagctgcgagtttaaccttcccggtacaaccggtaccccgttgtttatgcttcacttcaaaccccgcttcggcgactttactttcaagaagacgcagtcttcgatttttgatgggaaagggtttgggtcttttaacacgcaaaacgacgccgttgagaatgggaataatgctgaaacgccgttgatggaatcggccaaggtttcgattcttgactccggcgcctcgatgttctccggcatggaggtggctgcgcggacgactctgccggtgcggggacgtgctgccgtgaagttccggtggggagttaggattccggcggagttcaaggggaacaacgcgtttcagaagattccgtttctcgtaatggataagatcggcgtggagcacatgatggagtgcggagattcgaagaaggggaagggggacgccggagagaaaccgagggttccggctagtgctgacgtggcggaggcgtgctttgcggtgaagcggcagatggaggttctgcaggcggagaacgggttgcttaggaacgccgtggaagatctccggcgagaaattgtcggcggccgaagcggaggctcgattttggggaaaaaccctaaaaagaacgataggaaaacgacgtcggattacggtaattttcccgggaaatcgacggaggctgaagcgagtgaggaattgaagaaagcattaatgggagcagctggtggtagtagtgcttgaatttgaatctgtagaattgtgtttttctctgttgcaattttagtttcagttttgatgctgcgaaattttcttgtgtagtgttatatatattatgataatgatgatatataggttcattaggttggttcgtcaaggctgcttgttcttgtattcaattcaattttgaagctttgaacggaggatcatgaaaataagaaaatttgaggtttttagtagttggtacgaaatcag

SEQ ID NO: 58112 - protein, 330 aa, Glycine max
  peptide (1)..(330): Ceres Seq. ID no. 15171132
  misc_feature (51)..(129): Homolog of NCBI NO: 21740989 NR Description: OSJNBa0019K04.27 [Oryza sativa (japonica
  misc_feature (205)..(287): Homolog of NCBI NO: 28411873 NR Description: OSJNBa0016N23.25 [Oryza sativa (japonica
  misc_feature (1)..(198): Homolog of NCBI NO: 28411873 NR Description: OSJNBa0016N23.25 [Oryza sativa (japonica
  misc_feature (1)..(276): Homolog of NCBI NO: 15230911 NR Description: expressed protein [Arabidopsis thaliana]
MKASLKFREEQQKPLLRAKVPLGILGMPFQSGIVAGESKELTLNLSTFFESGPSLKVAYRPNDSKNPFSFIVKTGTGPFGSPLKSSMLMSCEFNLPGTTGTPLFMLHFKPRFGDFTFKKTQSSIFDGKGFGSFNTQNDAVENGNNAETPLMESAKVSILDSGASMFSGMEVAARTTLPVRGRAAVKFRWGVRIPAEFKGNNAFQKIPFLVMDKIGVEHMMECGDSKKGKGDAGEKPRVPASADVAEACFAVKRQMEVLQAENGLLRNAVEDLRREIVGGRSGGSILGKNPKKNDRKTTSDYGNFPGKSTEAEASEELKKALMGAAGGSSA

SEQ ID NO: 58113 - protein, 304 aa, Glycine max
  peptide (1)..(304): Ceres Seq. ID no. 15171133
  misc_feature (25)..(103): Homolog of NCBI NO: 21740989 NR Description: OSJNBa0019K04.27 [Oryza sativa (japonica
  misc_feature (179)..(261): Homolog of NCBI NO: 28411873 NR Description: OSJNBa0016N23.25 [Oryza sativa (japonica
  misc_feature (1)..(172): Homolog of NCBI NO: 28411873 NR Description: OSJNBa0016N23.25 [Oryza sativa (japonica
  misc_feature (1)..(250): Homolog of NCBI NO: 15230911 NR Description: expressed protein [Arabidopsis thaliana]
MPFQSGIVAGESKELTLNLSTFFESGPSLKVAYRPNDSKNPFSFIVKTGTGPFGSPLKSSMLMSCEFNLPGTTGTPLFMLHFKPRFGDFTFKKTQSSIFDGKGFGSFNTQNDAVENGNNAETPLMESAKVSILDSGASMFSGMEVAARTTLPVRGRAAVKFRWGVRIPAEFKGNNAFQKIPFLVMDKIGVEHMMECGDSKKGKGDAGEKPRVPASADVAEACFAVKRQMEVLQAENGLLRNAVEDLRREIVGGRSGGSILGKNPKKNDRKTTSDYGNFPGKSTEAEASEELKKALMGAAGGSSA

SEQ ID NO: 58114 - protein, 244 aa, Glycine max
  peptide (1)..(244): Ceres Seq. ID no. 15171134
  misc_feature (1)..(43): Homolog of NCBI NO: 21740989 NR Description: OSJNBa0019K04.27 [Oryza sativa (japonica
  misc_feature (119)..(201): Homolog of NCBI NO: 28411873 NR Description: OSJNBa0016N23.25 [Oryza sativa (japonica
  misc_feature (1)..(112): Homolog of NCBI NO: 28411873 NR Description: OSJNBa0016N23.25 [Oryza sativa (japonica
  misc_feature (1)..(190): Homolog of NCBI NO: 15230911 NR Description: expressed protein [Arabidopsis thaliana]
MLMSCEFNLPGTTGTPLFMLHFKPRFGDFTFKKTQSSIFDGKGFGSFNTQNDAVENGNNAETPLMESAKVSILDSGASMFSGMEVAARTTLPVRGRAAVKFRWGVRIPAEFKGNNAFQKIPFLVMDKIGVEHMMECGDSKKGKGDAGEKPRVPASADVAEACFAVKRQMEVLQAENGLLRNAVEDLRREIVGGRSGGSILGKNPKKNDRKTTSDYGNFPGKSTEAEASEELKKALMGAAGGSSA

SEQ ID NO: 58115 - DNA, 1363 bp, Glycine max
  misc_feature (1)..(1363): Ceres Seq. ID no. 15168468
aattatttctgataaaatcttgaacatctttttctctcattctaagaattggagacttttcaaaagtttagggactgcaaattctctgcttctctacacatggagccggtgtcgcgtgctaatttcttttcattccaaagattttggctaccgtttcagggacagggagggatgaggcagcaagttgatccctcggctcacacaatcaagtcccatggagcatcacttgcaagaaaacacgctcgtgattggcttatattgctgcttctcatagtgatagagattgtcctttttgtcattcatccatttaaacgctttgtgggaagggacatgatggaggaccttagatatcctatgaaagaaaacacggtgcctgtatgggctgttcctttatatgcggttctgttgccaatggccgttttccttctcttctatatgcgcaggagagatgtttatgatttgcaccacagtgttctaggtttgttatttgctgttctgataactggggtcttcaccgatgcaataaaaaatgcagttggccggcctcgcccagacttctattggcgttgcttccccgatggggtagagaattatgatagttggggaggtgtggtatgtcatggcaatgctagcgatataaaagaaggacacaagagtttcccaagcggccatacatcatggtcctttgcaggtctaggttttctgtctctgtacctatcggggaagattaaagcttttgatcgcaaagggcacgtggcaaaattatgcattgtgtttcttcctctacttgttgcttgcctagttgcaatctctcgagtggatgactattggcaccattggcaagatgtgtttgccggaggcattctagggcttgttgtggcaaccttttgttatatgcagttcttccctgcgccctataatgatgaaggatggggtccatatgcatatttccgggcaatggaggaatcacgagcgaatgcaaatattaatcgggaattaccagttgggcaggccatggaggatcgggtaacgaatcaagaaccaaggagaaatggtgataccacctttaccccttactcttaccgtagcccaaccttggaagccatggaaatgggacagaagtaatagtcttctatagcactaatcttctccctagctacctagttccttacttttgtgtatacttatgagcttctctacacggcaaccactagatttagctaattgtgcagcttctgtttcttcttgcattattattattattggcactgccactgtaaaaaatgaaaaatgacggcttctttccgctgaattagattatgttgatagatggtacgttaatgggatcccattttgaccttac

SEQ ID NO: 58116 - protein, 341 aa, Glycine max; identical to SEQ ID NO: 57831
  peptide (1)..(341): Ceres Seq. ID no. 15168469
  misc_feature (98)..(273): Pfam Name: PAP2 superfamily Pfam Description: PAP2 superfamily
  misc_feature (34)..(297): Homolog of NCBI NO: 38637528 NR Description: unknown protein [Oryza sativa (japonica
  misc_feature (35)..(335): Homolog of NCBI NO: 34910912 NR Description: putative phosphatidic acid phosphatase beta
  misc_feature (28)..(291): Homolog of NCBI NO: 15218051 NR Description: phosphatidic acid phosphatase (PAP2) family
  misc_feature (27)..(322): Homolog of NCBI NO: 25353094 NR Description: probable phosphatidic acid phosphatase
  misc_feature (34)..(319): Homolog of NCBI NO: 18396250 NR Description: phosphatidic acid phosphatase (PAP2) family
  misc_feature (34)..(319): Homolog of NCBI NO: 6957723 NR Description: putative phosphatidate phosphohydrolase
  misc_feature (8)..(322): Homolog of NCBI NO: 21554001 NR Description: putative phosphatidic acid phosphatase
  misc_feature (8)..(322): Homolog of NCBI NO: 18379166 NR Description: phosphatidic acid phosphatase (PAP2) family
  misc_feature (8)..(322): Homolog of NCBI NO: 15724220 NR Description: At2g01180/F10A8.6 [Arabidopsis thaliana]
  misc_feature (1)..(340): Homolog of NCBI NO: 9621903 NR Description: phosphatidic acid phosphatase alpha [Vigna

SEQ ID NO: 58117 - protein, 317 aa, Glycine max; identical to SEQ ID NO: 57832
  peptide (1)..(317): Ceres Seq. ID no. 15168470
  misc_feature (74)..(249): Pfam Name: PAP2 superfamily Pfam Description: PAP2 superfamily
  misc_feature (10)..(273): Homolog of NCBI NO: 38637528 NR Description: unknown protein [Oryza sativa (japonica
  misc_feature (11)..(311): Homolog of NCBI NO: 34910912 NR Description: putative phosphatidic acid phosphatase beta
  misc_feature (4)..(267): Homolog of NCBI NO: 15218051 NR Description: phosphatidic acid phosphatase (PAP2) family
  misc_feature (3)..(298): Homolog of NCBI NO: 25353094 NR Description: probable phosphatidic acid phosphatase
  misc_feature (10)..(295): Homolog of NCBI NO: 18396250 NR Description: phosphatidic acid phosphatase (PAP2) family
  misc_feature (10)..(295): Homolog of NCBI NO: 6957723 NR Description: putative phosphatidate phosphohydrolase
  misc_feature (1)..(298): Homolog of NCBI NO: 21554001 NR Description: putative phosphatidic acid phosphatase
  misc_feature (1)..(298): Homolog of NCBI NO: 18379166 NR Description: phosphatidic acid phosphatase (PAP2) family
  misc_feature (1)..(298): Homolog of NCBI NO: 15724220 NR Description: At2g01180/F10A8.6 [Arabidopsis thaliana]
  misc_feature (1)..(316): Homolog of NCBI NO: 9621903 NR Description: phosphatidic acid phosphatase alpha [Vigna

SEQ ID NO: 58118 - protein, 264 aa, Glycine max
  peptide (1)..(264): Ceres Seq. ID no. 15168471
  misc_feature (21)..(196): Pfam Name: PAP2 superfamily Pfam Description: PAP2 superfamily
  misc_feature (1)..(220): Homolog of NCBI NO: 38637528 NR Description: unknown protein [Oryza sativa (japonica
  misc_feature (1)..(258): Homolog of NCBI NO: 34910912 NR Description: putative phosphatidic acid phosphatase beta
  misc_feature (1)..(214): Homolog of NCBI NO: 15218051 NR Description: phosphatidic acid phosphatase (PAP2) family
  misc_feature (1)..(245): Homolog of NCBI NO: 25353094 NR Description: probable phosphatidic acid phosphatase
  misc_feature (1)..(242): Homolog of NCBI NO: 18396250 NR Description: phosphatidic acid phosphatase (PAP2) family
  misc_feature (1)..(242): Homolog of NCBI NO: 6957723 NR Description: putative phosphatidate phosphohydrolase
  misc_feature (1)..(245): Homolog of NCBI NO: 21554001 NR Description: putative phosphatidic acid phosphatase
  misc_feature (1)..(245): Homolog of NCBI NO: 18379166 NR Description: phosphatidic acid phosphatase (PAP2) family
  misc_feature (1)..(245): Homolog of NCBI NO: 15724220 NR Description: At2g01180/F10A8.6 [Arabidopsis thaliana]
  misc_feature (1)..(263): Homolog of NCBI NO: 9621903 NR Description: phosphatidic acid phosphatase alpha [Vigna
MMEDLRYPMKENTVPVWAVPLYAVLLPMAVFLLFYMRRRDVYDLHHSVLGLLFAVLITGVFTDAIKNAVGRPRPDFYWRCFPDGVENYDSWGGVVCHGNASDIKEGHKSFPSGHTSWSFAGLGFLSLYLSGKIKAFDRKGHVAKLCIVFLPLLVACLVAISRVDDYWHHWQDVFAGGILGLVVATFCYMQFFPAPYNDEGWGPYAYFRAMEESRANANINRELPVGQAMEDRVTNQEPRRNGDTTFTPYSYRSPTLEAMEMGQK

SEQ ID NO: 58119 - DNA, 985 bp, Glycine max
  misc_feature (1)..(985): Ceres Seq. ID no. 15168557
attgcctcacacacacaaacacaacagtgtctgctgcaccctacaatggtttcgctaccaacatggtttcgctactttcaccacaaggtcggatactccgtttccctcgccgtgaagaacaataaaggagatccaatcacagccagagagataaatgatgctgtttggaaaaacttctttctaggaaagctgacatacttgctctggaataaaggagaggagatggcccctactattgatggaaaagcagtaactcttgttcggaaattaccagctgtagacccaacgagtgtttttgtaggagatgttgtggttatgaaggaccctgagaagccagataactacctactcagaagattaactgcaattgaaggctatgaagtggtttctactgatgaaaaggatgaaccctttattcttgagaaggatcaatgctgggtagaggctgaaaatgaaaaattgaatgccaaggaagcgaaggatagccgaacatttggtccagttcagatgacagacattgtaggcagagtcatatattgcctgcgaagtgctgtagaccatggccgtgtacaaaacagtgatttcggcatgcgaaacgatacaccagtgctggaagtggaacttgatgttgatgagatggcaaagagtcacaaagcctgaaacatttttcccaagaaacactaactagtttactttacgcatgccttagtttcttcttgtggattttccttgaagcacagattgaagaataaaaaaatatgatttttaaattgttgcaatgggatgatggtgttatgtggatgtcctctgcatgctaggcaattggctgcggcctgtgttaaagcttgagttcaacattattgtatgctaagttctagcaaggactcctctgccctttgttctattcatttggctgtaaaattgaccaagttttggtctttttttgttaatggtcgaggaagataataaaagatgctgcgttgtt

SEQ ID NO: 58120 - protein, 219 aa, Glycine max
  peptide (1)..(219): Ceres Seq. ID no. 15168558
  misc_feature (16)..(193): Homolog of NCBI NO: 25408133 NR Description: hypothetical protein At2g31140 [imported] -
  misc_feature (16)..(219): Homolog of NCBI NO: 25406903 NR Description: hypothetical protein [imported] - Arabidopsis
  misc_feature (16)..(219): Homolog of NCBI NO: 15221421 NR Description: expressed protein [Arabidopsis thaliana]
  misc_feature (16)..(219): Homolog of NCBI NO: 30684839 NR Description: expressed protein [Arabidopsis thaliana]
  misc_feature (16)..(218): Homolog of NCBI NO: 38344766 NR Description: OSJNBa0068L06.9 [Oryza sativa (japonica
IASHTQTQQCLLHPTMVSLPTWFRYFHHKVGYSVSLAVKNNKGDPITAREINDAVWKNFFLGKLTYLLWNKGEEMAPTIDGKAVTLVRKLPAVDPTSVFVGDVVVMKDPEKPDNYLLRRLTAIEGYEVVSTDEKDEPFILEKDQCWVEAENEKLNAKEAKDSRTFGPVQMTDIVGRVIYCLRSAVDHGRVQNSDFGMRNDTPVLEVELDVDEMAKSHKA

SEQ ID NO: 58121 - protein, 204 aa, Glycine max
  peptide (1)..(204): Ceres Seq. ID no. 15168559
  misc_feature (1)..(178): Homolog of NCBI NO: 25408133 NR Description: hypothetical protein At2g31140 [imported] -
  misc_feature (1)..(204): Homolog of NCBI NO: 25406903 NR Description: hypothetical protein [imported] - Arabidopsis
  misc_feature (1)..(204): Homolog of NCBI NO: 15221421 NR Description: expressed protein [Arabidopsis thaliana]
  misc_feature (1)..(204): Homolog of NCBI NO: 30684839 NR Description: expressed protein [Arabidopsis thaliana]
  misc_feature (1)..(203): Homolog of NCBI NO: 38344766 NR Description: OSJNBa0068L06.9 [Oryza sativa (japonica
MVSLPTWFRYFHHKVGYSVSLAVKNNKGDPITAREINDAVWKNFFLGKLTYLLWNKGEEMAPTIDGKAVTLVRKLPAVDPTSVFVGDVVVMKDPEKPDNYLLRRLTAIEGYEVVSTDEKDEPFILEKDQCWVEAENEKLNAKEAKDSRTFGPVQMTDIVGRVIYCLRSAVDHGRVQNSDFGMRNDTPVLEVELDVDEMAKSHKA

SEQ ID NO: 58122 - protein, 145 aa, Glycine max
  peptide (1)..(145): Ceres Seq. ID no. 15168560
  misc_feature (1)..(119): Homolog of NCBI NO: 25408133 NR Description: hypothetical protein At2g31140 [imported] -
  misc_feature (1)..(145): Homolog of NCBI NO: 25406903 NR Description: hypothetical protein [imported] - Arabidopsis
  misc_feature (1)..(145): Homolog of NCBI NO: 15221421 NR Description: expressed protein [Arabidopsis thaliana]
  misc_feature (1)..(145): Homolog of NCBI NO: 30684839 NR Description: expressed protein [Arabidopsis thaliana]
  misc_feature (1)..(144): Homolog of NCBI NO: 38344766 NR Description: OSJNBa0068L06.9 [Oryza sativa (japonica
MAPTIDGKAVTLVRKLPAVDPTSVFVGDVVVMKDPEKPDNYLLRRLTAIEGYEVVSTDEKDEPFILEKDQCWVEAENEKLNAKEAKDSRTFGPVQMTDIVGRVIYCLRSAVDHGRVQNSDFGMRNDTPVLEVELDVDEMAKSHKA

SEQ ID NO: 58123 - DNA, 1754 bp, Glycine max
  misc_feature (1)..(1754): Ceres Seq. ID no. 15168569
aaaccctagaagttcgtcgtcttgtcttccagaatctgacaactttcctcatccgaacctaaattctctcatcaaaccctcacttatccaatccccacccaaattccccgcatcgacctcactcccctaaattcccccatcgccggctctctcacggccgaattcatcgcatcgccggttccgctacggtggctatcgcatgggtaagattctccgagaaaacgcgaagccgtcggcaaattcctcatcggcgtacccctctgcggcgcccgccaccacttcgtcgacatcggtgacggagacggtgagggggtcacaccagttcaagatcacggggtactcgctctcgaaggggatcgggattgggaagtacatggcctccgacgtgttttctgtcggagggtacaattgggcgatttatttctaccccgatgggaagagcgtggaggacaatgcaacctacgtgtcgctcttcatcgcgctggccagcgaaggcaccgatgttagggcacttttcgagttgacccttttggatcagagtgggaaggagaggcacaaggtgcatagccatttcgagaggactcttgaaagcgggccttacaccttaaaataccgcggtagtatgtggggttacaagcggtttttcaagagaacagctctagagacatcagactaccttaaagatgattgtctgtctgtgaattgtagtgttggtgttgtgaggtcacacacggaaggtccgaaaatctataccatagcaatacctccttctagcattggtcagaaatttggacaactgctggaaagtggtaaaggcagtgatgtaaattttgaagttaatggtgatatttttgctgcacataaattggtactagcagctcgttcacctgttttcagagcacagctttttggtcctatgaaagatcagaatacccagcgtattaaagttgaagacatggaggctccagttttcaaggcattgcttcattttatatactgggactcactaccagacatgcaagagcttactgggttgaactcaaaatgggcatcaaccttgatggctcagcatcttctagcagcagctgatcgatatggcttagagagacttaggctgatgtgtgaagcgagtctctgtgaagatgttgctattaatactgtggctacaactctagccttggcagagcagcaccattgtttccaactgaaagctgtctgtctcaagtttattgctacctctgaaaatcttagagctgtgatgcaaactgacggatttgagtacttgaaggaaagctgcccatctgttctgactgagctattggagtacgtggccagatttactgagcattcggacatcatgtgcaagcataggaatgaagcattacttgatggcagtgacataaatgggaggcgggtgaagcaaaggctctaatatgtgaagaacactgcacagctttctgtacatccctcttctactctccgttttaaaagatagcgagagcatggttagagggagaatatatataatcttttataggatcagaggcaatttttaattttcttagcttattcatgtgtaagagatgtaaatgtaatttgtgttgttgctgttactgttctgtttcacgtgtaggtttctgtaatatcttcagtatcactttttactggaaaacatgccttgcaagtgttgatcattactttttatattctgtatgcttattattcaaatgtagtagcgtaagtgcccttgaaac

SEQ ID NO: 58124 - protein, 410 aa, Glycine max
  peptide (1)..(410): Ceres Seq. ID no. 15168570
  misc_feature (44)..(173): Pfam Name: MATH domain Pfam Description: MATH domain
  misc_feature (9)..(378): Homolog of NCBI NO: 4680338 NR Description: hypothetical protein [Oryza sativa subsp. indica]
  misc_feature (1)..(409): Homolog of NCBI NO: 30691638 NR Description: expressed protein [Arabidopsis thaliana]
  misc_feature (6)..(407): Homolog of NCBI NO: 30678912 NR Description: expressed protein [Arabidopsis thaliana]
  misc_feature (23)..(409): Homolog of NCBI NO: 34900034 NR Description: OJ1641_C04.24 [Oryza sativa (japonica
  misc_feature (29)..(409): Homolog of NCBI NO: 18405153 NR Description: expressed protein [Arabidopsis thaliana]
  misc_feature (29)..(409): Homolog of NCBI NO: 21595740 NR Description: unknown [Arabidopsis thaliana]
  misc_feature (25)..(410): Homolog of NCBI NO: 34394164 NR Description: putative speckle-type POZ protein
  misc_feature (15)..(410): Homolog of NCBI NO: 22531225 NR Description: putative protein [Arabidopsis thaliana]
  misc_feature (21)..(410): Homolog of NCBI NO: 18397497 NR Description: expressed protein [Arabidopsis thaliana]
  misc_feature (12)..(410): Homolog of NCBI NO: 23617108 NR Description: contains ESTs
MGKILRENAKPSANSSSAYPSAAPATTSSTSVTETVRGSHQFKITGYSLSKGIGIGKYMASDVFSVGGYNWAIYFYPDGKSVEDNATYVSLFIALASEGTDVRALFELTLLDQSGKERHKVHSHFERTLESGPYTLKYRGSMWGYKRFFKRTALETSDYLKDDCLSVNCSVGVVRSHTEGPKIYTIAIPPSSIGQKFGQLLESGKGSDVNFEVNGDIFAAHKLVLAARSPVFRAQLFGPMKDQNTQRIKVEDMEAPVFKALLHFIYWDSLPDMQELTGLNSKWASTLMAQHLLAAADRYGLERLRLMCEASLCEDVAINTVATTLALAEQHHCFQLKAVCLKFIATSENLRAVMQTDGFEYLKESCPSVLTELLEYVARFTEHSDIMCKHRNEALLDGSDINGRRVKQRL

SEQ ID NO: 58125 - protein, 352 aa, Glycine max
  peptide (1)..(352): Ceres Seq. ID no. 15168571
  misc_feature (1)..(115): Pfam Name: MATH domain Pfam Description: MATH domain
  misc_feature (1)..(320): Homolog of NCBI NO: 4680338 NR Description: hypothetical protein [Oryza sativa subsp. indica]
  misc_feature (1)..(351): Homolog of NCBI NO: 30691638 NR Description: expressed protein [Arabidopsis thaliana]
  misc_feature (1)..(349): Homolog of NCBI NO: 30678912 NR Description: expressed protein [Arabidopsis thaliana]
  misc_feature (1)..(351): Homolog of NCBI NO: 34900034 NR Description: OJ1641_C04.24 [Oryza sativa (japonica
  misc_feature (1)..(351): Homolog of NCBI NO: 18405153 NR Description: expressed protein [Arabidopsis thaliana]
  misc_feature (1)..(351): Homolog of NCBI NO: 21595740 NR Description: unknown [Arabidopsis thaliana]
  misc_feature (1)..(352): Homolog of NCBI NO: 34394164 NR Description: putative speckle-type POZ protein
  misc_feature (1)..(352): Homolog of NCBI NO: 22531225 NR Description: putative protein [Arabidopsis thaliana]
  misc_feature (1)..(352): Homolog of NCBI NO: 18397497 NR Description: expressed protein [Arabidopsis thaliana]
  misc_feature (1)..(352): Homolog of NCBI NO: 23617108 NR Description: contains ESTs
MASDVFSVGGYNWAIYFYPDGKSVEDNATYVSLFIALASEGTDVRALFELTLLDQSGKERHKVHSHFERTLESGPYTLKYRGSMWGYKRFFKRTALETSDYLKDDCLSVNCSVGVVRSHTEGPKIYTIAIPPSSIGQKFGQLLESGKGSDVNFEVNGDIFAAHKLVLAARSPVFRAQLFGPMKDQNTQRIKVEDMEAPVFKALLHFIYWDSLPDMQELTGLNSKWASTLMAQHLLAAADRYGLERLRLMCEASLCEDVAINTVATTLALAEQHHCFQLKAVCLKFIATSENLRAVMQTDGFEYLKESCPSVLTELLEYVARFTEHSDIMCKHRNEALLDGSDINGRRVKQRL

SEQ ID NO: 58126 - protein, 269 aa, Glycine max
  peptide (1)..(269): Ceres Seq. ID no. 15168572
  misc_feature (57)..(175): Pfam Name: BTB/POZ domain Pfam Description: BTB/POZ domain
  misc_feature (1)..(237): Homolog of NCBI NO: 4680338 NR Description: hypothetical protein [Oryza sativa subsp. indica]
  misc_feature (1)..(268): Homolog of NCBI NO: 30691638 NR Description: expressed protein [Arabidopsis thaliana]
  misc_feature (1)..(266): Homolog of NCBI NO: 30678912 NR Description: expressed protein [Arabidopsis thaliana]
  misc_feature (1)..(268): Homolog of NCBI NO: 34900034 NR Description: OJ1641_C04.24 [Oryza sativa (japonica
  misc_feature (1)..(268): Homolog of NCBI NO: 18405153 NR Description: expressed protein [Arabidopsis thaliana]
  misc_feature (1)..(268): Homolog of NCBI NO: 21595740 NR Description: unknown [Arabidopsis thaliana]
  misc_feature (1)..(269): Homolog of NCBI NO: 34394164 NR Description: putative speckle-type POZ protein
  misc_feature (1)..(269): Homolog of NCBI NO: 22531225 NR Description: putative protein [Arabidopsis thaliana]
  misc_feature (1)..(269): Homolog of NCBI NO: 18397497 NR Description: expressed protein [Arabidopsis thaliana]
  misc_feature (1)..(269): Homolog of NCBI NO: 23617108 NR Description: contains ESTs
MWGYKRFFKRTALETSDYLKDDCLSVNCSVGVVRSHTEGPKIYTIAIPPSSIGQKFGQLLESGKGSDVNFEVNGDIFAAHKLVLAARSPVFRAQLFGPMKDQNTQRIKVEDMEAPVFKALLHFIYWDSLPDMQELTGLNSKWASTLMAQHLLAAADRYGLERLRLMCEASLCEDVAINTVATTLALAEQHHCFQLKAVCLKFIATSENLRAVMQTDGFEYLKESCPSVLTELLEYVARFTEHSDIMCKHRNEALLDGSDINGRRVKQRL

SEQ ID NO: 58127 - DNA, 949 bp, Glycine max
  misc_feature (1)..(949): Ceres Seq. ID no. 13639640
aaagataatgtctagacacaaactgctacgccaaaatactagcttcaacgcagcttgtctttgactcttctttcttggatcttgaagagccatttagttagctagatctgagtttaggaaacctaacaaactacacataactacttcactcacttgtgtttgagcctttccaccatcaaaatgctgagtgaaagttccaacacccacaactcatctaaaatgtccttcagaataacgaaggaggatgggttcttctctaggctaatagccaaggaaactaccacccccaactcttcttcaaggatcttctactacggagaaacttcggttgcggttcctttcacatgggaggcacaacctggtaccccgaaacaccctttgtcagagacatctttgccacctcttacacccccaccttcctacttttcaagccccaaaaagtcccacaacaccaagagaagaaactactactcaaataaggccagcaacatattttcaagcatttttctgaggcttgtaggatcaagaaagtctcttcataatcatcatcatgtgtcaccatcgtcatcttggtcgtcaccttcttcatcgtcttcatcttcttcttcgtggtctttggcgcattataataataataataataactcatcgccctcgttttccatgagagacaaaggtcgaggtcaaggaggaagaagcagcaaacacaacaaatgttctaatggatttagaggctgctatccctttggcaacatgaggaacgcaaatgtaagccatggtagtgtggactaattaattagttagtttaatttgatctattttggaaattaactattctgcatgattttaatatttttgtagagatcttcgaaagtttatatagctgctaagtgctaagtgtatttattggaagatgttagtgttggcctgggatgtcccccccttttcc

SEQ ID NO: 58128 - protein, 203 aa, Glycine max
  peptide (1)..(203): Ceres Seq. ID no. 13639641
  misc_feature (44)..(179): Homolog of NCBI NO: 15222240 NR Description: hypothetical protein [Arabidopsis thaliana]
  misc_feature (39)..(187): Homolog of NCBI NO: 15241064 NR Description: expressed protein [Arabidopsis thaliana]
  misc_feature (1)..(187): Homolog of NCBI NO: 38566620 NR Description: At5g01790 [Arabidopsis thaliana]
  misc_feature (4)..(173): Homolog of NCBI NO: 34896128 NR Description: P0701D05.18 [Oryza sativa (japonica
  misc_feature (26)..(201): Homolog of NCBI NO: 21537311 NR Description: unknown [Arabidopsis thaliana]
  misc_feature (26)..(201): Homolog of NCBI NO: 18405403 NR Description: expressed protein [Arabidopsis thaliana]
MLSESSNTHNSSKMSFRITKEDGFFSRLIAKETTTPNSSSRIFYYGETSVAVPFTWEAQPGTPKHPLSETSLPPLTPPPSYFSSPKKSHNTKRRNYYSNKASNIFSSIFLRLVGSRKSLHNHHHVSPSSSWSSPSSSSSSSSSWSLAHYNNNNNNSSPSFSMRDKGRGQGGRSSKHNKCSNGFRGCYPFGNMRNANVSHGSVD

SEQ ID NO: 58129 - protein, 190 aa, Glycine max
  peptide (1)..(190): Ceres Seq. ID no. 13639642
  misc_feature (31)..(166): Homolog of NCBI NO: 15222240 NR Description: hypothetical protein [Arabidopsis thaliana]
  misc_feature (26)..(174): Homolog of NCBI NO: 15241064 NR Description: expressed protein [Arabidopsis thaliana]
  misc_feature (1)..(174): Homolog of NCBI NO: 38566620 NR Description: At5g01790 [Arabidopsis thaliana]
  misc_feature (1)..(160): Homolog of NCBI NO: 34896128 NR Description: P0701D05.18 [Oryza sativa (japonica
  misc_feature (13)..(188): Homolog of NCBI NO: 21537311 NR Description: unknown [Arabidopsis thaliana]
  misc_feature (13)..(188): Homolog of NCBI NO: 18405403 NR Description: expressed protein [Arabidopsis thaliana]
MSFRITKEDGFFSRLIAKETTTPNSSSRIFYYGETSVAVPFTWEAQPGTPKHPLSETSLPPLTPPPSYFSSPKKSHNTKRRNYYSNKASNIFSSIFLRLVGSRKSLHNHHHVSPSSSWSSPSSSSSSSSSWSLAHYNNNNNNSSPSFSMRDKGRGQGGRSSKHNKCSNGFRGCYPFGNMRNANVSHGSVD

SEQ ID NO: 58130 - DNA, 749 bp, Glycine max
  misc_feature (1)..(749): Ceres Seq. ID no. 15173273
ctctctctctctctcctctaaaaaaaacacctaatctgatctgagttcctgacatgtccatcgaatttgattctgaatccattcccactcccacggcccaagcccaagcccaggagcgatccaactctcgctgcgccttgttattttcttcctacaactgcttcggcggccaacgacgtcgttcctcatggtgggagcgcgtccgctcccactcccactccgctccagcctcagccggtgaccggtggtggtcgcgtgggctcagggcgctgaagaagcttcgcgagtggtcggagatcgtagcggggcctaagtggaagaccttcattcgcaggttcaaccgcaaccgccccaacaaacgcatacccacgtaccagtatgaccccttcagttacgccctcaacttcgacgaggggcctaacggggatttcaaccaccaccacgacgatgctgcgcttcgcaatttctccacgcgctacgctgccgcgaacaacgtcaagtcgctttcccccaaggcccgtgactgcgatgacgccgttttggtgtgagtggtgtggagtggccacgcggtgtttggtttgtggcttagcttcagtccgaaaaggggcaggagtgggtgccccttcgcgtcattatttagttttatttttttgcttaaattacttattttttctttatattttcatgatttttttaattttttttagtcttgtaataatttttttgaaagtgatatttttagcttttac

SEQ ID NO: 58131 - protein, 164 aa, Glycine max
  peptide (1)..(164): Ceres Seq. ID no. 15173274
  misc_feature (36)..(124): Homolog of NCBI NO: 15238747 NR Description: expressed protein [Arabidopsis thaliana]
  misc_feature (41)..(98): Homolog of NCBI NO: 15232117 NR Description: expressed protein [Arabidopsis thaliana]
  misc_feature (44)..(144): Homolog of NCBI NO: 30685100 NR Description: expressed protein [Arabidopsis thaliana]
  misc_feature (44)..(144): Homolog of NCBI NO: 11357718 NR Description: hypothetical protein F2G14_10 - Arabidopsis
  misc_feature (36)..(144): Homolog of NCBI NO: 15241990 NR Description: expressed protein [Arabidopsis thaliana]
  misc_feature (36)..(144): Homolog of NCBI NO: 10177465 NR Description: gene_id:MQB2.19~pir||T06681~similar to unknown
  misc_feature (43)..(159): Homolog of NCBI NO: 15228321 NR Description: hypothetical protein [Arabidopsis thaliana]
MSIEFDSESIPTPTAQAQAQERSNSRCALLFSSYNCFGGQRRRSSWWERVRSHSHSAPASAGDRWWSRGLRALKKLREWSEIVAGPKWKTFIRRFNRNRPNKRIPTYQYDPFSYALNFDEGPNGDFNHHHDDAALRNFSTRYAAANNVKSLSPKARDCDDAVLV

SEQ ID NO: 58132 - protein, 123 aa, Glycine max
  peptide (1)..(123): Ceres Seq. ID no. 15173275
  misc_feature (1)..(68): Homolog of NCBI NO: 280630 NR Description: larval glue protein Lgp-1 precursor - fruit fly
MTPSVTPSTSTRGLTGISTTTTTMLRFAISPRATLPRTTSSRFPPRPVTAMTPFWCEWCGVATRCLVCGLASVRKGAGVGAPSRHYLVLFFCLNYLFFLYIFMIFLIFFSLVIIFLKVIFLAF

SEQ ID NO: 58133 - protein, 100 aa, Glycine max
  peptide (1)..(100): Ceres Seq. ID no. 15173276
  misc_feature (1)..(45): Homolog of NCBI NO: 280630 NR Description: larval glue protein Lgp-1 precursor - fruit fly
MLRFAISPRATLPRTTSSRFPPRPVTAMTPFWCEWCGVATRCLVCGLASVRKGAGVGAPSRHYLVLFFCLNYLFFLYIFMIFLIFFSLVIIFLKVIFLAF

SEQ ID NO: 58134 - DNA, 1292 bp, Glycine max
  misc_feature (1)..(1292): Ceres Seq. ID no. 14315330
ttcctaaaaggctgtccctgtccatgttgagcgcgtttgttcacgcgccttcaatttgttcttccaacaccctcagtcattgtgtgagtccgaagctcaacctctctcgctcttcaatggccgtatcctctattcgaatcgccgtcgtcggtgatgtgcatgattgctggaaccttgaacaagattcgaaagcacttgagctcttgcagccagatttggtgctgtttacaggtgattttggtgaagaaaatcttgaagtcattaagagtgttgtgaatcttgaatttgctaaagcagttatattgggaaaccacgatgcctggtttactaaacagttttctggaagcaaggagaaggataaagttcagcttcagctagaatgccttggtaaggagcacgtggcttatcaacgttcagacttccctcagataaaagtaagcgttgttggtggacgaccattttctattgggggtaaaccaatgtttcggaaaaagcttcttttggcaagatacggagtcaaagacatggatgagagtgctaagagaatccagaaagctgctcttggaacaccagaggaccattttcttatattacttgcacataatggacccacaggccttggttctgattcaaatgatatatgtggaaaggattgggaatttgagggtgatggtgatcatggtgacccagatctagcacaagcaatatccttgctaaaggagaacaatcagatatccattccattggttgtgttcggtcacatgcacaaagagctggcatatggcaatggctttaggaaaatgattgtggttggcgctgataacaccatatacttgaatggggcaattgttccaagggtcaaaaggttgggtggtgatgaagacaagaaaagcttagatgatgaaagtgcccttgcctcaccagaggccaaaggtacaagaagagcctttactttagttgagatttcggaaggaagagttgccaagattgcagaaagttgggtctcggttgtcgaagataggaccacattagaagaagagcacatactatttgagagcagctaggatcctcatcctccacatataggttcctgcttcagtcacatggattttaatgcgcatagataaatgcagccaggggtgaattatgtctcgatactcatgaatacatcgtatttaatgttagtaactactgtatagacttgataaatggtacatgctctgataccaattcccccttatctaggtggtgatttattgcttgtaccgctcctccattctatgtggcaattc

SEQ ID NO: 58135 - protein, 353 aa, Glycine max
  peptide (1)..(353): Ceres Seq. ID no. 14315331
  misc_feature (44)..(255): Pfam Name: Calcineurin-like phosphoesterase Pfam Description: Calcineurin-like phosphoesterase
  misc_feature (68)..(285): Homolog of NCBI NO: 33240462 NR Description: Predicted phosphoesterase
  misc_feature (41)..(293): Homolog of NCBI NO: 33865849 NR Description: putative transcripton factor [Synechococcus sp.
  misc_feature (44)..(353): Homolog of NCBI NO: 23042127 NR Description: hypothetical protein [Trichodesmium erythraeum
  misc_feature (43)..(346): Homolog of NCBI NO: 17232166 NR Description: putative transcripton factor for heterocyst
  misc_feature (46)..(335): Homolog of NCBI NO: 16331583 NR Description: hypothetical protein [Synechocystis sp. PCC 6803]
  misc_feature (35)..(293): Homolog of NCBI NO: 23124236 NR Description: hypothetical protein [Nostoc punctiforme]
  misc_feature (123)..(351): Homolog of NCBI NO: 30697022 NR Description: contains similarity to phosphoesterase
  misc_feature (39)..(69): Homolog of NCBI NO: 8777321 NR Description: contains similarity to
  misc_feature (139)..(351): Homolog of NCBI NO: 8777321 NR Description: contains similarity to
PKRLSLSMLSAFVHAPSICSSNTLSHCVSPKLNLSRSSMAVSSIRIAVVGDVHDCWNLEQDSKALELLQPDLVLFTGDFGEENLEVIKSVVNLEFAKAVILGNHDAWFTKQFSGSKEKDKVQLQLECLGKEHVAYQRSDFPQIKVSVVGGRPFSIGGKPMFRKKLLLARYGVKDMDESAKRIQKAALGTPEDHFLILLAHNGPTGLGSDSNDICGKDWEFEGDGDHGDPDLAQAISLLKENNQISIPLVVFGHMHKELAYGNGFRKMIVVGADNTIYLNGAIVPRVKRLGGDEDKKSLDDESALASPEAKGTRRAFTLVEISEGRVAKIAESWVSVVEDRTTLEEEHILFESS

SEQ ID NO: 58136 - protein, 346 aa, Glycine max
  peptide (1)..(346): Ceres Seq. ID no. 14315332
  misc_feature (37)..(248): Pfam Name: Calcineurin-like phosphoesterase Pfam Description: Calcineurin-like phosphoesterase
  misc_feature (61)..(278): Homolog of NCBI NO: 33240462 NR Description: Predicted phosphoesterase
  misc_feature (34)..(286): Homolog of NCBI NO: 33865849 NR Description: putative transcripton factor [Synechococcus sp.
  misc_feature (37)..(346): Homolog of NCBI NO: 23042127 NR Description: hypothetical protein [Trichodesmium erythraeum
  misc_feature (36)..(339): Homolog of NCBI NO: 17232166 NR Description: putative transcripton factor for heterocyst
  misc_feature (39)..(328): Homolog of NCBI NO: 16331583 NR Description: hypothetical protein [Synechocystis sp. PCC 6803]
  misc_feature (28)..(286): Homolog of NCBI NO: 23124236 NR Description: hypothetical protein [Nostoc punctiforme]
  misc_feature (116)..(344): Homolog of NCBI NO: 30697022 NR Description: contains similarity to phosphoesterase
  misc_feature (32)..(62): Homolog of NCBI NO: 8777321 NR Description: contains similarity to
  misc_feature (132)..(344): Homolog of NCBI NO: 8777321 NR Description: contains similarity to
MLSAFVHAPSICSSNTLSHCVSPKLNLSRSSMAVSSIRIAVVGDVHDCWNLEQDSKALELLQPDLVLFTGDFGEENLEVIKSVVNLEFAKAVILGNHDAWFTKQFSGSKEKDKVQLQLECLGKEHVAYQRSDFPQIKVSVVGGRPFSIGGKPMFRKKLLLARYGVKDMDESAKRIQKAALGTPEDHFLILLAHNGPTGLGSDSNDICGKDWEFEGDGDHGDPDLAQAISLLKENNQISIPLVVFGHMHKELAYGNGFRKMIVVGADNTIYLNGAIVPRVKRLGGDEDKKSLDDESALASPEAKGTRRAFTLVEISEGRVAKIAESWVSVVEDRTTLEEEHILFESS

SEQ ID NO: 58137 - protein, 315 aa, Glycine max
  peptide (1)..(315): Ceres Seq. ID no. 14315333
  misc_feature (6)..(217): Pfam Name: Calcineurin-like phosphoesterase Pfam Description: Calcineurin-like phosphoesterase
  misc_feature (30)..(247): Homolog of NCBI NO: 33240462 NR Description: Predicted phosphoesterase
  misc_feature (3)..(255): Homolog of NCBI NO: 33865849 NR Description: putative transcripton factor [Synechococcus sp.
  misc_feature (6)..(315): Homolog of NCBI NO: 23042127 NR Description: hypothetical protein [Trichodesmium erythraeum
  misc_feature (5)..(308): Homolog of NCBI NO: 17232166 NR Description: putative transcripton factor for heterocyst
  misc_feature (8)..(297): Homolog of NCBI NO: 16331583 NR Description: hypothetical protein [Synechocystis sp. PCC 6803]
  misc_feature (1)..(255): Homolog of NCBI NO: 23124236 NR Description: hypothetical protein [Nostoc punctiforme]
  misc_feature (85)..(313): Homolog of NCBI NO: 30697022 NR Description: contains similarity to phosphoesterase
  misc_feature (1)..(31): Homolog of NCBI NO: 8777321 NR Description: contains similarity to
  misc_feature (101)..(313): Homolog of NCBI NO: 8777321 NR Description: contains similarity to
MAVSSIRIAVVGDVHDCWNLEQDSKALELLQPDLVLFTGDFGEENLEVIKSVVNLEFAKAVILGNHDAWFTKQFSGSKEKDKVQLQLECLGKEHVAYQRSDFPQIKVSVVGGRPFSIGGKPMFRKKLLLARYGVKDMDESAKRIQKAALGTPEDHFLILLAHNGPTGLGSDSNDICGKDWEFEGDGDHGDPDLAQAISLLKENNQISIPLVVFGHMHKELAYGNGFRKMIVVGADNTIYLNGAIVPRVKRLGGDEDKKSLDDESALASPEAKGTRRAFTLVEISEGRVAKIAESWVSVVEDRTTLEEEHILFESS

SEQ ID NO: 58138 - DNA, 1460 bp, Glycine max
  misc_feature (1)..(1460): Ceres Seq. ID no. 15224973
ctggataacatttcaaccacttactccactcttgagtccttcacactcgacgctatcaccggccggtaacgtcacacaaacccaaaatcacaatggcgttctcatcgtccctatggtcttccctcttcgttgcttacccaaacagaaccgccatttccactcgattctctcacaaaccgcccaaactccctctctcgccggcgttcgccatcccgccgctctccacggccactgcggcggacgtctcgggcgccatcgacgggactacgatcgcggtggtgagcgggggattcgtggcggcactggcggcggtgctgtcgctgacggacccggagcggcggcggcagttacaggcggaggaggtgggcggcggcgacaaggaggtggtgagggagtacttcaacaactccgggttccagcgctggaagaagatctacggcgacaccgacgaggtgaaccgggttcagcgcgacattaggttgggccacgccaagaccgtggagaacacgctgagcatgttgaaggacgaaggttcccttcagggcgttacggtttgcgacgctgggtgcggtaccggttctctctctattcctcttgccaaagagggcgctgttgtgttcgccagtgatatctccgccgctatggttgccgaggctgagaaacaggcaaaagaacagcttgcaaccagtgaagatggatctgtgcccgtgatgcctaagtttgtagtgaaggatttagagagcttggatggcaagtatgatacggtggtctgcctcgatgtcttgattcattacccacaacataaagccgatgggatgattgcacaccttgcatcattggccaacaaccgattgattctgagttttgccccaaagacgttttattatgatctgctaaagagggttggagagttgttccctggtccttcaaaggcaacaagagcatatcttcactctgaggcagatgtagagagagcattgcaaaaggttggctggaccataaggaagagaggcttaaccactacccaattttactttgctaggcttattgaggctgttcctatgtagtggggattgaaaggtgagttttgcatgattagaggaaattcttagtgtaaattgttaggccttctattaagtgattttgtatgctattatcctccacatggaccacatataattctattgtgtatatttcttcatagcctagaagatgctgacgaattgaggctatgttttctgggagaaatagagtgtaagtggttcatgataatttgtgtggagctagtgcctagtgagttaccggtccattgggttggtggaatggaggcaagctccctttaagctgttcagaagttacagcgattattactcaagggtagtaattagttcctgtattgcattttttttataacaatgataacgataataataataataataataatatcacactttttg

SEQ ID NO: 58139 - protein, 324 aa, Glycine max
  peptide (1)..(324): Ceres Seq. ID no. 15224974
  misc_feature (95)..(319): Homolog of NCBI NO: 37523971 NR Description: Mg-protoporphyrin IX methyl transferase
  misc_feature (95)..(322): Homolog of NCBI NO: 23040051 NR Description: COG2227:
  misc_feature (79)..(323): Homolog of NCBI NO: 22297994 NR Description: Mg-protoporphyrin IX methyl transferase
  misc_feature (95)..(322): Homolog of NCBI NO: 7470730 NR Description: magnesium-protoporphyrin IX methyltransferase (EC
  misc_feature (95)..(322): Homolog of NCBI NO: 16332013 NR Description: Mg-protoporphyrin IX methyl transferase
  misc_feature (95)..(321): Homolog of NCBI NO: 23130334 NR Description: COG2227:
  misc_feature (95)..(321): Homolog of NCBI NO: 17230693 NR Description: Mg-protoporphyrin IX methyl transferase [Nostoc
  misc_feature (18)..(324): Homolog of NCBI NO: 6006382 NR Description: Similar to magnesium-protoporphyrin IX
  misc_feature (16)..(324): Homolog of NCBI NO: 15234905 NR Description: magnesium-protoporphyrin O-methyltransferase
  misc_feature (1)..(323): Homolog of NCBI NO: 7839365 NR Description: S-adenosyl-L-methionine Mg-protoporphyrin IX
MAFSSSLWSSLFVAYPNRTAISTRFSHKPPKLPLSPAFAIPPLSTATAADVSGAIDGTTIAVVSGGFVAALAAVLSLTDPERRRQLQAEEVGGGDKEVVREYFNNSGFQRWKKIYGDTDEVNRVQRDIRLGHAKTVENTLSMLKDEGSLQGVTVCDAGCGTGSLSIPLAKEGAVVFASDISAAMVAEAEKQAKEQLATSEDGSVPVMPKFVVKDLESLDGKYDTVVCLDVLIHYPQHKADGMIAHLASLANNRLILSFAPKTFYYDLLKRVGELFPGPSKATRAYLHSEADVERALQKVGWTIRKRGLTTTQFYFARLIEAVPM

SEQ ID NO: 58140 - protein, 183 aa, Glycine max
  peptide (1)..(183): Ceres Seq. ID no. 15224975
  misc_feature (1)..(178): Homolog of NCBI NO: 37523971 NR Description: Mg-protoporphyrin IX methyl transferase
  misc_feature (1)..(181): Homolog of NCBI NO: 23040051 NR Description: COG2227:
  misc_feature (1)..(182): Homolog of NCBI NO: 22297994 NR Description: Mg-protoporphyrin IX methyl transferase
  misc_feature (1)..(181): Homolog of NCBI NO: 7470730 NR Description: magnesium-protoporphyrin IX methyltransferase (EC
  misc_feature (1)..(181): Homolog of NCBI NO: 16332013 NR Description: Mg-protoporphyrin IX methyl transferase
  misc_feature (1)..(180): Homolog of NCBI NO: 23130334 NR Description: COG2227:
  misc_feature (1)..(180): Homolog of NCBI NO: 17230693 NR Description: Mg-protoporphyrin IX methyl transferase [Nostoc
  misc_feature (1)..(183): Homolog of NCBI NO: 6006382 NR Description: Similar to magnesium-protoporphyrin IX
  misc_feature (1)..(183): Homolog of NCBI NO: 15234905 NR Description: magnesium-protoporphyrin O-methyltransferase
  misc_feature (1)..(182): Homolog of NCBI NO: 7839365 NR Description: S-adenosyl-L-methionine Mg-protoporphyrin IX
MLKDEGSLQGVTVCDAGCGTGSLSIPLAKEGAVVFASDISAAMVAEAEKQAKEQLATSEDGSVPVMPKFVVKDLESLDGKYDTVVCLDVLIHYPQHKADGMIAHLASLANNRLILSFAPKTFYYDLLKRVGELFPGPSKATRAYLHSEADVERALQKVGWTIRKRGLTTTQFYFARLIEAVPM

SEQ ID NO: 58141 - DNA, 714 bp, Glycine max
  misc_feature (1)..(714): Ceres Seq. ID no. 12612236
attattcaccgaaaaagaggatctgcagagtgagtgatggggattgcggcggctattggattgttgtcaccgtttccgttctattactgcctctggatttggccacagtggtgggtggacttgtgtggcagaggccgagaggcccgagatccatctaaggttatggcttacgtttcttacttcttgaagctcgttcagttcatctccctcttctatgtttcttctttccactggcctcctcctttctacttctggcccctcattgcctttggccaattcctaaatttcagggtttatcagctacttggtgagactggcacatactatggtgtacgctttggaaaaacaattccctgggtaactgaattcccttttggtgtcatcaaagatcctcagtacgttggcagcatcatgagcattcttgcatgcttttcgtgggttccttttcaatacattctcctttgggttttaggatatgtgtttatgatgcatgtggaatcaaaggaagatccatctactcgtgccaagccactccattgattgagtgaatttcagtagattagaaggaatttggaggatttagcagcacctgaggtgccaaattctttgtatcttgctgtttctttcctttgctctggaatgaacatctctattttatatgttctgattccagcaaattatttctaatgaattgcgaacttatttttgtttctc

SEQ ID NO: 58142 - protein, 167 aa, Glycine max
  peptide (1)..(167): Ceres Seq. ID no. 12612237
  misc_feature (43)..(166): Homolog of NCBI NO: 30699543 NR Description: expressed protein [Arabidopsis thaliana]
  misc_feature (1)..(166): Homolog of NCBI NO: 21593732 NR Description: unknown [Arabidopsis thaliana]
  misc_feature (1)..(166): Homolog of NCBI NO: 18412906 NR Description: expressed protein
MGIAAAIGLLSPFPFYYCLWIWPQWWVDLCGRGREARDPSKVMAYVSYFLKLVQFISLFYVSSFHWPPPFYFWPLIAFGQFLNFRVYQLLGETGTYYGVRFGKTIPWVTEFPFGVIKDPQYVGSIMSILACFSWVPFQYILLWVLGYVFMMHVESKEDPSTRAKPLH

SEQ ID NO: 58143 - protein, 125 aa, Glycine max
  peptide (1)..(125): Ceres Seq. ID no. 12612238
  misc_feature (1)..(124): Homolog of NCBI NO: 30699543 NR Description: expressed protein [Arabidopsis thaliana]
  misc_feature (1)..(124): Homolog of NCBI NO: 21593732 NR Description: unknown [Arabidopsis thaliana]
  misc_feature (1)..(124): Homolog of NCBI NO: 18412906 NR Description: expressed protein
MAYVSYFLKLVQFISLFYVSSFHWPPPFYFWPLIAFGQFLNFRVYQLLGETGTYYGVRFGKTIPWVTEFPFGVIKDPQYVGSIMSILACFSWVPFQYILLWVLGYVFMMHVESKEDPSTRAKPLH

SEQ ID NO: 58144 - DNA, 846 bp, Glycine max
  misc_feature (1)..(846): Ceres Seq. ID no. 15173278
cttgttcaaacaattccccaacattcaaagctacacttaatcttagccaaaaggcctataaaggtatatatacctttttttttctgatcaagattcaaaccctagatcagttttaatttcctagctatagttttattcatagagcaagaatgggaaacagcttaaggtgttgtttggcttgtgttcttccatgtggggctctagacttgattcgaatagtccatttaaacggctatgtggaagagattacacgtccaatcacagcaggagaggttctaaaagccaaccctaaccatgttctaagcaaacctagctctcaaggagtcgttcgtcggattttgatcctctcgccggagaccgagctcaagaggggcagcatatacttcttgatcccggaatcttcactgccggagaataaacggcacgccggaaagggaagcattggtggtgatagtggtataaaaaagaaagcatcaacaatgaaaagcaacaagggtagtagtgatgttgattattcttcactaccacaagggtacctcaaagtcactcacaaaggttctaaagagaagagatcgtcgtgccgggatcgccggaaaggccgcatcggaatatggaggcctcatttagagagtatattggaagattagtcggttttttgtgccggcggtcggtggccggaatccaacttggccggaaaagaagagaagaaaaagaaaaaaaaatgttcaattattgaaatatagcgacacgacttttttttttccctgtgttttataaatgtatgtgggaatttgattttgtggataaaaaagtttactttcccttcgaaattgtcttgctgagtgc

SEQ ID NO: 58145 - protein, 165 aa, Glycine max
  peptide (1)..(165): Ceres Seq. ID no. 15173279
  misc_feature (62)..(164): Homolog of NCBI NO: 18396990 NR Description: expressed protein [Arabidopsis thaliana]
  misc_feature (1)..(119): Homolog of NCBI NO: 18396990 NR Description: expressed protein [Arabidopsis thaliana]
  misc_feature (138)..(165): Homolog of NCBI NO: 34909702 NR Description: B1131G08.9 [Oryza sativa (japonica
  misc_feature (3)..(95): Homolog of NCBI NO: 34909702 NR Description: B1131G08.9 [Oryza sativa (japonica
  misc_feature (1)..(165): Homolog of NCBI NO: 34907910 NR Description: P0439E11.22 [Oryza sativa (japonica
  misc_feature (1)..(165): Homolog of NCBI NO: 34896112 NR Description: P0701D05.10 [Oryza sativa (japonica
  misc_feature (1)..(165): Homolog of NCBI NO: 15227725 NR Description: hypothetical protein [Arabidopsis thaliana]
  misc_feature (1)..(165): Homolog of NCBI NO: 18390706 NR Description: expressed protein [Arabidopsis thaliana]
MGNSLRCCLACVLPCGALDLIRIVHLNGYVEEITRPITAGEVLKANPNHVLSKPSSQGVVRRILILSPETELKRGSIYFLIPESSLPENKRHAGKGSIGGDSGIKKKASTMKSNKGSSDVDYSSLPQGYLKVTHKGSKEKRSSCRDRRKGRIGIWRPHLESILED

SEQ ID NO: 58146 - DNA, 1052 bp, Glycine max
  misc_feature (1)..(1052): Ceres Seq. ID no. 13595755
attacctagaacatcctaatcgaaaaccttttctttcttttgtgtttcttgctttcttcttcttcgctttcgtcccttttcggagtatccctcccaaccatggacgttgatccttgccaatacgaacaaattgctataaatgaaaaagatgtcaacaacatcattctgtcataccttatacataattgctacaaagagtcatcagagtcattcatttcttgcactgggatgaagcagcctgcagatcatttggagaacatggaaaaaagaaaaagaatctttcaccatgcattggagggaaatgtacttaaggcgattgagctcacagggcagctggcacaggatattctggagaacaataatgatttgctgtttgatcttctaagccttcattttgtagaccttgtctgctctaaggaatgggcagaagctttggagtttgctcagaccaagttgagtccttttagtgtgaaggagcagaaatatatggaaaaaatagaaggttttatgtcccttcttgcttatgagaatccagtggaatgcccaatgtttcatctgattggcttagactatcggcaacaagttgtggatagtttgaatcaaactattctcgatgttggtgatggccagcacactttaaccttcccatccacactgccatggagcggcttatacaacagacctcagtagttagacaatgcttaagcctggaggatggggggcctccaccattttccttgaaggatattcttaaaagtcaatgaaaagcagttaaatatccactgggatgttgaggaatgaagcatgtgtacattgtgccttttttgccacataagggattggtgcatgcatgatttgatcactagtgtaaagttgtcttcgtatacttttgtataaattttttggtagcaggctatctagatctttcgggtcatattgcattctttaggtattagtgttccatgaaaatggagaaaattgcaattctaccggattaagataatattttctttctggggaatttgatctaattgtggccttaagatgtcgtc

SEQ ID NO: 58147 - protein, 196 aa, Glycine max
  peptide (1)..(196): Ceres Seq. ID no. 13595756
  misc_feature (15)..(171): Homolog of NCBI NO: 28573518 NR Description: CG18467-PA [Drosophila melanogaster]
  misc_feature (9)..(171): Homolog of NCBI NO: 24643081 NR Description: CG6617-PA [Drosophila melanogaster]
  misc_feature (11)..(186): Homolog of NCBI NO: 25404311 NR Description: hypothetical protein F11P17.12 [imported] -
  misc_feature (11)..(186): Homolog of NCBI NO: 15219873 NR Description: expressed protein [Arabidopsis thaliana]
  misc_feature (13)..(179): Homolog of NCBI NO: 21594655 NR Description: chromosome 20 open reading frame 11 [Homo sapiens]
  misc_feature (13)..(179): Homolog of NCBI NO: 8923557 NR Description: chromosome 20 open reading frame 11
  misc_feature (11)..(179): Homolog of NCBI NO: 37748055 NR Description: Unknown (protein for MGC:73100) [Danio rerio]
  misc_feature (13)..(179): Homolog of NCBI NO: 20863687 NR Description: RIKEN cDNA 2310003C23 [Mus musculus]
  misc_feature (1)..(169): Homolog of NCBI NO: 34910006 NR Description: P0413G02.3 [Oryza sativa (japonica
  misc_feature (3)..(187): Homolog of NCBI NO: 18390607 NR Description: expressed protein [Arabidopsis thaliana]
MDVDPCQYEQIAINEKDVNNIILSYLIHNCYKESSESFISCTGMKQPADHLENMEKRKRIFHHALEGNVLKAIELTGQLAQDILENNNDLLFDLLSLHFVDLVCSKEWAEALEFAQTKLSPFSVKEQKYMEKIEGFMSLLAYENPVECPMFHLIGLDYRQQVVDSLNQTILDVGDGQHTLTFPSTLPWSGLYNRPQ

SEQ ID NO: 58148 - protein, 153 aa, Glycine max
  peptide (1)..(153): Ceres Seq. ID no. 13595757
  misc_feature (1)..(128): Homolog of NCBI NO: 28573518 NR Description: CG18467-PA [Drosophila melanogaster]
  misc_feature (1)..(128): Homolog of NCBI NO: 24643081 NR Description: CG6617-PA [Drosophila melanogaster]
  misc_feature (1)..(143): Homolog of NCBI NO: 25404311 NR Description: hypothetical protein F11P17.12 [imported] -
  misc_feature (1)..(143): Homolog of NCBI NO: 15219873 NR Description: expressed protein [Arabidopsis thaliana]
  misc_feature (1)..(136): Homolog of NCBI NO: 21594655 NR Description: chromosome 20 open reading frame 11 [Homo sapiens]
  misc_feature (1)..(136): Homolog of NCBI NO: 8923557 NR Description: chromosome 20 open reading frame 11
  misc_feature (1)..(136): Homolog of NCBI NO: 37748055 NR Description: Unknown (protein for MGC:73100) [Danio rerio]
  misc_feature (1)..(136): Homolog of NCBI NO: 20863687 NR Description: RIKEN cDNA 2310003C23 [Mus musculus]
  misc_feature (1)..(126): Homolog of NCBI NO: 34910006 NR Description: P0413G02.3 [Oryza sativa (japonica
  misc_feature (1)..(144): Homolog of NCBI NO: 18390607 NR Description: expressed protein [Arabidopsis thaliana]
MKQPADHLENMEKRKRIFHHALEGNVLKAIELTGQLAQDILENNNDLLFDLLSLHFVDLVCSKEWAEALEFAQTKLSPFSVKEQKYMEKIEGFMSLLAYENPVECPMFHLIGLDYRQQVVDSLNQTILDVGDGQHTLTFPSTLPWSGLYNRPQ

SEQ ID NO: 58149 - protein, 143 aa, Glycine max
  peptide (1)..(143): Ceres Seq. ID no. 13595758
  misc_feature (1)..(118): Homolog of NCBI NO: 28573518 NR Description: CG18467-PA [Drosophila melanogaster]
  misc_feature (1)..(118): Homolog of NCBI NO: 24643081 NR Description: CG6617-PA [Drosophila melanogaster]
  misc_feature (1)..(133): Homolog of NCBI NO: 25404311 NR Description: hypothetical protein F11P17.12 [imported] -
  misc_feature (1)..(133): Homolog of NCBI NO: 15219873 NR Description: expressed protein [Arabidopsis thaliana]
  misc_feature (1)..(126): Homolog of NCBI NO: 21594655 NR Description: chromosome 20 open reading frame 11 [Homo sapiens]
  misc_feature (1)..(126): Homolog of NCBI NO: 8923557 NR Description: chromosome 20 open reading frame 11
  misc_feature (1)..(126): Homolog of NCBI NO: 37748055 NR Description: Unknown (protein for MGC:73100) [Danio rerio]
  misc_feature (1)..(126): Homolog of NCBI NO: 20863687 NR Description: RIKEN cDNA 2310003C23 [Mus musculus]
  misc_feature (1)..(116): Homolog of NCBI NO: 34910006 NR Description: P0413G02.3 [Oryza sativa (japonica
  misc_feature (1)..(134): Homolog of NCBI NO: 18390607 NR Description: expressed protein [Arabidopsis thaliana]
MEKRKRIFHHALEGNVLKAIELTGQLAQDILENNNDLLFDLLSLHFVDLVCSKEWAEALEFAQTKLSPFSVKEQKYMEKIEGFMSLLAYENPVECPMFHLIGLDYRQQVVDSLNQTILDVGDGQHTLTFPSTLPWSGLYNRPQ

SEQ ID NO: 58150 - DNA, 852 bp, Glycine max
  misc_feature (1)..(852): Ceres Seq. ID no. 15173288
atcatctctttgagttgccattgaagaagaagctcagatcggaaaaattcacctctccaatcccaatcccatcgttgcaaatgatccgattcattctgttgcagaacaggcagggcaagacccgtcttgccaaatactacgttcctctcgaggactccgagaagcacaaggtcgaatacgaggttcatcggctcgtcgtaaacagagaccctaaatacacaaatttcgtcgagtttcgtacgcacaagataatatacaggcgatatgctgggttatttttctcactctgtgttgatatcactgataatgagttggcgtatttagagtgcatccatttgtttgtggaaatattggatcacttcttcagcaatgtctgtgagctcgatttggtttttaacttccacaaggtctatcttatacttgatgaattcattctagcgggtgaactgcaagaaacaagcaagaaggctatcattgagagaatgggggaacttgaaaaactagaatgaaaaattacttttcagcagtcatatcaatttggagatttcgatgacttactcatgcccttggcttaattcttgtatttcaattgtgatacagaattttgaaaatcttttccgttgagccatgtattcaatgccctttaccttcgcttcttattcggcttatgtttatatttgtaagacatttataaaatcagggttttcagtagcctttctgttactgtctctgttttgtttcactttttataaatttatttgctcttcttggttgttagtaaaacacttaatggaaatgtaattggatgattgtagtatataagcaatgcaaaacgattaattttgatggtac

SEQ ID NO: 58151 - protein, 168 aa, Glycine max
  peptide (1)..(168): Ceres Seq. ID no. 15173289
  misc_feature (27)..(168): Pfam Name: Clathrin adaptor complex small chain Pfam Description: Clathrin adaptor complex small chain
  misc_feature (27)..(168): Homolog of NCBI NO: 30584435 NR Description: Homo sapiens adaptor-related protein complex 2,
  misc_feature (37)..(135): Homolog of NCBI NO: 25405904 NR Description: protein T2E6.6 [imported] - Arabidopsis thaliana
  misc_feature (27)..(168): Homolog of NCBI NO: 34784526 NR Description: Unknown (protein for MGC:65827) [Danio rerio]
  misc_feature (27)..(168): Homolog of NCBI NO: 40746043 NR Description: conserved hypothetical protein [Aspergillus
  misc_feature (66)..(168): Homolog of NCBI NO: 19070753 NR Description: clathrin coat assembly protein [Oryza sativa]
  misc_feature (27)..(168): Homolog of NCBI NO: 32416434 NR Description: hypothetical protein [Neurospora crassa]
  misc_feature (27)..(155): Homolog of NCBI NO: 7489722 NR Description: clathrin coat assembly protein AP17 - maize
  misc_feature (27)..(168): Homolog of NCBI NO: 15220987 NR Description: clathrin coat assembly protein AP17 -related
  misc_feature (27)..(168): Homolog of NCBI NO: 30983940 NR Description: clathrin coat assembly protein [Gossypium
  misc_feature (27)..(168): Homolog of NCBI NO: 17149110 NR Description: clathrin assembly protein AP17-like protein
HLFELPLKKKLRSEKFTSPIPIPSLQMIRFILLQNRQGKTRLAKYYVPLEDSEKHKVEYEVHRLVVNRDPKYTNFVEFRTHKIIYRRYAGLFFSLCVDITDNELAYLECIHLFVEILDHFFSNVCELDLVFNFHKVYLILDEFILAGELQETSKKAIIERMGELEKLE

SEQ ID NO: 58152 - protein, 142 aa, Glycine max
  peptide (1)..(142): Ceres Seq. ID no. 15173290
  misc_feature (1)..(142): Pfam Name: Clathrin adaptor complex small chain Pfam Description: Clathrin adaptor complex small chain
  misc_feature (1)..(142): Homolog of NCBI NO: 30584435 NR Description: Homo sapiens adaptor-related protein complex 2,
  misc_feature (11)..(109): Homolog of NCBI NO: 25405904 NR Description: protein T2E6.6 [imported] - Arabidopsis thaliana
  misc_feature (1)..(142): Homolog of NCBI NO: 34784526 NR Description: Unknown (protein for MGC:65827) [Danio rerio]
  misc_feature (1)..(142): Homolog of NCBI NO: 40746043 NR Description: conserved hypothetical protein [Aspergillus
  misc_feature (40)..(142): Homolog of NCBI NO: 19070753 NR Description: clathrin coat assembly protein [Oryza sativa]
  misc_feature (1)..(142): Homolog of NCBI NO: 32416434 NR Description: hypothetical protein [Neurospora crassa]
  misc_feature (1)..(129): Homolog of NCBI NO: 7489722 NR Description: clathrin coat assembly protein AP17 - maize
  misc_feature (1)..(142): Homolog of NCBI NO: 15220987 NR Description: clathrin coat assembly protein AP17 -related
  misc_feature (1)..(142): Homolog of NCBI NO: 30983940 NR Description: clathrin coat assembly protein [Gossypium
  misc_feature (1)..(142): Homolog of NCBI NO: 17149110 NR Description: clathrin assembly protein AP17-like protein
MIRFILLQNRQGKTRLAKYYVPLEDSEKHKVEYEVHRLVVNRDPKYTNFVEFRTHKIIYRRYAGLFFSLCVDITDNELAYLECIHLFVEILDHFFSNVCELDLVFNFHKVYLILDEFILAGELQETSKKAIIERMGELEKLE

SEQ ID NO: 58153 - DNA, 1324 bp, Glycine max
  misc_feature (1)..(1324): Ceres Seq. ID no. 13595861
atcgaaagtcgaaacatcccctgtcactttgactcaactcacacaccaatctccatatccctaccaattttccctattcactcatcaattttctcgtatcagattttgtggtagtgtagtccaactgtccaacttagagcaggcagcatggaggatattctgttggataccaggtgggaagatgtaatctgccccatatgcttggaagtccctcataatagtgtgctccttcagtgttcatcttatgataaggggtgtcgttcttttgtatgtgacacaagtcagttgcactcaaattgcttggatcgttttaaaagcacacatagcatgccatcctcttcaacatatgattcaacctcccaaatgtctgatgcaaattccatggcaaatagtgagtcagtggtatctgattgtcaatacaagctgagttgtccgttgtgtagaggtgatgtttttgggtggattattgttgataaagctcgtgtgcatcttgatgagaagaagcgttgctgtgaagaggagcaatgtgcatttattggaagttactccgagctacaaaaacatgctcaactggaacaccctcatgcttgtccatcgaaaattgatcctgtccgacagcttgattggaaaaattttcagcagtcatctgagatcatagatgttttgagcactattcattcagaaattccacggggagtggtcttgggagattatgtgattgaatatggggatgatgacagtgcagatgagtttgaggacttccctggagatgaaggttctgtagcatctgtagagtatggcgagtataggctagatgagattgatgatgattttgttagtacaattggccacttgagaggtggaagtggttttcgcagatcgcggagacgtcattctcgctccaatgacaattagtatttgaactgaaggaagcagaatgagaggaagagatacactcaacatagaaaccagtgtgatcttgatgcagctggtgtgacaactcgcaaaggttacatttaggtcatctaatgcatttgtgataacttgagggatcaacattacaagattgatagttgaatgtggattatattccaagtttctgttatgcttaccattaactaccatttagtatgctagccattgggagcctgttaatttactcctgtgccaccaaagtgattccgctagctttatgctctgtagaacaatgaattacttcttttccttgtatatatagccgcttagttgtgatgtattataatgattctaaagtagggatgtttccatgtcactgaataaaacttttgtttttttttcctccccc

SEQ ID NO: 58154 - protein, 255 aa, Glycine max
  peptide (1)..(255): Ceres Seq. ID no. 13595862
  misc_feature (90)..(209): Homolog of NCBI NO: 30699285 NR Description: expressed protein [Arabidopsis thaliana]
  misc_feature (90)..(209): Homolog of NCBI NO: 25365932 NR Description: unknown protein T32E8.10 [imported] - Arabidopsis
  misc_feature (10)..(65): Homolog of NCBI NO: 15236507 NR Description: expressed protein [Arabidopsis thaliana]
  misc_feature (87)..(225): Homolog of NCBI NO: 15236507 NR Description: expressed protein [Arabidopsis thaliana]
  misc_feature (6)..(78): Homolog of NCBI NO: 38346521 NR Description: OSJNBa0027H09.16 [Oryza sativa (japonica
  misc_feature (68)..(249): Homolog of NCBI NO: 38346521 NR Description: OSJNBa0027H09.16 [Oryza sativa (japonica
  misc_feature (1)..(85): Homolog of NCBI NO: 15230170 NR Description: expressed protein [Arabidopsis thaliana]
  misc_feature (83)..(255): Homolog of NCBI NO: 15230170 NR Description: expressed protein [Arabidopsis thaliana]
  misc_feature (1)..(255): Homolog of NCBI NO: 18417801 NR Description: expressed protein [Arabidopsis thaliana]
  misc_feature (1)..(255): Homolog of NCBI NO: 7486671 NR Description: hypothetical protein F8F16.230 - Arabidopsis
MEDILLDTRWEDVICPICLEVPHNSVLLQCSSYDKGCRSFVCDTSQLHSNCLDRFKSTHSMPSSSTYDSTSQMSDANSMANSESVVSDCQYKLSCPLCRGDVFGWIIVDKARVHLDEKKRCCEEEQCAFIGSYSELQKHAQLEHPHACPSKIDPVRQLDWKNFQQSSEIIDVLSTIHSEIPRGVVLGDYVIEYGDDDSADEFEDFPGDEGSVASVEYGEYRLDEIDDDFVSTIGHLRGGSGFRRSRRRHSRSNDN

SEQ ID NO: 58155 - protein, 195 aa, Glycine max
  peptide (1)..(195): Ceres Seq. ID no. 13595863
  misc_feature (1)..(195): Homolog of NCBI NO: 15221290 NR Description: expressed protein [Arabidopsis thaliana]
  misc_feature (30)..(149): Homolog of NCBI NO: 30699285 NR Description: expressed protein [Arabidopsis thaliana]
  misc_feature (30)..(149): Homolog of NCBI NO: 25365932 NR Description: unknown protein T32E8.10 [imported] - Arabidopsis
  misc_feature (27)..(165): Homolog of NCBI NO: 15236507 NR Description: expressed protein [Arabidopsis thaliana]
  misc_feature (1)..(18): Homolog of NCBI NO: 38346521 NR Description: OSJNBa0027H09.16 [Oryza sativa (japonica
  misc_feature (8)..(189): Homolog of NCBI NO: 38346521 NR Description: OSJNBa0027H09.16 [Oryza sativa (japonica
  misc_feature (1)..(25): Homolog of NCBI NO: 15230170 NR Description: expressed protein [Arabidopsis thaliana]
  misc_feature (23)..(195): Homolog of NCBI NO: 15230170 NR Description: expressed protein [Arabidopsis thaliana]
  misc_feature (1)..(195): Homolog of NCBI NO: 18417801 NR Description: expressed protein [Arabidopsis thaliana]
  misc_feature (1)..(195): Homolog of NCBI NO: 7486671 NR Description: hypothetical protein F8F16.230 - Arabidopsis
MPSSSTYDSTSQMSDANSMANSESVVSDCQYKLSCPLCRGDVFGWIIVDKARVHLDEKKRCCEEEQCAFIGSYSELQKHAQLEHPHACPSKIDPVRQLDWKNFQQSSEIIDVLSTIHSEIPRGVVLGDYVIEYGDDDSADEFEDFPGDEGSVASVEYGEYRLDEIDDDFVSTIGHLRGGSGFRRSRRRHSRSNDN

SEQ ID NO: 58156 - protein, 183 aa, Glycine max
  peptide (1)..(183): Ceres Seq. ID no. 13595864
  misc_feature (1)..(136): Homolog of NCBI NO: 38344827 NR Description: OSJNBa0064H22.8 [Oryza sativa (japonica
  misc_feature (1)..(183): Homolog of NCBI NO: 15221290 NR Description: expressed protein [Arabidopsis thaliana]
  misc_feature (18)..(137): Homolog of NCBI NO: 30699285 NR Description: expressed protein [Arabidopsis thaliana]
  misc_feature (18)..(137): Homolog of NCBI NO: 25365932 NR Description: unknown protein T32E8.10 [imported] - Arabidopsis
  misc_feature (15)..(153): Homolog of NCBI NO: 15236507 NR Description: expressed protein [Arabidopsis thaliana]
  misc_feature (1)..(177): Homolog of NCBI NO: 38346521 NR Description: OSJNBa0027H09.16 [Oryza sativa (japonica
  misc_feature (1)..(13): Homolog of NCBI NO: 15230170 NR Description: expressed protein [Arabidopsis thaliana]
  misc_feature (11)..(183): Homolog of NCBI NO: 15230170 NR Description: expressed protein [Arabidopsis thaliana]
  misc_feature (1)..(183): Homolog of NCBI NO: 18417801 NR Description: expressed protein [Arabidopsis thaliana]
  misc_feature (1)..(183): Homolog of NCBI NO: 7486671 NR Description: hypothetical protein F8F16.230 - Arabidopsis
MSDANSMANSESVVSDCQYKLSCPLCRGDVFGWIIVDKARVHLDEKKRCCEEEQCAFIGSYSELQKHAQLEHPHACPSKIDPVRQLDWKNFQQSSEIIDVLSTIHSEIPRGVVLGDYVIEYGDDDSADEFEDFPGDEGSVASVEYGEYRLDEIDDDFVSTIGHLRGGSGFRRSRRRHSRSNDN

SEQ ID NO: 58157 - DNA, 1653 bp, Glycine max
  misc_feature (1)..(1653): Ceres Seq. ID no. 15177184
gcactttatcacaatcacaggctaagcttcaacaatggacaagtcgtgcgtgatttctccaagttgctacgacaatcatcacctctgctttgcatttctcttctcctttctcttttgctctctgctgttatcctttcatgctcccaacctcctccgactcacatccaagaccaaaaatgtcacagattcctgcactggccgctatgtttacattcaccaactcccctcccgcttcaacgattacttgcttcagaattgccagtccctcactagaggcactgacaaacccaacatgtgtccatacatgcaaaacaatggtttaggtcctcacattacctactcccaagggcttttctccaacaacacttgctatgccaccaaccagttcttgttggaagttatttttcacaacaggatgaccaaatatggctgcttgaccaacgattcctccctcgcctctgcaattttcgtcccattctatgctggtcttgatgttagccgtttcctttggctctctaatctcacagagagagattcctctggtcgtgatcttcttcaatgggtcgcaaaaagacccgagtggaagcaaatgtggggcagagatcatttccttgtttctgggaggattgcttgggatttcaggagacaatatgatgatgcgtcctattggggtagtaagttcaggtttatacccgaatccatgaacatgtccatgttagcagttgaagcaagttcgtggaataatgactacgcaattccgtacccaacttctttccacccatcagaggacactcatgtttaccggtggcagagaaaaatcagacatcaaaagcggccatacttgttcactttcaccggagctccaaggcctgaacttgaaggttctatcaggggtaagattatagaccagtgtcgagcttcgagtgtttgcaaattcgttgactgcagctatggtgtagagagatgtgacgaccccatcaatgttataaaggtgtttgaaagttctgtgttctgtttgcagcctccgggtgactcatacaccagaaggtccatttttgattccatcttggccggttgtattcccgttttctttcatcctggtactgcttactcgcagtacaagtggcatttacccaagaataggactaagtactctgtgtatatacccgtgaaggatgtaaaacaatggaatgtcaacgtggagcaggtgttgctgggaattccagagggtgaggtgtttgcaatgagagaggaggttataaagctgcttccaaatattatctatgcagatcctaggtctaagttagattgctttgaagacgcgtttgatttagcagtaaaaggaatgcttgaaagaatagagaaggtgagggaagcaatgaggagtgggagagatcctagcattggttttgcggatgaagaccattataagtatacattttcacaaaattacagctaaaggaagacacatcatattatagtgcatatcgtttcatagttaacatattcccttcagagaatcccgtgtaacacttttttttttttttttgtgggtattctggcttttctgatttacttttgattttgctttttcttggcctataaagaaggaaatccgattgcaatgataacaagtgaagaaaaaatgtttgt

SEQ ID NO: 58158 - protein, 474 aa, Glycine max
  peptide (1)..(474): Ceres Seq. ID no. 15177185
  misc_feature (58)..(408): Pfam Name: Exostosin family Pfam Description: Exostosin family
  misc_feature (22)..(442): Homolog of NCBI NO: 15225734 NR Description: Exostosin family [Arabidopsis thaliana]
  misc_feature (52)..(449): Homolog of NCBI NO: 27497204 NR Description: Hypothetical protein [Oryza sativa (japonica
  misc_feature (24)..(446): Homolog of NCBI NO: 27497203 NR Description: Hypothetical protein [Oryza sativa (japonica
  misc_feature (51)..(446): Homolog of NCBI NO: 15225165 NR Description: Exostosin family [Arabidopsis thaliana]
  misc_feature (51)..(472): Homolog of NCBI NO: 15227020 NR Description: hypothetical protein [Arabidopsis thaliana]
  misc_feature (1)..(454): Homolog of NCBI NO: 15225735 NR Description: hypothetical protein [Arabidopsis thaliana]
  misc_feature (38)..(467): Homolog of NCBI NO: 30680972 NR Description: expressed protein [Arabidopsis thaliana]
  misc_feature (38)..(467): Homolog of NCBI NO: 25411977 NR Description: hypothetical protein At2g20370 [imported] -
  misc_feature (41)..(467): Homolog of NCBI NO: 27497206 NR Description: Unknown protein [Oryza sativa (japonica
  misc_feature (52)..(470): Homolog of NCBI NO: 29824391 NR Description: unknown protein [Arabidopsis thaliana]
MDKSCVISPSCYDNHHLCFAFLFSFLFCSLLLSFHAPNLLRLTSKTKNVTDSCTGRYVYIHQLPSRFNDYLLQNCQSLTRGTDKPNMCPYMQNNGLGPHITYSQGLFSNNTCYATNQFLLEVIFHNRMTKYGCLTNDSSLASAIFVPFYAGLDVSRFLWLSNLTERDSSGRDLLQWVAKRPEWKQMWGRDHFLVSGRIAWDFRRQYDDASYWGSKFRFIPESMNMSMLAVEASSWNNDYAIPYPTSFHPSEDTHVYRWQRKIRHQKRPYLFTFTGAPRPELEGSIRGKIIDQCRASSVCKFVDCSYGVERCDDPINVIKVFESSVFCLQPPGDSYTRRSIFDSILAGCIPVFFHPGTAYSQYKWHLPKNRTKYSVYIPVKDVKQWNVNVEQVLLGIPEGEVFAMREEVIKLLPNIIYADPRSKLDCFEDAFDLAVKGMLERIEKVREAMRSGRDPSIGFADEDHYKYTFSQNYS

SEQ ID NO: 58159 - protein, 388 aa, Glycine max
  peptide (1)..(388): Ceres Seq. ID no. 15177186
  misc_feature (1)..(322): Pfam Name: Exostosin family Pfam Description: Exostosin family
  misc_feature (1)..(356): Homolog of NCBI NO: 15225734 NR Description: Exostosin family [Arabidopsis thaliana]
  misc_feature (1)..(363): Homolog of NCBI NO: 27497204 NR Description: Hypothetical protein [Oryza sativa (japonica
  misc_feature (1)..(360): Homolog of NCBI NO: 27497203 NR Description: Hypothetical protein [Oryza sativa (japonica
  misc_feature (1)..(360): Homolog of NCBI NO: 15225165 NR Description: Exostosin family [Arabidopsis thaliana]
  misc_feature (1)..(386): Homolog of NCBI NO: 15227020 NR Description: hypothetical protein [Arabidopsis thaliana]
  misc_feature (1)..(368): Homolog of NCBI NO: 15225735 NR Description: hypothetical protein [Arabidopsis thaliana]
  misc_feature (1)..(381): Homolog of NCBI NO: 30680972 NR Description: expressed protein [Arabidopsis thaliana]
  misc_feature (1)..(381): Homolog of NCBI NO: 25411977 NR Description: hypothetical protein At2g20370 [imported] -
  misc_feature (1)..(381): Homolog of NCBI NO: 27497206 NR Description: Unknown protein [Oryza sativa (japonica
  misc_feature (1)..(384): Homolog of NCBI NO: 29824391 NR Description: unknown protein [Arabidopsis thaliana]
MCPYMQNNGLGPHITYSQGLFSNNTCYATNQFLLEVIFHNRMTKYGCLTNDSSLASAIFVPFYAGLDVSRFLWLSNLTERDSSGRDLLQWVAKRPEWKQMWGRDHFLVSGRIAWDFRRQYDDASYWGSKFRFIPESMNMSMLAVEASSWNNDYAIPYPTSFHPSEDTHVYRWQRKIRHQKRPYLFTFTGAPRPELEGSIRGKIIDQCRASSVCKFVDCSYGVERCDDPINVIKVFESSVFCLQPPGDSYTRRSIFDSILAGCIPVFFHPGTAYSQYKWHLPKNRTKYSVYIPVKDVKQWNVNVEQVLLGIPEGEVFAMREEVIKLLPNIIYADPRSKLDCFEDAFDLAVKGMLERIEKVREAMRSGRDPSIGFADEDHYKYTFSQNYS

SEQ ID NO: 58160 - protein, 384 aa, Glycine max
  peptide (1)..(384): Ceres Seq. ID no. 15177187
  misc_feature (1)..(318): Pfam Name: Exostosin family Pfam Description: Exostosin family
  misc_feature (1)..(352): Homolog of NCBI NO: 15225734 NR Description: Exostosin family [Arabidopsis thaliana]
  misc_feature (1)..(359): Homolog of NCBI NO: 27497204 NR Description: Hypothetical protein [Oryza sativa (japonica
  misc_feature (1)..(356): Homolog of NCBI NO: 27497203 NR Description: Hypothetical protein [Oryza sativa (japonica
  misc_feature (1)..(356): Homolog of NCBI NO: 15225165 NR Description: Exostosin family [Arabidopsis thaliana]
  misc_feature (1)..(382): Homolog of NCBI NO: 15227020 NR Description: hypothetical protein [Arabidopsis thaliana]
  misc_feature (1)..(364): Homolog of NCBI NO: 15225735 NR Description: hypothetical protein [Arabidopsis thaliana]
  misc_feature (1)..(377): Homolog of NCBI NO: 30680972 NR Description: expressed protein [Arabidopsis thaliana]
  misc_feature (1)..(377): Homolog of NCBI NO: 25411977 NR Description: hypothetical protein At2g20370 [imported] -
  misc_feature (1)..(377): Homolog of NCBI NO: 27497206 NR Description: Unknown protein [Oryza sativa (japonica
  misc_feature (1)..(380): Homolog of NCBI NO: 29824391 NR Description: unknown protein [Arabidopsis thaliana]
MQNNGLGPHITYSQGLFSNNTCYATNQFLLEVIFHNRMTKYGCLTNDSSLASAIFVPFYAGLDVSRFLWLSNLTERDSSGRDLLQWVAKRPEWKQMWGRDHFLVSGRIAWDFRRQYDDASYWGSKFRFIPESMNMSMLAVEASSWNNDYAIPYPTSFHPSEDTHVYRWQRKIRHQKRPYLFTFTGAPRPELEGSIRGKIIDQCRASSVCKFVDCSYGVERCDDPINVIKVFESSVFCLQPPGDSYTRRSIFDSILAGCIPVFFHPGTAYSQYKWHLPKNRTKYSVYIPVKDVKQWNVNVEQVLLGIPEGEVFAMREEVIKLLPNIIYADPRSKLDCFEDAFDLAVKGMLERIEKVREAMRSGRDPSIGFADEDHYKYTFSQNYS

SEQ ID NO: 58161 - DNA, 656 bp, Glycine max
  misc_feature (1)..(656): Ceres Seq. ID no. 13594349
gaggaagtgagtccagagacagggatcagttatggctccgtgttcagtttttttcaattttcttcttctgcttcttctttctttcaccaaagaagctttaggtgtttcagagcaagaagctgacagagtgcatggactacccggacagcctccggtgaagttcaaacaatattctggttatatcactgtcaatgaaacccatggaagagcactcttctattggttctttgaggccactcataaaccagaagaaaagcctcttctcttatggctcaatggaggccctggttgttcctcaattggttatggagaagcagaggagctaggacccttctttcctcaggacagcagccaaccaaagctaaagttaaatccttattcttggaataacgctgccaatcttttgtttttggaatcccctgttggggtggggttctcctacaccaacaccagcagtgatataagtgagcttggtgacaccattaccgctaaagattcacacacctttatcatcaagtggtttagaagatttccacaattcagatcacacgaattctacatttccggtgaaagctatgcagggcactatgttccgcaactttcagagctcattttcgataataatcgcaatcctgtcgagaaagactacattaact

SEQ ID NO: 58162 - protein, 208 aa, Glycine max
  peptide (1)..(208): Ceres Seq. ID no. 13594350
  misc_feature (8)..(207): Homolog of NCBI NO: 15234795 NR Description: serine carboxypeptidase -related [Arabidopsis
  misc_feature (1)..(201): Homolog of NCBI NO: 15227493 NR Description: serine carboxypeptidase -related [Arabidopsis
  misc_feature (8)..(207): Homolog of NCBI NO: 13877871 NR Description: putative serine carboxypeptidase II [Arabidopsis
  misc_feature (28)..(207): Homolog of NCBI NO: 15241571 NR Description: serine carboxypeptidase II -related [Arabidopsis
  misc_feature (29)..(207): Homolog of NCBI NO: 38344436 NR Description: OSJNBa0038O10.8 [Oryza sativa (japonica
  misc_feature (28)..(207): Homolog of NCBI NO: 37536528 NR Description: putative serine carboxypeptidase
  misc_feature (28)..(207): Homolog of NCBI NO: 10140766 NR Description: putative serine carboxypeptidase [Oryza sativa]
  misc_feature (20)..(200): Homolog of NCBI NO: 15220282 NR Description: serine carboxypeptidase -related [Arabidopsis
  misc_feature (27)..(207): Homolog of NCBI NO: 34894888 NR Description: putative serine carboxypeptidase II-like protein
  misc_feature (25)..(207): Homolog of NCBI NO: 10177810 NR Description: serine carboxypeptidase II-like protein
MAPCSVFFNFLLLLLLSFTKEALGVSEQEADRVHGLPGQPPVKFKQYSGYITVNETHGRALFYWFFEATHKPEEKPLLLWLNGGPGCSSIGYGEAEELGPFFPQDSSQPKLKLNPYSWNNAANLLFLESPVGVGFSYTNTSSDISELGDTITAKDSHTFIIKWFRRFPQFRSHEFYISGESYAGHYVPQLSELIFDNNRNPVEKDYIN

SEQ ID NO: 58163 - DNA, 1425 bp, Glycine max
  misc_feature (1)..(1425): Ceres Seq. ID no. 12476493
caacaaagtcacaaatcacacatacacacactcaaatacatacactagtagtgtggtgtgtgcccttcctttatccttttgctttttgtgtgcaattaacacacactcacacaaaaatgacggcatgccaagattggccagagccagtgattcgagtccaagccttggctgcaagtggcttagccacaatccccgaacgtttcataaagcctaagtcccaaagacccactaatagtaacaattatgctccaaagaccaatttctctcaaattggtcatcataagaacaataccaccaacagcaacatcccagtgattgacatgaagcacatctacagtggtgacgagggaaagagggctgagacgctccggctcgtgtcggaggcgtgccaagaatggggttttttccaggtggtgaaccatggagtgagccatgagttgatgaagggggcaagggaggtgtggagggagttctttcaccagccacttgatgtgaaagaggtgtatgctaatacacccctcacttatgaagggtatggaagcaggttgggagtgaaaaaaggggccattttggattggagtgattacttctttctccattacatgccttgttccctaagggaccaagccaagtggcctgccctcccaacatccttaaggagcatcatctctgaatatggtgaacaaattgttaagctaggaggaaggatacttgagataatgtcaataaatcttggccttagagaggattttctcctaaatgcatttggtggggaaaatgaccttggtgcttgcttgagggtgaatttctaccctaagtgcccacagcctgacctcactcttggactttcctctcactcagatcctggtggcatgaccattcttctccctgatgaaaatgtatcaggacttcaagtacgcagaggagaagattgggtcactgttaagccagtcccaaatgctttcatcatcaacatgggtgaccaaattcaggtgctgagcaatgcaacttacaagagtatagagcacagggtgatcgtgaactcagacaaagatcgcgtttcattggcctttttctataaccccaggagcgatataccgatccaaccagccaaggagcttgtgactaaggataggccagcactatacccaccaatgacatttgatgagtatagactttacattaggacaagaggaccaagtggaaaagctcaagttgaatctttgacttccaaatgagatgagattccaattgagcagtagtttgcagtgcacaaaattaatttgcatatgaataatttatcatctttgtgtttgtctcaatatcagactcaattaatcaagtatcatatcccacttaaattctatgtaacactttactctgtatttttcttatctcaaatataatatatggttgagttattgc

SEQ ID NO: 58164 - protein, 411 aa, Glycine max
  peptide (1)..(411): Ceres Seq. ID no. 12476494
  misc_feature (261)..(361): Pfam Name: 2OG-Fe(II) oxygenase superfamily Pfam Description: 2OG-Fe(II) oxygenase superfamily
  misc_feature (51)..(390): Homolog of NCBI NO: 1730107 NR Description: LEUCOANTHOCYANIDIN DIOXYGENASE (LDOX)
  misc_feature (75)..(408): Homolog of NCBI NO: 21554535 NR Description: putative anthocyanidin synthase [Arabidopsis
  misc_feature (75)..(408): Homolog of NCBI NO: 15224472 NR Description: putative anthocyanidin synthase
  misc_feature (327)..(408): Homolog of NCBI NO: 34907994 NR Description: leucoanthocyanidin dioxygenase-like protein
  misc_feature (39)..(122): Homolog of NCBI NO: 34907994 NR Description: leucoanthocyanidin dioxygenase-like protein
  misc_feature (97)..(336): Homolog of NCBI NO: 34907994 NR Description: leucoanthocyanidin dioxygenase-like protein
  misc_feature (39)..(410): Homolog of NCBI NO: 15228785 NR Description: leucoanthocyanidin dioxygenase -like protein
  misc_feature (44)..(407): Homolog of NCBI NO: 21537324 NR Description: leucoanthocyanidin dioxygenase-like protein
  misc_feature (43)..(407): Homolog of NCBI NO: 15229694 NR Description: putative leucoanthocyanidin dioxygenase; protein
  misc_feature (37)..(407): Homolog of NCBI NO: 15239179 NR Description: leucoanthocyanidin dioxygenase-like protein
TKSQITHTHTQIHTLVVWCVPFLYPFAFCVQLTHTHTKMTACQDWPEPVIRVQALAASGLATIPERFIKPKSQRPTNSNNYAPKTNFSQIGHHKNNTTNSNIPVIDMKHIYSGDEGKRAETLRLVSEACQEWGFFQVVNHGVSHELMKGAREVWREFFHQPLDVKEVYANTPLTYEGYGSRLGVKKGAILDWSDYFFLHYMPCSLRDQAKWPALPTSLRSIISEYGEQIVKLGGRILEIMSINLGLREDFLLNAFGGENDLGACLRVNFYPKCPQPDLTLGLSSHSDPGGMTILLPDENVSGLQVRRGEDWVTVKPVPNAFIINMGDQIQVLSNATYKSIEHRVIVNSDKDRVSLAFFYNPRSDIPIQPAKELVTKDRPALYPPMTFDEYRLYIRTRGPSGKAQVESLTSK

SEQ ID NO: 58165 - protein, 373 aa, Glycine max
  peptide (1)..(373): Ceres Seq. ID no. 12476495
  misc_feature (223)..(323): Pfam Name: 2OG-Fe(II) oxygenase superfamily Pfam Description: 2OG-Fe(II) oxygenase superfamily
  misc_feature (13)..(352): Homolog of NCBI NO: 1730107 NR Description: LEUCOANTHOCYANIDIN DIOXYGENASE (LDOX)
  misc_feature (37)..(370): Homolog of NCBI NO: 21554535 NR Description: putative anthocyanidin synthase [Arabidopsis
  misc_feature (37)..(370): Homolog of NCBI NO: 15224472 NR Description: putative anthocyanidin synthase
  misc_feature (289)..(370): Homolog of NCBI NO: 34907994 NR Description: leucoanthocyanidin dioxygenase-like protein
  misc_feature (1)..(84): Homolog of NCBI NO: 34907994 NR Description: leucoanthocyanidin dioxygenase-like protein
  misc_feature (59)..(298): Homolog of NCBI NO: 34907994 NR Description: leucoanthocyanidin dioxygenase-like protein
  misc_feature (1)..(372): Homolog of NCBI NO: 15228785 NR Description: leucoanthocyanidin dioxygenase -like protein
  misc_feature (6)..(369): Homolog of NCBI NO: 21537324 NR Description: leucoanthocyanidin dioxygenase-like protein
  misc_feature (5)..(369): Homolog of NCBI NO: 15229694 NR Description: putative leucoanthocyanidin dioxygenase; protein
  misc_feature (1)..(369): Homolog of NCBI NO: 15239179 NR Description: leucoanthocyanidin dioxygenase-like protein
MTACQDWPEPVIRVQALAASGLATIPERFIKPKSQRPTNSNNYAPKTNFSQIGHHKNNTTNSNIPVIDMKHIYSGDEGKRAETLRLVSEACQEWGFFQVVNHGVSHELMKGAREVWREFFHQPLDVKEVYANTPLTYEGYGSRLGVKKGAILDWSDYFFLHYMPCSLRDQAKWPALPTSLRSIISEYGEQIVKLGGRILEIMSINLGLREDFLLNAFGGENDLGACLRVNFYPKCPQPDLTLGLSSHSDPGGMTILLPDENVSGLQVRRGEDWVTVKPVPNAFIINMGDQIQVLSNATYKSIEHRVIVNSDKDRVSLAFFYNPRSDIPIQPAKELVTKDRPALYPPMTFDEYRLYIRTRGPSGKAQVESLTSK

SEQ ID NO: 58166 - protein, 305 aa, Glycine max
  peptide (1)..(305): Ceres Seq. ID no. 12476496
  misc_feature (155)..(255): Pfam Name: 2OG-Fe(II) oxygenase superfamily Pfam Description: 2OG-Fe(II) oxygenase superfamily
  misc_feature (1)..(284): Homolog of NCBI NO: 1730107 NR Description: LEUCOANTHOCYANIDIN DIOXYGENASE (LDOX)
  misc_feature (1)..(302): Homolog of NCBI NO: 21554535 NR Description: putative anthocyanidin synthase [Arabidopsis
  misc_feature (1)..(302): Homolog of NCBI NO: 15224472 NR Description: putative anthocyanidin synthase
  misc_feature (221)..(302): Homolog of NCBI NO: 34907994 NR Description: leucoanthocyanidin dioxygenase-like protein
  misc_feature (1)..(16): Homolog of NCBI NO: 34907994 NR Description: leucoanthocyanidin dioxygenase-like protein
  misc_feature (1)..(230): Homolog of NCBI NO: 34907994 NR Description: leucoanthocyanidin dioxygenase-like protein
  misc_feature (1)..(304): Homolog of NCBI NO: 15228785 NR Description: leucoanthocyanidin dioxygenase -like protein
  misc_feature (1)..(301): Homolog of NCBI NO: 21537324 NR Description: leucoanthocyanidin dioxygenase-like protein
  misc_feature (1)..(301): Homolog of NCBI NO: 15229694 NR Description: putative leucoanthocyanidin dioxygenase; protein
  misc_feature (1)..(301): Homolog of NCBI NO: 15239179 NR Description: leucoanthocyanidin dioxygenase-like protein
MKHIYSGDEGKRAETLRLVSEACQEWGFFQVVNHGVSHELMKGAREVWREFFHQPLDVKEVYANTPLTYEGYGSRLGVKKGAILDWSDYFFLHYMPCSLRDQAKWPALPTSLRSIISEYGEQIVKLGGRILEIMSINLGLREDFLLNAFGGENDLGACLRVNFYPKCPQPDLTLGLSSHSDPGGMTILLPDENVSGLQVRRGEDWVTVKPVPNAFIINMGDQIQVLSNATYKSIEHRVIVNSDKDRVSLAFFYNPRSDIPIQPAKELVTKDRPALYPPMTFDEYRLYIRTRGPSGKAQVESLTSK

SEQ ID NO: 58167 - DNA, 1794 bp, Glycine max
  misc_feature (1)..(1794): Ceres Seq. ID no. 15171148
aaaaaaggaaacgtatagaaaaagcttctccaaagaatttgaaggagaaagattcattcatgttcattttttccttttccccttcgtccccatcaagtttctgattctctcttttcacttcctttctctttcttcattcttctttctcttttcaactattttctttacatttttttctttttctctcgcttttttcgcgttcactttctctactctgttttacgcattttatttattgttttgttagttaattttgcgattcgagtaattggtatgcttgtgttttctagaagacgatattttcacgacgattaagctgcgttttcgccggtgtcgttttaccgcaagatggtgtcgttttcggaaatatgcaaaaagggttgaagttctttcttcagcattgaatctttgattacataggttggtttctttggaactcaattcaattcaataattggtcctccctttttgtggaactcaattcaattaggttagtggaaaaaatatggttgaatcaattgctgcaacttcactccttggccaccgcccaatttgtggtggaagtttaaccagggatgtttctgctaaacgcaaatctttgaatactgttcggttcccaacaactgagtttcttggtgggggaaggattgtggtttctctggctttgcctaaatctgataagcaggataggtttgtgttttcatcaattaaggccttggctgtggagttaacaagagaagcacatgcttatagggaaaagaaattgcccaatagggataacaagattgaccgtggatttgatcagaggcctgatttgtggcctccggcgaatagggcggataagctgtcacttcggaatcccttgctccggcatgagaggatgggatgtggttggttgggtgctatatttgagtgggagggtgttctaattgaagacaaccccgatttagagaagcaggcttggctggcactctctcaggaagaaggcaaaccctctcctcctgcttttatcctcaagagaatagaaggcatgaagaatgaacaggcgatttcggaagtgctgtgttggtctagggatccggcacagctgagaagaatggctaatagaaaggaagaaatctaccaagctttgctgggtgggatatatagtttcttgtctgggtccaaggagtttgtgagtgttttgatgcattataagataccaatggcattggtttccacgcggcctagaaaggctcttgagtctgctatgggggagattgggattgaggacactttcagtgttattgtagcagcagaggatgttcataggggaaagcctgatccagaaatgtttgtgtatgctgcacagcttttgaacttcatacctgagagggtcattgtgtttggtaactccaatctaacagtggaggctgctcatgaagcccggatgaagtgtgtggctgttgctagcaggcatcctgtatatgagcttggggctgcagacttggttgtcaggcgccttgacgagctttcagtggttgatttgaagaatcttgcagacattgaaatgactgaatttgggtctgtggagcctgagatggagctggaggtggaaaaagatcatgatacatcatcacttgatgacaatttctggtaaatcctataaatgtacagttgattgaactcatctgattgttgatgatattagttacaggttagttacttgtgtatatggtaaacagaataaatggggaaaaaatgataagtggtatgcattgaacattgatgttactactaatgaattttctgttc

SEQ ID NO: 58168 - protein, 377 aa, Glycine max
  peptide (1)..(377): Ceres Seq. ID no. 15171149
  misc_feature (130)..(317): Pfam Name: haloacid dehalogenase-like hydrolase Pfam Description: haloacid dehalogenase-like hydrolase
  misc_feature (219)..(346): Homolog of NCBI NO: 23019853 NR Description: hypothetical protein [Thermobifida fusca]
  misc_feature (132)..(347): Homolog of NCBI NO: 23129248 NR Description: hypothetical protein [Nostoc punctiforme]
  misc_feature (133)..(336): Homolog of NCBI NO: 23018808 NR Description: hypothetical protein [Thermobifida fusca]
  misc_feature (132)..(344): Homolog of NCBI NO: 14532506 NR Description: AT3g10970/F9F8_21 [Arabidopsis thaliana]
  misc_feature (132)..(344): Homolog of NCBI NO: 21592870 NR Description: unknown [Arabidopsis thaliana]
  misc_feature (132)..(344): Homolog of NCBI NO: 18399067 NR Description: haloacid dehalogenase-like hydrolase family
  misc_feature (117)..(364): Homolog of NCBI NO: 38345597 NR Description: OSJNBb0012E24.15 [Oryza sativa (japonica
  misc_feature (132)..(363): Homolog of NCBI NO: 18542168 NR Description: putative genetic modifier [Zea mays]
  misc_feature (132)..(363): Homolog of NCBI NO: 10444400 NR Description: genetic modifier [Zea mays]
  misc_feature (1)..(371): Homolog of NCBI NO: 15234236 NR Description: haloacid dehalogenase-like hydrolase family
MVESIAATSLLGHRPICGGSLTRDVSAKRKSLNTVRFPTTEFLGGGRIVVSLALPKSDKQDRFVFSSIKALAVELTREAHAYREKKLPNRDNKIDRGFDQRPDLWPPANRADKLSLRNPLLRHERMGCGWLGAIFEWEGVLIEDNPDLEKQAWLALSQEEGKPSPPAFILKRIEGMKNEQAISEVLCWSRDPAQLRRMANRKEEIYQALLGGIYSFLSGSKEFVSVLMHYKIPMALVSTRPRKALESAMGEIGIEDTFSVIVAAEDVHRGKPDPEMFVYAAQLLNFIPERVIVFGNSNLTVEAAHEARMKCVAVASRHPVYELGAADLVVRRLDELSVVDLKNLADIEMTEFGSVEPEMELEVEKDHDTSSLDDNFW

SEQ ID NO: 58169 - protein, 252 aa, Glycine max
  peptide (1)..(252): Ceres Seq. ID no. 15171150
  misc_feature (5)..(192): Pfam Name: haloacid dehalogenase-like hydrolase Pfam Description: haloacid dehalogenase-like hydrolase
  misc_feature (94)..(221): Homolog of NCBI NO: 23019853 NR Description: hypothetical protein [Thermobifida fusca]
  misc_feature (7)..(222): Homolog of NCBI NO: 23129248 NR Description: hypothetical protein [Nostoc punctiforme]
  misc_feature (8)..(211): Homolog of NCBI NO: 23018808 NR Description: hypothetical protein [Thermobifida fusca]
  misc_feature (7)..(219): Homolog of NCBI NO: 14532506 NR Description: AT3g10970/F9F8_21 [Arabidopsis thaliana]
  misc_feature (7)..(219): Homolog of NCBI NO: 21592870 NR Description: unknown [Arabidopsis thaliana]
  misc_feature (7)..(219): Homolog of NCBI NO: 18399067 NR Description: haloacid dehalogenase-like hydrolase family
  misc_feature (1)..(239): Homolog of NCBI NO: 38345597 NR Description: OSJNBb0012E24.15 [Oryza sativa (japonica
  misc_feature (7)..(238): Homolog of NCBI NO: 18542168 NR Description: putative genetic modifier [Zea mays]
  misc_feature (7)..(238): Homolog of NCBI NO: 10444400 NR Description: genetic modifier [Zea mays]
  misc_feature (1)..(246): Homolog of NCBI NO: 15234236 NR Description: haloacid dehalogenase-like hydrolase family
MGCGWLGAIFEWEGVLIEDNPDLEKQAWLALSQEEGKPSPPAFILKRIEGMKNEQAISEVLCWSRDPAQLRRMANRKEEIYQALLGGIYSFLSGSKEFVSVLMHYKIPMALVSTRPRKALESAMGEIGIEDTFSVIVAAEDVHRGKPDPEMFVYAAQLLNFIPERVIVFGNSNLTVEAAHEARMKCVAVASRHPVYELGAADLVVRRLDELSVVDLKNLADIEMTEFGSVEPEMELEVEKDHDTSSLDDNFW

SEQ ID NO: 58170 - protein, 202 aa, Glycine max
  peptide (1)..(202): Ceres Seq. ID no. 15171151
  misc_feature (1)..(142): Pfam Name: haloacid dehalogenase-like hydrolase Pfam Description: haloacid dehalogenase-like hydrolase
  misc_feature (44)..(171): Homolog of NCBI NO: 23019853 NR Description: hypothetical protein [Thermobifida fusca]
  misc_feature (1)..(172): Homolog of NCBI NO: 23129248 NR Description: hypothetical protein [Nostoc punctiforme]
  misc_feature (1)..(161): Homolog of NCBI NO: 23018808 NR Description: hypothetical protein [Thermobifida fusca]
  misc_feature (1)..(169): Homolog of NCBI NO: 14532506 NR Description: AT3g10970/F9F8_21 [Arabidopsis thaliana]
  misc_feature (1)..(169): Homolog of NCBI NO: 21592870 NR Description: unknown [Arabidopsis thaliana]
  misc_feature (1)..(169): Homolog of NCBI NO: 18399067 NR Description: haloacid dehalogenase-like hydrolase family
  misc_feature (1)..(189): Homolog of NCBI NO: 38345597 NR Description: OSJNBb0012E24.15 [Oryza sativa (japonica
  misc_feature (1)..(188): Homolog of NCBI NO: 18542168 NR Description: putative genetic modifier [Zea mays]
  misc_feature (1)..(188): Homolog of NCBI NO: 10444400 NR Description: genetic modifier [Zea mays]
  misc_feature (1)..(196): Homolog of NCBI NO: 15234236 NR Description: haloacid dehalogenase-like hydrolase family
MKNEQAISEVLCWSRDPAQLRRMANRKEEIYQALLGGIYSFLSGSKEFVSVLMHYKIPMALVSTRPRKALESAMGEIGIEDTFSVIVAAEDVHRGKPDPEMFVYAAQLLNFIPERVIVFGNSNLTVEAAHEARMKCVAVASRHPVYELGAADLVVRRLDELSVVDLKNLADIEMTEFGSVEPEMELEVEKDHDTSSLDDNFW

SEQ ID NO: 58171 - DNA, 866 bp, Glycine max
  misc_feature (1)..(866): Ceres Seq. ID no. 15177027
agttgtgacggattgatccaaagttgatggagaggatctaaatctgagttttgacgaactgggaagttacggcggaagaaaacctcttgcagttgttgacttgttggtgcaggtagttgaatatagtacattttgtcacacgaaagtttctgtgttacaatggaggagctgaaatctgctatggaggagcacatggaccttatggcagatcttgttcagaagctctcttcagatcttcgcgctggctttcgccccgcttacgataactttatcggttttttccatgccattgactggaaggaaccttggctaatgggattattaggattccatgttgtgttgctgcttgtagctatcatctctaggaagaagacaaactttcaaatgttcttgttccttttgacattggctggtgtatattttgcggagagtctgaacagatttttgggtaaaaactggaaaagcttctctagtcagaattactttgatccaaggggactatttatgtctgttctttggtctggaccacttcttgttatttctatgataatcttgatcaatacactcttctccttatgttacatgattgttaggtggaaaagagccgaactgagacatcgtgcaagggctgctcgtaataagcaggattagttgttttgttgtgggattttgatggattaaactctgaaggagttcatgtcaatggtaatgtaatcatatgttttacaaatgaattttgtttttccttttttttatttataattttcagatttagtacttgttatttccagttatgtctgtgtacactattaacgggaattttttctctccttttactgaaggaactgagaatttaacaaagtgct

SEQ ID NO: 58172 - protein, 163 aa, Glycine max
  peptide (1)..(163): Ceres Seq. ID no. 15177028
  misc_feature (45)..(163): Homolog of NCBI NO: 11359939 NR Description: hypothetical protein DKFZp434C1714.1 - human
  misc_feature (45)..(163): Homolog of NCBI NO: 40548391 NR Description: hypothetical protein DKFZp434C1714 [Homo sapiens]
  misc_feature (45)..(163): Homolog of NCBI NO: 21595411 NR Description: Hypothetical protein DKFZp434C1714 [Homo sapiens]
  misc_feature (46)..(81): Homolog of NCBI NO: 25518732 NR Description: hypothetical protein F7P12.4 [imported] -
  misc_feature (1)..(47): Homolog of NCBI NO: 25518732 NR Description: hypothetical protein F7P12.4 [imported] -
  misc_feature (44)..(162): Homolog of NCBI NO: 31210097 NR Description: ENSANGP00000009975 [Anopheles gambiae]
  misc_feature (40)..(163): Homolog of NCBI NO: 24653051 NR Description: CG30051-PB [Drosophila melanogaster]
  misc_feature (3)..(163): Homolog of NCBI NO: 38637052 NR Description: unknown protein [Oryza sativa (japonica
  misc_feature (1)..(163): Homolog of NCBI NO: 21554376 NR Description: unknown [Arabidopsis thaliana]
  misc_feature (1)..(163): Homolog of NCBI NO: 18399227 NR Description: expressed protein [Arabidopsis thaliana]
MEELKSAMEEHMDLMADLVQKLSSDLRAGFRPAYDNFIGFFHAIDWKEPWLMGLLGFHVVLLLVAIISRKKTNFQMFLFLLTLAGVYFAESLNRFLGKNWKSFSSQNYFDPRGLFMSVLWSGPLLVISMIILINTLFSLCYMIVRWKRAELRHRARAARNKQD

SEQ ID NO: 58173 - protein, 156 aa, Glycine max
  peptide (1)..(156): Ceres Seq. ID no. 15177029
  misc_feature (38)..(156): Homolog of NCBI NO: 11359939 NR Description: hypothetical protein DKFZp434C1714.1 - human
  misc_feature (38)..(156): Homolog of NCBI NO: 40548391 NR Description: hypothetical protein DKFZp434C1714 [Homo sapiens]
  misc_feature (38)..(156): Homolog of NCBI NO: 21595411 NR Description: Hypothetical protein DKFZp434C1714 [Homo sapiens]
  misc_feature (39)..(74): Homolog of NCBI NO: 25518732 NR Description: hypothetical protein F7P12.4 [imported] -
  misc_feature (1)..(40): Homolog of NCBI NO: 25518732 NR Description: hypothetical protein F7P12.4 [imported] -
  misc_feature (37)..(155): Homolog of NCBI NO: 31210097 NR Description: ENSANGP00000009975 [Anopheles gambiae]
  misc_feature (33)..(156): Homolog of NCBI NO: 24653051 NR Description: CG30051-PB [Drosophila melanogaster]
  misc_feature (1)..(156): Homolog of NCBI NO: 38637052 NR Description: unknown protein [Oryza sativa (japonica
  misc_feature (1)..(156): Homolog of NCBI NO: 21554376 NR Description: unknown [Arabidopsis thaliana]
  misc_feature (1)..(156): Homolog of NCBI NO: 18399227 NR Description: expressed protein [Arabidopsis thaliana]
MEEHMDLMADLVQKLSSDLRAGFRPAYDNFIGFFHAIDWKEPWLMGLLGFHVVLLLVAIISRKKTNFQMFLFLLTLAGVYFAESLNRFLGKNWKSFSSQNYFDPRGLFMSVLWSGPLLVISMIILINTLFSLCYMIVRWKRAELRHRARAARNKQD

SEQ ID NO: 58174 - protein, 152 aa, Glycine max
  peptide (1)..(152): Ceres Seq. ID no. 15177030
  misc_feature (34)..(152): Homolog of NCBI NO: 11359939 NR Description: hypothetical protein DKFZp434C1714.1 - human
  misc_feature (34)..(152): Homolog of NCBI NO: 40548391 NR Description: hypothetical protein DKFZp434C1714 [Homo sapiens]
  misc_feature (34)..(152): Homolog of NCBI NO: 21595411 NR Description: Hypothetical protein DKFZp434C1714 [Homo sapiens]
  misc_feature (35)..(70): Homolog of NCBI NO: 25518732 NR Description: hypothetical protein F7P12.4 [imported] -
  misc_feature (1)..(36): Homolog of NCBI NO: 25518732 NR Description: hypothetical protein F7P12.4 [imported] -
  misc_feature (33)..(151): Homolog of NCBI NO: 31210097 NR Description: ENSANGP00000009975 [Anopheles gambiae]
  misc_feature (29)..(152): Homolog of NCBI NO: 24653051 NR Description: CG30051-PB [Drosophila melanogaster]
  misc_feature (1)..(152): Homolog of NCBI NO: 38637052 NR Description: unknown protein [Oryza sativa (japonica
  misc_feature (1)..(152): Homolog of NCBI NO: 21554376 NR Description: unknown [Arabidopsis thaliana]
  misc_feature (1)..(152): Homolog of NCBI NO: 18399227 NR Description: expressed protein [Arabidopsis thaliana]
MDLMADLVQKLSSDLRAGFRPAYDNFIGFFHAIDWKEPWLMGLLGFHVVLLLVAIISRKKTNFQMFLFLLTLAGVYFAESLNRFLGKNWKSFSSQNYFDPRGLFMSVLWSGPLLVISMIILINTLFSLCYMIVRWKRAELRHRARAARNKQD

SEQ ID NO: 58175 - DNA, 1392 bp, Glycine max
  misc_feature (1)..(1392): Ceres Seq. ID no. 13497992
taacaatcattattataacgcaaacttcaacttgtaatcaagggagagagaaaatttcaagcacaaaaaatggcggagaagaaagtggtgatcctaggaggtggtgttgccggtgccaaccttgcaaaaactatacaacgtcaagccaacgtcacccttattgatccgaaggaatattttgagattccatgggcaagtttgaggggattggttgagccaacttttgctgaaaggatagtgatcaaccatagagagtacttcaaaaagggtaaccttgttgtatccagtgctgtcaacataactgaaactgcagtggtgactgaagatggccagcagattgcctatgactatcttgttattgccactggacacacagaaccaatccccaaaaccaggagtgaaagacttgaccaatacaaaggagaaaatgcaaagatcaaatctgcaagttcagttttgattgttgggggaggtccaactggtgttgagcttgcagcagagattgctgttgattttcctgataagaaggtcaccatagtgcataaaggaacgaggttgcttgaatacattgggacaaaagcttccagcaagactttaaagtggctcaaatcaaagaaaattgatgtgaaactagaacaatcggtcgatttgagctcctcttcagaagaaaataagacatatcaaacttcaaatggagagactataaaagcagatcttcattttctatgcacagggaaaccacttggttcaacatggattagagaaactcttctaaagaatgacttggatgctgatggaaggatcaaggtcgatgagcacttgagagtgaagggcaagagcaacatttttgcaattggagatattacagatgttcaagaaatcaaacaagggatgtatgcaagtgctcatgctcaagtggttgccaagaacctgaagctattgatagagggaggaggcaaagagcgtaagttgggaacatacaaggcacagccaccaatatctatagtttcacttggaaggaaaatagctgttgcacagttcccattcatgactgtgcttggaaggcttcctggcatgatcaagtcaggggatttgtttgttgggaaaaccagaaaggaattaggactcgaacctaatgttaaaaaatcttaaatttggtatattgagtgagtgttgtggtgtgtaattgtgtatatacacttcttcaactctttttcttccttgtcattgttgtgcatgtgtaagttgattgtatgtgtttactttcctattgtattcaacaaattactttgtatctgtaatgtttcttaatgattttgatgttgtcggtgttgtctcttgagatatgggattggagtcagaagcagaatgagttagagtgttattcattgg

SEQ ID NO: 58176 - protein, 360 aa, Glycine max
  peptide (1)..(360): Ceres Seq. ID no. 13497993
  misc_feature (5)..(274): Pfam Name: Pyridine nucleotide-disulphide oxidoreductase Pfam Description: Pyridine nucleotide-disulphide oxidoreductase
  misc_feature (2)..(301): Homolog of NCBI NO: 27764291 NR Description: unnamed protein product [Podospora anserina]
  misc_feature (5)..(164): Homolog of NCBI NO: 8745008 NR Description: hypothetical protein P1295.22 [Leishmania major]
  misc_feature (6)..(312): Homolog of NCBI NO: 24418885 NR Description: RIKEN cDNA 5430437E11 [Mus musculus]
  misc_feature (6)..(355): Homolog of NCBI NO: 30017355 NR Description: RIKEN cDNA 5430437E11 [Mus musculus]
  misc_feature (6)..(355): Homolog of NCBI NO: 14318424 NR Description: apoptosis-inducing factor (AIF)-homologous
  misc_feature (149)..(353): Homolog of NCBI NO: 40641605 NR Description: putative pyridine nucleotide-disulphide
  misc_feature (34)..(355): Homolog of NCBI NO: 34581771 NR Description: pyridine nucleotide-disulphide oxidoreductase
  misc_feature (4)..(357): Homolog of NCBI NO: 15229901 NR Description: pyridine nucleotide-disulphide oxidoreductase
  misc_feature (4)..(357): Homolog of NCBI NO: 26450665 NR Description: unknown protein [Arabidopsis thaliana]
  misc_feature (4)..(357): Homolog of NCBI NO: 22326972 NR Description: pyridine nucleotide-disulphide oxidoreductase
MAEKKVVILGGGVAGANLAKTIQRQANVTLIDPKEYFEIPWASLRGLVEPTFAERIVINHREYFKKGNLVVSSAVNITETAVVTEDGQQIAYDYLVIATGHTEPIPKTRSERLDQYKGENAKIKSASSVLIVGGGPTGVELAAEIAVDFPDKKVTIVHKGTRLLEYIGTKASSKTLKWLKSKKIDVKLEQSVDLSSSSEENKTYQTSNGETIKADLHFLCTGKPLGSTWIRETLLKNDLDADGRIKVDEHLRVKGKSNIFAIGDITDVQEIKQGMYASAHAQVVAKNLKLLIEGGGKERKLGTYKAQPPISIVSLGRKIAVAQFPFMTVLGRLPGMIKSGDLFVGKTRKELGLEPNVKKS

SEQ ID NO: 58177 - DNA, 1114 bp, Glycine max
  misc_feature (1)..(1114): Ceres Seq. ID no. 13594377
atcatcacttggaagaaaaaagagaggcaaaagtaaaagatggcaccttacatttctagagatagagcctctatttttgttttacttgcctcactagtccttccctttattctcctggactattcttcttctgtgttgtttgcaagtgcaaaatccccaaaatccaaggatgctgatttgttagaatttgctctcaatttggaatacttagaggctgagtttttcttgtttggggctttggggcatggattagatgtagttgctccaaacctaactgggggaggaccccttcccattggtgccaaaaaggttgaacttgacgatcttaccaatgatgtcatcttgcagtttgcttttcaggaagttggacacttaagggctataaagagcaaagtgacagggttccctaggccattgttggatctaagctcaaaatcttttgccaaactaatggacaatgcatttgggaaacctctggttcctccctttgatccctatgctaattccctcaactttataattgcatcttatgtgattccctatgttggcctcactggttatgttggtgccaatcgactactggaaagtgctacttctagggagcttgttgcggggcttctaggagtagagtctggacaagatgcaattttaagagaattgttgtatgaacgtaaagaacagttggtgccaccgtacggagtggccgtggaagagttcacaaaccgcatttctatacttaggagcaagttaggaaacagaggtttgaaagatgaaggtattgttgtgccttttggactcggtgccgagggtaaagttagaggtaacattcttgctggtgacgtaaactcactggcatattcaaggactccagaagaaatattaaggatagtatatggaagtggtgatgaacatgtttgtggtggtttctatcctataggagcaagtggtcaaatagctcaatcttacttaaattaagctaaagcatttgttttaaacttttatagattatacaacttgtctttaatccattgctaattttcttgttgctaaatattgttgatgggtgaagaccttgaaaaaacttttgataatatgcaaataataaaggagaaat

SEQ ID NO: 58178 - protein, 311 aa, Glycine max
  peptide (1)..(311): Ceres Seq. ID no. 13594378
  misc_feature (35)..(303): Homolog of NCBI NO: 10957418 NR Description: dessication-associated protein [Deinococcus
  misc_feature (35)..(308): Homolog of NCBI NO: 22984403 NR Description: hypothetical protein [Burkholderia fungorum]
  misc_feature (48)..(169): Homolog of NCBI NO: 12083528 NR Description: similar to Arabidopsis thaliana hypothetical
  misc_feature (171)..(309): Homolog of NCBI NO: 12083528 NR Description: similar to Arabidopsis thaliana hypothetical
  misc_feature (42)..(311): Homolog of NCBI NO: 15228845 NR Description: expressed protein [Arabidopsis thaliana]
  misc_feature (17)..(281): Homolog of NCBI NO: 118926 NR Description: Desiccation-related protein PCC13-62 precursor
  misc_feature (40)..(310): Homolog of NCBI NO: 38346151 NR Description: OSJNBb0118P14.11 [Oryza sativa (japonica
  misc_feature (43)..(310): Homolog of NCBI NO: 25357137 NR Description: hypothetical protein T2J15.11 [imported] -
  misc_feature (5)..(310): Homolog of NCBI NO: 18401988 NR Description: dessication-related protein -related [Arabidopsis
  misc_feature (5)..(310): Homolog of NCBI NO: 21593191 NR Description: dessication-related protein, putative
MAPYISRDRASIFVLLASLVLPFILLDYSSSVLFASAKSPKSKDADLLEFALNLEYLEAEFFLFGALGHGLDVVAPNLTGGGPLPIGAKKVELDDLTNDVILQFAFQEVGHLRAIKSKVTGFPRPLLDLSSKSFAKLMDNAFGKPLVPPFDPYANSLNFIIASYVIPYVGLTGYVGANRLLESATSRELVAGLLGVESGQDAILRELLYERKEQLVPPYGVAVEEFTNRISILRSKLGNRGLKDEGIVVPFGLGAEGKVRGNILAGDVNSLAYSRTPEEILRIVYGSGDEHVCGGFYPIGASGQIAQSYLN

SEQ ID NO: 58179 - protein, 174 aa, Glycine max
  peptide (1)..(174): Ceres Seq. ID no. 13594379
  misc_feature (1)..(166): Homolog of NCBI NO: 10957418 NR Description: dessication-associated protein [Deinococcus
  misc_feature (1)..(171): Homolog of NCBI NO: 22984403 NR Description: hypothetical protein [Burkholderia fungorum]
  misc_feature (1)..(32): Homolog of NCBI NO: 12083528 NR Description: similar to Arabidopsis thaliana hypothetical
  misc_feature (34)..(172): Homolog of NCBI NO: 12083528 NR Description: similar to Arabidopsis thaliana hypothetical
  misc_feature (1)..(174): Homolog of NCBI NO: 15228845 NR Description: expressed protein [Arabidopsis thaliana]
  misc_feature (1)..(144): Homolog of NCBI NO: 118926 NR Description: Desiccation-related protein PCC13-62 precursor
  misc_feature (1)..(173): Homolog of NCBI NO: 38346151 NR Description: OSJNBb0118P14.11 [Oryza sativa (japonica
  misc_feature (1)..(173): Homolog of NCBI NO: 25357137 NR Description: hypothetical protein T2J15.11 [imported] -
  misc_feature (1)..(173): Homolog of NCBI NO: 18401988 NR Description: dessication-related protein -related [Arabidopsis
  misc_feature (1)..(173): Homolog of NCBI NO: 21593191 NR Description: dessication-related protein, putative
MDNAFGKPLVPPFDPYANSLNFIIASYVIPYVGLTGYVGANRLLESATSRELVAGLLGVESGQDAILRELLYERKEQLVPPYGVAVEEFTNRISILRSKLGNRGLKDEGIVVPFGLGAEGKVRGNILAGDVNSLAYSRTPEEILRIVYGSGDEHVCGGFYPIGASGQIAQSYLN

SEQ ID NO: 58180 - DNA, 1471 bp, Glycine max
  misc_feature (1)..(1471): Ceres Seq. ID no. 15168521
aaggtttcaattccgtcaaattctcaaaccctaaaataaattcagcaaatcacaaaagagaactatttattcctattccttgtatgcaatcttcctgaatataccagaattgttttcattattactactcaacaatttctttctttctttctttcttttggttttgcagcaacaaaatcaacaccaagcaaatggaagtaacagtcctcatgagctgcttccgccgctgcctcagccgccacaggcccctcacgtgggggttgaatccgagcaaatccggtccggtctgatggcggatcgggccaagattccggcaccggaaggagttctgaagtgtcctcggtgtgaatccaccaacacaaagttttgctacttcaacaattacagcctctctcagccaaggcacttctgcaagacatgtaggcgttattggacaagaggtggtgctctcaggaacgttcctgttggtggaggatgccgtaggaacaaaaagaacaaaaggtctcgctccaaatctccggtttctactgagaaaccatcacttcccaataatacaagtgcaatccctgagcttattggtcgtttcccacaacctttcatggcctctcttcagagtatgaaccgctatggtgtagggattaacacaggtgttaacttgcgtgagattcaagcacagaacgcttctcaaatggagtttcaaattggaggtcttggcaatggttcaagcgttgctactgcaggaggaggaggaggaggaggagtggagcagtggcggtttcagcagtttcctttcttgaatggttttgagtcaacttcagctgcttctaattcctacccttttcaaagtgaaattgttgaaggtttggttggagatattaatgccacaagttctaggattactcagctgccagcacgggttaaaatggaatataacggtggcttgaatttgtcaagatctcctttgaatgtctcagaaaatagtaaccatttctattcatggacggatttatctggtcttgcatcttcttcagcgagtcatctcttgtaactttgacctctcatatgggttagtagccacaaaaatttaagggttttggtgctgttattttttgatcaataattgaatgagtttccattttatgaagctctctctctccctttctcttggcatgtttaaactcatttatttatcgatccaaaaaatatttgtaccaataaactcttagatttatatatccgggttagaatgacagctctccaatgtcgttccaccgtcttcacgcgtcagtgttgttaacagaaatccaatcaggctggtagaatttaatcttcaattgtatatttttcttatcattggtttgtttatgtttttgcatcgagtcaagtttcttttgtgttctttttggctttctttgaacaacagtgtgtgcatgtattatgttttgtttgtttatgcgatatcatttgggct

SEQ ID NO: 58181 - protein, 252 aa, Glycine max
  peptide (1)..(252): Ceres Seq. ID no. 15168522
  misc_feature (10)..(70): Pfam Name: Dof domain, zinc finger Pfam Description: Dof domain, zinc finger
  misc_feature (1)..(232): Homolog of NCBI NO: 30680246 NR Description: Dof zinc finger protein [Arabidopsis thaliana]
  misc_feature (1)..(232): Homolog of NCBI NO: 25406987 NR Description: hypothetical protein [imported] - Arabidopsis
  misc_feature (1)..(213): Homolog of NCBI NO: 34900534 NR Description: DNA-binding protein Dof3-like protein
  misc_feature (1)..(213): Homolog of NCBI NO: 33146614 NR Description: putative dof zinc finger protein
  misc_feature (1)..(246): Homolog of NCBI NO: 15224320 NR Description: Dof zinc finger protein [Arabidopsis thaliana]
  misc_feature (5)..(251): Homolog of NCBI NO: 30694234 NR Description: Dof zinc finger protein [Arabidopsis thaliana]
  misc_feature (1)..(233): Homolog of NCBI NO: 25352305 NR Description: probable DOF zinc finger protein
  misc_feature (1)..(194): Homolog of NCBI NO: 29124139 NR Description: putative DNA-binding protein
  misc_feature (1)..(249): Homolog of NCBI NO: 30684022 NR Description: Dof zinc finger protein [Arabidopsis thaliana]
  misc_feature (1)..(251): Homolog of NCBI NO: 11282341 NR Description: zinc finger protein OBP3 - Arabidopsis thaliana
MADRAKIPAPEGVLKCPRCESTNTKFCYFNNYSLSQPRHFCKTCRRYWTRGGALRNVPVGGGCRRNKKNKRSRSKSPVSTEKPSLPNNTSAIPELIGRFPQPFMASLQSMNRYGVGINTGVNLREIQAQNASQMEFQIGGLGNGSSVATAGGGGGGGVEQWRFQQFPFLNGFESTSAASNSYPFQSEIVEGLVGDINATSSRITQLPARVKMEYNGGLNLSRSPLNVSENSNHFYSWTDLSGLASSSASHLL

SEQ ID NO: 58182 - protein, 149 aa, Glycine max
  peptide (1)..(149): Ceres Seq. ID no. 15168523
  misc_feature (1)..(129): Homolog of NCBI NO: 30680246 NR Description: Dof zinc finger protein [Arabidopsis thaliana]
  misc_feature (1)..(129): Homolog of NCBI NO: 25406987 NR Description: hypothetical protein [imported] - Arabidopsis
  misc_feature (1)..(110): Homolog of NCBI NO: 34900534 NR Description: DNA-binding protein Dof3-like protein
  misc_feature (1)..(110): Homolog of NCBI NO: 33146614 NR Description: putative dof zinc finger protein
  misc_feature (1)..(143): Homolog of NCBI NO: 15224320 NR Description: Dof zinc finger protein [Arabidopsis thaliana]
  misc_feature (1)..(148): Homolog of NCBI NO: 30694234 NR Description: Dof zinc finger protein [Arabidopsis thaliana]
  misc_feature (1)..(130): Homolog of NCBI NO: 25352305 NR Description: probable DOF zinc finger protein
  misc_feature (1)..(91): Homolog of NCBI NO: 29124139 NR Description: putative DNA-binding protein
  misc_feature (1)..(146): Homolog of NCBI NO: 30684022 NR Description: Dof zinc finger protein [Arabidopsis thaliana]
  misc_feature (1)..(148): Homolog of NCBI NO: 11282341 NR Description: zinc finger protein OBP3 - Arabidopsis thaliana
MASLQSMNRYGVGINTGVNLREIQAQNASQMEFQIGGLGNGSSVATAGGGGGGGVEQWRFQQFPFLNGFESTSAASNSYPFQSEIVEGLVGDINATSSRITQLPARVKMEYNGGLNLSRSPLNVSENSNHFYSWTDLSGLASSSASHLL

SEQ ID NO: 58183 - protein, 143 aa, Glycine max
  peptide (1)..(143): Ceres Seq. ID no. 15168524
  misc_feature (1)..(123): Homolog of NCBI NO: 30680246 NR Description: Dof zinc finger protein [Arabidopsis thaliana]
  misc_feature (1)..(123): Homolog of NCBI NO: 25406987 NR Description: hypothetical protein [imported] - Arabidopsis
  misc_feature (1)..(104): Homolog of NCBI NO: 34900534 NR Description: DNA-binding protein Dof3-like protein
  misc_feature (1)..(104): Homolog of NCBI NO: 33146614 NR Description: putative dof zinc finger protein
  misc_feature (1)..(137): Homolog of NCBI NO: 15224320 NR Description: Dof zinc finger protein [Arabidopsis thaliana]
  misc_feature (1)..(142): Homolog of NCBI NO: 30694234 NR Description: Dof zinc finger protein [Arabidopsis thaliana]
  misc_feature (1)..(124): Homolog of NCBI NO: 25352305 NR Description: probable DOF zinc finger protein
  misc_feature (1)..(85): Homolog of NCBI NO: 29124139 NR Description: putative DNA-binding protein
  misc_feature (1)..(140): Homolog of NCBI NO: 30684022 NR Description: Dof zinc finger protein [Arabidopsis thaliana]
  misc_feature (1)..(142): Homolog of NCBI NO: 11282341 NR Description: zinc finger protein OBP3 - Arabidopsis thaliana
MNRYGVGINTGVNLREIQAQNASQMEFQIGGLGNGSSVATAGGGGGGGVEQWRFQQFPFLNGFESTSAASNSYPFQSEIVEGLVGDINATSSRITQLPARVKMEYNGGLNLSRSPLNVSENSNHFYSWTDLSGLASSSASHLL

SEQ ID NO: 58184 - DNA, 1663 bp, Glycine max
  misc_feature (1)..(1663): Ceres Seq. ID no. 15176532
aaacttcttttatttccttcttcttctcttctctgttacagcaatggcttctttgccaacacttctctcgttcgccgtcatcttcttcaccgtcgccctcttatacctccgccgcgtgttccgccgccgtcagttccgcctcccgccggggagccacggcctgccgttgatcggcgagacgctgcagctgatatcggcgtacaagagcgacaatccggagcctttcatcgacgagcgcgtggagcggtacggttcgatcttcacgacgcacgtgttcggcgagccgacggtgttctcggcggacccggaggtgaaccggttcattctgcagaacgaagggaagctgttggattgcagttatcccggttcgatatcgaacctgctcggaaaacactctcttctgttgatgaaaggtgctctccacaagagaatgcactctctcacaatgagcttcgccaactcctccatcatcaaggatcatcttcttcaccacatcgaccgcctcatctgcctcaacctcgatgcctggtccgacactgtctttctcatggatcaggcaaaaaagataacatttgagttaacggtgaagcagttgatgagctttgacccagatgaatggactgagaatctaaggaaagagtatgttcttgtgattgaaggattcttcactctcccttttcctctcttctccaccacataccgcagagccatcaaggcaagaacaaaggtggcagaggcactagcgttggtagtgaggcagaggagaaaagagtatggtgaaaacaaagagaaaaagagtgacatgcttggggcactgttggcctccggcgaccacctttccgacgaggaaatagtggattttttgttggctttgctcgtcgccggttacgaaaccacctctaccataatgactcttgcgatcaagttcctcactgagactcctctggccttggcacagctcaaggaagagcatgaccaaatcagagcaaagagtcacccaggggcaccactggaatggacggattacaagtcaatggcatttactcaatgtgttgtgaatgagaccttgagagtggcaaacataattggtgggatatttaggagagcaacgacagacatcaacataaaaggttacactattcctaagggatggaaagtctttgcatcatttcgtgctgtacatctgaatcctgaacattacaaagatgcccggtccttcaatccctggagatggcagagtaactcatcagaaacagcaaatcctgggaatgtttatacaccatttggaggagggccaaggttgtgccctggctatgagctagccagagttgtactgtctgtcttccttcaccgcattgttacccgcttcagttgggttcctgctgaggaagataagttggtgttttttccaactactaggacgcagaagaggtatcctattattgtgcagcgtagacattagagaggaatgaccatgtatagcaatatgaaaattaagagcacaacagatagagaagggaaaaaaggaagctgagtgtagatcagtttaataagttaattttcatcacatgtaaataaataataaaattcatatctccccgttcatatatcaattgtctctgcaatgctcaacaaccagaaaagttggcaagaattttaacgc

SEQ ID NO: 58185 - protein, 486 aa, Glycine max
  peptide (1)..(486): Ceres Seq. ID no. 15176533
  misc_feature (10)..(122): Homolog of NCBI NO: 15219454 NR Description: cytochrome P450 family [Arabidopsis thaliana]
  misc_feature (82)..(485): Homolog of NCBI NO: 15219454 NR Description: cytochrome P450 family [Arabidopsis thaliana]
  misc_feature (46)..(484): Homolog of NCBI NO: 18400142 NR Description: cytochrome P450, putative (CYP90D) [Arabidopsis
  misc_feature (47)..(482): Homolog of NCBI NO: 25282635 NR Description: cytochrome P450 like protein [imported] -
  misc_feature (42)..(482): Homolog of NCBI NO: 18419825 NR Description: rotundifolia3 (rot3) [Arabidopsis thaliana]
  misc_feature (42)..(482): Homolog of NCBI NO: 13878393 NR Description: Cytochrome P450 90C1 (ROTUNDIFOLIA3)
  misc_feature (41)..(484): Homolog of NCBI NO: 34902330 NR Description: Putative steroid 22-alpha-hydroxylase
  misc_feature (46)..(482): Homolog of NCBI NO: 34903584 NR Description: cytochrome P450-like protein
  misc_feature (23)..(485): Homolog of NCBI NO: 15239203 NR Description: cytochrome p450 90A1 [Arabidopsis thaliana]
  misc_feature (15)..(486): Homolog of NCBI NO: 9587211 NR Description: cytochrome P450 [Vigna radiata]
NFFYFLLLLFSVTAMASLPTLLSFAVIFFTVALLYLRRVFRRRQFRLPPGSHGLPLIGETLQLISAYKSDNPEPFIDERVERYGSIFTTHVFGEPTVFSADPEVNRFILQNEGKLLDCSYPGSISNLLGKHSLLLMKGALHKRMHSLTMSFANSSIIKDHLLHHIDRLICLNLDAWSDTVFLMDQAKKITFELTVKQLMSFDPDEWTENLRKEYVLVIEGFFTLPFPLFSTTYRRAIKARTKVAEALALVVRQRRKEYGENKEKKSDMLGALLASGDHLSDEEIVDFLLALLVAGYETTSTIMTLAIKFLTETPLALAQLKEEHDQIRAKSHPGAPLEWTDYKSMAFTQCVVNETLRVANIIGGIFRRATTDINIKGYTIPKGWKVFASFRAVHLNPEHYKDARSFNPWRWQSNSSETANPGNVYTPFGGGPRLCPGYELARVVLSVFLHRIVTRFSWVPAEEDKLVFFPTTRTQKRYPIIVQRRH

SEQ ID NO: 58186 - protein, 472 aa, Glycine max
  peptide (1)..(472): Ceres Seq. ID no. 15176534
  misc_feature (1)..(108): Homolog of NCBI NO: 15219454 NR Description: cytochrome P450 family [Arabidopsis thaliana]
  misc_feature (68)..(471): Homolog of NCBI NO: 15219454 NR Description: cytochrome P450 family [Arabidopsis thaliana]
  misc_feature (32)..(470): Homolog of NCBI NO: 18400142 NR Description: cytochrome P450, putative (CYP90D) [Arabidopsis
  misc_feature (33)..(468): Homolog of NCBI NO: 25282635 NR Description: cytochrome P450 like protein [imported] -
  misc_feature (28)..(468): Homolog of NCBI NO: 18419825 NR Description: rotundifolia3 (rot3) [Arabidopsis thaliana]
  misc_feature (28)..(468): Homolog of NCBI NO: 13878393 NR Description: Cytochrome P450 90C1 (ROTUNDIFOLIA3)
  misc_feature (27)..(470): Homolog of NCBI NO: 34902330 NR Description: Putative steroid 22-alpha-hydroxylase
  misc_feature (32)..(468): Homolog of NCBI NO: 34903584 NR Description: cytochrome P450-like protein
  misc_feature (9)..(471): Homolog of NCBI NO: 15239203 NR Description: cytochrome p450 90A1 [Arabidopsis thaliana]
  misc_feature (1)..(472): Homolog of NCBI NO: 9587211 NR Description: cytochrome P450 [Vigna radiata]
MASLPTLLSFAVIFFTVALLYLRRVFRRRQFRLPPGSHGLPLIGETLQLISAYKSDNPEPFIDERVERYGSIFTTHVFGEPTVFSADPEVNRFILQNEGKLLDCSYPGSISNLLGKHSLLLMKGALHKRMHSLTMSFANSSIIKDHLLHHIDRLICLNLDAWSDTVFLMDQAKKITFELTVKQLMSFDPDEWTENLRKEYVLVIEGFFTLPFPLFSTTYRRAIKARTKVAEALALVVRQRRKEYGENKEKKSDMLGALLASGDHLSDEEIVDFLLALLVAGYETTSTIMTLAIKFLTETPLALAQLKEEHDQIRAKSHPGAPLEWTDYKSMAFTQCVVNETLRVANIIGGIFRRATTDINIKGYTIPKGWKVFASFRAVHLNPEHYKDARSFNPWRWQSNSSETANPGNVYTPFGGGPRLCPGYELARVVLSVFLHRIVTRFSWVPAEEDKLVFFPTTRTQKRYPIIVQRRH

SEQ ID NO: 58187 - protein, 351 aa, Glycine max
  peptide (1)..(351): Ceres Seq. ID no. 15176535
  misc_feature (1)..(335): Homolog of NCBI NO: 20520627 NR Description: putative cytochrome P450 [Oryza sativa (japonica
  misc_feature (1)..(350): Homolog of NCBI NO: 15219454 NR Description: cytochrome P450 family [Arabidopsis thaliana]
  misc_feature (1)..(349): Homolog of NCBI NO: 18400142 NR Description: cytochrome P450, putative (CYP90D) [Arabidopsis
  misc_feature (1)..(347): Homolog of NCBI NO: 25282635 NR Description: cytochrome P450 like protein [imported] -
  misc_feature (1)..(347): Homolog of NCBI NO: 18419825 NR Description: rotundifolia3 (rot3) [Arabidopsis thaliana]
  misc_feature (1)..(347): Homolog of NCBI NO: 13878393 NR Description: Cytochrome P450 90C1 (ROTUNDIFOLIA3)
  misc_feature (1)..(349): Homolog of NCBI NO: 34902330 NR Description: Putative steroid 22-alpha-hydroxylase
  misc_feature (1)..(347): Homolog of NCBI NO: 34903584 NR Description: cytochrome P450-like protein
  misc_feature (1)..(350): Homolog of NCBI NO: 15239203 NR Description: cytochrome p450 90A1 [Arabidopsis thaliana]
  misc_feature (1)..(351): Homolog of NCBI NO: 9587211 NR Description: cytochrome P450 [Vigna radiata]
MKGALHKRMHSLTMSFANSSIIKDHLLHHIDRLICLNLDAWSDTVFLMDQAKKITFELTVKQLMSFDPDEWTENLRKEYVLVIEGFFTLPFPLFSTTYRRAIKARTKVAEALALVVRQRRKEYGENKEKKSDMLGALLASGDHLSDEEIVDFLLALLVAGYETTSTIMTLAIKFLTETPLALAQLKEEHDQIRAKSHPGAPLEWTDYKSMAFTQCVVNETLRVANIIGGIFRRATTDINIKGYTIPKGWKVFASFRAVHLNPEHYKDARSFNPWRWQSNSSETANPGNVYTPFGGGPRLCPGYELARVVLSVFLHRIVTRFSWVPAEEDKLVFFPTTRTQKRYPIIVQRRH

SEQ ID NO: 58188 - DNA, 1375 bp, Glycine max
  misc_feature (1)..(1375): Ceres Seq. ID no. 15224520
ggataaattatttagggggcagaaaagatcaaccgagtctaattccagcctttggctgattctctttgcaaaccaatctcatcatatattctcaaaccatatcagcttccccaccacacaaaaccataaaccaaaaactccattgattgaagaaaaagagagcatcatatcatcgtattcatggacacagaacaagaagagatgcagttcatggggctctacggcgtctacagagaatcctacaagatcatattcgcatggagcaaggtcttcaacaagatcaccttaaccctaatcctccctctctccttcatctttctcatccacatcgaagtctccaacatcctcttcggaaaaatcctccacaacacccaacaaatgatggaaaccccacaagacacgccccaataccacaacctcaccaacatgctctcttccgaatgggccattttcattctcttcaagctcctctacttcaccttcctcctcgtcttctccctcttatccacctcagcagcagtctacaccgtggcctcaatctacacttcacgagaagtcaccttctccaaagtcatgaacgttgttcccaaagtatggaaaagactcatggtaacttttttatgcacctttgtggcgtttttcgcgtacaacgttatgacactcgttgttttcgttatatgggcacttgcaataggactaaggaatggtggggttgtggttttggttgtgttggggatgttgtatttcgcggggtttgtgtacttaacggtggtttggcaactggcgagtgtggtgaccgtgttggaggaagacacgtgcggggtaagagcaatgatgaagaccaacgagttgataaaagggagaatagggttgaccgtactcatattcttgaagctcgtgatttcttttgggttgatacagtttctgttcaagaaaacggtggtacaagggtggaagttggggtctgtggatagaacgatttatggggtggtgtgtttggtgctgttctctcagttgtaccttttccaacttgttatacaaaccgtgctctatttcgtttgcaagtcctaccaccatcagaatattgacaaatctgctttgtcggatcaccttgaagtgtatcatggtgagtatgagcctttgaaggctaaagatgttcagatggaagagtgccatgtttgatagatatagcaaaattatgtgcatatctatctgctatagtttctaggtgtcataagaaatatgttccaatgtttgaaattaaatcaatcagatatatatgtcagagtgctgaatacacaggattagttatctgcagcatgtgccttaatttgcttttgcgctacgtgttaataaattcttgtagtttttattc

SEQ ID NO: 58189 - protein, 333 aa, Glycine max
  peptide (1)..(333): Ceres Seq. ID no. 15224521
  misc_feature (11)..(316): Homolog of NCBI NO: 27817928 NR Description: hypothetical protein [Oryza sativa (japonica
  misc_feature (16)..(312): Homolog of NCBI NO: 9295718 NR Description: T24P13.3 [Arabidopsis thaliana]
  misc_feature (11)..(303): Homolog of NCBI NO: 15222319 NR Description: hypothetical protein [Arabidopsis thaliana]
  misc_feature (1)..(329): Homolog of NCBI NO: 34908936 NR Description: P0691E06.20 [Oryza sativa (japonica
  misc_feature (1)..(333): Homolog of NCBI NO: 7485737 NR Description: hypothetical protein F18F4.50 - Arabidopsis
  misc_feature (1)..(329): Homolog of NCBI NO: 15241607 NR Description: expressed protein [Arabidopsis thaliana]
  misc_feature (1)..(333): Homolog of NCBI NO: 30684945 NR Description: expressed protein [Arabidopsis thaliana]
  misc_feature (1)..(333): Homolog of NCBI NO: 18397813 NR Description: expressed protein [Arabidopsis thaliana]
MDTEQEEMQFMGLYGVYRESYKIIFAWSKVFNKITLTLILPLSFIFLIHIEVSNILFGKILHNTQQMMETPQDTPQYHNLTNMLSSEWAIFILFKLLYFTFLLVFSLLSTSAAVYTVASIYTSREVTFSKVMNVVPKVWKRLMVTFLCTFVAFFAYNVMTLVVFVIWALAIGLRNGGVVVLVVLGMLYFAGFVYLTVVWQLASVVTVLEEDTCGVRAMMKTNELIKGRIGLTVLIFLKLVISFGLIQFLFKKTVVQGWKLGSVDRTIYGVVCLVLFSQLYLFQLVIQTVLYFVCKSYHHQNIDKSALSDHLEVYHGEYEPLKAKDVQMEECHV

SEQ ID NO: 58190 - protein, 326 aa, Glycine max
  peptide (1)..(326): Ceres Seq. ID no. 15224522
  misc_feature (4)..(309): Homolog of NCBI NO: 27817928 NR Description: hypothetical protein [Oryza sativa (japonica
  misc_feature (9)..(305): Homolog of NCBI NO: 9295718 NR Description: T24P13.3 [Arabidopsis thaliana]
  misc_feature (4)..(296): Homolog of NCBI NO: 15222319 NR Description: hypothetical protein [Arabidopsis thaliana]
  misc_feature (1)..(322): Homolog of NCBI NO: 34908936 NR Description: P0691E06.20 [Oryza sativa (japonica
  misc_feature (1)..(326): Homolog of NCBI NO: 7485737 NR Description: hypothetical protein F18F4.50 - Arabidopsis
  misc_feature (1)..(322): Homolog of NCBI NO: 15241607 NR Description: expressed protein [Arabidopsis thaliana]
  misc_feature (1)..(326): Homolog of NCBI NO: 30684945 NR Description: expressed protein [Arabidopsis thaliana]
  misc_feature (1)..(326): Homolog of NCBI NO: 18397813 NR Description: expressed protein [Arabidopsis thaliana]
MQFMGLYGVYRESYKIIFAWSKVFNKITLTLILPLSFIFLIHIEVSNILFGKILHNTQQMMETPQDTPQYHNLTNMLSSEWAIFILFKLLYFTFLLVFSLLSTSAAVYTVASIYTSREVTFSKVMNVVPKVWKRLMVTFLCTFVAFFAYNVMTLVVFVIWALAIGLRNGGVVVLVVLGMLYFAGFVYLTVVWQLASVVTVLEEDTCGVRAMMKTNELIKGRIGLTVLIFLKLVISFGLIQFLFKKTVVQGWKLGSVDRTIYGVVCLVLFSQLYLFQLVIQTVLYFVCKSYHHQNIDKSALSDHLEVYHGEYEPLKAKDVQMEECHV

SEQ ID NO: 58191 - protein, 323 aa, Glycine max
  peptide (1)..(323): Ceres Seq. ID no. 15224523
  misc_feature (1)..(306): Homolog of NCBI NO: 27817928 NR Description: hypothetical protein [Oryza sativa (japonica
  misc_feature (6)..(302): Homolog of NCBI NO: 9295718 NR Description: T24P13.3 [Arabidopsis thaliana]
  misc_feature (1)..(293): Homolog of NCBI NO: 15222319 NR Description: hypothetical protein [Arabidopsis thaliana]
  misc_feature (1)..(319): Homolog of NCBI NO: 34908936 NR Description: P0691E06.20 [Oryza sativa (japonica
  misc_feature (1)..(323): Homolog of NCBI NO: 7485737 NR Description: hypothetical protein F18F4.50 - Arabidopsis
  misc_feature (1)..(319): Homolog of NCBI NO: 15241607 NR Description: expressed protein [Arabidopsis thaliana]
  misc_feature (1)..(323): Homolog of NCBI NO: 30684945 NR Description: expressed protein [Arabidopsis thaliana]
  misc_feature (1)..(323): Homolog of NCBI NO: 18397813 NR Description: expressed protein [Arabidopsis thaliana]
MGLYGVYRESYKIIFAWSKVFNKITLTLILPLSFIFLIHIEVSNILFGKILHNTQQMMETPQDTPQYHNLTNMLSSEWAIFILFKLLYFTFLLVFSLLSTSAAVYTVASIYTSREVTFSKVMNVVPKVWKRLMVTFLCTFVAFFAYNVMTLVVFVIWALAIGLRNGGVVVLVVLGMLYFAGFVYLTVVWQLASVVTVLEEDTCGVRAMMKTNELIKGRIGLTVLIFLKLVISFGLIQFLFKKTVVQGWKLGSVDRTIYGVVCLVLFSQLYLFQLVIQTVLYFVCKSYHHQNIDKSALSDHLEVYHGEYEPLKAKDVQMEECHV

SEQ ID NO: 58192 - DNA, 1412 bp, Glycine max
  misc_feature (1)..(1412): Ceres Seq. ID no. 15168525
attctattccatgtctcttcttgagagagttcacttctctcactctaaaagtctaaatcaccttgttttcaactgtctctctttccttttctagtcgagtacttttctttcacttttcacttagctgataggtttcaacttgcaccatcttttcattagcattctgtatcagtcctcatcccactgtatgcattgctagctctcatattaccccaactccttgattttctttttgtttgagtcgtagaagatgttacttagaagctcctcggcaccgattctaacttcattgttacactattcaaaggagtcctcctccgaaccagaacacattcttaaccttcctaaaacagcatcagctttaagtctaagccaaaacttggtggagatagaccttaaaaagtcatcaagtcccaagagaaaaaatcgtgtgccacttagtagtgttcctaaaaatcaacagagtaaaaagataaaagaaagagatgaagggaaagatccacaacaaaaaacttgcatgaaagcaaaatcttcaattcaagaactgttttctagtttggatttagataagggactcctggatcatgaagagcgtggttcggggaagaaagatagttggttacagacttcagtgatgggtggtggaatggggagtgatggtggttggatttgtggtggttgcaatggaagtggaagaggctcaggtggtggacatggaaaaaagtggggtttccatgaaggaaatgatcatggtagagataggacggaagcttattaccagaacatgattgaagcaaaccccagtgatgcacttttgctaggaaattatgcaaagtttttgaaagaggtttgtgacgattatcctaaatcaaaagagtatctcgaaagggcgattttggctaatcctgatgatggtcatattctgtccctctatgcggagttaatatggcaattagagaaggatgctaatcgagctgaaggatattttgatcaagccattaaaagtgccccatatgatagctatgtcctagcttcatatgctaatttcctttgggatgccgaagaagacgaggaagataaagactgtaaaaataaatcgaatcacagccatacatatccaactgatctctttcatggagctaaccatcacattcatttaactgcagccatagaaacctcaccactgtttcttaagtgaaggtgtgtgacttgtatgacaaatgtaagtaaataatagtcttttgtcagctattgtgaatagcagcttggatcatactaagagaaagcatctttaatttggtgcctcttgtgctggtaaaaaggcttccaccattgtatcttttaagaataatgttagttttgtatgcagagactaaggagtaaagagcaacactgtattatatacctttaac

SEQ ID NO: 58193 - protein, 315 aa, Glycine max
  peptide (1)..(315): Ceres Seq. ID no. 15168526
  misc_feature (175)..(294): Homolog of NCBI NO: 18390404 NR Description: expressed protein [Arabidopsis thaliana]
  misc_feature (145)..(277): Homolog of NCBI NO: 37537130 NR Description: unknown protein [Oryza sativa (japonica
  misc_feature (132)..(276): Homolog of NCBI NO: 32488305 NR Description: OSJNBb0065L13.14 [Oryza sativa (japonica
  misc_feature (134)..(281): Homolog of NCBI NO: 15236755 NR Description: expressed protein [Arabidopsis thaliana]
  misc_feature (134)..(281): Homolog of NCBI NO: 14532728 NR Description: unknown protein [Arabidopsis thaliana]
  misc_feature (121)..(278): Homolog of NCBI NO: 21592868 NR Description: unknown [Arabidopsis thaliana]
  misc_feature (121)..(278): Homolog of NCBI NO: 18414994 NR Description: expressed protein [Arabidopsis thaliana]
  misc_feature (121)..(278): Homolog of NCBI NO: 7487766 NR Description: hypothetical protein T6K21.120 - Arabidopsis
  misc_feature (1)..(306): Homolog of NCBI NO: 18412668 NR Description: expressed protein [Arabidopsis thaliana]
  misc_feature (1)..(296): Homolog of NCBI NO: 15241290 NR Description: expressed protein [Arabidopsis thaliana]
MLLRSSSAPILTSLLHYSKESSSEPEHILNLPKTASALSLSQNLVEIDLKKSSSPKRKNRVPLSSVPKNQQSKKIKERDEGKDPQQKTCMKAKSSIQELFSSLDLDKGLLDHEERGSGKKDSWLQTSVMGGGMGSDGGWICGGCNGSGRGSGGGHGKKWGFHEGNDHGRDRTEAYYQNMIEANPSDALLLGNYAKFLKEVCDDYPKSKEYLERAILANPDDGHILSLYAELIWQLEKDANRAEGYFDQAIKSAPYDSYVLASYANFLWDAEEDEEDKDCKNKSNHSHTYPTDLFHGANHHIHLTAAIETSPLFLK

SEQ ID NO: 58194 - protein, 226 aa, Glycine max
  peptide (1)..(226): Ceres Seq. ID no. 15168527
  misc_feature (86)..(205): Homolog of NCBI NO: 18390404 NR Description: expressed protein [Arabidopsis thaliana]
  misc_feature (56)..(188): Homolog of NCBI NO: 37537130 NR Description: unknown protein [Oryza sativa (japonica
  misc_feature (43)..(187): Homolog of NCBI NO: 32488305 NR Description: OSJNBb0065L13.14 [Oryza sativa (japonica
  misc_feature (45)..(192): Homolog of NCBI NO: 15236755 NR Description: expressed protein [Arabidopsis thaliana]
  misc_feature (45)..(192): Homolog of NCBI NO: 14532728 NR Description: unknown protein [Arabidopsis thaliana]
  misc_feature (32)..(189): Homolog of NCBI NO: 18414994 NR Description: expressed protein [Arabidopsis thaliana]
  misc_feature (32)..(189): Homolog of NCBI NO: 21592868 NR Description: unknown [Arabidopsis thaliana]
  misc_feature (32)..(189): Homolog of NCBI NO: 7487766 NR Description: hypothetical protein T6K21.120 - Arabidopsis
  misc_feature (1)..(217): Homolog of NCBI NO: 18412668 NR Description: expressed protein [Arabidopsis thaliana]
  misc_feature (1)..(207): Homolog of NCBI NO: 15241290 NR Description: expressed protein [Arabidopsis thaliana]
MKAKSSIQELFSSLDLDKGLLDHEERGSGKKDSWLQTSVMGGGMGSDGGWICGGCNGSGRGSGGGHGKKWGFHEGNDHGRDRTEAYYQNMIEANPSDALLLGNYAKFLKEVCDDYPKSKEYLERAILANPDDGHILSLYAELIWQLEKDANRAEGYFDQAIKSAPYDSYVLASYANFLWDAEEDEEDKDCKNKSNHSHTYPTDLFHGANHHIHLTAAIETSPLFLK

SEQ ID NO: 58195 - protein, 187 aa, Glycine max
  peptide (1)..(187): Ceres Seq. ID no. 15168528
  misc_feature (47)..(166): Homolog of NCBI NO: 18390404 NR Description: expressed protein [Arabidopsis thaliana]
  misc_feature (17)..(149): Homolog of NCBI NO: 37537130 NR Description: unknown protein [Oryza sativa (japonica
  misc_feature (4)..(148): Homolog of NCBI NO: 32488305 NR Description: OSJNBb0065L13.14 [Oryza sativa (japonica
  misc_feature (6)..(153): Homolog of NCBI NO: 15236755 NR Description: expressed protein [Arabidopsis thaliana]
  misc_feature (6)..(153): Homolog of NCBI NO: 14532728 NR Description: unknown protein [Arabidopsis thaliana]
  misc_feature (1)..(150): Homolog of NCBI NO: 18414994 NR Description: expressed protein [Arabidopsis thaliana]
  misc_feature (1)..(150): Homolog of NCBI NO: 21592868 NR Description: unknown [Arabidopsis thaliana]
  misc_feature (1)..(150): Homolog of NCBI NO: 7487766 NR Description: hypothetical protein T6K21.120 - Arabidopsis
  misc_feature (1)..(178): Homolog of NCBI NO: 18412668 NR Description: expressed protein [Arabidopsis thaliana]
  misc_feature (1)..(168): Homolog of NCBI NO: 15241290 NR Description: expressed protein [Arabidopsis thaliana]
MGGGMGSDGGWICGGCNGSGRGSGGGHGKKWGFHEGNDHGRDRTEAYYQNMIEANPSDALLLGNYAKFLKEVCDDYPKSKEYLERAILANPDDGHILSLYAELIWQLEKDANRAEGYFDQAIKSAPYDSYVLASYANFLWDAEEDEEDKDCKNKSNHSHTYPTDLFHGANHHIHLTAAIETSPLFLK

SEQ ID NO: 58196 - DNA, 1324 bp, Glycine max
  misc_feature (1)..(1324): Ceres Seq. ID no. 13594402
ctaatcgaaaaaaccaaaatctggtaattaagatcttctcttcagaagatgtgtaacaccctcaagttcaacccctttaagaaccgtttgctaataatgttcatgctggttctttctctccccttcaatgttcaatcccaagccaaagatagtgaagaacagaacctggcagaactccctcaaacggttcatccaagcaagggaatagtaatagcagttctctccacaatgtttgccataacattactcttacttctctatgttaaattctgccgaactatccctcatgaactccttagtcaaaactcaaatctccaaaactttcagggcctaactcgatcaaggtctagagtttctgggattgacaaacaagtagttgaaacacttcctttcttcaagttctcttccctcaagggttccaaagaaggcctagaatgcaccgtttgtctctccaaattcgaggacacagagactctaagacttcttccaaagtgcaagcacgctttccacatgaattgcattgacaagtggtttgaaagccactctacgtgccctctttgtagacgcagggttgaagcaggggacattaaaaacctcaacttttcattaagctcgcggttcctccgagttccttcaaatctcacggaggatccaaaccttgaaatctttgttcacagagagccatctcatggagggtcagcatcgatccaaaggtcatatttacccttagaccagcggtgtcgaggatcatcgagaagaggcttttgggacgtgggcaagtgcaagaaacaagaactactgcttattgatgatagcagttctattggtgggacaagaaagtggaacaaaccggtgcacgtgatgaatcataagatagttatctctaatgtttttacgaggagcaggtggagtgatcttaatgcttcggacctgttgtcattgaacagtgagatgcttaatgatgtttgcagtgggagattctgtttgtgtcctttggaatccagcgacgacagcggaaattttcatgggatttcgagttctaatgaggaagaaaactcgtttacggcactgaatagtcctgcggagaagaggtgcatgtctgagaggtttacacaaaaggggaaggagaataggatcagagaatgtgtgacatctaatggggccagtgagaggctgtggaaggtttggttgccaattgcgcgaagaacggtccaatggtttgcgatacaagaaaggaattcggttgaattagaacacaaaaccttagcttcaaatgtctgatcaatgcgactaaattgttggtaacgtgtatgtttgtgcattc

SEQ ID NO: 58197 - protein, 410 aa, Glycine max
  peptide (1)..(410): Ceres Seq. ID no. 13594403
  misc_feature (130)..(171): Pfam Name: Zinc finger, C3HC4 type (RING finger) Pfam Description: Zinc finger, C3HC4 type (RING finger)
  misc_feature (10)..(172): Homolog of NCBI NO: 19347753 NR Description: putative RING-H2 zinc finger protein ATL6
  misc_feature (42)..(206): Homolog of NCBI NO: 15809840 NR Description: AT4g30400/F17I23_260 [Arabidopsis thaliana]
  misc_feature (39)..(194): Homolog of NCBI NO: 15224200 NR Description: zinc finger (C3HC4-type RING finger) protein
  misc_feature (16)..(205): Homolog of NCBI NO: 15219561 NR Description: RING zinc finger protein -related [Arabidopsis
  misc_feature (7)..(177): Homolog of NCBI NO: 25407810 NR Description: hypothetical protein AT4g40070 [imported] -
  misc_feature (7)..(177): Homolog of NCBI NO: 7487705 NR Description: hypothetical protein T5J17.240 - Arabidopsis
  misc_feature (49)..(208): Homolog of NCBI NO: 15239252 NR Description: zinc finger (C3HC4-type RING finger) protein
  misc_feature (16)..(398): Homolog of NCBI NO: 15225285 NR Description: zinc finger (C3HC4-type RING finger) protein
  misc_feature (370)..(404): Homolog of NCBI NO: 15235482 NR Description: zinc finger (C3HC4-type RING finger) protein
  misc_feature (17)..(334): Homolog of NCBI NO: 15235482 NR Description: zinc finger (C3HC4-type RING finger) protein
MCNTLKFNPFKNRLLIMFMLVLSLPFNVQSQAKDSEEQNLAELPQTVHPSKGIVIAVLSTMFAITLLLLLYVKFCRTIPHELLSQNSNLQNFQGLTRSRSRVSGIDKQVVETLPFFKFSSLKGSKEGLECTVCLSKFEDTETLRLLPKCKHAFHMNCIDKWFESHSTCPLCRRRVEAGDIKNLNFSLSSRFLRVPSNLTEDPNLEIFVHREPSHGGSASIQRSYLPLDQRCRGSSRRGFWDVGKCKKQELLLIDDSSSIGGTRKWNKPVHVMNHKIVISNVFTRSRWSDLNASDLLSLNSEMLNDVCSGRFCLCPLESSDDSGNFHGISSSNEEENSFTALNSPAEKRCMSERFTQKGKENRIRECVTSNGASERLWKVWLPIARRTVQWFAIQERNSVELEHKTLASNV

SEQ ID NO: 58198 - protein, 394 aa, Glycine max
  peptide (1)..(394): Ceres Seq. ID no. 13594404
  misc_feature (114)..(155): Pfam Name: Zinc finger, C3HC4 type (RING finger) Pfam Description: Zinc finger, C3HC4 type (RING finger)
  misc_feature (1)..(156): Homolog of NCBI NO: 19347753 NR Description: putative RING-H2 zinc finger protein ATL6
  misc_feature (26)..(190): Homolog of NCBI NO: 15809840 NR Description: AT4g30400/F17I23_260 [Arabidopsis thaliana]
  misc_feature (23)..(178): Homolog of NCBI NO: 15224200 NR Description: zinc finger (C3HC4-type RING finger) protein
  misc_feature (1)..(189): Homolog of NCBI NO: 15219561 NR Description: RING zinc finger protein -related [Arabidopsis
  misc_feature (1)..(161): Homolog of NCBI NO: 25407810 NR Description: hypothetical protein AT4g40070 [imported] -
  misc_feature (1)..(161): Homolog of NCBI NO: 7487705 NR Description: hypothetical protein T5J17.240 - Arabidopsis
  misc_feature (33)..(192): Homolog of NCBI NO: 15239252 NR Description: zinc finger (C3HC4-type RING finger) protein
  misc_feature (1)..(382): Homolog of NCBI NO: 15225285 NR Description: zinc finger (C3HC4-type RING finger) protein
  misc_feature (354)..(388): Homolog of NCBI NO: 15235482 NR Description: zinc finger (C3HC4-type RING finger) protein
  misc_feature (1)..(318): Homolog of NCBI NO: 15235482 NR Description: zinc finger (C3HC4-type RING finger) protein
MFMLVLSLPFNVQSQAKDSEEQNLAELPQTVHPSKGIVIAVLSTMFAITLLLLLYVKFCRTIPHELLSQNSNLQNFQGLTRSRSRVSGIDKQVVETLPFFKFSSLKGSKEGLECTVCLSKFEDTETLRLLPKCKHAFHMNCIDKWFESHSTCPLCRRRVEAGDIKNLNFSLSSRFLRVPSNLTEDPNLEIFVHREPSHGGSASIQRSYLPLDQRCRGSSRRGFWDVGKCKKQELLLIDDSSSIGGTRKWNKPVHVMNHKIVISNVFTRSRWSDLNASDLLSLNSEMLNDVCSGRFCLCPLESSDDSGNFHGISSSNEEENSFTALNSPAEKRCMSERFTQKGKENRIRECVTSNGASERLWKVWLPIARRTVQWFAIQERNSVELEHKTLASNV

SEQ ID NO: 58199 - protein, 392 aa, Glycine max
  peptide (1)..(392): Ceres Seq. ID no. 13594405
  misc_feature (112)..(153): Pfam Name: Zinc finger, C3HC4 type (RING finger) Pfam Description: Zinc finger, C3HC4 type (RING finger)
  misc_feature (1)..(154): Homolog of NCBI NO: 19347753 NR Description: putative RING-H2 zinc finger protein ATL6
  misc_feature (24)..(188): Homolog of NCBI NO: 15809840 NR Description: AT4g30400/F17I23_260 [Arabidopsis thaliana]
  misc_feature (21)..(176): Homolog of NCBI NO: 15224200 NR Description: zinc finger (C3HC4-type RING finger) protein
  misc_feature (1)..(187): Homolog of NCBI NO: 15219561 NR Description: RING zinc finger protein -related [Arabidopsis
  misc_feature (1)..(159): Homolog of NCBI NO: 25407810 NR Description: hypothetical protein AT4g40070 [imported] -
  misc_feature (1)..(159): Homolog of NCBI NO: 7487705 NR Description: hypothetical protein T5J17.240 - Arabidopsis
  misc_feature (31)..(190): Homolog of NCBI NO: 15239252 NR Description: zinc finger (C3HC4-type RING finger) protein
  misc_feature (1)..(380): Homolog of NCBI NO: 15225285 NR Description: zinc finger (C3HC4-type RING finger) protein
  misc_feature (352)..(386): Homolog of NCBI NO: 15235482 NR Description: zinc finger (C3HC4-type RING finger) protein
  misc_feature (1)..(316): Homolog of NCBI NO: 15235482 NR Description: zinc finger (C3HC4-type RING finger) protein
MLVLSLPFNVQSQAKDSEEQNLAELPQTVHPSKGIVIAVLSTMFAITLLLLLYVKFCRTIPHELLSQNSNLQNFQGLTRSRSRVSGIDKQVVETLPFFKFSSLKGSKEGLECTVCLSKFEDTETLRLLPKCKHAFHMNCIDKWFESHSTCPLCRRRVEAGDIKNLNFSLSSRFLRVPSNLTEDPNLEIFVHREPSHGGSASIQRSYLPLDQRCRGSSRRGFWDVGKCKKQELLLIDDSSSIGGTRKWNKPVHVMNHKIVISNVFTRSRWSDLNASDLLSLNSEMLNDVCSGRFCLCPLESSDDSGNFHGISSSNEEENSFTALNSPAEKRCMSERFTQKGKENRIRECVTSNGASERLWKVWLPIARRTVQWFAIQERNSVELEHKTLASNV

SEQ ID NO: 58200 - DNA, 1037 bp, Glycine max
  misc_feature (1)..(1037): Ceres Seq. ID no. 13581740
gaaaagagaattgagctggcttggtgatccctgctccatcagaggttagggtttggcagagaacagaaattgggaaattcctcaatcttttgaactcgtcaagtgcgtgcaacactgtacaataatcttcatcgtccttgaaattcccaatcccctgtagtggtagtaagttgctagcaatcgagaatgggagggcacggaggtctcaacattctcccccaaaagcgatggaacgtttacaatttcgacaacagagagaaggtccgtcgcgacgaagagcaagccgccagggaggagcagctcaagcgtgaagagacccggaagcgcgacgccgagctccgcctcgaccgactccgcgtcgctcgcggcttggcgccgtcgattccgccgcctcccgaatccgaacctcagccttcctcccgctccgaacccgtgccttcctccgaccctggccacatcaacctcttcgaggggatcaacatttttgacccaattcagaaggacggtgctgctgaaagggattgggcgaagaggaggaagaagattgagaagggaggaggacccaagcccaagcccacagtttctgtgggcccggaggatgagaagtataggctgggctatgggcttgcggggaagggggttcagttgccgtggtatcttcggaagcctgatggtgaaggtgtcggtgatgataataaggatgaaggtggtgacgtggataggagagaaaataagggtgagaagaagaggaagactatggaggaattgagggaagagaggttgaaaagggagaggaaagagaaggatagggagagggctttgagacacgagaagatgcagagtcacagagatggttctggttatggcagtaggaggaggttcaccagatgaacataggttttttgtgttctttttctgaactgatttttgtttctgaagtttcatgtaattggaagttatgcaatttggattcagtagtatattgtataagggaagataggtttatatagttaatcaaagtggtttggttttctttc

SEQ ID NO: 58201 - protein, 234 aa, Glycine max
  peptide (1)..(234): Ceres Seq. ID no. 13581741
  misc_feature (1)..(57): Homolog of NCBI NO: 23489800 NR Description: hypothetical protein [Plasmodium yoelii yoelii]
  misc_feature (7)..(224): Homolog of NCBI NO: 39585902 NR Description: Hypothetical protein CBG05151 [Caenorhabditis
  misc_feature (1)..(234): Homolog of NCBI NO: 37535892 NR Description: hypothetical protein [Oryza sativa (japonica
  misc_feature (1)..(230): Homolog of NCBI NO: 7485079 NR Description: hypothetical protein - Arabidopsis thaliana
  misc_feature (1)..(231): Homolog of NCBI NO: 30683690 NR Description: expressed protein [Arabidopsis thaliana]
MGGHGGLNILPQKRWNVYNFDNREKVRRDEEQAAREEQLKREETRKRDAELRLDRLRVARGLAPSIPPPPESEPQPSSRSEPVPSSDPGHINLFEGINIFDPIQKDGAAERDWAKRRKKIEKGGGPKPKPTVSVGPEDEKYRLGYGLAGKGVQLPWYLRKPDGEGVGDDNKDEGGDVDRRENKGEKKRKTMEELREERLKRERKEKDRERALRHEKMQSHRDGSGYGSRRRFTR

SEQ ID NO: 58202 - DNA, 512 bp, Glycine max
  misc_feature (1)..(512): Ceres Seq. ID no. 13581734
atttcatactacaacctcgcagttcaaaagttcaaaccccaaatcttcaaaatcctcacagcaaacccaaaataaaacaacaacaacataaaaaaaccttaacaaaaccaaaaccccaagagaaaaacaccacacttccaatcaaatgttcttcctctctttgcccttctcttcctgcttcagagcttcacaacccaaccacgatcccaccaccctctcaacgaacctcaccacctacatctaccacaccgaatacggcaccgtttcgctgacatggtcacgctccatgctaggccgctccctccacgtgaacctccacaaccactcctcctttcacctccacgtcaaaccctgaaggaaaaaagggtccaagaagctttctcacaacacnnnnttcctctggaacctctcctccgcgagattcgaatccggacgacccgaacctcgctcnnnnntctacctcgccatcgaggtagaacacagcctcagcctcctcgtgggggacttatccc

SEQ ID NO: 58203 - protein, 89 aa, Glycine max
  peptide (1)..(89): Ceres Seq. ID no. 13581735
  misc_feature (27)..(89): Pfam Name: Mucin-like glycoprotein Pfam Description: Mucin-like glycoprotein
  misc_feature (32)..(89): Homolog of NCBI NO: 186396 NR Description: mucin
  misc_feature (3)..(89): Homolog of NCBI NO: 186396 NR Description: mucin
  misc_feature (5)..(89): Homolog of NCBI NO: 2135765 NR Description: mucin 2 precursor, intestinal - human (fragments)
  misc_feature (5)..(89): Homolog of NCBI NO: 17566006 NR Description: Reverse transcriptase [Caenorhabditis elegans]
  misc_feature (7)..(89): Homolog of NCBI NO: 188864 NR Description: mucin
  misc_feature (32)..(89): Homolog of NCBI NO: 188864 NR Description: mucin
  misc_feature (5)..(89): Homolog of NCBI NO: 186396 NR Description: mucin
  misc_feature (3)..(89): Homolog of NCBI NO: 188864 NR Description: mucin
  misc_feature (5)..(89): Homolog of NCBI NO: 188864 NR Description: mucin
FILQPRSSKVQTPNLQNPHSKPKIKQQQHKKTLTKPKPQEKNTTLPIKCSSSLCPSLPASELHNPTTIPPPSQRTSPPTSTTPNTAPFR

SEQ ID NO: 58204 - protein, 79 aa, Glycine max
  peptide (1)..(79): Ceres Seq. ID no. 13581736
  misc_feature (40)..(40): Xaa is any aa, unknown or other
  misc_feature (41)..(41): Xaa is any aa, unknown or other
  misc_feature (60)..(60): Xaa is any aa, unknown or other
  misc_feature (61)..(61): Xaa is any aa, unknown or other
MVTLHARPLPPREPPQPLLLSPPRQTLKEKRVQEAFSQHXXPLEPLLREIRIRTTRTSLXXLPRHRGRTQPQPPRGGLI

SEQ ID NO: 58205 - protein, 69 aa, Glycine max
  peptide (1)..(69): Ceres Seq. ID no. 13581737
MFFLSLPFSSCFRASQPNHDPTTLSTNLTTYIYHTEYGTVSLTWSRSMLGRSLHVNLHNHSSFHLHVKP

SEQ ID NO: 58206 - DNA, 1822 bp, Glycine max
  misc_feature (1)..(1822): Ceres Seq. ID no. 15171286
gtaacatcttagtcgtcctatacatagagaagaagtagtacgtagtagatgctttcgaaaccctactctaacaaaaaccaagacatttagtttcatcaccactgttgagaaacttggagaagattttcaccaatggatccctgtcccttcgtgcgtctcatggtagactctttagctctcaaccttccctccgccaccaaaccgccacctgtctccggcgtccacccttccactaccccatgcttctgccaaatccgcatcaccaatttcccctctcaaaccgcgcttcttccactctcttcttcctcctccggcgacgccaaccccgaagccgcaacctccgccccgggcttccacctcgactccagcgcgctccgtcgcctctccgccaaacctctcaccctccgcctcgccgtctactccggcagcaccgcccgcgcctgcggcatctcctccgccaaactcctcggccgcctcaacctcaccctcgacctctccgccgcgctctcccgccccaacaccttccactccggctggctcaacctgagaaagaacagaaccggcttcgaaccggagcacaagcctgcgcctcgggttcacattgtggtccggtccgaaccggacccgcggttcgtgttccagttcggtggcgaaccggagtgtagcccggtggttttccagattcaggagaataatatcagacagcctgtctttagttgcaagttcagtgcggatcgtaactctagatccaggtgtctaccctcagattttgccaacaaccccagtagatggaggagaaccttgaagggtattagagagcgtcatgggagggagagaaagggttggatgataatgatccatgatctctctggctcacccgttgcagctgcctccatgataaccccatttgtcccttcccctggttcagacagagtatcaagatcaaacccaggtgcatggctcattcttcgcaccaacaatggtgcctctgtgagtagctggaagccatggggccgtctcgaagcgtggcgagaacgaggccctgtcgatggcttgggctacaagtttgagctcgtcactgagaatggacctgccaatgggataccaattgctgaggccacaatgaatgtgaaaaagggtggccagttctgcattgactacaaagtgatgagggattctggattgggttcaaggttgaaaggaaaagggtttgtgatgggttccacagtggaaggtgaaggcaaagttagcaagcctgttgtgcaagttggtgcacagcatgtgacatgcatggctgatgctgctttgttcattgcactttctgctgccattgatcttagcatggatgcatgcaagctcttctcgcataaactaaggaaagagctttgccatgaagaacaacaagtttcctttccctaaaaacctgctagaagaattgaattgttgtccttagttaaattacaagttagttatcatctgctgcagtgatagccaatgcgttcctagcttgatggatagtgggaactctggtttgagcatagagacagacttgcaattaattatcaagtctttgcagctgctatggcggattcagttttgtgaatgttgtcaggaaattaatcagagttgctagttttgttgattctacctttttctggttggattttctaaacagcagaaattagaggggtgattttagcagcattttttgtactgaacatgtacagagtacagacaaaccacaggcaaatgtatgtttatatatttttatttttttatatatttattaattttttttatgtcttacttgattttatgtctt

SEQ ID NO: 58207 - protein, 428 aa, Glycine max
  peptide (1)..(428): Ceres Seq. ID no. 15171287
  misc_feature (255)..(423): Pfam Name: Protein of unknown function (DUF1005) Pfam Description: Protein of unknown function (DUF1005)
  misc_feature (358)..(425): Homolog of NCBI NO: 34896878 NR Description: unknown protein [Oryza sativa (japonica
  misc_feature (53)..(352): Homolog of NCBI NO: 34896878 NR Description: unknown protein [Oryza sativa (japonica
  misc_feature (359)..(418): Homolog of NCBI NO: 15222861 NR Description: expressed protein [Arabidopsis thaliana]
  misc_feature (1)..(342): Homolog of NCBI NO: 15222861 NR Description: expressed protein [Arabidopsis thaliana]
  misc_feature (48)..(423): Homolog of NCBI NO: 34909364 NR Description: P0638D12.14 [Oryza sativa (japonica
  misc_feature (358)..(425): Homolog of NCBI NO: 36104436 NR Description: unknown protein [Oryza sativa (japonica
  misc_feature (1)..(352): Homolog of NCBI NO: 36104436 NR Description: unknown protein [Oryza sativa (japonica
  misc_feature (358)..(421): Homolog of NCBI NO: 15218372 NR Description: expressed protein [Arabidopsis thaliana]
  misc_feature (1)..(342): Homolog of NCBI NO: 15218372 NR Description: expressed protein [Arabidopsis thaliana]
  misc_feature (1)..(423): Homolog of NCBI NO: 15233530 NR Description: expressed protein [Arabidopsis thaliana]
MDPCPFVRLMVDSLALNLPSATKPPPVSGVHPSTTPCFCQIRITNFPSQTALLPLSSSSSGDANPEAATSAPGFHLDSSALRRLSAKPLTLRLAVYSGSTARACGISSAKLLGRLNLTLDLSAALSRPNTFHSGWLNLRKNRTGFEPEHKPAPRVHIVVRSEPDPRFVFQFGGEPECSPVVFQIQENNIRQPVFSCKFSADRNSRSRCLPSDFANNPSRWRRTLKGIRERHGRERKGWMIMIHDLSGSPVAAASMITPFVPSPGSDRVSRSNPGAWLILRTNNGASVSSWKPWGRLEAWRERGPVDGLGYKFELVTENGPANGIPIAEATMNVKKGGQFCIDYKVMRDSGLGSRLKGKGFVMGSTVEGEGKVSKPVVQVGAQHVTCMADAALFIALSAAIDLSMDACKLFSHKLRKELCHEEQQVSFP

SEQ ID NO: 58208 - protein, 419 aa, Glycine max
  peptide (1)..(419): Ceres Seq. ID no. 15171288
  misc_feature (246)..(414): Pfam Name: Protein of unknown function (DUF1005) Pfam Description: Protein of unknown function (DUF1005)
  misc_feature (349)..(416): Homolog of NCBI NO: 34896878 NR Description: unknown protein [Oryza sativa (japonica
  misc_feature (44)..(343): Homolog of NCBI NO: 34896878 NR Description: unknown protein [Oryza sativa (japonica
  misc_feature (350)..(409): Homolog of NCBI NO: 15222861 NR Description: expressed protein [Arabidopsis thaliana]
  misc_feature (1)..(333): Homolog of NCBI NO: 15222861 NR Description: expressed protein [Arabidopsis thaliana]
  misc_feature (39)..(414): Homolog of NCBI NO: 34909364 NR Description: P0638D12.14 [Oryza sativa (japonica
  misc_feature (349)..(416): Homolog of NCBI NO: 36104436 NR Description: unknown protein [Oryza sativa (japonica
  misc_feature (1)..(343): Homolog of NCBI NO: 36104436 NR Description: unknown protein [Oryza sativa (japonica
  misc_feature (349)..(412): Homolog of NCBI NO: 15218372 NR Description: expressed protein [Arabidopsis thaliana]
  misc_feature (1)..(333): Homolog of NCBI NO: 15218372 NR Description: expressed protein [Arabidopsis thaliana]
  misc_feature (1)..(414): Homolog of NCBI NO: 15233530 NR Description: expressed protein [Arabidopsis thaliana]
MVDSLALNLPSATKPPPVSGVHPSTTPCFCQIRITNFPSQTALLPLSSSSSGDANPEAATSAPGFHLDSSALRRLSAKPLTLRLAVYSGSTARACGISSAKLLGRLNLTLDLSAALSRPNTFHSGWLNLRKNRTGFEPEHKPAPRVHIVVRSEPDPRFVFQFGGEPECSPVVFQIQENNIRQPVFSCKFSADRNSRSRCLPSDFANNPSRWRRTLKGIRERHGRERKGWMIMIHDLSGSPVAAASMITPFVPSPGSDRVSRSNPGAWLILRTNNGASVSSWKPWGRLEAWRERGPVDGLGYKFELVTENGPANGIPIAEATMNVKKGGQFCIDYKVMRDSGLGSRLKGKGFVMGSTVEGEGKVSKPVVQVGAQHVTCMADAALFIALSAAIDLSMDACKLFSHKLRKELCHEEQQVSFP

SEQ ID NO: 58209 - DNA, 1440 bp, Glycine max
  misc_feature (1)..(1440): Ceres Seq. ID no. 14302817
gcacgataggaggcactacgctgtcgtttgcggtgttagaagacgtagtcgggcgtgatggcgaagaagcgatcagccccgagtggcggtcgtcgggaaaaccgagccgaatcatcttcccgacggctcaactcagcttccggtcgcagaaaactcgttgcgttcttcatcgtatcgtccatcatcgctatcgtcacttatcgttatcgcttcagacaatcttctccttcgcaaggccttgtcacaactcatgctaattgccaacatatactcgccgaaaattcaaaagtatcaggaaattcgtctcagcgccattatacttatcctgtgcttggctacattactccctggaattctcgaggttatgaattggcaaaaaggttcaactctaagttcacacatttatcacccatttggtatgatctaaagagccaacagactagcttagttctagaggggagacataatgctgacagaggatggatctcagagcttaaaaaggcaggagaagctttgattttgcctagagttgttctggaagcatcaccagcagtgctgttgggaaaggaaaaacaaaggaacaaagccattaaccttatagtaacagagtgcaaggaaatgggatatgatggtattgttttggaatcttggtcaaggtgggcagcttatggtatcttgcatgatccaagcatgcggaatttggcattgcagtttgtaaaacagcttggagatgcactgcattctataagctcagagaaaattagtgggcagcagctgcagttggtctatgttataggtccaccttctgagaagttgcaagagcatgattttggtcctaaagatcttgagactttaagtgaagctgtggatggattctcgttaatgacatatgatttctctaatcctcataatcctggtcctaatgcacctttgaaatggattcaaattgttctacagctgcttctcggtacctctggcaatagagcccaaagccttgcccccaagatacttcttggtatcaacttctatggaaatgatttctccctttcaagggatgcagggggtggagctattattgggagagattacctggcacttttggagaagcactggcctgaactgcagtgggataagaatagtggggagcattttttcttttacactgacgacaaggatatcaggcatgtggtattttatccatctttgaagtcaatttctttgcggttagaggaagctcgttcatggggatgtggcatctcgatctgggaaattggccaaggtctggattatttttttgaccttctgtgatagcttgttatgtgtacttcttttgtggcccatgctaatgtttattcctacgtcgtaatgttgtgtattcagtataatcgaaacgtacttcagttaaattgggattttgtttttcagaaatctagtttgagg

SEQ ID NO: 58210 - protein, 416 aa, Glycine max
  peptide (1)..(416): Ceres Seq. ID no. 14302818
  misc_feature (201)..(408): Pfam Name: Glycosyl hydrolases family 18 Pfam Description: Glycosyl hydrolases family 18
  misc_feature (59)..(416): Homolog of NCBI NO: 13905168 NR Description: 3110023E09Rik protein [Mus musculus]
  misc_feature (258)..(416): Homolog of NCBI NO: 34861254 NR Description: similar to Cc1-9 [Rattus norvegicus]
  misc_feature (59)..(208): Homolog of NCBI NO: 34861254 NR Description: similar to Cc1-9 [Rattus norvegicus]
  misc_feature (59)..(200): Homolog of NCBI NO: 14585861 NR Description: hypothetical protein SB139 [Homo sapiens]
  misc_feature (258)..(416): Homolog of NCBI NO: 14585861 NR Description: hypothetical protein SB139 [Homo sapiens]
  misc_feature (186)..(416): Homolog of NCBI NO: 34912746 NR Description: B1040D09.22 [Oryza sativa (japonica
  misc_feature (1)..(254): Homolog of NCBI NO: 22135960 NR Description: unknown protein [Arabidopsis thaliana]
  misc_feature (51)..(416): Homolog of NCBI NO: 11034671 NR Description: P0407B12.10 [Oryza sativa (japonica
  misc_feature (1)..(412): Homolog of NCBI NO: 7485232 NR Description: hypothetical protein A_IG002N01.31 - Arabidopsis
  misc_feature (1)..(416): Homolog of NCBI NO: 15234049 NR Description: glycosyl hydrolase family 18 [Arabidopsis
MAKKRSAPSGGRRENRAESSSRRLNSASGRRKLVAFFIVSSIIAIVTYRYRFRQSSPSQGLVTTHANCQHILAENSKVSGNSSQRHYTYPVLGYITPWNSRGYELAKRFNSKFTHLSPIWYDLKSQQTSLVLEGRHNADRGWISELKKAGEALILPRVVLEASPAVLLGKEKQRNKAINLIVTECKEMGYDGIVLESWSRWAAYGILHDPSMRNLALQFVKQLGDALHSISSEKISGQQLQLVYVIGPPSEKLQEHDFGPKDLETLSEAVDGFSLMTYDFSNPHNPGPNAPLKWIQIVLQLLLGTSGNRAQSLAPKILLGINFYGNDFSLSRDAGGGAIIGRDYLALLEKHWPELQWDKNSGEHFFFYTDDKDIRHVVFYPSLKSISLRLEEARSWGCGISIWEIGQGLDYFFDLL

SEQ ID NO: 58211 - protein, 229 aa, Glycine max
  peptide (1)..(229): Ceres Seq. ID no. 14302819
  misc_feature (14)..(221): Pfam Name: Glycosyl hydrolases family 18 Pfam Description: Glycosyl hydrolases family 18
  misc_feature (1)..(229): Homolog of NCBI NO: 13905168 NR Description: 3110023E09Rik protein [Mus musculus]
  misc_feature (71)..(229): Homolog of NCBI NO: 34861254 NR Description: similar to Cc1-9 [Rattus norvegicus]
  misc_feature (1)..(21): Homolog of NCBI NO: 34861254 NR Description: similar to Cc1-9 [Rattus norvegicus]
  misc_feature (1)..(13): Homolog of NCBI NO: 14585861 NR Description: hypothetical protein SB139 [Homo sapiens]
  misc_feature (71)..(229): Homolog of NCBI NO: 14585861 NR Description: hypothetical protein SB139 [Homo sapiens]
  misc_feature (1)..(229): Homolog of NCBI NO: 34912746 NR Description: B1040D09.22 [Oryza sativa (japonica
  misc_feature (1)..(67): Homolog of NCBI NO: 22135960 NR Description: unknown protein [Arabidopsis thaliana]
  misc_feature (1)..(229): Homolog of NCBI NO: 11034671 NR Description: P0407B12.10 [Oryza sativa (japonica
  misc_feature (1)..(225): Homolog of NCBI NO: 7485232 NR Description: hypothetical protein A_IG002N01.31 - Arabidopsis
  misc_feature (1)..(229): Homolog of NCBI NO: 15234049 NR Description: glycosyl hydrolase family 18 [Arabidopsis
MGYDGIVLESWSRWAAYGILHDPSMRNLALQFVKQLGDALHSISSEKISGQQLQLVYVIGPPSEKLQEHDFGPKDLETLSEAVDGFSLMTYDFSNPHNPGPNAPLKWIQIVLQLLLGTSGNRAQSLAPKILLGINFYGNDFSLSRDAGGGAIIGRDYLALLEKHWPELQWDKNSGEHFFFYTDDKDIRHVVFYPSLKSISLRLEEARSWGCGISIWEIGQGLDYFFDLL

SEQ ID NO: 58212 - DNA, 1288 bp, Glycine max
  misc_feature (1)..(1288): Ceres Seq. ID no. 15171141
agaggaagagaagagaaagaggagcacataataaccctcaaactccatttcactcacagaaaaatagagatatagagagagaaagtgctgcagaatacacacatacacaccacttcttcaagagagagaggtgtgtgaaggaaaataagaactgaaagaaaaattgttttgcaaaggaagatatgaaactttgcaaatttaacaactgagaaagaagatctgtgatttctctctctctttttgttgttgttgttgtttgcagagaaaatcacacaaacgcacacacacacacacacacacacacacacccttcttcgtgtctgaatttttatcattgacaattttttcacaaagggttgttgtctcttcagagagacacagatcttgaggttggaggcaaaatccttcacacactttggtggttatggaaacagaagagaggaaccagaaagattgcaaggcttcggagccagagtttttcttgcagtgggggaacaggaagaggctgagatgtgtgagggtgaaggaccctcggatttcagcgaggctcaacggtggaatcagaaggaaacttggttctgcaatggagcatcatcgctctggcctcactgtgccagaaaaagaacatcatcaccatcatcatcatcaacaacttaatcgccttacaaggaattccgacggggcgattctccggtcatcggccggcgagacaaggaaatcggcgtcgccggagaaggaggaccggtactacacgacgcggggttcggcggaggagaacggcaaggtcaccggcggcgaaggcatcaacggcgaagaacgagccctagtttggcccaagctctacatcactctctcaagcaaggagaaagaggaagattttctggccatgaagggttgcaagcttcctcagcgacccaaaaagagggccaaaatcattcaaagaagcttacttagaccaagagggttgaaggctatgggaagcatggaaagtgattctgaatgaatgatatgatggaaagaaagaaaaaaaaatcaattgagcggatccacaagaagggggaagaaggaagcccttttaagaagcatgaagaagaaatgttttggagatggtgatgatgatgatgatgttgtttgaattgatgaatggtgaagataatgatgattcaagttttttttatatttgtgtggcatgtatgttgccccctcaatgtttttttgtaaacgagtaagattcgatccgatccaatccatttcaattaattaagaaaaaatattttctcatcttcac

SEQ ID NO: 58213 - protein, 192 aa, Glycine max
  peptide (1)..(192): Ceres Seq. ID no. 15171142
  misc_feature (72)..(175): Homolog of NCBI NO: 34911178 NR Description: P0019E03.4 [Oryza sativa (japonica
  misc_feature (90)..(175): Homolog of NCBI NO: 7485821 NR Description: hypothetical protein F1C12.211 - Arabidopsis
  misc_feature (90)..(175): Homolog of NCBI NO: 21553974 NR Description: unknown [Arabidopsis thaliana]
  misc_feature (1)..(176): Homolog of NCBI NO: 30103017 NR Description: unknown protein [Oryza sativa (japonica
  misc_feature (1)..(176): Homolog of NCBI NO: 30695924 NR Description: expressed protein [Arabidopsis thaliana]
  misc_feature (1)..(176): Homolog of NCBI NO: 25405821 NR Description: unknown protein, 25817-24837 [imported] -
  misc_feature (15)..(51): Homolog of NCBI NO: 30678969 NR Description: expressed protein [Arabidopsis thaliana]
  misc_feature (76)..(176): Homolog of NCBI NO: 30678969 NR Description: expressed protein [Arabidopsis thaliana]
  misc_feature (15)..(51): Homolog of NCBI NO: 6006854 NR Description: hypothetical protein [Arabidopsis thaliana]
  misc_feature (76)..(177): Homolog of NCBI NO: 6006854 NR Description: hypothetical protein [Arabidopsis thaliana]
METEERNQKDCKASEPEFFLQWGNRKRLRCVRVKDPRISARLNGGIRRKLGSAMEHHRSGLTVPEKEHHHHHHHQQLNRLTRNSDGAILRSSAGETRKSASPEKEDRYYTTRGSAEENGKVTGGEGINGEERALVWPKLYITLSSKEKEEDFLAMKGCKLPQRPKKRAKIIQRSLLRPRGLKAMGSMESDSE

SEQ ID NO: 58214 - protein, 139 aa, Glycine max
  peptide (1)..(139): Ceres Seq. ID no. 15171143
  misc_feature (37)..(122): Homolog of NCBI NO: 30685058 NR Description: expressed protein [Arabidopsis thaliana]
  misc_feature (37)..(122): Homolog of NCBI NO: 30685055 NR Description: expressed protein [Arabidopsis thaliana]
  misc_feature (19)..(122): Homolog of NCBI NO: 34911178 NR Description: P0019E03.4 [Oryza sativa (japonica
  misc_feature (37)..(122): Homolog of NCBI NO: 7485821 NR Description: hypothetical protein F1C12.211 - Arabidopsis
  misc_feature (37)..(122): Homolog of NCBI NO: 21553974 NR Description: unknown [Arabidopsis thaliana]
  misc_feature (1)..(123): Homolog of NCBI NO: 30103017 NR Description: unknown protein [Oryza sativa (japonica
  misc_feature (1)..(123): Homolog of NCBI NO: 30695924 NR Description: expressed protein [Arabidopsis thaliana]
  misc_feature (1)..(123): Homolog of NCBI NO: 25405821 NR Description: unknown protein, 25817-24837 [imported] -
  misc_feature (23)..(123): Homolog of NCBI NO: 30678969 NR Description: expressed protein [Arabidopsis thaliana]
  misc_feature (23)..(124): Homolog of NCBI NO: 6006854 NR Description: hypothetical protein [Arabidopsis thaliana]
MEHHRSGLTVPEKEHHHHHHHQQLNRLTRNSDGAILRSSAGETRKSASPEKEDRYYTTRGSAEENGKVTGGEGINGEERALVWPKLYITLSSKEKEEDFLAMKGCKLPQRPKKRAKIIQRSLLRPRGLKAMGSMESDSE

SEQ ID NO: 58215 - DNA, 1356 bp, Glycine max
  misc_feature (1)..(1356): Ceres Seq. ID no. 15179800
atatattgaatgttctggtcttcctttgtgtttttgtagatagaagccatcagtcatggataggcttctatcatcgtcttcacccccttcttttacatttctcactcgattcgaatctgcaactgcaagattcaatttctctccgtcaacacgttctcactctcacttgaagcggctctcctcaatttgttgccagcatgcaaatccatctcctttttcctcttccactccctttctcgcttcttccaaccaccccattaattttccatccttttcctcttcttcagatccctccacactcgaatcccattctctcaatcaaatcaaaaccggggctttcccaaaaccaaaggtaataacagctcggacgcttgtaatactttctgctcttgctatgatcttaatccaaccaactattgcaccagcagcttttgcaacctttcaaactgctgccaagactggtggtcctgctgctgcagctgcagttggtagaaaactaatccacacggagctactaagtagtgcttggactggtttcttggctggctgcttacacaccttatcagggcctgaccacctagctgccttggctccattgtcaatcggtcgaacccgaatggagagtgctgctgttggagccctttggggttgtggccatgatgctggtcaagttctttttgggttaatatttctaatcctcaaggatcaactccatattgaaattatccgaacttggggtaccagagtggtgggtcttactctgctaataattggtgctatgggaattagagaagcatcagaagtacatgccccaattgttgctttagaaagtggtgaatgtgatgtcaacgtgtatgaatcgcttgataatccaacagtgggcaaaaagaagataggttttgctacttttgcaacagggatagttcatggcctgcaaccagatgcattgatgatggttttgcctgcccttgctttgccttcgcgtttggctggtgctgcgtttctcatcatgttcttaattggaactgtaattgcaatgggaagttataccgtgtttataggttcgtgtagccaggcactgaaggatagagtacctaggataactgagaaactcacttgggtttcctcccttattgcaatagccctcggatttgctatcattattagccagttttttgggtttagtctgtattaaaacatctttaataagaaaggtactttttttcttatgaacattgttttagtatttagaaaaagtagacgttggacagaaaattggttgtttataggaagtacatcatccagaaaacatgtgaaattgattgttaattatttactttgcattcgaatgtgtat

SEQ ID NO: 58216 - protein, 379 aa, Glycine max
  peptide (1)..(379): Ceres Seq. ID no. 15179801
  misc_feature (153)..(328): Homolog of NCBI NO: 33866162 NR Description: cyanobacterial conserved hypothetical protein
  misc_feature (98)..(379): Homolog of NCBI NO: 21397272 NR Description: Hypothetical protein [Oryza sativa (japonica
  misc_feature (99)..(379): Homolog of NCBI NO: 34897966 NR Description: hypothetical protein~similar to Arabidopsis
  misc_feature (99)..(379): Homolog of NCBI NO: 7486794 NR Description: hypothetical protein M4E13.135 - Arabidopsis
  misc_feature (1)..(379): Homolog of NCBI NO: 18418571 NR Description: expressed protein [Arabidopsis thaliana]
  misc_feature (7)..(379): Homolog of NCBI NO: 21592431 NR Description: unknown [Arabidopsis thaliana]
  misc_feature (9)..(379): Homolog of NCBI NO: 15724154 NR Description: At2g16800/T24I21.21 [Arabidopsis thaliana]
  misc_feature (9)..(379): Homolog of NCBI NO: 18398217 NR Description: expressed protein [Arabidopsis thaliana]
MDRLLSSSSPPSFTFLTRFESATARFNFSPSTRSHSHLKRLSSICCQHANPSPFSSSTPFLASSNHPINFPSFSSSSDPSTLESHSLNQIKTGAFPKPKVITARTLVILSALAMILIQPTIAPAAFATFQTAAKTGGPAAAAAVGRKLIHTELLSSAWTGFLAGCLHTLSGPDHLAALAPLSIGRTRMESAAVGALWGCGHDAGQVLFGLIFLILKDQLHIEIIRTWGTRVVGLTLLIIGAMGIREASEVHAPIVALESGECDVNVYESLDNPTVGKKKIGFATFATGIVHGLQPDALMMVLPALALPSRLAGAAFLIMFLIGTVIAMGSYTVFIGSCSQALKDRVPRITEKLTWVSSLIAIALGFAIIISQFFGFSLY

SEQ ID NO: 58217 - protein, 266 aa, Glycine max
  peptide (1)..(266): Ceres Seq. ID no. 15179802
  misc_feature (40)..(215): Homolog of NCBI NO: 33866162 NR Description: cyanobacterial conserved hypothetical protein
  misc_feature (1)..(266): Homolog of NCBI NO: 21397272 NR Description: Hypothetical protein [Oryza sativa (japonica
  misc_feature (1)..(266): Homolog of NCBI NO: 34897966 NR Description: hypothetical protein~similar to Arabidopsis
  misc_feature (1)..(266): Homolog of NCBI NO: 7486794 NR Description: hypothetical protein M4E13.135 - Arabidopsis
  misc_feature (1)..(266): Homolog of NCBI NO: 18418571 NR Description: expressed protein [Arabidopsis thaliana]
  misc_feature (1)..(266): Homolog of NCBI NO: 21592431 NR Description: unknown [Arabidopsis thaliana]
  misc_feature (1)..(266): Homolog of NCBI NO: 15724154 NR Description: At2g16800/T24I21.21 [Arabidopsis thaliana]
  misc_feature (1)..(266): Homolog of NCBI NO: 18398217 NR Description: expressed protein [Arabidopsis thaliana]
MILIQPTIAPAAFATFQTAAKTGGPAAAAAVGRKLIHTELLSSAWTGFLAGCLHTLSGPDHLAALAPLSIGRTRMESAAVGALWGCGHDAGQVLFGLIFLILKDQLHIEIIRTWGTRVVGLTLLIIGAMGIREASEVHAPIVALESGECDVNVYESLDNPTVGKKKIGFATFATGIVHGLQPDALMMVLPALALPSRLAGAAFLIMFLIGTVIAMGSYTVFIGSCSQALKDRVPRITEKLTWVSSLIAIALGFAIIISQFFGFSLY

SEQ ID NO: 58218 - protein, 192 aa, Glycine max
  peptide (1)..(192): Ceres Seq. ID no. 15179803
  misc_feature (1)..(141): Homolog of NCBI NO: 33866162 NR Description: cyanobacterial conserved hypothetical protein
  misc_feature (1)..(192): Homolog of NCBI NO: 21397272 NR Description: Hypothetical protein [Oryza sativa (japonica
  misc_feature (1)..(192): Homolog of NCBI NO: 34897966 NR Description: hypothetical protein~similar to Arabidopsis
  misc_feature (1)..(192): Homolog of NCBI NO: 7486794 NR Description: hypothetical protein M4E13.135 - Arabidopsis
  misc_feature (1)..(192): Homolog of NCBI NO: 18418571 NR Description: expressed protein [Arabidopsis thaliana]
  misc_feature (1)..(192): Homolog of NCBI NO: 21592431 NR Description: unknown [Arabidopsis thaliana]
  misc_feature (1)..(192): Homolog of NCBI NO: 15724154 NR Description: At2g16800/T24I21.21 [Arabidopsis thaliana]
  misc_feature (1)..(192): Homolog of NCBI NO: 18398217 NR Description: expressed protein [Arabidopsis thaliana]
MESAAVGALWGCGHDAGQVLFGLIFLILKDQLHIEIIRTWGTRVVGLTLLIIGAMGIREASEVHAPIVALESGECDVNVYESLDNPTVGKKKIGFATFATGIVHGLQPDALMMVLPALALPSRLAGAAFLIMFLIGTVIAMGSYTVFIGSCSQALKDRVPRITEKLTWVSSLIAIALGFAIIISQFFGFSLY

SEQ ID NO: 58219 - DNA, 1292 bp, Glycine max
  misc_feature (1)..(1292): Ceres Seq. ID no. 15170306
gttctcattcatttcatttttcgtggtttcaatctcaggcataaggctcccgcgtcgcaccccactcctcccctccaaaccctcccagccacgctccctcgcacgtgaggctcttgcgtcgcagcaacaactccgcaatacttgactcgagaatgagccattcattcattccaagggacgacccctgacgcttccactctttctttggtggcggcatcgttttctctccgctttacccattcattcattcacgttctttatatgcatgctgagagtcgtgtggagatgccactgcctatgtacgtaccaagagacgaacaatttgatgagtctaagctgaacacattcttaatcaagaggctcaaggcagtggtccataacttgatccctggtcttaaggctagtctttctgctaataaccatgacttcaatagattttcagacattgacgacctttacagtgatggcctgcccttgcaagatgaaattttgaagaaaattccattgttacaagtgctcacaaagatacaagaatgcagccaggggcttcttaagtatgacactcccaagattatttctaaggacaagttttcctggctgcgagatgatgaattttcccggcaagcaatagcaggagtcaaccctgttaacattgaggggcttaaagttttcccactggtgagcaaactcgacccggaaacatatgaccaccaagattctgcactcaaaaaagagcatattctaggacaacttaatggcatgaccgtgcaacaggcaatagtggaaaataagctgtttatggtaaagtaacgcgatgtctatgttccatttcttgacgggatcaatgccctttatgggagaaaatcctatgctacccgcaccatatttttcttgataccgcttggcactctcaagcctattgctatagagcttagcctcggaccaagtttcggatgaaaacgtgtagttactcctcctgtggatgcaactacaaattggaagtggcagcttgccaaagctcatgtgtgtgccaatgatgctggggtgcaccaacttgttaaccattgtacctcttgaggttgtatcttatttatcctctatcatctgaaatcgtcaaggcaaatggggtaatgatggaaaaagcatggactgggacactggatcgtgtgcagacattttggggcctaagacgaaaatgttaaagggtcttttttttacaaaaattttaaagagacttagtacattatataaaatatcaatttttatattaatcttctagcttttttagctgc

SEQ ID NO: 58220 - protein, 182 aa, Glycine max
  peptide (1)..(182): Ceres Seq. ID no. 15170307
  misc_feature (1)..(182): Pfam Name: Lipoxygenase Pfam Description: Lipoxygenase
  misc_feature (1)..(182): Homolog of NCBI NO: 15218506 NR Description: lipoxygenase (LOX), putative [Arabidopsis
  misc_feature (1)..(182): Homolog of NCBI NO: 12323766 NR Description: putative lipoxygenase, 5' partial; 101105-97928
  misc_feature (3)..(182): Homolog of NCBI NO: 6002055 NR Description: lipoxygenase [Arabidopsis thaliana]
  misc_feature (3)..(182): Homolog of NCBI NO: 18394479 NR Description: lipoxygenase (LOX), putative [Arabidopsis
  misc_feature (3)..(182): Homolog of NCBI NO: 9665131 NR Description: lipoxygenase [Arabidopsis thaliana]
  misc_feature (3)..(182): Homolog of NCBI NO: 7433165 NR Description: lipoxygenase (EC 1.13.11.12) loxD - tomato
  misc_feature (3)..(182): Homolog of NCBI NO: 7433167 NR Description: probable lipoxygenase (EC 1.13.11.12) (clone H3)
  misc_feature (1)..(182): Homolog of NCBI NO: 32454714 NR Description: lipoxygenase [Nicotiana attenuata]
  misc_feature (1)..(182): Homolog of NCBI NO: 28911945 NR Description: lipoxygenase [Nicotiana attenuata]
  misc_feature (1)..(182): Homolog of NCBI NO: 14589309 NR Description: lipoxygenase [Sesbania rostrata]
MHAESRVEMPLPMYVPRDEQFDESKLNTFLIKRLKAVVHNLIPGLKASLSANNHDFNRFSDIDDLYSDGLPLQDEILKKIPLLQVLTKIQECSQGLLKYDTPKIISKDKFSWLRDDEFSRQAIAGVNPVNIEGLKVFPLVSKLDPETYDHQDSALKKEHILGQLNGMTVQQAIVENKLFMVK

SEQ ID NO: 58221 - protein, 174 aa, Glycine max
  peptide (1)..(174): Ceres Seq. ID no. 15170308
  misc_feature (1)..(174): Pfam Name: Lipoxygenase Pfam Description: Lipoxygenase
  misc_feature (1)..(174): Homolog of NCBI NO: 15218506 NR Description: lipoxygenase (LOX), putative [Arabidopsis
  misc_feature (1)..(174): Homolog of NCBI NO: 12323766 NR Description: putative lipoxygenase, 5' partial; 101105-97928
  misc_feature (1)..(174): Homolog of NCBI NO: 6002055 NR Description: lipoxygenase [Arabidopsis thaliana]
  misc_feature (1)..(174): Homolog of NCBI NO: 18394479 NR Description: lipoxygenase (LOX), putative [Arabidopsis
  misc_feature (1)..(174): Homolog of NCBI NO: 9665131 NR Description: lipoxygenase [Arabidopsis thaliana]
  misc_feature (1)..(174): Homolog of NCBI NO: 7433165 NR Description: lipoxygenase (EC 1.13.11.12) loxD - tomato
  misc_feature (1)..(174): Homolog of NCBI NO: 7433167 NR Description: probable lipoxygenase (EC 1.13.11.12) (clone H3)
  misc_feature (1)..(174): Homolog of NCBI NO: 32454714 NR Description: lipoxygenase [Nicotiana attenuata]
  misc_feature (1)..(174): Homolog of NCBI NO: 28911945 NR Description: lipoxygenase [Nicotiana attenuata]
  misc_feature (1)..(174): Homolog of NCBI NO: 14589309 NR Description: lipoxygenase [Sesbania rostrata]
MPLPMYVPRDEQFDESKLNTFLIKRLKAVVHNLIPGLKASLSANNHDFNRFSDIDDLYSDGLPLQDEILKKIPLLQVLTKIQECSQGLLKYDTPKIISKDKFSWLRDDEFSRQAIAGVNPVNIEGLKVFPLVSKLDPETYDHQDSALKKEHILGQLNGMTVQQAIVENKLFMVK

SEQ ID NO: 58222 - protein, 170 aa, Glycine max
  peptide (1)..(170): Ceres Seq. ID no. 15170309
  misc_feature (1)..(170): Pfam Name: Lipoxygenase Pfam Description: Lipoxygenase
  misc_feature (1)..(170): Homolog of NCBI NO: 15218506 NR Description: lipoxygenase (LOX), putative [Arabidopsis
  misc_feature (1)..(170): Homolog of NCBI NO: 12323766 NR Description: putative lipoxygenase, 5' partial; 101105-97928
  misc_feature (1)..(170): Homolog of NCBI NO: 6002055 NR Description: lipoxygenase [Arabidopsis thaliana]
  misc_feature (1)..(170): Homolog of NCBI NO: 18394479 NR Description: lipoxygenase (LOX), putative [Arabidopsis
  misc_feature (1)..(170): Homolog of NCBI NO: 9665131 NR Description: lipoxygenase [Arabidopsis thaliana]
  misc_feature (1)..(170): Homolog of NCBI NO: 7433165 NR Description: lipoxygenase (EC 1.13.11.12) loxD - tomato
  misc_feature (1)..(170): Homolog of NCBI NO: 7433167 NR Description: probable lipoxygenase (EC 1.13.11.12) (clone H3)
  misc_feature (1)..(170): Homolog of NCBI NO: 32454714 NR Description: lipoxygenase [Nicotiana attenuata]
  misc_feature (1)..(170): Homolog of NCBI NO: 28911945 NR Description: lipoxygenase [Nicotiana attenuata]
  misc_feature (1)..(170): Homolog of NCBI NO: 14589309 NR Description: lipoxygenase [Sesbania rostrata]
MYVPRDEQFDESKLNTFLIKRLKAVVHNLIPGLKASLSANNHDFNRFSDIDDLYSDGLPLQDEILKKIPLLQVLTKIQECSQGLLKYDTPKIISKDKFSWLRDDEFSRQAIAGVNPVNIEGLKVFPLVSKLDPETYDHQDSALKKEHILGQLNGMTVQQAIVENKLFMVK

SEQ ID NO: 58223 - DNA, 904 bp, Glycine max
  misc_feature (1)..(904): Ceres Seq. ID no. 13594411
ctagaacatcctaatcgaaaaataacaccacattacattggcttgggagctatggcggcaaggatgttgcagaggcgattcatttcaatcttctcaagacaaacccatcaccccattactcaagaatcttggtattctcctaccagtgcaatattaaacagttatggattccatcaacggggggtcatgacccatacaaatccaatcaaacctgtctgtgaagatgtagagaataatgaagcagacaccttaaaatcaagtccaaacccagatgaagttgctacatctattagtgttaatgaaacctcttctgtaaagttttctgccaagtccagtttgaagacatcctcaaggcatgatcttgctatggttttcacctgcaaggtctgtgaaacgagatccattaagacggcttgtcgcgaatcgtatgagaaaggtgtagtggtggcaagatgtggggggtgtaataaccttcacctgattgcagatcaccttgggtggtttggtgaaccaggaagcgttgaggacttcctggctgctcgtggagaagaagtgaaaagaggttcagttgacacactgaatcttacattggaagatttagctggaaggaaaccttgaaagatagaatttgaccaagtgtatgttctgcaatagggtgtcactgagagtttggaagtgcaagggaggtaacaatagttggttttgtaaactcggctcttctgtctataattatgctagtaatattaaaaagcaacatattcaatgtactgtttgctttatcaattatttttggtgcctgccaaaggaatgtttttagaccatgatacaccttcatgtgcaaaacttagccaagaaaggaatttatgaaaaaaaaaaaaaaaaaagctyatcgataccgtcgacc

SEQ ID NO: 58224 - protein, 205 aa, Glycine max
  peptide (1)..(205): Ceres Seq. ID no. 15221345
  misc_feature (121)..(185): Pfam Name: DNL zinc finger Pfam Description: DNL zinc finger
  misc_feature (121)..(200): Homolog of NCBI NO: 6324019 NR Description: Protein required for cell viability; Ynl310cp
  misc_feature (102)..(187): Homolog of NCBI NO: 39584058 NR Description: Hypothetical protein CBG11741 [Caenorhabditis
  misc_feature (104)..(194): Homolog of NCBI NO: 19113862 NR Description: hypothetical protein [Schizosaccharomyces pombe]
  misc_feature (75)..(200): Homolog of NCBI NO: 23509418 NR Description: hypothetical protein [Plasmodium falciparum 3D7]
  misc_feature (121)..(187): Homolog of NCBI NO: 24642261 NR Description: CG12379-PA [Drosophila melanogaster]
  misc_feature (121)..(187): Homolog of NCBI NO: 17553552 NR Description: Protein required for cell viability like
  misc_feature (123)..(198): Homolog of NCBI NO: 34853079 NR Description: similar to CG12379-PA [Rattus norvegicus]
  misc_feature (86)..(200): Homolog of NCBI NO: 23485607 NR Description: Drosophila melanogaster CG12379 gene product
  misc_feature (123)..(198): Homolog of NCBI NO: 12835133 NR Description: unnamed protein product [Mus musculus]
  misc_feature (18)..(204): Homolog of NCBI NO: 29028810 NR Description: At3g54830 [Arabidopsis thaliana]
LEHPNRKITPHYIGLGAMAARMLQRRFISIFSRQTHHPITQESWYSPTSAILNSYGFHQRGVMTHTNPIKPVCEDVENNEADTLKSSPNPDEVATSISVNETSSVKFSAKSSLKTSSRHDLAMVFTCKVCETRSIKTACRESYEKGVVVARCGGCNNLHLIADHLGWFGEPGSVEDFLAARGEEVKRGSVDTLNLTLEDLAGRKP

SEQ ID NO: 58225 - protein, 188 aa, Glycine max
  peptide (1)..(188): Ceres Seq. ID no. 15221346
  misc_feature (104)..(168): Pfam Name: DNL zinc finger Pfam Description: DNL zinc finger
  misc_feature (104)..(183): Homolog of NCBI NO: 6324019 NR Description: Protein required for cell viability; Ynl310cp
  misc_feature (85)..(170): Homolog of NCBI NO: 39584058 NR Description: Hypothetical protein CBG11741 [Caenorhabditis
  misc_feature (87)..(177): Homolog of NCBI NO: 19113862 NR Description: hypothetical protein [Schizosaccharomyces pombe]
  misc_feature (58)..(183): Homolog of NCBI NO: 23509418 NR Description: hypothetical protein [Plasmodium falciparum 3D7]
  misc_feature (104)..(170): Homolog of NCBI NO: 24642261 NR Description: CG12379-PA [Drosophila melanogaster]
  misc_feature (104)..(170): Homolog of NCBI NO: 17553552 NR Description: Protein required for cell viability like
  misc_feature (106)..(181): Homolog of NCBI NO: 34853079 NR Description: similar to CG12379-PA [Rattus norvegicus]
  misc_feature (69)..(183): Homolog of NCBI NO: 23485607 NR Description: Drosophila melanogaster CG12379 gene product
  misc_feature (106)..(181): Homolog of NCBI NO: 12835133 NR Description: unnamed protein product [Mus musculus]
  misc_feature (1)..(187): Homolog of NCBI NO: 29028810 NR Description: At3g54830 [Arabidopsis thaliana]
MAARMLQRRFISIFSRQTHHPITQESWYSPTSAILNSYGFHQRGVMTHTNPIKPVCEDVENNEADTLKSSPNPDEVATSISVNETSSVKFSAKSSLKTSSRHDLAMVFTCKVCETRSIKTACRESYEKGVVVARCGGCNNLHLIADHLGWFGEPGSVEDFLAARGEEVKRGSVDTLNLTLEDLAGRKP

SEQ ID NO: 58226 - protein, 184 aa, Glycine max
  peptide (1)..(184): Ceres Seq. ID no. 15221347
  misc_feature (100)..(164): Pfam Name: DNL zinc finger Pfam Description: DNL zinc finger
  misc_feature (100)..(179): Homolog of NCBI NO: 6324019 NR Description: Protein required for cell viability; Ynl310cp
  misc_feature (81)..(166): Homolog of NCBI NO: 39584058 NR Description: Hypothetical protein CBG11741 [Caenorhabditis
  misc_feature (83)..(173): Homolog of NCBI NO: 19113862 NR Description: hypothetical protein [Schizosaccharomyces pombe]
  misc_feature (54)..(179): Homolog of NCBI NO: 23509418 NR Description: hypothetical protein [Plasmodium falciparum 3D7]
  misc_feature (100)..(166): Homolog of NCBI NO: 24642261 NR Description: CG12379-PA [Drosophila melanogaster]
  misc_feature (100)..(166): Homolog of NCBI NO: 17553552 NR Description: Protein required for cell viability like
  misc_feature (102)..(177): Homolog of NCBI NO: 34853079 NR Description: similar to CG12379-PA [Rattus norvegicus]
  misc_feature (65)..(179): Homolog of NCBI NO: 23485607 NR Description: Drosophila melanogaster CG12379 gene product
  misc_feature (102)..(177): Homolog of NCBI NO: 12835133 NR Description: unnamed protein product [Mus musculus]
  misc_feature (1)..(183): Homolog of NCBI NO: 29028810 NR Description: At3g54830 [Arabidopsis thaliana]
MLQRRFISIFSRQTHHPITQESWYSPTSAILNSYGFHQRGVMTHTNPIKPVCEDVENNEADTLKSSPNPDEVATSISVNETSSVKFSAKSSLKTSSRHDLAMVFTCKVCETRSIKTACRESYEKGVVVARCGGCNNLHLIADHLGWFGEPGSVEDFLAARGEEVKRGSVDTLNLTLEDLAGRKP

SEQ ID NO: 58227 - protein, 143 aa, Glycine max
  peptide (1)..(143): Ceres Seq. ID no. 15221348
  misc_feature (59)..(123): Pfam Name: DNL zinc finger Pfam Description: DNL zinc finger
  misc_feature (59)..(138): Homolog of NCBI NO: 6324019 NR Description: Protein required for cell viability; Ynl310cp
  misc_feature (40)..(125): Homolog of NCBI NO: 39584058 NR Description: Hypothetical protein CBG11741 [Caenorhabditis
  misc_feature (42)..(132): Homolog of NCBI NO: 19113862 NR Description: hypothetical protein [Schizosaccharomyces pombe]
  misc_feature (13)..(138): Homolog of NCBI NO: 23509418 NR Description: hypothetical protein [Plasmodium falciparum 3D7]
  misc_feature (59)..(125): Homolog of NCBI NO: 24642261 NR Description: CG12379-PA [Drosophila melanogaster]
  misc_feature (59)..(125): Homolog of NCBI NO: 17553552 NR Description: Protein required for cell viability like
  misc_feature (61)..(136): Homolog of NCBI NO: 34853079 NR Description: similar to CG12379-PA [Rattus norvegicus]
  misc_feature (24)..(138): Homolog of NCBI NO: 23485607 NR Description: Drosophila melanogaster CG12379 gene product
  misc_feature (61)..(136): Homolog of NCBI NO: 12835133 NR Description: unnamed protein product [Mus musculus]
  misc_feature (1)..(142): Homolog of NCBI NO: 29028810 NR Description: At3g54830 [Arabidopsis thaliana]
MTHTNPIKPVCEDVENNEADTLKSSPNPDEVATSISVNETSSVKFSAKSSLKTSSRHDLAMVFTCKVCETRSIKTACRESYEKGVVVARCGGCNNLHLIADHLGWFGEPGSVEDFLAARGEEVKRGSVDTLNLTLEDLAGRKP

SEQ ID NO: 58228 - DNA, 1150 bp, Glycine max
  misc_feature (1)..(1150): Ceres Seq. ID no. 14316408
atattcatctcagttcaaaggtttgtttctctcctattatcgatttgcctaacttgtattgttttttgtcgaaaccatcacactttacaactcaactattatgattttcctgttgtttatcccttcatcttattcatctttcatggaggaccacaccccatttctctagcactgattaaacaataatctttgatttttttggtcctccggtcatccttgatgtgttcacaggagtggctagtatagaagaaccataagcactgagggaaaaagtgattagtactttagccaacaaattaaaaatggctgtcaccaaggtctacattgtgtattactccttatatggacatgtagacaccatggctagagaagtacacagaggggctgctacagttgaaggtgttgaagcaacactttggagggtacctgagatgctttcggaactaatattggataagttgaaggcccctcctaaaccaaatgatgtaccagacataatgccagaacaatttgtggaggctgatggtttgatatttggttttccttctcgttttgggatgatgccgagccagctcaaggccttctttgatgcaactagtgagctatgggcatcccaagcacttgccggcaaacctgctggaatcttctggagtactggtttttatggtggaggccaagaactatcagcattgacagctataactcaattagctcatcatggtatgctttttgttcctcttggatacacctttggaagtggcatgtttgagatagatgaggtaaaaggaggatctgcatatggtgctggaacttttgcaggagatggatctcgtcaacctacagaactagaactgcagcaggcattttaccagggtaaatatcttgccgaagtaacaaaaaagctgaaaagctaacttctctgcctaacaaatacatgacaggatactatgaactgtgatgtgctacattatctataacatttgattgaagactcgatgattatttttaccggtaagacaagatagaaagacctcatgtggcttttctttttctgggttctgttgttgcaacaatgtatatcttctgttatctctttcagaaaactctcaaattattccaatgaaatgataaacaagatattcagttttcc

SEQ ID NO: 58229 - protein, 203 aa, Glycine max
  peptide (1)..(203): Ceres Seq. ID no. 14316409
  misc_feature (1)..(201): Homolog of NCBI NO: 15234512 NR Description: quinone reductase family [Arabidopsis thaliana]
  misc_feature (4)..(202): Homolog of NCBI NO: 7445353 NR Description: hypothetical protein M4I22.80 - Arabidopsis
  misc_feature (5)..(202): Homolog of NCBI NO: 38636776 NR Description: putative quinone-oxidoreductase QR2
  misc_feature (4)..(202): Homolog of NCBI NO: 12484052 NR Description: quinone-oxidoreductase QR2 [Triphysaria
  misc_feature (1)..(202): Homolog of NCBI NO: 34910128 NR Description: putative 1,4-benzoquinone reductase
  misc_feature (4)..(202): Homolog of NCBI NO: 5031275 NR Description: unknown [Prunus armeniaca]
  misc_feature (1)..(202): Homolog of NCBI NO: 21068664 NR Description: putative quinone oxidoreductase [Cicer arietinum]
  misc_feature (4)..(202): Homolog of NCBI NO: 30687535 NR Description: quinone reductase family [Arabidopsis thaliana]
  misc_feature (4)..(202): Homolog of NCBI NO: 15239652 NR Description: quinone reductase, putative [Arabidopsis
  misc_feature (1)..(202): Homolog of NCBI NO: 22327957 NR Description: quinone reductase family [Arabidopsis thaliana]
MAVTKVYIVYYSLYGHVDTMAREVHRGAATVEGVEATLWRVPEMLSELILDKLKAPPKPNDVPDIMPEQFVEADGLIFGFPSRFGMMPSQLKAFFDATSELWASQALAGKPAGIFWSTGFYGGGQELSALTAITQLAHHGMLFVPLGYTFGSGMFEIDEVKGGSAYGAGTFAGDGSRQPTELELQQAFYQGKYLAEVTKKLKS

SEQ ID NO: 58230 - protein, 184 aa, Glycine max
  peptide (1)..(184): Ceres Seq. ID no. 14316410
  misc_feature (1)..(182): Homolog of NCBI NO: 15234512 NR Description: quinone reductase family [Arabidopsis thaliana]
  misc_feature (1)..(183): Homolog of NCBI NO: 7445353 NR Description: hypothetical protein M4I22.80 - Arabidopsis
  misc_feature (1)..(183): Homolog of NCBI NO: 38636776 NR Description: putative quinone-oxidoreductase QR2
  misc_feature (1)..(183): Homolog of NCBI NO: 12484052 NR Description: quinone-oxidoreductase QR2 [Triphysaria
  misc_feature (1)..(183): Homolog of NCBI NO: 34910128 NR Description: putative 1,4-benzoquinone reductase
  misc_feature (1)..(183): Homolog of NCBI NO: 5031275 NR Description: unknown [Prunus armeniaca]
  misc_feature (1)..(183): Homolog of NCBI NO: 21068664 NR Description: putative quinone oxidoreductase [Cicer arietinum]
  misc_feature (1)..(183): Homolog of NCBI NO: 30687535 NR Description: quinone reductase family [Arabidopsis thaliana]
  misc_feature (1)..(183): Homolog of NCBI NO: 15239652 NR Description: quinone reductase, putative [Arabidopsis
  misc_feature (1)..(183): Homolog of NCBI NO: 22327957 NR Description: quinone reductase family [Arabidopsis thaliana]
MAREVHRGAATVEGVEATLWRVPEMLSELILDKLKAPPKPNDVPDIMPEQFVEADGLIFGFPSRFGMMPSQLKAFFDATSELWASQALAGKPAGIFWSTGFYGGGQELSALTAITQLAHHGMLFVPLGYTFGSGMFEIDEVKGGSAYGAGTFAGDGSRQPTELELQQAFYQGKYLAEVTKKLKS

SEQ ID NO: 58231 - protein, 160 aa, Glycine max
  peptide (1)..(160): Ceres Seq. ID no. 14316411
  misc_feature (1)..(158): Homolog of NCBI NO: 15234512 NR Description: quinone reductase family [Arabidopsis thaliana]
  misc_feature (1)..(159): Homolog of NCBI NO: 7445353 NR Description: hypothetical protein M4I22.80 - Arabidopsis
  misc_feature (1)..(159): Homolog of NCBI NO: 38636776 NR Description: putative quinone-oxidoreductase QR2
  misc_feature (1)..(159): Homolog of NCBI NO: 12484052 NR Description: quinone-oxidoreductase QR2 [Triphysaria
  misc_feature (1)..(159): Homolog of NCBI NO: 34910128 NR Description: putative 1,4-benzoquinone reductase
  misc_feature (1)..(159): Homolog of NCBI NO: 5031275 NR Description: unknown [Prunus armeniaca]
  misc_feature (1)..(159): Homolog of NCBI NO: 21068664 NR Description: putative quinone oxidoreductase [Cicer arietinum]
  misc_feature (1)..(159): Homolog of NCBI NO: 30687535 NR Description: quinone reductase family [Arabidopsis thaliana]
  misc_feature (1)..(159): Homolog of NCBI NO: 15239652 NR Description: quinone reductase, putative [Arabidopsis
  misc_feature (1)..(159): Homolog of NCBI NO: 22327957 NR Description: quinone reductase family [Arabidopsis thaliana]
MLSELILDKLKAPPKPNDVPDIMPEQFVEADGLIFGFPSRFGMMPSQLKAFFDATSELWASQALAGKPAGIFWSTGFYGGGQELSALTAITQLAHHGMLFVPLGYTFGSGMFEIDEVKGGSAYGAGTFAGDGSRQPTELELQQAFYQGKYLAEVTKKLKS

SEQ ID NO: 58232 - DNA, 1423 bp, Glycine max
  misc_feature (1)..(1423): Ceres Seq. ID no. 14315354
gattggagggagtgaagtctttccctccacaagaaaaaaaaatcagaaaaaggaaatgagagattgttggacaccgtgcaaatcaagcactttgcttgttatttcacgcgccctctctccattttgacctccctttcctcttcgttccccactcactgcaacggcgccggagatccgtcgctctcctcctcctcctcctcctcctcctcctcctccgccgcgatgggcgccaattccatgctctccgagtcctctcacgatctcgacgaccagatctcccagctcatgcagtgcaagccactctccgagcaacaggtcagaggtttatgtgagaaggctaaggagattttaatggatgaaagtaatgttcagcctgttaaaagccctgtgacaatttgtggcgatattcatgggcaatttcatgatcttgctgaactgtttcgaattggagggaagtgtccagatactaactacttgtttatgggtgattatgtggaccggggttattattcagttgagactgtatcgctccttgtggcactgaaagttcggtatccccagcgaattactattcttagaggaaaccatgaaagccgtcagattactcaagtatatggattttatgatgaatgccttagaaagtatggtaatgctaatgtttggaagacctttacagacctttttgatttttttccattgactgcattggttgaatctgaaatattctgtttgcatggtggactgtcaccttcaattgagacccttgataacataaggaactttgatcgtgttcaagaggttcctcatgaaggccccatgtgtgatctattgtggtctgacccagatgacagatgtggctggggaatttctcctcgtggtgctggatatacttttggccaggatatatctgaacaattcaatcacactaacagccttaaattgattgctagagctcatcagcttgttatggatggatttaactgggctcatgaacaaaaggtggttaccatttttagtgcacctaactactgttaccgatgtgggaacatggcttccatattggaggttgatgattgcaagggtcacacattcatccagtttgaacctgctcctaggagaggagaacctgatgtcactcgtagaacgcctgattacttcttataatgtagctgttgaatgtcatactgttatatcatggttacctctactgcactaatttcaggcaggtaacattccactgattacactcgaggaattgctggacaccttgtctggagaagtcgccaagatgatgtcataatacgtattgttccagcaaaatgtggtcttttttttttttttttcgtgtttattttttgtatcttatgttcagtaactcccttttatggctttacaagctatatgactggattttgttggtcgc

SEQ ID NO: 58233 - protein, 313 aa, Glycine max
  peptide (1)..(313): Ceres Seq. ID no. 14315355
  misc_feature (54)..(249): Pfam Name: Calcineurin-like phosphoesterase Pfam Description: Calcineurin-like phosphoesterase
  misc_feature (1)..(313): Homolog of NCBI NO: 7435135 NR Description: phosphoprotein phosphatase (EC 3.1.3.16) 2a1
  misc_feature (5)..(313): Homolog of NCBI NO: 81694 NR Description: phosphoprotein phosphatase (EC 3.1.3.16) 2A
  misc_feature (5)..(313): Homolog of NCBI NO: 1352668 NR Description: SERINE/THREONINE PROTEIN PHOSPHATASE PP2A
  misc_feature (10)..(313): Homolog of NCBI NO: 11134218 NR Description: Serine/threonine protein phosphatase PP2A-2
  misc_feature (8)..(313): Homolog of NCBI NO: 11133821 NR Description: Serine/threonine protein phosphatase PP2A
  misc_feature (8)..(313): Homolog of NCBI NO: 418777 NR Description: phosphoprotein phosphatase (EC 3.1.3.16) 2A-alpha
  misc_feature (1)..(313): Homolog of NCBI NO: 18405985 NR Description: protein phosphatase 2A (PP2A) [Arabidopsis
  misc_feature (1)..(313): Homolog of NCBI NO: 18410971 NR Description: protein phosphatase PP2A catalytic subunit
  misc_feature (1)..(313): Homolog of NCBI NO: 548441 NR Description: SERINE/THREONINE PROTEIN PHOSPHATASE PP2A
  misc_feature (1)..(313): Homolog of NCBI NO: 7248363 NR Description: type 2A protein phosphatase-3 [Vicia faba]
MGANSMLSESSHDLDDQISQLMQCKPLSEQQVRGLCEKAKEILMDESNVQPVKSPVTICGDIHGQFHDLAELFRIGGKCPDTNYLFMGDYVDRGYYSVETVSLLVALKVRYPQRITILRGNHESRQITQVYGFYDECLRKYGNANVWKTFTDLFDFFPLTALVESEIFCLHGGLSPSIETLDNIRNFDRVQEVPHEGPMCDLLWSDPDDRCGWGISPRGAGYTFGQDISEQFNHTNSLKLIARAHQLVMDGFNWAHEQKVVTIFSAPNYCYRCGNMASILEVDDCKGHTFIQFEPAPRRGEPDVTRRTPDYFL

SEQ ID NO: 58234 - protein, 308 aa, Glycine max
  peptide (1)..(308): Ceres Seq. ID no. 14315356
  misc_feature (49)..(244): Pfam Name: Calcineurin-like phosphoesterase Pfam Description: Calcineurin-like phosphoesterase
  misc_feature (1)..(308): Homolog of NCBI NO: 7435135 NR Description: phosphoprotein phosphatase (EC 3.1.3.16) 2a1
  misc_feature (1)..(308): Homolog of NCBI NO: 81694 NR Description: phosphoprotein phosphatase (EC 3.1.3.16) 2A
  misc_feature (1)..(308): Homolog of NCBI NO: 1352668 NR Description: SERINE/THREONINE PROTEIN PHOSPHATASE PP2A
  misc_feature (5)..(308): Homolog of NCBI NO: 11134218 NR Description: Serine/threonine protein phosphatase PP2A-2
  misc_feature (3)..(308): Homolog of NCBI NO: 11133821 NR Description: Serine/threonine protein phosphatase PP2A
  misc_feature (3)..(308): Homolog of NCBI NO: 418777 NR Description: phosphoprotein phosphatase (EC 3.1.3.16) 2A-alpha
  misc_feature (1)..(308): Homolog of NCBI NO: 18405985 NR Description: protein phosphatase 2A (PP2A) [Arabidopsis
  misc_feature (1)..(308): Homolog of NCBI NO: 18410971 NR Description: protein phosphatase PP2A catalytic subunit
  misc_feature (1)..(308): Homolog of NCBI NO: 548441 NR Description: SERINE/THREONINE PROTEIN PHOSPHATASE PP2A
  misc_feature (1)..(308): Homolog of NCBI NO: 7248363 NR Description: type 2A protein phosphatase-3 [Vicia faba]
MLSESSHDLDDQISQLMQCKPLSEQQVRGLCEKAKEILMDESNVQPVKSPVTICGDIHGQFHDLAELFRIGGKCPDTNYLFMGDYVDRGYYSVETVSLLVALKVRYPQRITILRGNHESRQITQVYGFYDECLRKYGNANVWKTFTDLFDFFPLTALVESEIFCLHGGLSPSIETLDNIRNFDRVQEVPHEGPMCDLLWSDPDDRCGWGISPRGAGYTFGQDISEQFNHTNSLKLIARAHQLVMDGFNWAHEQKVVTIFSAPNYCYRCGNMASILEVDDCKGHTFIQFEPAPRRGEPDVTRRTPDYFL

SEQ ID NO: 58235 - protein, 292 aa, Glycine max
  peptide (1)..(292): Ceres Seq. ID no. 14315357
  misc_feature (33)..(228): Pfam Name: Calcineurin-like phosphoesterase Pfam Description: Calcineurin-like phosphoesterase
  misc_feature (1)..(292): Homolog of NCBI NO: 7435135 NR Description: phosphoprotein phosphatase (EC 3.1.3.16) 2a1
  misc_feature (1)..(292): Homolog of NCBI NO: 81694 NR Description: phosphoprotein phosphatase (EC 3.1.3.16) 2A
  misc_feature (1)..(292): Homolog of NCBI NO: 1352668 NR Description: SERINE/THREONINE PROTEIN PHOSPHATASE PP2A
  misc_feature (1)..(292): Homolog of NCBI NO: 11134218 NR Description: Serine/threonine protein phosphatase PP2A-2
  misc_feature (1)..(292): Homolog of NCBI NO: 11133821 NR Description: Serine/threonine protein phosphatase PP2A
  misc_feature (1)..(292): Homolog of NCBI NO: 418777 NR Description: phosphoprotein phosphatase (EC 3.1.3.16) 2A-alpha
  misc_feature (1)..(292): Homolog of NCBI NO: 18405985 NR Description: protein phosphatase 2A (PP2A) [Arabidopsis
  misc_feature (1)..(292): Homolog of NCBI NO: 18410971 NR Description: protein phosphatase PP2A catalytic subunit
  misc_feature (1)..(292): Homolog of NCBI NO: 548441 NR Description: SERINE/THREONINE PROTEIN PHOSPHATASE PP2A
  misc_feature (1)..(292): Homolog of NCBI NO: 7248363 NR Description: type 2A protein phosphatase-3 [Vicia faba]
MQCKPLSEQQVRGLCEKAKEILMDESNVQPVKSPVTICGDIHGQFHDLAELFRIGGKCPDTNYLFMGDYVDRGYYSVETVSLLVALKVRYPQRITILRGNHESRQITQVYGFYDECLRKYGNANVWKTFTDLFDFFPLTALVESEIFCLHGGLSPSIETLDNIRNFDRVQEVPHEGPMCDLLWSDPDDRCGWGISPRGAGYTFGQDISEQFNHTNSLKLIARAHQLVMDGFNWAHEQKVVTIFSAPNYCYRCGNMASILEVDDCKGHTFIQFEPAPRRGEPDVTRRTPDYFL

SEQ ID NO: 58236 - DNA, 1228 bp, Glycine max
  misc_feature (1)..(1228): Ceres Seq. ID no. 13594412
attttaactcaaaacatagaattgttgaaggaacaaaacgtgtgtgtctgtcttacaaggtttagtagtgactatggagcagagcattggtggacaatctagcatacaatgcatatttctacgcaaggactgcttctcctcaaagctcgcgtctcttccaacttctccttccgagatgccctttggtcacaaccgttggtttcgcaggttgtcggtttttccacgtttgcaactatgtcaagggctgagaaagggtttctccaaaaacatggcttgcagtgtcagtgtggataattgtgatacggttcatccagcaacagatgcttatgctggagaggcagttgaagctttgaaagctgggaaagtcattgcagtaccaactgatacactctatggatttgcttgtgatgcttgctcaatggaagcagttaacagaatttatgagattaaaggccgtagacatacaagcccagtggctatttgtgtcggtgacgtatcagatatagcccgttttgctgtcactgaccatttacctcatggtctgcttgattccctcctacctgggcctgttacagttgttctaaaacgaggggattcaagtattcttgaacgatctttgaacccaggatttgatagtataggagttagagtgcctgattgcaatttcatcaggatcattgcccgtggttcaggaactgccctagcccttaccagtgcaaacctaagtggccagccaagtagtctttccatcaaagattttgagaacctctgggaacactgtgcttttgtttatgatggtggtttgattccatcaagtcgtgcaggttcaacaattgtggacctcaccacaccacacaaatacagaatacttagacctggaagtgcaaaggaagagacagttgccatcttggagaagcattctttcgttgaggcagagaccacgtaacataagttgtgattcatttgcagtgtcacgttctagctaggcctaatgtttcacttgcaaaaaaaaaaacgcgttataaatgtatggtcattatgcttcaactaagttattctattctatttccattaatagcatagcaatacattcatataaaacttctatctagagcacgtgctatggaattgttgagaaactagtaaaatccaattctatgaatcatttgatgtatggatagcattattgttataatgaaaaaccaatcattactgcagggaatatttg

SEQ ID NO: 58237 - protein, 290 aa, Glycine max
  peptide (1)..(290): Ceres Seq. ID no. 13594413
  misc_feature (90)..(269): Pfam Name: yrdC domain Pfam Description: yrdC domain
  misc_feature (76)..(288): Homolog of NCBI NO: 17537239 NR Description: yrdC domain containing protein [Caenorhabditis
  misc_feature (74)..(286): Homolog of NCBI NO: 39591298 NR Description: Hypothetical protein CBG20783 [Caenorhabditis
  misc_feature (104)..(279): Homolog of NCBI NO: 28278078 NR Description: Similar to hypothetical protein MGC38336 [Xenopus
  misc_feature (22)..(172): Homolog of NCBI NO: 18424373 NR Description: expressed protein [Arabidopsis thaliana]
  misc_feature (89)..(286): Homolog of NCBI NO: 28573691 NR Description: CG33005-PB [Drosophila melanogaster]
  misc_feature (89)..(281): Homolog of NCBI NO: 31088868 NR Description: ischemia/reperfusion inducible protein [Homo
  misc_feature (89)..(281): Homolog of NCBI NO: 30691316 NR Description: YRDC protein [Homo sapiens]
  misc_feature (89)..(281): Homolog of NCBI NO: 30908964 NR Description: ischemia/reperfusion inducible protein [Mus
  misc_feature (89)..(281): Homolog of NCBI NO: 23956354 NR Description: hypothetical protein MGC38336 [Mus musculus]
  misc_feature (68)..(290): Homolog of NCBI NO: 9759323 NR Description: gene_id:MUP24.1~pir||T31603~similar to unknown
MEQSIGGQSSIQCIFLRKDCFSSKLASLPTSPSEMPFGHNRWFRRLSVFPRLQLCQGLRKGFSKNMACSVSVDNCDTVHPATDAYAGEAVEALKAGKVIAVPTDTLYGFACDACSMEAVNRIYEIKGRRHTSPVAICVGDVSDIARFAVTDHLPHGLLDSLLPGPVTVVLKRGDSSILERSLNPGFDSIGVRVPDCNFIRIIARGSGTALALTSANLSGQPSSLSIKDFENLWEHCAFVYDGGLIPSSRAGSTIVDLTTPHKYRILRPGSAKEETVAILEKHSFVEAETT

SEQ ID NO: 58238 - protein, 256 aa, Glycine max
  peptide (1)..(256): Ceres Seq. ID no. 13594414
  misc_feature (56)..(235): Pfam Name: yrdC domain Pfam Description: yrdC domain
  misc_feature (42)..(254): Homolog of NCBI NO: 17537239 NR Description: yrdC domain containing protein [Caenorhabditis
  misc_feature (40)..(252): Homolog of NCBI NO: 39591298 NR Description: Hypothetical protein CBG20783 [Caenorhabditis
  misc_feature (70)..(245): Homolog of NCBI NO: 28278078 NR Description: Similar to hypothetical protein MGC38336 [Xenopus
  misc_feature (1)..(138): Homolog of NCBI NO: 18424373 NR Description: expressed protein [Arabidopsis thaliana]
  misc_feature (55)..(252): Homolog of NCBI NO: 28573691 NR Description: CG33005-PB [Drosophila melanogaster]
  misc_feature (55)..(247): Homolog of NCBI NO: 31088868 NR Description: ischemia/reperfusion inducible protein [Homo
  misc_feature (55)..(247): Homolog of NCBI NO: 30691316 NR Description: YRDC protein [Homo sapiens]
  misc_feature (55)..(247): Homolog of NCBI NO: 30908964 NR Description: ischemia/reperfusion inducible protein [Mus
  misc_feature (55)..(247): Homolog of NCBI NO: 23956354 NR Description: hypothetical protein MGC38336 [Mus musculus]
  misc_feature (34)..(256): Homolog of NCBI NO: 9759323 NR Description: gene_id:MUP24.1~pir||T31603~similar to unknown
MPFGHNRWFRRLSVFPRLQLCQGLRKGFSKNMACSVSVDNCDTVHPATDAYAGEAVEALKAGKVIAVPTDTLYGFACDACSMEAVNRIYEIKGRRHTSPVAICVGDVSDIARFAVTDHLPHGLLDSLLPGPVTVVLKRGDSSILERSLNPGFDSIGVRVPDCNFIRIIARGSGTALALTSANLSGQPSSLSIKDFENLWEHCAFVYDGGLIPSSRAGSTIVDLTTPHKYRILRPGSAKEETVAILEKHSFVEAETT

SEQ ID NO: 58239 - protein, 225 aa, Glycine max
  peptide (1)..(225): Ceres Seq. ID no. 13594415
  misc_feature (25)..(204): Pfam Name: yrdC domain Pfam Description: yrdC domain
  misc_feature (11)..(223): Homolog of NCBI NO: 17537239 NR Description: yrdC domain containing protein [Caenorhabditis
  misc_feature (9)..(221): Homolog of NCBI NO: 39591298 NR Description: Hypothetical protein CBG20783 [Caenorhabditis
  misc_feature (39)..(214): Homolog of NCBI NO: 28278078 NR Description: Similar to hypothetical protein MGC38336 [Xenopus
  misc_feature (1)..(107): Homolog of NCBI NO: 18424373 NR Description: expressed protein [Arabidopsis thaliana]
  misc_feature (24)..(221): Homolog of NCBI NO: 28573691 NR Description: CG33005-PB [Drosophila melanogaster]
  misc_feature (24)..(216): Homolog of NCBI NO: 31088868 NR Description: ischemia/reperfusion inducible protein [Homo
  misc_feature (24)..(216): Homolog of NCBI NO: 30691316 NR Description: YRDC protein [Homo sapiens]
  misc_feature (24)..(216): Homolog of NCBI NO: 30908964 NR Description: ischemia/reperfusion inducible protein [Mus
  misc_feature (24)..(216): Homolog of NCBI NO: 23956354 NR Description: hypothetical protein MGC38336 [Mus musculus]
  misc_feature (3)..(225): Homolog of NCBI NO: 9759323 NR Description: gene_id:MUP24.1~pir||T31603~similar to unknown
MACSVSVDNCDTVHPATDAYAGEAVEALKAGKVIAVPTDTLYGFACDACSMEAVNRIYEIKGRRHTSPVAICVGDVSDIARFAVTDHLPHGLLDSLLPGPVTVVLKRGDSSILERSLNPGFDSIGVRVPDCNFIRIIARGSGTALALTSANLSGQPSSLSIKDFENLWEHCAFVYDGGLIPSSRAGSTIVDLTTPHKYRILRPGSAKEETVAILEKHSFVEAETT

SEQ ID NO: 58240 - DNA, 559 bp, Glycine max
  misc_feature (1)..(559): Ceres Seq. ID no. 12608605
attgcaggctcgtagttgtagtgcgaggggacgagttgtttgttcgttaacagttagttaggatggcgagcggtggaaaggtttcgttcaaagtaaccctcacctccgatccaaagcttcccttcaaagtgttcagcgttccagaggctgcacctttcactgccgttctgaaatttgcagcagaagaattcaaagtgcctccccagaccagcgccatcatcaccaatgatggtgttgggataaatcctcagcaaagtgcaggtaatgtcttccttaagcatggttcagagctacgtctgattcctcgtgatagggtcggtgcatatgagatgtttcgagatatctgattagtggctaattaccttcttcattatttatctcgaggagtgtagcttaataaacaccagtattacactattactgatatcatgtagtaattgatttatcggtgtccctatgagataaattttatgtgaataatgaatacatatttgggaaaatgatatatatgtagtcttccctcctttgaacttttaatttatttctgatttttgtcggt

SEQ ID NO: 58241 - protein, 94 aa, Glycine max
  peptide (1)..(94): Ceres Seq. ID no. 12608606
  misc_feature (5)..(80): Pfam Name: Uncharacterised protein family (UPF0185) Pfam Description: Uncharacterised protein family (UPF0185)
  misc_feature (6)..(80): Homolog of NCBI NO: 1235522 NR Description: ORF is homologous to hypothetical 9.8 kD protein
  misc_feature (6)..(86): Homolog of NCBI NO: 28277496 NR Description: Similar to RIKEN cDNA 1810045K17 gene [Danio
  misc_feature (6)..(86): Homolog of NCBI NO: 37595394 NR Description: hypothetical protein BM-002 [Danio rerio]
  misc_feature (6)..(87): Homolog of NCBI NO: 7705300 NR Description: hypothetical protein BM-002 [Homo sapiens]
  misc_feature (2)..(87): Homolog of NCBI NO: 40889046 NR Description: Chain A, Solution Structure Of Mouse Hypothetical
  misc_feature (3)..(86): Homolog of NCBI NO: 17557033 NR Description: Eukaryotic protein similar to human bone marrow
  misc_feature (2)..(88): Homolog of NCBI NO: 39589640 NR Description: Hypothetical protein CBG12253 [Caenorhabditis
  misc_feature (6)..(92): Homolog of NCBI NO: 20140686 NR Description: Hypothetical protein pr46A
  misc_feature (2)..(87): Homolog of NCBI NO: 34905822 NR Description: P0483G10.15 [Oryza sativa (japonica
  misc_feature (1)..(87): Homolog of NCBI NO: 15217447 NR Description: unknown protein
MASGGKVSFKVTLTSDPKLPFKVFSVPEAAPFTAVLKFAAEEFKVPPQTSAIITNDGVGINPQQSAGNVFLKHGSELRLIPRDRVGAYEMFRDI

SEQ ID NO: 58242 - DNA, 1918 bp, Glycine max
  misc_feature (1)..(1918): Ceres Seq. ID no. 14315317
aaaatcttcattgcttcctcactcaccggcgcctactcatatcacagatcatagataaataataccaatacttcatagtattcacgaaccattctatttccattcggcagcaacaaaatcaccatccttcttctgcaccgcaatgctcttcctcttccctccgtcattagtttgttagttagattacccttttcccttccatgcttacgtcaccaccgctcaccattcactctctttttacccctaaaccattgaatcgatctaaatctctcccaaatcgcaaaccccttttgctcaattgagtcaattctctccctaagttcctctgtcggcgtctgggtgggtaaaagttgttgttttgtcttctgggttttggagcaaagacaaaagatgggtgagggagaacgtttccagcttgggactgtgggtgcgttgactctttctgtggtctcatctgtgtccattgtgatttgcaataaggcgctgatgagttcactgcatttcattttcgctacaactttgaccagctggcatctgcttgtcacgttttgttcccttcatgtggcgctcaaaatgagattctttgagcacaaaccttttgagcagaaagctgtaatgggattcgggattttaaatgggatctcaattggacttttaaatttgagcctggggttcaattccgttggcttctatcaaatgactaagctggcaatcattccttgtactgtattgttggagaccatttttcttgggaagagattcagtaagagaattcaatttgccctcagtatcctccttttgggtgtcgggattgctactgtcacagatttgcagctcaatgctctgggctctttcttatcttttcttgcagtgattacaacttgtgttgctcagattatgacaaatactatccagaagaagtacaaggtttcttccacccagcttctgtatcaatcatgtccatatcaagcagcaaccctgttaatcgctggtccatatctggataaacttttgaccaaccaaaatgtatttggtttcaagtatacgacacaagtgacggttttcataattctttcctgccttatctccatctctgtcaatttcagtacgttccttgttattggaaagacatctccagtcacctatcaggttcttggacacctgaagacatgccttgtattggcatttggttatatacttctccgagacccatttagctggagaaacatactgggtattttgatagccatgattgggatgattctatattcttactattgcactctcgagaatcagcaaaaaactgttgaagctgcatcacaatcatcccaggcaagagaagatgaatctgatcctctgatgaatgtggaaaatggaagtgcagttgtgagttctaatgtcggacaaagacaaatgtcccctgtatggagcaagagcaaagactagtatgtttaatgggctttgttttagcattgtcaagaacagttttatagtccctatagagggttaacacccgtaatccatgaggaattagaaagtggaagtgctgccaaacacatgtcctagtcatttttaatagctttagtctaatatttttatgaatcgtttgccgaccaacagtattagggaagggaacaagcacatggtcatgtcgtaattctattggccaacaaatatgtcttatagtaacatacatctcctggtgatgttttcatatcatgatacatttatgattttatatagatattcaaactttttcttggcttgaatagcatataaacacctactggtaattctttttctcccttattatctctatttgtattcctatactaatagtagtaatttattcaagtccatttttttattttagaaactgaacttattcgaagcatgaggaccacattatattgttttc

SEQ ID NO: 58243 - protein, 351 aa, Glycine max
  peptide (1)..(351): Ceres Seq. ID no. 14315318
  misc_feature (162)..(295): Pfam Name: Integral membrane protein DUF6 Pfam Description: Integral membrane protein DUF6
  misc_feature (1)..(319): Homolog of NCBI NO: 18411172 NR Description: transporter-related [Arabidopsis thaliana]
  misc_feature (12)..(302): Homolog of NCBI NO: 15238957 NR Description: transporter-related [Arabidopsis thaliana]
  misc_feature (103)..(335): Homolog of NCBI NO: 37535412 NR Description: putative
  misc_feature (103)..(351): Homolog of NCBI NO: 25406945 NR Description: hypothetical protein [imported] - Arabidopsis
  misc_feature (3)..(335): Homolog of NCBI NO: 13384378 NR Description: putative phosphate translocator
  misc_feature (1)..(328): Homolog of NCBI NO: 30683853 NR Description: transporter-related [Arabidopsis thaliana]
  misc_feature (4)..(347): Homolog of NCBI NO: 13699188 NR Description: putative glucose-6-phosphate/phosphate-tranlocat
  misc_feature (1)..(347): Homolog of NCBI NO: 34896140 NR Description: P0701D05.25 [Oryza sativa (japonica
  misc_feature (1)..(351): Homolog of NCBI NO: 27311731 NR Description: putative integral membrane protein [Arabidopsis
  misc_feature (1)..(351): Homolog of NCBI NO: 22329373 NR Description: transporter-related [Arabidopsis thaliana]
MGEGERFQLGTVGALTLSVVSSVSIVICNKALMSSLHFIFATTLTSWHLLVTFCSLHVALKMRFFEHKPFEQKAVMGFGILNGISIGLLNLSLGFNSVGFYQMTKLAIIPCTVLLETIFLGKRFSKRIQFALSILLLGVGIATVTDLQLNALGSFLSFLAVITTCVAQIMTNTIQKKYKVSSTQLLYQSCPYQAATLLIAGPYLDKLLTNQNVFGFKYTTQVTVFIILSCLISISVNFSTFLVIGKTSPVTYQVLGHLKTCLVLAFGYILLRDPFSWRNILGILIAMIGMILYSYYCTLENQQKTVEAASQSSQAREDESDPLMNVENGSAVVSSNVGQRQMSPVWSKSKD

SEQ ID NO: 58244 - protein, 319 aa, Glycine max
  peptide (1)..(319): Ceres Seq. ID no. 14315319
  misc_feature (130)..(263): Pfam Name: Integral membrane protein DUF6 Pfam Description: Integral membrane protein DUF6
  misc_feature (1)..(287): Homolog of NCBI NO: 18411172 NR Description: transporter-related [Arabidopsis thaliana]
  misc_feature (1)..(270): Homolog of NCBI NO: 15238957 NR Description: transporter-related [Arabidopsis thaliana]
  misc_feature (71)..(303): Homolog of NCBI NO: 37535412 NR Description: putative
  misc_feature (71)..(319): Homolog of NCBI NO: 25406945 NR Description: hypothetical protein [imported] - Arabidopsis
  misc_feature (1)..(303): Homolog of NCBI NO: 13384378 NR Description: putative phosphate translocator
  misc_feature (1)..(296): Homolog of NCBI NO: 30683853 NR Description: transporter-related [Arabidopsis thaliana]
  misc_feature (1)..(315): Homolog of NCBI NO: 13699188 NR Description: putative glucose-6-phosphate/phosphate-tranlocat
  misc_feature (1)..(315): Homolog of NCBI NO: 34896140 NR Description: P0701D05.25 [Oryza sativa (japonica
  misc_feature (1)..(319): Homolog of NCBI NO: 27311731 NR Description: putative integral membrane protein [Arabidopsis
  misc_feature (1)..(319): Homolog of NCBI NO: 22329373 NR Description: transporter-related [Arabidopsis thaliana]
MSSLHFIFATTLTSWHLLVTFCSLHVALKMRFFEHKPFEQKAVMGFGILNGISIGLLNLSLGFNSVGFYQMTKLAIIPCTVLLETIFLGKRFSKRIQFALSILLLGVGIATVTDLQLNALGSFLSFLAVITTCVAQIMTNTIQKKYKVSSTQLLYQSCPYQAATLLIAGPYLDKLLTNQNVFGFKYTTQVTVFIILSCLISISVNFSTFLVIGKTSPVTYQVLGHLKTCLVLAFGYILLRDPFSWRNILGILIAMIGMILYSYYCTLENQQKTVEAASQSSQAREDESDPLMNVENGSAVVSSNVGQRQMSPVWSKSKD

SEQ ID NO: 58245 - protein, 290 aa, Glycine max
  peptide (1)..(290): Ceres Seq. ID no. 14315320
  misc_feature (101)..(234): Pfam Name: Integral membrane protein DUF6 Pfam Description: Integral membrane protein DUF6
  misc_feature (1)..(258): Homolog of NCBI NO: 18411172 NR Description: transporter-related [Arabidopsis thaliana]
  misc_feature (1)..(241): Homolog of NCBI NO: 15238957 NR Description: transporter-related [Arabidopsis thaliana]
  misc_feature (42)..(274): Homolog of NCBI NO: 37535412 NR Description: putative
  misc_feature (42)..(290): Homolog of NCBI NO: 25406945 NR Description: hypothetical protein [imported] - Arabidopsis
  misc_feature (1)..(274): Homolog of NCBI NO: 13384378 NR Description: putative phosphate translocator
  misc_feature (1)..(267): Homolog of NCBI NO: 30683853 NR Description: transporter-related [Arabidopsis thaliana]
  misc_feature (1)..(286): Homolog of NCBI NO: 13699188 NR Description: putative glucose-6-phosphate/phosphate-tranlocat
  misc_feature (1)..(286): Homolog of NCBI NO: 34896140 NR Description: P0701D05.25 [Oryza sativa (japonica
  misc_feature (1)..(290): Homolog of NCBI NO: 27311731 NR Description: putative integral membrane protein [Arabidopsis
  misc_feature (1)..(290): Homolog of NCBI NO: 22329373 NR Description: transporter-related [Arabidopsis thaliana]
MRFFEHKPFEQKAVMGFGILNGISIGLLNLSLGFNSVGFYQMTKLAIIPCTVLLETIFLGKRFSKRIQFALSILLLGVGIATVTDLQLNALGSFLSFLAVITTCVAQIMTNTIQKKYKVSSTQLLYQSCPYQAATLLIAGPYLDKLLTNQNVFGFKYTTQVTVFIILSCLISISVNFSTFLVIGKTSPVTYQVLGHLKTCLVLAFGYILLRDPFSWRNILGILIAMIGMILYSYYCTLENQQKTVEAASQSSQAREDESDPLMNVENGSAVVSSNVGQRQMSPVWSKSKD

SEQ ID NO: 58246 - protein, 249 aa, Glycine max
  peptide (1)..(249): Ceres Seq. ID no. 14315321
  misc_feature (60)..(193): Pfam Name: Integral membrane protein DUF6 Pfam Description: Integral membrane protein DUF6
  misc_feature (1)..(217): Homolog of NCBI NO: 18411172 NR Description: transporter-related [Arabidopsis thaliana]
  misc_feature (1)..(200): Homolog of NCBI NO: 15238957 NR Description: transporter-related [Arabidopsis thaliana]
  misc_feature (1)..(233): Homolog of NCBI NO: 37535412 NR Description: putative
  misc_feature (1)..(249): Homolog of NCBI NO: 25406945 NR Description: hypothetical protein [imported] - Arabidopsis
  misc_feature (1)..(233): Homolog of NCBI NO: 13384378 NR Description: putative phosphate translocator
  misc_feature (1)..(226): Homolog of NCBI NO: 30683853 NR Description: transporter-related [Arabidopsis thaliana]
  misc_feature (1)..(245): Homolog of NCBI NO: 13699188 NR Description: putative glucose-6-phosphate/phosphate-tranlocat
  misc_feature (1)..(245): Homolog of NCBI NO: 34896140 NR Description: P0701D05.25 [Oryza sativa (japonica
  misc_feature (1)..(249): Homolog of NCBI NO: 27311731 NR Description: putative integral membrane protein [Arabidopsis
  misc_feature (1)..(249): Homolog of NCBI NO: 22329373 NR Description: transporter-related [Arabidopsis thaliana]
MTKLAIIPCTVLLETIFLGKRFSKRIQFALSILLLGVGIATVTDLQLNALGSFLSFLAVITTCVAQIMTNTIQKKYKVSSTQLLYQSCPYQAATLLIAGPYLDKLLTNQNVFGFKYTTQVTVFIILSCLISISVNFSTFLVIGKTSPVTYQVLGHLKTCLVLAFGYILLRDPFSWRNILGILIAMIGMILYSYYCTLENQQKTVEAASQSSQAREDESDPLMNVENGSAVVSSNVGQRQMSPVWSKSKD

SEQ ID NO: 58247 - DNA, 1097 bp, Glycine max
  misc_feature (1)..(1097): Ceres Seq. ID no. 14305259
gattcctcttcattcttcaataactccaatgtattccttagctcaacacaagtatacaccaaacttccaccaccaagtttgcaagaaccatccaccccgtcacccgtctcgagtacattgttctaccacaaccactaccaccaccacctctaggtctaagtccaatgctaagtcattggtcattgagacccggctcgtgccggtgccgccaatgccaacggtcgttaccactgagatccaccgtccaatgaacaatgacccaagtttgcaatcaacatggtctcatagagcttgggtggcagctggatgctcaactttggtcatttccttgggagagtccataaagggtgctattgatttgaacatgtgggttgagcccattgtggcaggttgggttggatacatcttagctgatcttggatcaggggtttaccattgggccatcgacaattatggcgatggctcaaccccaatagttggggctcaaattgaagcctttcaaggccaccacaagtggccttggaccatcactaggcgtcaatttgctaacaatttacatgcattggcacgtgcagtgaccttggcagtgcttcctgtagtccttctttgccatgaccctattgttgaaggatttgttgtggtgtgctcaggttgcatcatgtttagccaacagtttcatgcatggtcacatggcactaagagccggcttccgccactcgtggtggcattacaagaggccggcgtgctcgtgtcacggtggcaacatgccgcacaccaccgggcaccatataacaataactattgtatagtgagtggagtgtggaatgagtttttggataagcataaggtctttgaagccatggaaatggtattgtattttaaaacaggagttaggccaaggtcatggagtgaacctgcccctgagtgggttgaggagattgagactccttctcaaatccaaatccaaacccaatgaatgatgtttattctcttctccatttatttttaaaccatttataacacacatgtgtcaatgtagcttttgggtaatgtaaattacattatatttaaattataaagcttgaaaggttaaatac

SEQ ID NO: 58248 - protein, 324 aa, Glycine max
  peptide (1)..(324): Ceres Seq. ID no. 14305260
  misc_feature (103)..(314): Homolog of NCBI NO: 40806193 NR Description: ubiquitin-conjugating enzyme variant Kua [Homo
  misc_feature (103)..(314): Homolog of NCBI NO: 7208823 NR Description: dJ1185N5.1.1 (ubiquitin-conjugating enzyme E2
  misc_feature (113)..(300): Homolog of NCBI NO: 13397952 NR Description: hypothetical protein [Myxococcus xanthus]
  misc_feature (133)..(300): Homolog of NCBI NO: 19921580 NR Description: CG10723-PA [Drosophila melanogaster]
  misc_feature (104)..(301): Homolog of NCBI NO: 31232784 NR Description: ENSANGP00000013131 [Anopheles gambiae]
  misc_feature (247)..(314): Homolog of NCBI NO: 14488086 NR Description: AT4g27030/F10M23_370 [Arabidopsis thaliana]
  misc_feature (69)..(319): Homolog of NCBI NO: 38637069 NR Description: hypothetical protein [Oryza sativa (japonica
  misc_feature (37)..(305): Homolog of NCBI NO: 15227763 NR Description: hypothetical protein [Arabidopsis thaliana]
  misc_feature (35)..(315): Homolog of NCBI NO: 15220724 NR Description: hypothetical protein [Arabidopsis thaliana]
  misc_feature (29)..(314): Homolog of NCBI NO: 15236949 NR Description: hypothetical protein [Arabidopsis thaliana]
IPLHSSITPMYSLAQHKYTPNFHHQVCKNHPPRHPSRVHCSTTTTTTTTSRSKSNAKSLVIETRLVPVPPMPTVVTTEIHRPMNNDPSLQSTWSHRAWVAAGCSTLVISLGESIKGAIDLNMWVEPIVAGWVGYILADLGSGVYHWAIDNYGDGSTPIVGAQIEAFQGHHKWPWTITRRQFANNLHALARAVTLAVLPVVLLCHDPIVEGFVVVCSGCIMFSQQFHAWSHGTKSRLPPLVVALQEAGVLVSRWQHAAHHRAPYNNNYCIVSGVWNEFLDKHKVFEAMEMVLYFKTGVRPRSWSEPAPEWVEEIETPSQIQIQTQ

SEQ ID NO: 58249 - protein, 315 aa, Glycine max
  peptide (1)..(315): Ceres Seq. ID no. 14305261
  misc_feature (94)..(305): Homolog of NCBI NO: 40806193 NR Description: ubiquitin-conjugating enzyme variant Kua [Homo
  misc_feature (94)..(305): Homolog of NCBI NO: 7208823 NR Description: dJ1185N5.1.1 (ubiquitin-conjugating enzyme E2
  misc_feature (104)..(291): Homolog of NCBI NO: 13397952 NR Description: hypothetical protein [Myxococcus xanthus]
  misc_feature (124)..(291): Homolog of NCBI NO: 19921580 NR Description: CG10723-PA [Drosophila melanogaster]
  misc_feature (95)..(292): Homolog of NCBI NO: 31232784 NR Description: ENSANGP00000013131 [Anopheles gambiae]
  misc_feature (238)..(305): Homolog of NCBI NO: 14488086 NR Description: AT4g27030/F10M23_370 [Arabidopsis thaliana]
  misc_feature (60)..(310): Homolog of NCBI NO: 38637069 NR Description: hypothetical protein [Oryza sativa (japonica
  misc_feature (28)..(296): Homolog of NCBI NO: 15227763 NR Description: hypothetical protein [Arabidopsis thaliana]
  misc_feature (26)..(306): Homolog of NCBI NO: 15220724 NR Description: hypothetical protein [Arabidopsis thaliana]
  misc_feature (20)..(305): Homolog of NCBI NO: 15236949 NR Description: hypothetical protein [Arabidopsis thaliana]
MYSLAQHKYTPNFHHQVCKNHPPRHPSRVHCSTTTTTTTTSRSKSNAKSLVIETRLVPVPPMPTVVTTEIHRPMNNDPSLQSTWSHRAWVAAGCSTLVISLGESIKGAIDLNMWVEPIVAGWVGYILADLGSGVYHWAIDNYGDGSTPIVGAQIEAFQGHHKWPWTITRRQFANNLHALARAVTLAVLPVVLLCHDPIVEGFVVVCSGCIMFSQQFHAWSHGTKSRLPPLVVALQEAGVLVSRWQHAAHHRAPYNNNYCIVSGVWNEFLDKHKVFEAMEMVLYFKTGVRPRSWSEPAPEWVEEIETPSQIQIQTQ

SEQ ID NO: 58250 - protein, 254 aa, Glycine max
  peptide (1)..(254): Ceres Seq. ID no. 14305262
  misc_feature (33)..(244): Homolog of NCBI NO: 40806193 NR Description: ubiquitin-conjugating enzyme variant Kua [Homo
  misc_feature (33)..(244): Homolog of NCBI NO: 7208823 NR Description: dJ1185N5.1.1 (ubiquitin-conjugating enzyme E2
  misc_feature (43)..(230): Homolog of NCBI NO: 13397952 NR Description: hypothetical protein [Myxococcus xanthus]
  misc_feature (63)..(230): Homolog of NCBI NO: 19921580 NR Description: CG10723-PA [Drosophila melanogaster]
  misc_feature (34)..(231): Homolog of NCBI NO: 31232784 NR Description: ENSANGP00000013131 [Anopheles gambiae]
  misc_feature (177)..(244): Homolog of NCBI NO: 14488086 NR Description: AT4g27030/F10M23_370 [Arabidopsis thaliana]
  misc_feature (1)..(249): Homolog of NCBI NO: 38637069 NR Description: hypothetical protein [Oryza sativa (japonica
  misc_feature (1)..(235): Homolog of NCBI NO: 15227763 NR Description: hypothetical protein [Arabidopsis thaliana]
  misc_feature (1)..(245): Homolog of NCBI NO: 15220724 NR Description: hypothetical protein [Arabidopsis thaliana]
  misc_feature (1)..(244): Homolog of NCBI NO: 15236949 NR Description: hypothetical protein [Arabidopsis thaliana]
MPTVVTTEIHRPMNNDPSLQSTWSHRAWVAAGCSTLVISLGESIKGAIDLNMWVEPIVAGWVGYILADLGSGVYHWAIDNYGDGSTPIVGAQIEAFQGHHKWPWTITRRQFANNLHALARAVTLAVLPVVLLCHDPIVEGFVVVCSGCIMFSQQFHAWSHGTKSRLPPLVVALQEAGVLVSRWQHAAHHRAPYNNNYCIVSGVWNEFLDKHKVFEAMEMVLYFKTGVRPRSWSEPAPEWVEEIETPSQIQIQTQ

SEQ ID NO: 58251 - DNA, 1860 bp, Glycine max
  misc_feature (1)..(1860): Ceres Seq. ID no. 14316424
tcttccattcatttgcatctcattctgaatcttgcgccgtttccctctcccactcgccagtgttgcggaattttttagaagtgtgaatgttcgttcatgcatgagcggctcttaaagtttccttgcggattcgattgcgatatattgagactgcgatggcctcagccgtcgtgaatttcttgaacgcgacgttggattgggtgacgtttgcgtcggatggtccttctgcgcgagctgtagttttcggagtccatatcggtggacatttgtttatcgaagtgtttttgctagttgtcatacttttcttgctttcacagaaaagttacaagcctcctaaaaggcctttaacaaataaggaaattgatgagttatgtgacgaatgggttccggaaccccttattccttctcttaataaagagttgcagtatgaaccaccagtgctggagagtgctgctgggccacataccataattaatggcaaagaagttgtcaattttgcttcagcaaactatcttgggtttataggtcatccaaagctacttgactcatgttcttctgctttagcgaaatacggtgttggttcttgtggtccccgtggattttatgggacaattgatgtccaccttgactgtgaagcaagaatagcaaaatttttaggaacccctgaatcaattctgtactcttatggactttccaccatgttcagtgcaattcccgctttctctaaaaaaggagatgtaattgtggcggatgagggagtccgctggggaatacagaatggcctttatctttctagaagcacagtggtgtattttaagcacaatgacatggattctttaagagaaactctagagaacattactgccaaatataagaaggccaagaatttgaggcgttatattgttattgaagctgtctaccagaattctggggaaatagcacccttggacgagatcattaaattgaaggaaaaatatcgctttcgtgttttgctagatgagagcaactcattgggtgtgcttggaagttctggaagaggtctcactgaatactgtggagttccagttgagaagatagacattataactgcttctatgggacatgcattggccacagaaggaggattctgcactggaagtacaagagttatagatcaccaacgattgagtagctctggttatgtcttttctgcttctttgcccccatatcttgcaagtgctgcaattacagctattgatgtcctggaggaaaatcccaatctgataaaaaagctgaagaaaaatattgcttttttaagaaaaggattgtcaaaaataccaggcatcacaattacaagtaatccagagtcacctattgtttatttgagattagagaaatcaagaggttccatgaaagatgacctgcatctgcttgaaaatatcgcggaacgggttttgaaagaagaatctgtatttgtggttgtttccaaaagatcaacattggacaaatgccgtttgcctgtgggaattagattgtttgtttctgctgggcattcagagtctgatctgctcaaggcatctgaatcattgaaaaaggttgtagcatcagtcctgggtggtcagaattgaacgctctacatctttctttttcatctaatgtaccaaaacataagttcgattccatgtgtttaggtgagcaattttgaaatccaggcgatagagaaagtcccgtagttcttaatttgtgtagtattttatgttccagtttagggtaacagtattttgtgcgtgttgctcattggttgtctaaagtagtagaataaggatttaatgtttcttgtcatgagttggggaatatacctatgaattacattccgatatc

SEQ ID NO: 58252 - protein, 483 aa, Glycine max
  peptide (1)..(483): Ceres Seq. ID no. 14316425
  misc_feature (141)..(474): Pfam Name: Aminotransferase class I and II Pfam Description: Aminotransferase class I and II
  misc_feature (37)..(479): Homolog of NCBI NO: 6685595 NR Description: Serine palmitoyltransferase 1 (Long chain base protein 1) (LCB 1) (Serine-palmitoyl-CoA transferase 1) (SPT 1)
  misc_feature (37)..(479): Homolog of NCBI NO: 29244577 NR Description: serine palmitoyltransferase subunit 1 [Mus
  misc_feature (37)..(479): Homolog of NCBI NO: 26354158 NR Description: unnamed protein product [Mus musculus]
  misc_feature (37)..(479): Homolog of NCBI NO: 6685592 NR Description: Serine palmitoyltransferase 1 (Long chain base protein 1) (LCB 1) (Serine-palmitoyl-CoA transferase 1) (SPT 1)
  misc_feature (37)..(479): Homolog of NCBI NO: 2853289 NR Description: serine palmitoyltransferase LCB1 subunit [Mus
  misc_feature (37)..(479): Homolog of NCBI NO: 5454084 NR Description: serine palmitoyltransferase subunit 1 isoform a
  misc_feature (1)..(479): Homolog of NCBI NO: 15451568 NR Description: Putative serine palmitoyltransferase [Oryza
  misc_feature (1)..(479): Homolog of NCBI NO: 37531898 NR Description: putative serine palmitoyltransferase
  misc_feature (1)..(479): Homolog of NCBI NO: 25407728 NR Description: serine C-palmitoyltransferase like protein
  misc_feature (1)..(479): Homolog of NCBI NO: 18419845 NR Description: serine C-palmitoyltransferase family [Arabidopsis
MASAVVNFLNATLDWVTFASDGPSARAVVFGVHIGGHLFIEVFLLVVILFLLSQKSYKPPKRPLTNKEIDELCDEWVPEPLIPSLNKELQYEPPVLESAAGPHTIINGKEVVNFASANYLGFIGHPKLLDSCSSALAKYGVGSCGPRGFYGTIDVHLDCEARIAKFLGTPESILYSYGLSTMFSAIPAFSKKGDVIVADEGVRWGIQNGLYLSRSTVVYFKHNDMDSLRETLENITAKYKKAKNLRRYIVIEAVYQNSGEIAPLDEIIKLKEKYRFRVLLDESNSLGVLGSSGRGLTEYCGVPVEKIDIITASMGHALATEGGFCTGSTRVIDHQRLSSSGYVFSASLPPYLASAAITAIDVLEENPNLIKKLKKNIAFLRKGLSKIPGITITSNPESPIVYLRLEKSRGSMKDDLHLLENIAERVLKEESVFVVVSKRSTLDKCRLPVGIRLFVSAGHSESDLLKASESLKKVVASVLGGQN

SEQ ID NO: 58253 - protein, 302 aa, Glycine max
  peptide (1)..(302): Ceres Seq. ID no. 14316426
  misc_feature (1)..(293): Pfam Name: Aminotransferase class I and II Pfam Description: Aminotransferase class I and II
  misc_feature (1)..(298): Homolog of NCBI NO: 6685595 NR Description: Serine palmitoyltransferase 1 (Long chain base protein 1) (LCB 1) (Serine-palmitoyl-CoA transferase 1) (SPT 1)
  misc_feature (1)..(298): Homolog of NCBI NO: 29244577 NR Description: serine palmitoyltransferase subunit 1 [Mus
  misc_feature (1)..(298): Homolog of NCBI NO: 26354158 NR Description: unnamed protein product [Mus musculus]
  misc_feature (1)..(298): Homolog of NCBI NO: 6685592 NR Description: Serine palmitoyltransferase 1 (Long chain base protein 1) (LCB 1) (Serine-palmitoyl-CoA transferase 1) (SPT 1)
  misc_feature (1)..(298): Homolog of NCBI NO: 2853289 NR Description: serine palmitoyltransferase LCB1 subunit [Mus
  misc_feature (1)..(298): Homolog of NCBI NO: 5454084 NR Description: serine palmitoyltransferase subunit 1 isoform a
  misc_feature (1)..(298): Homolog of NCBI NO: 15451568 NR Description: Putative serine palmitoyltransferase [Oryza
  misc_feature (1)..(298): Homolog of NCBI NO: 37531898 NR Description: putative serine palmitoyltransferase
  misc_feature (1)..(298): Homolog of NCBI NO: 25407728 NR Description: serine C-palmitoyltransferase like protein
  misc_feature (1)..(298): Homolog of NCBI NO: 18419845 NR Description: serine C-palmitoyltransferase family [Arabidopsis
MFSAIPAFSKKGDVIVADEGVRWGIQNGLYLSRSTVVYFKHNDMDSLRETLENITAKYKKAKNLRRYIVIEAVYQNSGEIAPLDEIIKLKEKYRFRVLLDESNSLGVLGSSGRGLTEYCGVPVEKIDIITASMGHALATEGGFCTGSTRVIDHQRLSSSGYVFSASLPPYLASAAITAIDVLEENPNLIKKLKKNIAFLRKGLSKIPGITITSNPESPIVYLRLEKSRGSMKDDLHLLENIAERVLKEESVFVVVSKRSTLDKCRLPVGIRLFVSAGHSESDLLKASESLKKVVASVLGGQN

SEQ ID NO: 58254 - protein, 259 aa, Glycine max
  peptide (1)..(259): Ceres Seq. ID no. 14316427
  misc_feature (1)..(250): Pfam Name: Aminotransferase class I and II Pfam Description: Aminotransferase class I and II
  misc_feature (1)..(255): Homolog of NCBI NO: 6685595 NR Description: Serine palmitoyltransferase 1 (Long chain base protein 1) (LCB 1) (Serine-palmitoyl-CoA transferase 1) (SPT 1)
  misc_feature (1)..(255): Homolog of NCBI NO: 29244577 NR Description: serine palmitoyltransferase subunit 1 [Mus
  misc_feature (1)..(255): Homolog of NCBI NO: 26354158 NR Description: unnamed protein product [Mus musculus]
  misc_feature (1)..(255): Homolog of NCBI NO: 6685592 NR Description: Serine palmitoyltransferase 1 (Long chain base protein 1) (LCB 1) (Serine-palmitoyl-CoA transferase 1) (SPT 1)
  misc_feature (1)..(255): Homolog of NCBI NO: 2853289 NR Description: serine palmitoyltransferase LCB1 subunit [Mus
  misc_feature (1)..(255): Homolog of NCBI NO: 5454084 NR Description: serine palmitoyltransferase subunit 1 isoform a
  misc_feature (1)..(255): Homolog of NCBI NO: 15451568 NR Description: Putative serine palmitoyltransferase [Oryza
  misc_feature (1)..(255): Homolog of NCBI NO: 37531898 NR Description: putative serine palmitoyltransferase
  misc_feature (1)..(255): Homolog of NCBI NO: 25407728 NR Description: serine C-palmitoyltransferase like protein
  misc_feature (1)..(255): Homolog of NCBI NO: 18419845 NR Description: serine C-palmitoyltransferase family [Arabidopsis
MDSLRETLENITAKYKKAKNLRRYIVIEAVYQNSGEIAPLDEIIKLKEKYRFRVLLDESNSLGVLGSSGRGLTEYCGVPVEKIDIITASMGHALATEGGFCTGSTRVIDHQRLSSSGYVFSASLPPYLASAAITAIDVLEENPNLIKKLKKNIAFLRKGLSKIPGITITSNPESPIVYLRLEKSRGSMKDDLHLLENIAERVLKEESVFVVVSKRSTLDKCRLPVGIRLFVSAGHSESDLLKASESLKKVVASVLGGQN

SEQ ID NO: 58255 - DNA, 1146 bp, Glycine max
  misc_feature (1)..(1146): Ceres Seq. ID no. 12608505
cgaaaaatactagaaaatctatctatgattatgagagcgtagttgaaagcaacgactgaaatcgagagggagacgaaaagtttagatcgagagagatgggaaaggagagtagcaaagatacggttccggtgacgcagtggctgaatcgaatggtctcagaaccttactacctcttccatttcttaaccttcttctcctatttcgtcgttcgcagctccgcaacccaaatcttagcgcctcatctcactcaccatctccttcgtcgcgaaatacaaacactgctagtgttcgcgatattggctttcatcaagggaataaaagaagaaacatgggaagcctttatagctgatgtgcttttcctggccaagatttgtctttttctcctagcctttacaatggatcgccgcttagccgtttggtatattcttgtatttttagtgatacatatgttaacacaacaacctccattccaaggactaggtacgtctagcaagctaacaccgttgcagttggaaagcctgctgacagagggaacaactacaagattgtggctggtggaattccgttcttcatattcacctgcttgcattcgctcaagtcagcagtttcctgagctctcaattacatattcaagcaaaaatttatcatttggaatagttgatcttggtctctttcccaatgctgctgaaagatttggaatatctctaagtggaagcatgggccagcttccaacatttatcttatttgagaatgcagctgaagttgcccgctttcctgagttggattttgaagctgcatattttcaccctaaaattacaaaggggcttctttctcgacattttgagcttgatcggcaccttctcgaatatgttagtggtaaataggatgttagtggagcaagttgtccgaaatttagtcatcactgagaatggcaattttggatttccggatatctgaggaggacattttcgtaaatgaactttgaaagttaacgtttgtttaacaccatcacacaagggtcaaagtaatgtcttcagacaacgggggtgtatgtgtaattagattaaatctcaataggtgttattataatttgttctttattttataatctatcatcggttctaagtgaaagtcaaaaaatttggc

SEQ ID NO: 58256 - protein, 262 aa, Glycine max
  peptide (1)..(262): Ceres Seq. ID no. 12608506
  misc_feature (57)..(230): Homolog of NCBI NO: 21313210 NR Description: RIKEN cDNA 2310042M24 [Mus musculus]
  misc_feature (57)..(230): Homolog of NCBI NO: 27700999 NR Description: similar to CGI-31 protein [Homo sapiens] [Rattus
  misc_feature (57)..(230): Homolog of NCBI NO: 26344562 NR Description: unnamed protein product [Mus musculus]
  misc_feature (19)..(230): Homolog of NCBI NO: 31234890 NR Description: ENSANGP00000011893 [Anopheles gambiae]
  misc_feature (24)..(227): Homolog of NCBI NO: 39591530 NR Description: Hypothetical protein CBG17959 [Caenorhabditis
  misc_feature (16)..(230): Homolog of NCBI NO: 7705726 NR Description: CGI-31 protein [Homo sapiens]
  misc_feature (15)..(230): Homolog of NCBI NO: 20130157 NR Description: CG11007-PA [Drosophila melanogaster]
  misc_feature (24)..(227): Homolog of NCBI NO: 17552500 NR Description: Putative endoplasmic reticulum protein of ancient
  misc_feature (15)..(260): Homolog of NCBI NO: 34903644 NR Description: B1015E06.5 [Oryza sativa (japonica
  misc_feature (12)..(261): Homolog of NCBI NO: 15239121 NR Description: putative protein; protein id: At5g11640.1
MGKESSKDTVPVTQWLNRMVSEPYYLFHFLTFFSYFVVRSSATQILAPHLTHHLLRREIQTLLVFAILAFIKGIKEETWEAFIADVLFLAKICLFLLAFTMDRRLAVWYILVFLVIHMLTQQPPFQGLGTSSKLTPLQLESLLTEGTTTRLWLVEFRSSYSPACIRSSQQFPELSITYSSKNLSFGIVDLGLFPNAAERFGISLSGSMGQLPTFILFENAAEVARFPELDFEAAYFHPKITKGLLSRHFELDRHLLEYVSGK

SEQ ID NO: 58257 - protein, 244 aa, Glycine max
  peptide (1)..(244): Ceres Seq. ID no. 12608507
  misc_feature (39)..(212): Homolog of NCBI NO: 21313210 NR Description: RIKEN cDNA 2310042M24 [Mus musculus]
  misc_feature (39)..(212): Homolog of NCBI NO: 27700999 NR Description: similar to CGI-31 protein [Homo sapiens] [Rattus
  misc_feature (39)..(212): Homolog of NCBI NO: 26344562 NR Description: unnamed protein product [Mus musculus]
  misc_feature (1)..(212): Homolog of NCBI NO: 31234890 NR Description: ENSANGP00000011893 [Anopheles gambiae]
  misc_feature (6)..(209): Homolog of NCBI NO: 39591530 NR Description: Hypothetical protein CBG17959 [Caenorhabditis
  misc_feature (1)..(212): Homolog of NCBI NO: 7705726 NR Description: CGI-31 protein [Homo sapiens]
  misc_feature (1)..(212): Homolog of NCBI NO: 20130157 NR Description: CG11007-PA [Drosophila melanogaster]
  misc_feature (6)..(209): Homolog of NCBI NO: 17552500 NR Description: Putative endoplasmic reticulum protein of ancient
  misc_feature (1)..(242): Homolog of NCBI NO: 34903644 NR Description: B1015E06.5 [Oryza sativa (japonica
  misc_feature (1)..(243): Homolog of NCBI NO: 15239121 NR Description: putative protein; protein id: At5g11640.1
MVSEPYYLFHFLTFFSYFVVRSSATQILAPHLTHHLLRREIQTLLVFAILAFIKGIKEETWEAFIADVLFLAKICLFLLAFTMDRRLAVWYILVFLVIHMLTQQPPFQGLGTSSKLTPLQLESLLTEGTTTRLWLVEFRSSYSPACIRSSQQFPELSITYSSKNLSFGIVDLGLFPNAAERFGISLSGSMGQLPTFILFENAAEVARFPELDFEAAYFHPKITKGLLSRHFELDRHLLEYVSGK
